United States Patent Application Publication US 2026/0103690 A1 - sequence listing, part 99

SEQ ID NO: 491707 - protein, 364 aa, unidentified
MEASGRFVGIDLGKRTYDMCLVEPKGKITRTNGKTDFKGIDKLCEQLGADDLVAIEACNLAMRIERRIRQTVGCKVYILNPGKLAVIYMSTRKTDKEDALKLAKLLKNHDEEELPIVTPPTDEEWERRKLLSEYKSLKGARTREVNKLHAIFEHAGYTQFKRKDMCCEKNRNNILPLLKGYEKEEAERLIERLSLLEKQIEQLLQKINAEVEKDDKVQLAMTVPGIGPITALAYVAYMGDLSRFENPHQVSNFLGFVPKIDHSCTIKRNGHTTKKGNALLRSLLVQAAWATVRSKDGGALRDKYKYMSGTKGMSKGKSIVTTARKLGELLYMLLKENKSYEPQKFITPEYHISKLADEALAANM

SEQ ID NO: 491708 - protein, 374 aa, unidentified
MEQAITYVGLDAHKDRIAVAIAETGRLREVREHGKIANTPTALKGLVSRLTRSGATLQFCYEAGPCGYRIQRQLTAAGHGCVVVAPSLIPRKPGDRIKTDRRDATNLAKLHRAGELTPVWVPDPAHEAVRDLLRARLAAVRGLRQARQQLSGFLLRHGHHYNRPAWTLIHRRWLAGLKFEQAVHHIVLEDCIAAVEAATARRDRLEAHIKAALPEWSLAPVVQALQALRGMALVAAATLVAELGDITRFANPRQLMAYLGLVPSEHSSGGTRRQGRITKAGNGAARRMLIEAAWSYRFPARISRELLLRQEGLARSIRDTAWKAQERLCRRYRKLARAGKPPTVVTTAIARELAGFVWAIANHVESSGALIRRS

SEQ ID NO: 491709 - protein, 353 aa, unidentified
MKAKMESNAGSLAVISIDIGKEVFHIVGLGVDGKIAFRRKIRRSGLKDAFEKLPPCIVGMEACLSAHFVSRLLRALGHKPRIIPAIYVKPFVKGQKNDYNDAEAIAEAALRPNLRVVEEKSQDQLDLQACHRVRSRLVSRRTATINQIRAFLIEQGIPVRAGARALRNSLFAILENRRGEISPRTASLILGLYEDWCGLDKRIETVTGAIEELSQVEPKCRRLMSVPGIGPIIATGIVAAIGRGEAFERGRDFAAWLGLVPRQHSTGGRTVLGRISKRGSKYLRTLLIQAAKVLLMRPHNWSRYSFGAWLKTASQRLHKNKLAVALANKLARIAWSVLYNEKAFDTQPEAVAI

SEQ ID NO: 491710 - protein, 402 aa, unidentified
MNAVGIDVSKGKSMVAIMRPFGEIVSTPFEIKHTSSDINSLVKLIKSIEGESRIVMEHTGRYYEVLAHQLSEANLFVSAINPKLIKDFDNDSLRKVKTDKADSVKIARYALDKWQNLKQYSVMDELRNQLKTMNRQFGFYMKHKTAMKNNLIGILDQTYPGVNTYFDSPARSDGSQKWVDFASTYWHVDCIRKMSINAFIDHYENWCKRKKYNFSKSKAEEIYGKAKELVPVLPKDDITKLIIKQAVDQLNSASITVESLRTLMNETASKLPEYPVVMAMKGVGTSLGPQLMAEIGDVSRFTHKGAITAFAGVDPGVNESGSYEQKSVPTSKRGSSDLRKTLFQVMDVLIKTHPQDDPVYQFLDKKRAQKKPYYVYMTAGANKFLRIYYGRVKEYLASLPES

SEQ ID NO: 491711 - protein, 370 aa, unidentified
MRNHSTVFVALDVHQKSIVAAYAVGAGEVEDLGQIGVRQCDLDRLCKRMQSKGSPVRFVYEAGPCGYSVHRYLTAKGFDCTVCAPSKVARRPGDRVKTDQRDARKLVRALRMNDLSAVHVPDASDEAFRDFVRMWGAARRDLAKAKQRLKSFLLVHDVRYTGKANWGPVHRRWLSRFVFKETNSQLAFQEHLHAIEDRFAQCERLEAMLREAACRWRFYPLIQAIQALRGVQFTVAVGLIAELGEISRFASAPQMMAWLGMTPSEHTSGERRRQGSITKCGNAHARRLLIEAAWAYRYPPKVSPSIQRRHEGLPKAIVARAWDAQLRLCKRFRKLTARGKPHNVALVAVARELAGFIWDIAHLSTAATHR

SEQ ID NO: 491712 - protein, 409 aa, unidentified
MLFVGDDWAEAHHDVEIVDADGRRLARRRLPEGVAGLSDLHALIADHLGDQDEPADVVVGIETDRGPWVQALVAAGYTVYALNPVQVARYRERHVTSGAKSDPGDAHTLAEVVRLDRAHHRPVAGDSQVAEHVKVLARTHQGLIWSRQRQTNQLRSMLREFYPAALAAFGDDLAGRDALAVLSIAPSPQAGRSLSRSKIASALRRAGRQRHIDATAERIQTVLRSPQLAAHPGVVDAYAAGVTALVAVIGALAAQIENLRGQVEAGFGRHPDAEIYLSQPGLGQVLAARVLAEFGDDPQRYADAKARKNYSGMSPITRASGTRRVVLARHARNRRLADALYQQAFAALKASPGARGYYDQQRGRGATHHQALRALANRLVGILHGCLRHHTRYDEHTAWPQPAPTANAA

SEQ ID NO: 491713 - protein, 396 aa, unidentified
MKEVASGRERITEMPVMIAGQSRFQPFGLSCWGFRDLNKGVGSMTASYDYHIGVDYHKSYSHLVVQDSCGKTLRSGRVKNDRQSLGSFLERYRENSHAVVEATRNWMVIYDWLDDICDDVVLAHPLKVKAIADAKVKTDKIDATVLAHLLRADLVPEAWAPSDKARELRVALRERMFYVRLRTMTKNRIVTVFDRYPEQTAQLKKLGDLFGKAGRIQLTQVAVSAIDRVQIDRGLAFIGDIDARIKQAEATIRAMTKANANVRLLKSIPGIGEFFARLIDAEIDDINRFRNPKAAYAGLVPSTYSSGGKTYHGKIIKQGNKWLRWAFVEAVTPAIASDAQLRAHYEHLKVRGTNKARVAIARKLLTIAFQILRDQRAYEPRGKIHEEGVSTISRLS

SEQ ID NO: 491714 - protein, 315 aa, unidentified
MHIQQSFMVGIDVSKAHLDVAVEGKRAVVRFDNDAPGWAALATAVAGAELVVVEATGGYEMAIVRTLMAAGIPVAVVNPRQVRDFARASGRLAKTDQVDARVTLHFARAMRPAQIPHIDDGRIALAALVTRRRQLIDMAVAEKNRLEHAPEAVAALIGETLAALKAQLARVDAAIALAIEAEPDMVERRNLLLTVPGIGEVSAAVLIAELPELGAIDDKKLAALVGVAPIAHDSGTWRGQRHIAGGRATVRCALYMATLSAIRCNPAIKTFHKRLRDAGKPPKVAIVAAMRKLIIMINTILKRRTPWNQPQQHGC

SEQ ID NO: 491715 - protein, 328 aa, unidentified
MQTITTIGLDIAKSVFQVHGVDAGGQGVIRRQLRRQHVLAFFERLPPCLVGIEACASSHYWSRELQALGHTVRLMPPAYVKPYVKRQKNDSTDAEAICEAVTRPNMRFVPTKTVEQQSCLMLHRARHLFIRQQTAVINSIRAYLAEFGIVAPVGRRGVEQLLEVVADRADDRLPEVARACLAALGSQLRALKAQILEFDRRIIAWHRSSVTSKRLDAIPGIGPALATALVASIADPKAFRSGRDFSAWVGLVPKQNSSGGKDKLGNISKQGDRYLRSLFTAGALAVIRYAKIHGTGHRPWLTGQLARGDRPRSPPSRSPTSSPGWPGR

SEQ ID NO: 491716 - protein, 402 aa, unidentified
MNAVGIDVSKGKSMVAIMRPFGEIVSAPFEIKHTASGINSLVELINSVEGESRIVMEHTGRYYEVLAHQLSEANLFVSAINPKLIKDFDNDSLRKVKSDKADSVKIARYALDKWQNLKQYNVMDELRNQLKTMNRQFGFYIKHKTAMKNNLIGILDQTYPGVNTYFDSPARSDGSQKWVDFASTYWHVDCVRKMSLNSFIDHYQNWCKRKKYNFSQSKAEEIYGKAKELVPVLSKDAITKLIIKQAVDQLNSASTTVESLRTLMNETASKLPEYPVVMAMKGVGTSLGPQLIAEIGDVSRFTHKSAITAFAGVDPGVNESGSYEQKSVPTSKRGSSDLRKTLFQVMDVLIKTHPQDDPVYQFLDKKRAQGKPYYVYMTAGANKFLRIYYGRVKEYLSSLPES

SEQ ID NO: 491717 - protein, 364 aa, unidentified
MENVFLCCGGLDLHKKSVEACVRRMEPSGHVHQQTHHWGTMTRDILMLADWMAAQWVTHVAMESTGVYWKPIYNILESRFTVLLVNARHLKQVPGRKSHTRDCQWIAQLLQHGLLKGSFVPPRPQRELRDLTRHRTRLVEEKTRTSNRIEKVLEDANIKLGSVASEVLGVSGRAMIQALLQGEKGPTQIADLAQRQLRGKIPEFEKALEGNLTEHHRFMLRLLWKGLTRQEALIAELEAKIEEVARPFASGIERLDAVPGVDRCVAEVVLADVGAKVDPFPTHQQVTAWAGMCPDNEESAGKRRKRRITPGNRWLKRTLVQAAWAATHTKNSELASQYRRLAGRRGEKRALIAVGHSLLVILYY

SEQ ID NO: 491718 - protein, 421 aa, unidentified
MKPQAPEAFAAFVGLDWADAKHDICLQVAGSTRREFLRLEHRPEVIDAWVCTLRTRFNGQPLAVCLELNKGPIVSALRTYDFLVLFPVNPLTVAKYREAFTPSRAKDDPTDAELQVEILLKHRDKLTPLVPQSPTMRALAQLVEHRRRLVGDKVRLTNRLTSALKNYFPHVLQWFQEKDTAIFCDFLSRWPTLKAVQLARRATLESFFRAHHVRTADVITIRIEAIQNAVALTTDEGVIAPHTLLVQALVAQLRVTLQAIADFDTAIAQRAQAHPDFPLFDALPGAGAVFAPRLLVAFGEQRERFTSAEELQKYAGIAPVTERSGKKSWVHWRWQCPTFLRQTFVEWAAESIRHSFWAQVYYQQQRDKGKAHQAAVRALAFKWIRILYRCWQERLPYDESTYLQALHRRGSSLIQNLAKAS

SEQ ID NO: 491719 - protein, 316 aa, unidentified
MTPVGVDIAKLKFDVAALINGKYKSKTFSNTPAGIKQFSQWLTRFESPHVTLEATGRYGEALSIALADSGVKISIVNPSRIAAFAKTELARSKTDKEDAKLIARFCELHRPSLWQPPPRSQRQLQMLVRRLDNLLQMKQMENNRLEGADAVVLSSLNAVLATLETQIQATRAQISDHIDNDPDLRNRRDLLDTIPGLGEATIPVILSALGEPQRFSSQRQVAAFAGLNPAEHQSGERRGKTRLSKKGDSLLRKALYMPAMVAWRHNPTIRNFCERLKSRGKAGKAIVGAAMRKLLCLAYAVLKSGVPYDPKRVLAR

SEQ ID NO: 491720 - protein, 411 aa, unidentified
MLFVGDDWAEDHHDIEVQDETGRRLARARLPEGVAGLARLHELLAEHLDEDDVDPETGFLAQNVVVGSETDRGTWVAALLAAGYRVFAINPMSAARYRERHATSGAKSDRGDAHVLAEIVRLDREHHRPVAGDSPAAEALKLVARSHQAFIWDRTRHLLRLRSALREFFPAALEAFPDLLAPDALELLERAPDPARAARLSRSKITAALLRAHRRDPEAKAEAIQAVLRAPALRQPPQVEAAYGFIVASAVRLIGQLSTQIDQLQAVVAEGFGRHPDAEIVASQPGLGPVLGARVLAEFGDDRRRYADAKARKNYAGTSPIIRASGTKRVVLARYARNRPLADATHQWAFCALTASPGARAYYDTLRARGTGHHAALRQLANRLVGILHGCLKTRTPYHENTAWPDRAAVA

SEQ ID NO: 491721 - protein, 338 aa, unidentified
MKLTADQLNTATFVGIDSHPDSHTALAMNRFKEPKGNVTFPNTHAGISQFQTWLQTLGTQKDRVVIGVEGGGNARNALLASILPIYDLLFEVNPLYTKHKRSFGTRGDKTDLDDAKLIAGVLTTELEELPRIRPGQLTSGMLRLKKAVWFYEEVTVQGARLQNQLHKLNREHKLTQDKEEKQLLITIIKARKKEHSIAEKTKANMERELKTLLCGNGLNLTRIRGIGVITVARIIAHTGGIERFSNRDAYVRYTGIAPLARSSGKSSFFVKANRGNRKLNSVFYFATLCRIMHDPCVKELYRKKIASGKTKKEAITYLMRKTAILAYGMLKSGEEYRQ

SEQ ID NO: 491722 - protein, 347 aa, unidentified
MRFYNRQHRHYCGIDLHVKTMYVCILDAAGQVLVHRNVPSTPEAFLEVVAPYRDDLVVAAECMFTWYWLADLCAAEDIAFVLGHALSMKAIHGGKAKNDKLDSHKIAVLLRGGLLPQSYVYPAAMRATRDLLRRRLHLVRKRGQLLAHIQSTRHQYQLPAFEGRITYPANRDGLSERFPDPSVRKSIEVDIALLDQYDTLINDLEATLVRDAKRHDADTFHRLRTVPGIGKILALTILYEVHDITRFDRVQEFASYARLVKCSKQSAGKTLGTSGAKMGNVHLKWAFSEAAVLFLCRNSEGKRLLAQIQKKHRKDKALSILAHKIGRAVYYMMARRTVFSMEKFLHA

SEQ ID NO: 491723 - protein, 391 aa, unidentified
MFYIGIDIAKKNHEASIIDSSGKSLSKSISFPNSTKGIEKFNNFISEFGVTTNNCIIGMEATGHYWISLFSYIIDLGFTCYVINPIQSDAFRKMYVRQTKNDSVDSFIIAQIMRFGEFSISNFSDENTFALRNLTRYRFALVDECSDWKRKLVAILDQVFPEYSSLFSNIYGVASKELLSKYPLPEDMLSIPAEELGNLLYECSKGRLGINKAEEIQSRARETFGIKFAKRSFSFQIKQIISQISFLEEQLKEIEIEISYLLEDICPIITTITGIGSVLGASIVSEIGNITRFERANQLVAYAGLDTRVKQSGDFSATNTKLSKRGSPYLRRSIWLAATVAAFKDPALSIYYQGLRARGKAHGTAIGAVARKLTNIIFAVLRDQKPYTPNI

SEQ ID NO: 491724 - protein, 345 aa, unidentified
MENMYYIGLDVHKKTISYCVKDGGGRIYAEAEIPATRLGLDMWMKTLPQPWTAAMEATIFTAWIYDHLKPHAAAVKVAHPLMLRAIAAAKKKNDRIDAHKIADCLRCDFLPECYMASTEIRERRRTLRYRNLLVRQAVQMKNKIAVLLMEAGVSYNKQKLHKVGYFRELLATNPDIDEGLKPLLRLCRETVVRLGKTESALVRSLQRDSLLMERVERLMTIPAVGPITALTWALEVGDVQRFSSIKKAISYCGLCGAENSSANIIKRTPLSKQRNKHLQTTLIEAAKMAPRNSPELAMIYDREKQKGNANRATLAVARKLVAYLVAVDRRQKDFLIVERENRTAA

SEQ ID NO: 491725 - protein, 367 aa, unidentified
MKKVSTAVPKQGRKFAPPTLTIGLDLGDRNSWYCVLDEAGQMQLEQRVRTSAKALQEVFGVLPRSRIALETGTHSPWISRLLDELGHEVIVANARKVRLIGESRKKDDRLDAQTLARLARIDPALLCPVQHRSAQAQADLTVIRARAGLVRARTALVNTARSLAKSYGERLRGCNVRNMNPEKAEGLSPELQRALEPLLAGIEVLSEQIREYHERIEKLAQESYPQVALLKQIKGVGTLIALTFLLTLEDPHRFRKSRDVGCYLGLQPGRRNSGQSAPQMHISKEGDPYLRTLLVQGAQHILGPFGVDCDLRRWGLKLAERGGKSGKKRAIIATARKLAVLLHHLWVSGEVYEPLHNRSRTTVAAAA

SEQ ID NO: 491726 - protein, 423 aa, unidentified
MDLMYNRAAGLDVHKESIVACVRTVSGRKTTRECRTFDTTTDGLLALLEWLTSCRCEIVAMEATGVFWMPVWKILSDGTFPSIVANAAHIKAVPGRKTDMKDAEWLADLVAFGLIKASFVPDEEQHELRALMRTRKQLVREQTRHVQRIQKTLTEANIHLDSVISDIMGLNGRRMIEAMINGTRDPGKLAALADKRLKAKPKELYDALHGRLTEHHRFLLKLHLGQWDTLDTTIREVDREVKIRVSTMDAEVTADKAKFSDLIALLATIPGVSQLSALTILSEIGTDMSRFPTAGHLVAWAGMCPGQNESAGKRKRTRLRKGAPWLKTMLVQCAWAAKKTKNSYYKAQFFRLQSKRGPQKAICAVAASILTAIYHMLKNGTVHQDLGLAHFDKHSPDIKVKRLVSQITKLGFEVALQPLAKAA

SEQ ID NO: 491727 - protein, 316 aa, unidentified
MESVSFPKIVSRGCGIDIHKKVVVATINGEGLRKETREFNTFTSSLTELKDWLLANNITHVAMESTGVYWKPVYNVLEPCGLKVWIVNARHIKYVPGHKTDKADSAWICKLLLAGLLKPSYIPSKEQRKLRDLTRYRTKLIQQIASEKNRRIRILEDCNIKLSSVLSNTNGVVATSLITMLCEGRKITMSDIESVYHGRINASKEDLFEACNGIMEAHHVYLLGIINNDIKQTRTLIESLNVHIKDMLSEYENILELLKGVPGLSTKTVQDLVAEIGLDMNTFPTDKHLASWAGMCPGNNESAGKKKVEEQPMEIS

SEQ ID NO: 491728 - protein, 349 aa, unidentified
MSEISRISIDTSKAVFTLHGVNAAGDPVLRVDLRRGRLLAFFRKQPRTQVAMEACGGSHHWARELTALGHEVRLVPPQYVKPFVKRGKNDRIDAEAICEAAGRPGMHFVPVKTVAQQADGMVLKVRETLVGQRTQLINTLRGHAAEFGMIAGTGTSKVAALLTAIAAEPGIPPVAKEMLAELGAQIEHLDSRIDALEAKLMAMHKANPVSRVLATAPGVGPITALSFALEVDAAAFASGRHLAAWLGLTPQQHSTGGKPRMGGISRAGNERLRVLLVNGATSVINAVQRRGSKLATPWLLKLLARRPKKVAAVALANKMARMLWAMMTTGELYRRPGAAATGRCAAGVS

SEQ ID NO: 491729 - protein, 427 aa, unidentified
MKYAPIQVLPDVPAGGVFAGIDWAVADHVACVVDMAGRILDRFSAGHDKAGLETLITRLRRSGITEVAIERGGGVLVDALLAAGLTVVVVSSRQVKNLRARYRSAGGKDDRFDAFVLADTLRTDRARLRPLVPDAPATLALRAAVRARKDLVAHRVAACNQLRAHLAVAFPAAVGLFFDLASPISLRFLASFGSQDAAAALDEQAITAWLKTIPGRGKTAPASVLCARLGAAPDGVTGDDGAAHAVITAALTATAGMLAAQIKVLEAGIGAQLAAHPDGHIFTSLPRAGTLRAARLLAEIGDCRSRYPGPQSLAALAGVVPVTRESGTHTSHAFRWAVNRPLRDAVCDFADGSRHASPWAESVYQAARSRGKDHPHAIRILSRAWILIIWRCWQDGTAYDPAKHTALQQILDQQAAQAAVAGPGDTP

SEQ ID NO: 491730 - protein, 339 aa, unidentified
MEITTFGLDLAKRVFQLHWVDMNTGEICRRQLKRGQLTEFFAQREPSIVAMEACGSAHYWARKLRAMGHDVRLIAAQFVRPFVKSNKTDAADAQAIWETAQRPGMKLVPMKSEAQQGVLMLHRVRQQLVKMRTMQVNQLRGLLYEFGCDLPQGRQRGIERIRVELGRLESVLPAPLIETMRQQLKRIDDFDKDIAEIEKKLGACKNSDKDVRRLLAVPGVGLLTATAMVATIADAKAFNSAREFAAFLGLVPRQSGTGGRVKLLGISKRGDVYLRTLLIHGARSVIANAKQREAWLDKLLARRPTNVAVVALANKMARTIWALLAYDRTYERGYAARAA

SEQ ID NO: 491731 - protein, 327 aa, unidentified
MKSPIAAALGIDIAKAKFDVCLLKENGRAKHKVFVNTRHGFEQLIRWLDSHQVSTLHACLEATGTYGEPLALFLFEAGVIVSFVNPAAVRAFANAGLSRTKTDKVDAELIARFCLAQQPEVWVPPAPELRELQAMVRRLESLVEMRVMEENRFSAGGLTEAVRHSLDEHIAYLLEQIKQTERLIREHINQHPDLKEQSELLDSIPGIGETTAALLLAEIVHIKEYKSARQVAAYAGLVPRERRSGSSVRGRTCLSKIGNARLRKALYFPAVTALRSSDFFIAWAEPLRTRGKCKMSVIGAAMRKLIHLAYGVLKTGKPFDPNWAKAA

SEQ ID NO: 491732 - protein, 309 aa, unidentified
MRTICGVDASKPWLDAGIADRHQRFANAPEGIAALGDFCREHGVAMVVMEASGGVEQEAFLALWRQGLPCAIVNPAAVRHFALAMGYLEKTDRIDAAMIARFAEAKRIEPTPPPSQDQRKLTALATRMRQVSADLSVQKQRLASTRDEAARDSLREAIAFFTRQAKILAAEIAALVQTDPLWRELDRTLRSVKGVADRTVAVLLADLPEIGTLSNKAIAKITGLAPIANDSGKRQGKRPVRGGRASVRSILLLVADLARKFDQSLADFRQRLLDQGKPKMVVRVALAHKLLVRLNAKARDARANLPSAV

SEQ ID NO: 491733 - protein, 348 aa, unidentified
MTLVGCDLHSRKQQVAALDTTTGEVLEQELTHDGDAVEQFYRALRPPVTIGIETTGYTQWFHALMHRLGHTVLVGEAGKIRAMVVRKTKTDRRDARHLLDLLKHDRFPSVWIPDPPTRDLRALVAHRGRLVRMRTMVKNGLQAIALNHRLALRSALWTQRGLAQLRALALPPHTTRRREDSLELLAWITSRIDQLDAQIEGVVHAHPQARRLLTHPGVGPLTALTTVLVLGPIARFPDSKHVVSYVGLAPTINASADKQHLGKITKQGNALLRWVLGQAAPLAARADDDLRRRYFAVLQRRGRPKAKVALARKLLVRLYVMLRDQIDYEEFRRRGRAAPARHTALAVR

SEQ ID NO: 491734 - protein, 339 aa, unidentified
MGGRYVGIDLHRRRSVIYTMDADGERLGCVRIANDPWVLLEEVAKAGADAEVVIEATYGWYWAVDLLRDAGFSVHLSHPSGNDWGNRRVKNDERDARDLADLLRLGRLAEAWIAPPATRELRELVRYRAKLVQLRSGLKAQVHAVMAKEGVLPGLGDMFGPGGQRLLDEMELADAYTARVESLRDLIGIYDREVVMLERTIHQQLRGDRGYRAIQAITGVGPTLAAMFVAEIGDVSRFRSAEALCSWAGLTPKHRESDTKVVRGGISKMGSRLVRWAALEAVSAYKGGPVLREDFHRIAERRGKNKARVAVARKLLTLVYYGLRDGEIRCLRDTTAVAA

SEQ ID NO: 491735 - protein, 342 aa, unidentified
MQAVTTIGLDIAKSVFQIHGVDAAGHVVVRRKLKRRYVVPFFQKLPPCLIGIEACASSHHWSRELKALGHTVRLMPPAYVKPYVKRQKNDAADAEAICEAVTRANMRFVATKTLEQQSCLMLHRTRHLFIRQQTAVINAIRAHLAEFGIVAPVGRNGVEQLLEAVADTSDNRLPEIARACVLALGAQLRTLKAQILNFDRLIMWHRSNEASKRLDDIPGVGPALATALVASVADPKAFRSGRDFSAWIGLVPKQRSSGGKDKLGGISKQGDRYLRSLFTAGALAVIRYAKIHGTQHRPWLTALLARRPTKVAAIALANKIARMAWAMMARGDRYREPVALAA

SEQ ID NO: 491736 - protein, 346 aa, unidentified
MQIASIGIDLGKTNFHLVALGERSKVLVRKKFSRTQLLAYTANLPGSLIGLEACAGSHFVGAALREQGHQVRLIPAQFVKPYRKSNKNDFLDAEAIAEAVTKQNMRFAQLKTQEQLDWQALHRVRDRLVQRRTALINEIRGFLLERGITFAAQPIHLRKSLPRVMEDAEQNLSPRLRWLLDRMWQEWKQIETEVEAISEEIERISKDDARCRQLRQIPGFGPMVSTATVAAIGNGSAFRRGRDFAAWVGVVPRQHSTGGKQKLYGISKRGNVYLRRMLIHGARSVLFRVKYDTGGFGQWIRRLAQRAPRNKVVVAIANKLARIAWAVLSSGRDYRHQPLQPLATAA

SEQ ID NO: 491737 - protein, 332 aa, unidentified
MTYIGIDVSKDTFVVAYSPKKTCRTRTFKNTTKGIHEFIQTISKDGHHCVLEATGNYSAQLVYLLSEAGITTSLENPLKVKNFARVMLSTVKTDEVDARLIALYGEKMNPAPYKLHSDAILTLKQKRTVIRQLRKQLIATKNLKGSMEVLPFFDSKCRKSIEQTIAFLERQIKHLEEDLSVLARREYKKQMELLTSIKGIGITLAAALIMATGGFTYFDNAKQLTRYLGLSPTYQQSDTSVNLKGHINRNGDSSLRSQLYVAAFASLRCNAQCKACYDRLRSNGKPGKVAVIAVANKLVRQAFAVVTQEKPYVDGYVSTLKSAPTSSESGKG

SEQ ID NO: 491738 - protein, 338 aa, unidentified
MKRYPGVDLHRNCFTVCTRTEGGQEALRSWSIHELHRFARAVRSTDEVAVEATGNTRLFCEGLRERGCRLAVVDPRQFEVISRSVKKTDTHDAKVLAEFLAKGLLPEVRMKDGIQARIASLTQTRDKLVKLRTILKNKINNLLAARGILIRKESLASEKGLVGVLRAPVEDLERVELEILVEQIRHLNKSIEKVEAVLREQGPKLPGWKNLTSIKGIGDTGASILLSTIGKIEDFADEGKLAAYFGIVPRVSNSNETERSGRITKLGCKLGRTALVQCSLIAMRYSPYLRAYYERIAARRGTGKAIIALARKFLGIIYKTLKNDWVFEDFPNFVLVKT

SEQ ID NO: 491739 - protein, 362 aa, unidentified
MSSTVDIVYPVCCGMDVHKNFLVACIATTDERSHTTHQIRRFSTFTGDLRKLADWLSQNNCRDVCMESSGKYWIPVFNAIEKTCNVCLTHPKYVKAIKGKKTDKKDAKWISELFKCDLVRSSFIPPQEIRQLRDLCRYYVKLTYMCSSEKNRAQNCLTVCNFKLDDVFSDVFGKSATRVLDALLEHNGSDFEIAPLLSGKCKASVEDVQAALDGELTLAQTEKLKFIRQHMDSLNNLKAVLESLILRLAEPYQAQINLLLTVPSIKEPLTAIRILAEIGADMSVFETSKKLCSWAGLTPQNQESAGKKKTTRIGRAGAYLKPLLVQIALAVSSSDKHIELKSKYLSLKKTSWWQESYYCHCS

SEQ ID NO: 491740 - protein, 353 aa, unidentified
MANPMANLTIGVDLGDRYSELYVVDAAGACVETGRIRTTVAGLEQWFGGRPPARVVVEAGTHSPWASRVLQRLGHEVLVANPRKLRGLYENDSKDDRVDAEYLARVGRLDPALLKPITHRGEAAQADLAVLSSRDVLVRARTLLINHTRGVVKALGGRLPRCSAEAFARRVGPHVPPAVRPALAPVLEQLQQLTTTIRGFDRAVEHRCAQSYPETARLRQVTGVGPVTALAYVVVLDDPTRFRRSRAVGAYLGLRPRRSQSGEQDPQLRITKAGNPFLRRLVVQAAHYILGPHGPDCDLRRHGERIAARGGKNAKKRAVIAVARKLAVLLHHLWISGAVYEPLRHRPALAQAS

SEQ ID NO: 491741 - protein, 343 aa, unidentified
MQAITTIGLDIAKSVFQVHGIDAEGKVIIRRQLKRRYLLAFFQKLPPCLVGIEACASSHHWSRQLKALGHNVRLMPPAYVKPYVKRQKNDATDAEAICEAVTRANMRFVETKTPEQQSCLMLHRTRQLFIRHQTSVINAIRAHLAEFGIVAPVGRKGVEQLLAIVTDTSDQRVPELARACLAALGVQLGKLKAQILEFDRMIMAWHRSNETSRRLDAIPGIGPALATALVASVADPRAFRSGRNFSAWIGLVPKQYSSGGKERLGSISKQGDRYLRSLFTAGALAVIRYAKIHGSQHRPWLTALLARKPTKVAAIALANKIARMAWAMMAKGERYKEPAALAA

SEQ ID NO: 491742 - protein, 421 aa, unidentified
MRKADTRKVKAVGDDTLIVAVDIGMEMNRGYCTTPDGRSSKTFKFDNTRVGMDTLWDMIMISKNRFKCNEVIVGYESTGPYGEPMLHYLMKKPVRIAQVNPMHTKKVKEINDNSPLKTDDKDPRVIADIIKLGRALSIVIPEGDAAYLRRLNNSRERHVRERTALYNQLQQLLFLLFPEFRTVIKNIKCKTPLYLLKKYPTPEVISALDKHVLGEEMRKPSQGKFREHHADMPINLAKDTVGIREGAVGLSMDIRHILVQLEMLTNLIAEIESEMEIALGRIPYSSKLLSIKGVGVISVAGIIGEIGDFKKFKTRSEIMKLAGLDLYEISSGKMKGQRRIAKRGRSLLRKILYYVAIQTIRKNGILHDYYTRLTDGGMKRMKTLVAVSRKLLGIIYAIVRDDSEYSVNFESMKRQVIKKAA

SEQ ID NO: 491743 - protein, 424 aa, unidentified
MKKNISKTTKAQKQGNGTRKRLRETKRNVAGLETAKKRKSKQRGVEQEMKEEHGNASQAVHEGEAVVEFKAGEGEGYTIGIDLGDKRSRYCILDKEGKILRESSVATLPASLKTVFSKLAGCRIAMEVGTHSPWVSRLLTALGHEVIVANAREVPLIYKSRRKNDKLDAEKLARLARMDAKLLKGIRHRGAEGQGDLLLIRSRAQLVETRTGLMNMVRGLVKSRGERLPGCTSEGFVVELLEGVDEAAVRALKPVMVLIEQMTETIQGYDQQVEEMGKKHAEIARLDQVSGVGPLIAATYVLTIEDPERFGRSRDVGGYLGLVPGQSDSGESQPQKRITKAGDGYLRYLLVQGAHYILGPHGPDTDLRRWGQKLGSSGGDRGKKRAVVAVARKLAILLLVLWKTGAKYEPLRNSDKQEKQKVAA

SEQ ID NO: 491744 - protein, 341 aa, unidentified
MDKVSTIGLDIAKSVFQVHGVDAAGAVLIRKRISRAKVLEYFGELPPCLVGIEACPSAHHWGRELQGLGHTVRLIPPSYVKAYLKRGKNDANDAAAICEAVTRPSMRFVPIKTKEQQTALMLHRARQLLVRQRTMLSNALRGHLAELGIVSAKGRNGTAELLRIIADGRVSPAVCGILKVLTRQYGAVGTEIASIDKSIMALHRGCEASQRLAEIPGIGPIGATALVAEIGDWKTFSSGRSFAAWIGLVPKQHTTGGKDRLGSITKQGNRYLRWLLVVGAMAVIRYARKHGTQKRPWLGRLMERRPTKVAAVALANKIAPMAWAIMVRGERYKEPKLLLAA

SEQ ID NO: 491745 - protein, 357 aa, unidentified
MESQEVKYVGVDCGKKSIEVVRINSENSLERRQFSTTESGINNLLQWLTLNDIVGLEAGSQSFRIAKSILNKGVQVIVLNPGNLATIYQSLKKTDKEDSLKIARLIQRHPIEELPTVPIPNDEEEDNRRLCTEQENWTKQLTQGKNRLHSLFTQAGLTHITKKHLRTKANREISVALLPSRYQKEAERILKVLDLVELNLKLIEKEIQEALKKNKAYVQTIMSMPGIGMITSLAIMSYMGDCKRFSSAKQAAYYAGLVPRVDISGDTVRYGRIINRGCHSIRRVIVQAAWSLVRCQHGGKVKEFYQRLYLKKGAKKSIIATSRKMIEVLYAMIRTGKLFDSMPENILNRKLTQYGLM

SEQ ID NO: 491746 - protein, 319 aa, unidentified
MTASVTPVPHVIGCDVGKAEIVAFDSRTGRTAALPNRPDALEGFIGSLPRTCLVVCEATGGYEAELLLAAAAAAIPVHRADARRVKAFIRSLGRIAKTDAIDAKGLARYGQERHAVLPRWQPRAAALDDLQTLVRLRARLVRHRAALTNQIKAPGGAIAKNRLHALVQAATDQIASIETDIAGLVECQPAIARAVAIIRDIPGCGPVTAATVAALMPELGSITGRQAASLAGLAPHPHQSGQRDGYRRTRGGRPELKRALFMAAMAARNHNPSLAEVYKRLVANGKKPIVAITALMRKLITIINARIRDANAQNTVQLS

SEQ ID NO: 491747 - protein, 336 aa, unidentified
MVQIYGIDLGMSSFDVSFLSESGSVRHLSGVKNTVHGISKFLLSLPSSAVLCAEHTGVYGDLLLRLCTLNRTCLCFVPGYQIKHSLGLQRGKSDPLDACRIREYAERFYDLLRPCFYPGEEMSELQELYRTRSLLVESRKRLDTLNIGDNCKSSVSLAAVHARRAVLAELNTQISGLDHEIEALIQNSSEFSRNYQILTSIVGVGPVTSCELIIKTENFRKLDTAKKCAAYAGIAPYPKESGKMKCGHKISPMGDKQLKTLLFLCARSAKEHNKEIRLYFLKKHKVEKKHFFVAMNNIANKLLRLIYSLIQKQQTYDRDYIQRDPRCVVISDTNKC

SEQ ID NO: 491748 - protein, 470 aa, unidentified
MATQSPSKNRRQSQPHTLHKPRGVIHPRVQAVGPEHFGLVCVDCAKARSRMMLADFYGRVLLEPTTVEHNQSHFETAVTSVRAAMTRHRIQDVIVVVERTGRYHGPVQRSFRKAGFEVRIVHPFTTKQYRLPADPGNKTDDTDLSAIHRAAVNGFGLLEPEPDPVYARLQLLARHRRTWVQKRVVLQQQMLEHLQSFMPGYSKCVGDLFGSPAILWVARDLGSAAAIGQIGLAGLSQRVRQAGLRVYRSTLEKIVAWARSAPSAEEQASLHHRIFLELDADQVAKAQRIQAVERDLAGPLAGTPYVLLLGIVGINVVSAAEFAGEMGPIGRYTKARAITGRAGLFPSRYQSDRVDRRDGALVRHADRDLRSAILTIADNLIKCNDHFKVLAAGWRLKGKDARSIRAQVAGRFCRIAYQMVAGRITFQHPCARQRDSILDKLIRFSLEHSTAPDQFLRNLDAAVAQLPRTA

SEQ ID NO: 491749 - protein, 343 aa, unidentified
MPHSVGLDVSQKMTAICVVDAEGRRIWRGDCLTQPDKISALVSRHAGSDAKVGVETGAMTPWLVHGLRASGLQVECLDARRVKSALQMRLNKTDHNDAEGLAQVVRTGWYRAVHVKSLEAHQARSLLGARAQLVGMRTRLANMIRGVLKTFGILPGSERGMRFDRRVERAMEDSPDVAAIVHPLLVSWRHMREQIAGFDVAIQRRVKADPTCRLLMSVPGIGALSALAFVSTIEDPARFSRSRAVGAHLGLTPRRYQSGEIDRSGRISGCGDALARTLMYEAAVVILHRVKRSLPLKDWALAIAERSGPGKARIALARKLSVILHSIWRSGEPFRWGAEPAAQ

SEQ ID NO: 491750 - protein, 399 aa, unidentified
MKESKKKKEVLKYSVGIDISMDDFHVCVSGIDSEQRVTVRGTRSFKNTSSGHAQCVGWAKKLNKEQVPMVFLMEATGVYYEELAWYLHLEKEHVSVVVPNKTKKYLQSLGKSKNDKIDAIGLAQMGAEKQLKQWIPLTDSIYELRTLTRHRESCSKLRTATINRIHALEHGRVKVKPVLKSLKSSLKHFDKELEKMDELIKDLIMSDPLLAKQCLKITKVKGIGITTFAIVVAETNGFAAIENHRQLVSYAGYDVVENQSGNHVGRTRISKKGNSRIRAAMHFPALQAVEREEPAMVCLFERVYGRTGIKMKAYVAVQKKMLELIYFLWIKDEEYDPNRNRTSGNDEPKLLFSQQPVESITPENEVVSMNTETTQDRLPCKDSPEVLFSQGQNYKKKLL

SEQ ID NO: 491751 - protein, 388 aa, unidentified
MFFLGIDIGKNTHVASLLDEKAKVIFKAYSFANTLDDAEALVVKLEPYKASLEIGMEATGHYWLSLYSFLTEHNFIVHVLNPIQTDGWRKGIEIRKRKTDVIDSVLIADLIRYGDFLETSLADEDILSLRNLTRFRSYLVNSVSDLKRKAIAVLDQIFPEYASVFSNVFGQTSKELLKSLSLPSDYENLSATKIEEVLSNITQKKKASETISTLSDKASRSFGISFCKDSFAFQLKLIIEQICFIEEQIASVELEIEQLMSKLGTNIKTIPGVGNVIGAVILGEIGDIERFDNPSKLVAYAGLDASISQSGEYEASSGKLSKRGSPYLRKALYMAAQRAEFCDPVFHAYYEKKRNEGKHHLVATNAVARKLCHTIYAILKKDIPYEVQ

SEQ ID NO: 491752 - protein, 423 aa, unidentified
MIPAVIERCAGIDVGKKFLAVCVMTGPANEEAKAEVRKFGTVRHELESLRKWLQSEGCTHVVMESTGVYWKPVLNVLEDDPQYALKIVLANSQQVKAVTGHKTDPHDARWLAHLLRHGMIRPSFIPPRAIRELRDFTRRRKQMIGLAADERNRVQKVLEDANVKIGDVLSDVFGLSGQLMLEALVNGLGGAGPPSAFDIAQLARGHAKKKLNELTAALEGHQMRESHRTLIRHAMRHMAFLAEEIEALDQDIAAVIREASLTPAYELLQTVPGIKSQAAATILAESGPNVKQFPTAAHFSSWSGLAPGNNESAGKRKRAPAMKGNPHIKTALVEAAWSASRTKQSEFEDRYQRLRPKIGHKRAIVASAHTLALRIYEVLEAGLPYQPHGGNLNPRSVNRLVRHHTRRLKCLHRWLEGQGTVGE

SEQ ID NO: 491753 - protein, 361 aa, unidentified
MPKWRSRDVHGKGAFIMNIATAGLDLAKSVMQVHAVNSRGKIVVRKKQRRTDVLRYFATLEPCVIGMEARASSHYWGRELTKLGHTVRLIAPQFVRPYVKSNKTDAADAEAICEAITRPNMRFVPLKTQAQQTVLSLHRARAGRVKSRIALANQIRGLLGEFGIVLPQGIQLLGQRAMAALSTRDDGHSEPFRALIQMLVEHLRELGSKVAELEGRIRAIRRTDAPGRLLETIPGIGPLTASALAASIGNAGSFRSGRELTAWLGLVPRQHSSGGTPRLLGISKRGDTALRTLLIHGAGAVIRMAASKPEMADSWVLKLFRRRHKNIAAGARGKECTAWAILIRNQPFQADHVPTRSSVTD

SEQ ID NO: 491754 - protein, 348 aa, unidentified
MRFYTQQHRYTCGIDLHARSLYVCILDDTGQVLVHKNIKASPEALLKLIADYRDDLIIGVECMFSWYWVADFCEDHGIEFVLGHALYMKAIHGGKAKNDRIDSEKIARLLKGGMFPYAYVYPREMRADRDLMRRRIKLARERGELMGHIKNTLSQYNLPAHSENLRYDKHREPLRTAFPDPSVQRSIDLDLARIEFYDGQLAKLEWYLKKTAKSVDPKTVIQLQSVHGIGDILSLVILYEIHSIERFPRVQDFVSYCRLVKCQRESAGKKHGTGGAKIGNPYLRWAFGEAAALFLRGNPEAQRWLEKKTRKHNKAKAMTILAHKLGRAVYYMLKRETLFDQDRFLAQS

SEQ ID NO: 491755 - protein, 351 aa, unidentified
MREYIAFDSHKRYTIMERENQQTSIARQRRIEHAPGAICAALRDCEPGTPVAIEATGNWYWIISEIEQAGLRPLLVHPRKAKLMMGLINKTDQLDVHGLNRLQRNATLPTVWIPPAELRDLRELTRVRMVLAAQRTRLKNRISSTLAKYGLAVTDASDPYSQKGRRQLLGLLGQLPPQTQWAARTLLAQLDFIEGQIREQEQRLKQLIEVTPQMRLLMSLPGVGVILAAVLWLEIGSMERFASAERLASYAGTTPRVHASGGMVRYGRLRPDVNRYLRWALVEAGNSVAVNHTRCPQRHVSELYRRLRTRKGHAKAIGAVARHLAEATYHVLSRNEPYREPTICAGRSREV

SEQ ID NO: 491756 - protein, 366 aa, unidentified
MGWTPPRRPWCARVVVFVTTDQEASVSEVSTIGLDLAKHVFQVHGADASGKVVFRKRLRREKVLEFFAGKPACVVAMEACSSAHHWARELTRLGHIVRLIPPAYVKPFVKRQKNDAADAEAICEAAQRPTMRFVAVKSETAQANAVVFRARDLLVRQRTQAINALRGHLGEYGLVVAKGPGHVIKLVEHVEDPASNVPDAARLVLRTLVEALRFLRERIDLLDREIARRARENNEVRRLMSIPGVGPITATALAALAPPADAFRKGRDFAAWVGLTPSQHSTGGKQKLGTTSKMGERTLRRLLIIGASSVVRKALRQGTAAGSWLGRMLARKPRMLVIVALANKMARIAWAVQAKGEVYRAPVVAA

SEQ ID NO: 491757 - protein, 407 aa, unidentified
MKEKNAIEFEQVVEIGCGADVHKDIIVVTVLGKDTKPETRSYKTYTSSLIKLREWLLSKRVTHMAMESTGVYWKPVFNVMGDEIKILLVNARHVKNVPGHKTDKGDSQWLAKLLLSGLLKGSFIPERPIRELRDLTRYKTNLIQMISSERNRFMKTLEDANIKLSSVLNDVFGVTGTKIMNHVLVFENYRPEELIQYVHGKVKAPRPEIMEALTGYITPHHRFMLKTILENISQIERTIRTVEAHIEACIEPYKVERELLETIPGVHKESANRIIAEIGVDMSQFPDQNHLASWAGVCPGSNETAGKNKSGRITHGNKYLRSLLVESGWAASRTKNTYMSAKYKSLVGRRGKKKAIIALGHKILIATYFILRDKVQFKELGEDHLNNYRKDRLIAYYQKQLEKLTAA

SEQ ID NO: 491758 - protein, 389 aa, unidentified
MKIYVGIDIAKLNHFAAAISSDGEIIIEPFKFTNDADGFQLLVSKLESFDKNSLIIGLESTAHYGDNLVRFLVTELYQVCVLNPIKTCQMRKNNVRKTKTDKVDTYVIAKTLMMQDNLRFVSFFDLDMMDLKALGRFRQKTIKQRTRLKIQLTTYVDQVFPEIQYFFKSGLHQHAVYALLKEAPSPKEIASMHMTHLANLLKVNSHGHFTKEQAKELRVLAQKSVGANDSAISIQITQTIQQIELLDSQLEKIEAEMTDIMKFNDSVIMTIPGIGYINGGMILGEIGDIHRFSNPNKLLAFAGLDPSVYQSGNFQAKTTRMSKRGSRVLRYALVNAAWNVVRNNATFKAYYDAKRAEGRSHYNALGHCAGKLVRVIWKMLTDKVEFNLE

SEQ ID NO: 491759 - protein, 343 aa, unidentified
MKSYVGLDVSLKQTSICVVDESGSVVREGVVISDPEAIAAFVRLNAPGAARIGLETGPTTTWLWTELKRLDLPVICIDARHAKAALKMQINKSDRNDAAGIARIMQTGWFKEVRVKDIDSHLVKALLVSRALLVKIKRDLENQIRGLLKNLGLFIGRGKFNVFAVRTEELIEDRPELVAVIRPLLAARKAIEEQVHNLDRRVLKLARRDMQVRRFMTVPGVGPVTALCFTATIDDPTRFKRSRSVGAYVGLTTRRHASGEVDWSGRISKCGDAMLRMYLFEAAGVLLTRVPKWSALKAWGMRLAKRNGLRKAKVAVARKLAVILHRMWIDGTEFNWSKEEASA

SEQ ID NO: 491760 - protein, 319 aa, unidentified
MTCSQSLTIAAGIDVGQRFLDVGLAPSGKTFRVANLAEGIATVIARLTREGVRRVVLEAIGPCAQHLVAALAAAGFEVGIVNPRRIKAFRDAEGRRAKTDRLDAALIARFAMTMSEAVRPLPSAEQMALKALSLRRRQLTEMIAIEKTRLKQAFEPLLVDSHRAAIAALTAECDKVEAELARRIADNPELARVLRILTSLPGIGERIATVLVTDLPELGQCDRKAIASLAGLAPHISQSGNVPPRAAIAGGRPCVRTAAYMAGLVASRAHPQLKAAYQSMRAQGKPAKVAIIAIARKLLVTANALVKANQPYSIPPTPP

SEQ ID NO: 491761 - protein, 345 aa, unidentified
MEITTIGLDLAKNVFQVHGVDERGKTVLRKQLRREQMVEFFAKLSPCLIGMEACGSAHHWARVLQGQGHTVRVIASQFVKPYVKSNKNDAADAEAICEAVARPNMRFVPVKSVEQQAVLAAHRARQGFVKARTAQANQIRGLLAEFGLVIPRGLWHIHQRVPALLERAADTLPLALRHLIERLLAHLRELDRQVAELETQIQAWHRSSELSRRLEKIPGIGPLTASALVASIADARSFNNGRQLSAWLGLVPRQSSSGGKPLLLGMSKRGDVYLRTLLIHGARSAILAAQRKAATTDSWLGKLLQRRHLNVATVALANRNARTAWALLAHDREFQPDYRPSLATA

SEQ ID NO: 491762 - protein, 337 aa, unidentified
MEQQTQYVGIDLHRRRSVIVRRNQAGETLDTVRIDNDPVALAAELAKAGEHPEVILEATYGWYWAADVLKECGANVHLAHPLGNNWGHRRVKNDERDATDLVDLLRMGRLAEAWIAPPPLRELRELIRYRAKLVHLRTSLKSQIHAVLAKEGVTVPMSDLFGVGGQILLDKVHLADAYRVRVESLRELIEHVNREIAMLEEQTAPYFAGDLGYHAVQAIPGVGPVLGAIFVAEIGDISRFTSARHLCSWAGLTPTHKESDTTVHRGHITKQGSRLVRWAAVEAVAHQRTDTPIRRHHRNVGERRGTQIGRVAAARKLLILVYYGLRDGEIRCLAQTG

SEQ ID NO: 491763 - protein, 309 aa, unidentified
MAVTDRTLGIDVSKRSLDVHLQPDDRTWQVPNTDDGVRQLAEQVAPLQPVRIVVESTGGYERPVLYRMLGAHLPVAMVNPRPVRDFAKAMGLLAKTDRIDAKVLALFARHVPTRLTVAPSRHQQALKQLVARRRQLVEQVSTTRSQAEHVDLPAVRDSMQRTVSHLQTEIAAIESMIQQLIDQDEPLRQRHAKLQSVKGVGPATARVLVSELPELGRIGRRQIAALVGVAPYNDDSGQHRGRRRIRGGRATVRRALYMATLVATRHNPVIRAYYQHLQEQGKAKKVALVACMRKLLIRLNALIAEPQNA

SEQ ID NO: 491764 - protein, 349 aa, unidentified
MTEQRRSYAGECVYVGVDVHKETYTVTCVCHKQIVKTATVQAEPAGLVASLLRWFPGATLYSAYEAGFSAFVLHRVLTTAGITNIVVNPASIAVAANDKVKTDRRDAKKLAIDLADGRLRGIYIPTEAEELARLLPRTRAQIVEHRATIARQIKAKLHQFGLIAPSSRRMISNRYLRQVAAGSLAPELRVSLTLLAEQWRFATRQLIEIRRLLQEQAAAQAELETVYRSVPGIGAVVARTLATELGDMTRFANERALFSYTGLTPSEYSSGASVRRGHISRQGSGRVRHLLIETAWRALPRDIVLQEIFDRIAATRGKKRAIVAIARRLTGRIRACFRQGTTYAVGTYT

SEQ ID NO: 491765 - protein, 344 aa, unidentified
MYHYAGIDVSLEQSAVCVVDGTGRIVREAKVASEPEALIAWFGSLATPLERIGLEAGPLSQWLYAGLREAGLAVELLETRHVRDAFKAMSVKTDRNDARAIAQLMRLGWFRPVHCKSVEAQEVRAVLTARKLLQSKLLDVENSLRGVLRGFGLKVGKTTERTFAARIEELVARHAALASIAKALLAVHAVLLREFKGLDKQVLRLARSQPQARLLMTTPSVGPIVALTYASAIDDPERFRSSKAAGAHFGLTPKKYQSGQTDYTGRITKIGDASVREALYQAAHVMLTKPVKNCTELKSWAMRIAKRAGLRKAKVALARKLAVLLHRMLADAKPFNPNAKALAA

SEQ ID NO: 491766 - protein, 412 aa, unidentified
MQYAPAVLPDEPANGLTCGIDWARDDHAVSILDRHGRQVHRSTVEHSAAGLRELVAVLARTGVSEVAIERPDGPVVNALLDAGITVVVISPNQLKNLRGRYGSAGNKDDRFDAFVLADTLRTDRARLRPLVPDSAATAALRATCRARKDLVIHRVAVANQLREHLNRVFPGAVGLFADLDSAISLKFLARFDRQERADWLTPIRLGAWLKSAHYTGRTDPAILHVRLIAAPRGATGQEGTAHAHITGALVATLTSLVEQITVLSEQIEQQLAAHADAHIFISLPRSGTVRAARLLAEIGDCRARFPTPEALMCLAGVAPSTRQSGKMRSVGFRWACDKQLRDAVCDFANGSRHANPWAADVYERARARKHDHPHAVRILARAWLYVIWHCWQTNTTYDPAKHGALQALQNHS

SEQ ID NO: 491767 - protein, 363 aa, unidentified
MTTEEKQRTLFVGIDVHKDTHTAVGVSPFGEKLFETTVGNYQKDFDELSRRIREVSDGAVLSPFVGLEDCSGYGERIARALYAKGFPTVHVPPILVDRLRKRQTHPEKSDSLDALGVAKVMMHDTDSLPVYSIAERDASSKFLRELRLDREYLVVERSRLRNQIHLLLHRIYNTEYASYFKDPFALKALRHWVRVKPPQCDPYLLRSLKRKAKRMLELHVAIKELENDMEAVMKSEEYTLPTASGCGVVLAATMIGEIGDIHRFKSPASLAKYAGCAPREHSSGKTTRYRKTKSGNRKLNCAFHRMALSQISPTGNDAARTYFKKKVSEGKTKSQALVCLRRHMVTVVYMMLKHGTEYRCPQT

SEQ ID NO: 491768 - protein, 351 aa, unidentified
MEIIAFDSHKRYTLASVETGDGRLVREQRVRHSRGEIVGFLSRCESGSPVAVETIGNWYWIVDEIEQAGMQPRLVHARKAKLMLGSINKTDKLDVRGLNKLQRTGTLPTVWIPPGDVRDKRELPRTRMVFGEQRTRLKNRIHSVLDKYGLQAPDGISDIFGSKGRKYLQGCMEQLPAQTRYTTECLIKQLDTVEGQIKAIEKRMKEVFGHTQEIGVLMTMPGVGFILAVVISQEVGDVDRFGGPDRLASYCGMTPRVSASGDKVRYGRLRPDTNHYLKWAFSEAGNSVAVNRKCYPQRHVSRLYTRIRGRRGHAKAVGAVGRHLAEATYWMLKKKEPYLERGIKGVSPTGA

SEQ ID NO: 491769 - protein, 382 aa, unidentified
MQASTVDTPTAFHCGTIFVAIELSQKSWLVTLHSPDRDRISRHKLEGGDHAGLLALLAKVRERASLKLGAVPKVVSCYEAGYDGFWLHRLLTEAGIGNFVFDPASIAVEQRARRAKTDRIDGEPLLRTLMAYLRGEPRVVRIVRVPSVAQEDARRASRERDRLVTEQTGHGNRIKALLRLVGMAVGNPRRRDWLGWLERQRDRQGHPMPPHLLAEVKREHARLMLVREQLAALEQASATSAASVPAQMAERRDLLQRLKALGPAFAATLTNEVFYKDFRNRRQVGAYCGLASSPWRSGGIDREQGISKAGNPRARLKAIELAWLWLRHQPESELSRWFHTRTANAGKRAKRIAIVALARKLIVALWRYLTTGLVPAGATMKA

SEQ ID NO: 491770 - protein, 393 aa, unidentified
MICVGIDVAKDKHDCFILSSEGEILADVFTIQNNAEGFDTLLQTIRRCARPEDKMKVGLEATGHYSYNILGFLLDKGLPTYVINPLHTNLYRKSLSLRKTKTDRVDARTIAAMLMSDVDLKPYTDTAYHNEELKSLTRYRFDKVRERAKLKQSVSRLVTILFPELEKLVPTLHLASVYGLLSELPGAKQVAGAHLTHLKAVLSDASKGRYGRDMATTLRDAARCSVGSVMPAKSLELQHTIRLIRELDAEIEDIEAAIQSMMDEIQSPITTIPGIGVRMGAMILAEIGDFSCFDSPDKILAYAGMSPSTYQSGQLSLSGSYSHMEKRGSRYLRYALYNATKYVCLWDPTFAAYLAKKRAEGKHYNVALSHAAKKFVRLIYAMERSQQPYNTAA

SEQ ID NO: 491771 - protein, 418 aa, unidentified
MTTFIRSVWLWKVFFYRRCCGIDVHKKVIVACLVNGGEQELREFGTTTSEIKTLANWLTESGCEMIAMESTGVFWKPLYNLFELMDLDAMIVNAAHMKALPGRKTDVKDAEWIADLLRHGLLKASYIPNREQRELREITRYRKSLTEERCREVNRLQKILEGANIKLDSVVKDITGKSARKLLQRIIDDDIPDSDEVSKLVHGRMRPKLDQIVASIEGITTPLQRKLLAQIIDHIDDLNRRIGELDKLVQEYMAEYEAAIEAIDEIPGIARRSAEVILAEIGLDMGRFPSAAHLCSWAGVCPGNYQSAGRRKHGKTTKGNKALKTILTQCAKSAKTVKSSYFFAQYQRISARRGKNRATLAVAHSMLIAIYHILKNKTAFHDLGSDYYDSFNRDRKINSYLKRLKALGWEPDAISNSA

SEQ ID NO: 491772 - protein, 418 aa, unidentified
MIPAVIERCAGIDVGKKFLIVCVLTGPANEKPTAEVRKFGTVRAELERLREWLKSEGCTHVVMESTGSYWKSPLNVLEDDPEYRLQIVLANPQQVKAVTGHKTDPHDASWLAHLLRHGMIRPSFIPARPLRELRDLTRRRKQMIRAAADERNRVQQVLEDANVKIGDVLSDVFGLSGQRMLEALVAGESSACEIAQLARGHARKKIADLTAALEGHQMRDAHRFLITHAMRHMAFLAEQIEALDQEIERRIAGGELDQAYQLLQTIPGIRTQAAGTLLAEGGPDMKQFPTAGNFSSWSGAAPGNNESAGKRKRSPTLRGNPHMKTALVESAWSASRTNGSEFQDRYQRLQPRLGHKRAIVAVAHLLAIRIYEVLDSGLPYQNSRARPSPASVRRLVRHHSRRLKHLHRWLADPLRKDA

SEQ ID NO: 491773 - protein, 417 aa, unidentified
MRAVALDVHRDFCEVAIVEQGGLRSGGRIETKPETLELFAQSLDVHDQVALEVTGNAWEIARIIEPRVARVVVGSPSDTGIRQARAKTDRLDARALAKLLWAGSLDSVWMPDECIRAMRRRLARRTQLVRARTRAKNEVHAVLLRCLKGRPPASDLFGVKGRRWLQEQELPIPERETVDAALRQVEFLDAEIAAVEALIAAAALSWPEVKRLMTVPGVNVIVAATFMAAIGDIRRFPDRRKLTGYLGLDPRVRQSGVGPASHGHISKQGSAAARHALVEASWSTVRQPGPIAGFYVRIKARRGHSIAIVASARKLACLFWCLLTRGEDYAFAQPSLTKKKMRRLELQAGAPRFQGGRGVWSTNDAMRQAERELALQAQRAYERTVKDWQQNKRASATAGRASSGSSKEQVARQTTRP

SEQ ID NO: 491774 - protein, 383 aa, unidentified
MTNQVSRFIPRDYDVFAGLDVDKKSMAVIFTNHDGPMRALRMAHSAKPLLNYVRKHFPGQRVAFAYEAGPTGFGLHDELVTEDYTCLVVAPSKVPRASDERVKTNRLDGRKLSESLRGGQLHSIHVPTRAYRDLRHLVQLRDAHVRQLSASKLRIKSLLLYEAIPFPDPQEKWTARAMRELQTLPCSETVRFKLDDLLNTLHFHFQAAAAATKQIRRYCLHDAELQQSIDLLLSLPGIGWIVGSHLVARLGDPQQIKNGKQIAGFLGIVSSEHSTGEKQNRGEITRTGDSRLRNKLIQSAWTAIKKDPELRAFYRRIYQRHPKKVAARKAIVAVARKLTNRIYVVLKEQRPYVVRPDSSIAPLTAEETVGPRERLDGAQNDQS

SEQ ID NO: 491775 - protein, 372 aa, unidentified
MSDCSTVIGIDLGDKQSIYTVLDVASGEELQSGTVHTTRAGLTRVFGSFASSRFVVEACGSSRWVSEHLAGMGHEVLVGNTRKVRCIYDTDNKSDARDADMLARLGRLDPKLLYPIRHRSKEAQQHMAVLKARDAIVGTRTKLVNHVRSTVKGFGERLPSCSTDSFPNKVAGALPKELHGALAPIIELIGQLTTEIRAYDKKIQALCKHYSEAELLLSIPGVGPLTALSYLLTVEFPERFEDSRDVPAYFGLTPRRDQSGDTDKQLRITKAGNGFVRRMLVNAAQYILGVKCRQDSELRRWGLRLAERGGKNGKKRAVIAVARKLAVLLHRLWINGMLFDPFPHGEPEVATLDSPTETGPPVPLSPSVAAHG

SEQ ID NO: 491776 - protein, 310 aa, unidentified
MDQIVVGLDVAKEHLAVHVLPSEEAFTVGADESGLATLATRLTPLTPTRIVLEATGGYEVPVAAALAAAGLPVVVVNPRQIRDFAKATGTLAKTDALDARIIAQFAAAIRPPVRPLPDADAQRLSALVTRRRQLLEMLGAESHRRRQARDPRLQRRIADHVTWLERALREVDAELRDTIQASPVWRAREQLLSSVPGIGPVTAQTVLAELPELGQVGHRQIAALVGVAPFAWESGTLRGKRAIRGGRPTVRRVLYMATLVAVRRNPILAAFYQRLRAGGRPAKVALVAAMRKLLTILNAMLRDRREWQPA

SEQ ID NO: 491777 - protein, 351 aa, unidentified
MMIIGCDYHPDFQQIAWVNRETGECGERQLRHNDGEAEKFYRNLKLQGVTVRVGMEATGHARWFERLLAELQQELWVGDPGQIKASRVRKQKTDRRDAEHILKLMLEDRFPRVWIPSPGNRDLRQLLWHRHRLVQLRTRVMNQLQAVALNEGVRRKKGLWSGAGRAQLESFRLAPWATRRRQDLLELVDRLNPTIEELSRAAEKEAQRRPEVQRLMTHPGVGPLTALAYVLIIGAVERFRCGKQIGSYLGFIPCEDSSAGHQRLGHISKQGNTLLRFLLVEAAQAAVRSDPDWRRRFVHLGMRRDRSIAKVAMARKLAVRLYWMWRRGWDYQQLKKFGSHAGQPGYVHGVQ

SEQ ID NO: 491778 - protein, 348 aa, unidentified
MLQNLDRAIAVIGIDIGKNSFHIVGLDGRGAIVLRQKWSRGQVEARLVNMPPCLIGMEACVGAHHLSRKLKAFGHDARLMPAKYVRPYSKGQKNDFRDAEAIAEAVQRPTMKFVATKTADQLDLQALHRVRERLVSQRTGIINQIRAFLLERGVAVRQGLRFLRAELPRILATPPDVLSPRMVRVIEGLAEDWRRLDERVDHLSGEITALARQDVGCERLMSVPGIGPIISSAMVAAIGTGDAFSKGRDFAAWLGLVPKQISTGDRTILGKISKRGNRYLRVLFVQAAWVVLIKPKSWERHGLKHWIEAAKKRLHRNVLAIALANKLARIAWSVLANGRIFEARPQAA

SEQ ID NO: 491779 - protein, 314 aa, unidentified
MNFVGIDLHKKTITLEALNQDRHVVKRPTLACSDPQSIRRCFEQFRPFQAVVEATASYEWLWELLEPLAQRLVLAHPGKLRLIAESKNKSDRVDAHVLAELLVLDLIPPACRPGPRQREHRRLVRQREYLTHRTTAVRNKIRRLLSDYNADRPNLFTRDGLAYVATVAVAEADRFILQQLLAEWRHHEEQLQAMDKRLRQFAQAGPAREQEARDVLASIPGVGPVTIDVVLSEVGDVGRFRSAKEVVAYAGLAPGQRESAGKRKELGITKQGSRSLRWVLVEAAWAVVGGGKRSSNVYNAEGGKRPLSPWPGGC

SEQ ID NO: 491780 - protein, 428 aa, unidentified
MGVMSEIEVMGQEPQFAAFVGLDWADQKHAWCLQAAGATQRESGEVEHTPETVEAWVGQLCRRFGNRPIAVAVEQVKGALVFMLSKYEPMHLFPVPPAMSASMRKALSPSGAKDDPRDADLLLDLLLKHRDKLRRLAPDSEATRRVQNLVEERRNLVDEKTAQTNRLTNHLKIYFPQMLGWFDRLDTELVCAFLEQWATLEELQKVPPARLRTFFRKHRCRDQELIERRMEGIKQAIPATRDGAVIEAKSAVVKVSAQLIRSLVRGIGELDRKIEAAAAAHPDFFIFESLPGAGAAMAPRLLAAFGSQRDRYANAEEVQAYSGIAPVTERSGKKKWIHFRWACPKFLRQSFHEWAGHSIAHSQWARSYYQQQRERGKGHHAAVRGLAFKWIRIVFRCWKDGVVYDESKYLAALAKRHSPLAAVAGTIL

SEQ ID NO: 491781 - protein, 317 aa, unidentified
MSVANEVFVGIDVSKAELEVCWLPQRERLQVARDEGGLVRLVERLKELGPSLVVLEASGGYEMPVAMALAGASLPCVVVNARQVRDFAKASGKLAKTDRIDAQVIAEFAQAIRPQVRALPDAAAAHLIALVARRRQLVEMLTAEQNRLALSHAAVREDLKQNIAWLKSRLQDLDGELARAVRSSPLWRENDKLMQQVPGVGRVVSAVLLALLPELGRLSPKKIAALVGVCPFNRESGRWNGKRAIFGGRAGVRSVLYMAIVSAIRWNPLIKTFYQRLLAVGKPKKLAMTACMRKLLVILNAMMRDRADWNPNRALAT

SEQ ID NO: 491782 - protein, 352 aa, unidentified
MRRLKRQKITGEDLFIGIDLHKARWHVTIRSADVELFCGSIPGEWEALRGLLDRYEGNRIRAVYEAGCFGFWLYDRLVEHGVECLVTPPSLVPQEYGNRVKTDRRDSRKLSSLLAKGLLKRVWVPSQEERYHRQVVRRRRQLVRDRVRTQNRIKSELQFYGISLPAPKGRWTHIYFNNLRRIRFGNRWMQHSFNRLLEQYELLGKLIDKQTKVLRDLAKTESYRKRVEILTSIPGIGVITAMEILLELQDVARFRRADQLAAYIGLTPSQYTSADKVRMGRITGIGKDSVRTTLVESSWWLIRKDKAMRIKYEKIKARAGAKRAIVAVARILILRIRRMILDGQGYTFSEAC

SEQ ID NO: 491783 - protein, 351 aa, unidentified
MIIVGCDFHPKWQQVAVLDAETGEIGEHKLMNGDGQAEQFYCSLPAPALVGIEACGNSQWFIDMLERLGHEVWIGDAAQIRASYVRKQKTDRRDAGHILRLLIEKRFPRLWQPTAAERDLRQLLIHRHKLVEIRTRVKNGLQHLALNRGMQKQHSLWGARGMDAFKNLSFEGWSEKRRGDLLRLLAELDERVEELDTAVTEAAQSDARARLLMTQPGVGPITALAFAVTIGDVSRFPTSGQVASYLGLIPGEHSSGGKQRLGAITKQGNRFMRQLLVEAVQTTNRLDEGFRRQYQARCHKKPKGVAKVAAARKLTVRLYWMLKTNTSYPQIAHIESSSGVPMVAQAHRAFD

SEQ ID NO: 491784 - protein, 391 aa, unidentified
MVCVGIDVAKDKHDCCILDSDGMVRADCFTIPNNMDGFKQLLQTIRNCTKKSDKIKVGLEATGHYSYNILGFLLDNGLPTYVINPLHTNLYRKSLSLRKTKTDRVDARTIATMLLSDVDLKSYTDIAYHNEDLKSLTRYRFDKVQERAKLKQSVSRLATILFPELEGLVSSIHGTSIYALLGEYPGAKQISEVHLTKLTNLLTTASKGRYGKEKAIQIREAARASIGSVMPAKSLELKHTIKLIQELASEINEIEDSIQKIIDELNPPILSIPGMGVNSAAVILAEIGDFSNFSSPDKILAYAGCSPSTYQSGKLTNCYAHMEKRGSRYLRHALYNATKYVCYWNPVFAEYLAKKRAEGKHYNVALSHAMKKLVRLIYALQKSGKAYLAAA

SEQ ID NO: 491785 - protein, 420 aa, unidentified
MPYRIAGIDVHKRMLAVAIADVEVVGEFAVERRQFGSAPSQLRVLAEWLVEQQTEEVVMESTAQYWKPVWAALERYWKPLAQQRGSARRAGTLHLAQAQSNRARPGRKRDFADAERLVKRLVAQELTLSFVPDPVQRVWRTLTRTKYQLTRNRVQLQNRLEALLEEAQIKLSSFVSDLLGVSARRMLQALADGVTEPAALAALAHERVRATQEQLRDALGACQDLNPVYRRLVKMALEDLQLLEQHIDGVDQQLAMLLGPYQDQVHRLAEVPGLGADSAQQIIAEVGTMAATFPSAGHLASWVGACPGDEETAGVSRSHRSPKGNRPMRRILNQAANAAVKYKGSVFQTLYRRYVTRLGHNQTIAIIAHRLCRLIWKILHQGVRYEERGPAMNERSKRARATRMIRELRSLGYRIDLASA

SEQ ID NO: 491786 - protein, 328 aa, unidentified
MFYLGMDVAKAKLDCCLLLDEASGKRKTKAVNNTKSGIADLLVWVAKQNVSSKELHVVMEGTGVYHEQAALALADAGVTVSIVNPAQVKDFGRGLAVRTKTDGVDSFVLARYGALLRPAAWTPPAPEARMLQALLSRREAITQDLQRERNRQEKADATDTPDRIRQSLADSIEFLIKQLAELQQDIDQHIDRHPSLRDDMALLQSIPAVGPQVGGNLLSVMHSHEFSSAEQLAAYLGLVPVERQSGSSVMGRARLSKAGPARIRAVLYMAAVVATRHNPHVKAVYDRLLARGKSKMSALGAAMRKLVHLCFGVLKTRKPYQHNYAKIT

SEQ ID NO: 491787 - protein, 345 aa, unidentified
MTGTVYCGVDFHARMQTIAFCSLGDGEVQIAELDHRRDDIRGFYSQFTGEVIVGLETGGYSSWFEAMVEELGHTVWLGHAAEIRRRGNWRQKNDRRDAELILDIMIRGDFPRIHRHNRESIEVVRMLRHRQRLVKMRTMMTNSMQAVAISCGASQKTPMKNLARQQQLKSARMSVAQKHQTDDLFLLLAPLNERISGINAWLKQQANNDERVRLLMTHPGVGLLTGLGVVHTLEPFERFTKQRSVVAYVGLEPMERSSAERKRYIGISKAGSRLLRHCLGEAAQTAVRYDSELKEFYHRIAKRRGKAIATVAVARKLLIRCWIMLRNNIDYSEFRRRGVEARLAR

SEQ ID NO: 491788 - protein, 363 aa, unidentified
MQVRHIFVGIDLGDKNSVARIAIERENSVRVGFTNTRAGRARLFAEVNRRSEAAEGAIIVMAYEASSCGFVLKDEADQRGMLCHVLAPTKMEKSVDQRRQKNDDRDAQDVLEKLRGHYLAGNRLPTVWVPTAQMRDDRELVRIRQEVGEKQTKVKVQIQMLLKRHGLEKPVGSGSAQTIKYRKWLEAVAEDSAWGWGMRQSLSSLLRQLRWLETELEQLDQQVEQLSQQERHKPIVEALKTEKGVGTPTAMVYRTEMGYAGRFDRGRQAGRFMGLTPTSHESGEQNDRKGHISRQGPPRLRRMLCQAAWAHVRHDPHAREVYERLVAKNPKKKKIVLVAVMRRLAVRLWHRMREAELALEHIC

SEQ ID NO: 491789 - protein, 355 aa, unidentified
MKFYVKQHKYYCGVDLHARSLYVCIIDKEGTVVKHKNIDATPEAFLNIIRDCREDLVVAVECMFAWYWLADLCKKENIPFILGHALYMKAIHGGKAKNDRIDSHKIAALLRGGMMPEAYVYPAEMRATRDLLRRRNHLMRKRAELLAHIQNTNHQYNLLPFKKAIAYKGNREGVAERFNDECVRKSMDVDISLIDHYDKLLKKLEYYIDKKAKVHDPEALFRLRSFPGIGHTLALIILYEVHDINRFLRVQDFVSYSRLVKSAKESAGKRYGTSGAKIGNAHLKWAFSEAAVLSLKQSPEIKKYKAKLVKKHGKAKALTILAHKIGRAVYYMLQRREVFSIDRFLNKQMIQAGQA

SEQ ID NO: 491790 - protein, 359 aa, unidentified
MMTDNNGETQRVIGGVDTHKDVHVAAVLDERGRLLDTASFATTTIGYRRLHRWLCDHGEVLAVGVEGTGSWGAGLARFLRARGVNVVEVNRPNRQTRRRKGKSDTIDAEMAARAVLAGDATAVPKAGDGPVEALRQLRLARAGAMKARTAAANQLHSLTDTAPDELRARLRSLSTLQRARLCARLRPGDVLTTAGAAKRALRAVAHRWLALRDEIAELTGDIRHVLDTIAAPMLERYGVGYETTGALLCAAGDNPERLHTEGSYAALCGSTPVRVSSGKTNRHRLNRAGDRQANSALWTIVMVRIRSRHAPTIAYLERRTADGLSKREAIRCLKRYVAREIYNDIRTIIATNTPQQMAA

SEQ ID NO: 491791 - protein, 338 aa, unidentified
MEHYVGLDVSLEETAICVLDRTGKVIWRGRCSSDPDAIARTVRDRAPFVVRIGLETGQLSTWLSLRRLDLPVVCLDARHAKAALSLQVNKTDDNDAHGLAQIVRTGWYREVAVKSMDSQAVRVLLMARAQLISQRQATANQIRGLLKTFGLRVGQAGGSRFAVRVRELVADHPVLVAIIEPLLTVWQTLREQAAELDRQVRMRVREDAAARRLMTAPGVGAVVALAYTAVIDDPARFAKSASVGAYLGLTPRRYRSGEVDCAGRISKCGDGLLRSYLFEAANVVLSRITRPSGLKTWGQALAQRIGARKAKVAVARKLAVVLHRMWRDNTEFRWEPAR

SEQ ID NO: 491792 - protein, 403 aa, unidentified
MIRYHVGVDVGKYRHHISILDLSRGDYDKAFSFTNDHDGFMDLVAALEKISSERSDFLIGVEACPYALNLTYFLMAMGFTLMEVNPFRAGQFRKAQGKKAKTDKIDARAIAAILSLSGHKVLSIPDPILDNLKELTRFRVNLVDEKSTIIIHLREALSTLFPEYEKVFRQLDSAGSLALLATYPGPEHMISAGEEAVGKTLSLASPRRMSRGMARRIIEAAKCTVGVVQRQPSLGIKISILAKRIASLRSTIQDLDRQITALFDSLPCKPQGFPVGRAPSLATIIAEIGDIHRYPTLKKFLSHLGWCPQSFQTGNYLLKHPKMSHAGNKYVRRLIWMLSIFAIKSVPRYREYFQRRVSEGKTKMHIVVAVGRKLLSALYAMLKTGTAYDPNWEVNRRLALARR

SEQ ID NO: 491793 - protein, 371 aa, unidentified
MEHTRFVGLDIHKERISVSVAESGRAGAVEYYGEIANDPGAISKLCDRLGRSGKPLAFCYEAGPCGYGVHRQLTSLGHRCDVVAPSLIPMKSGDRVKTDRRDATMLARLHRAGELTPVWVPDADHEAMRDLIRLRSVVRQIVTRARQHLQGFLLRHGRKHGGGRAWSMAYRRWLSTLAFEHPAQQIAFQDYVDAVTDAERRLKRVEEQIAGLLPEWNLRPVVDALQAMRGIALINAVVLVAEVGDFTRFSNPRQLMAYFGLVPGERSSGQTVRRGGITKTGNAHARRALVEGAWAYRMKPRIGRHKVDRIEALPKVVRDIGWKAQIRLCARYRRLSARGKTATVVNVAIAREMVGFIWSIACAIQSTPKAA

SEQ ID NO: 491794 - protein, 299 aa, unidentified
MSDGICFAGLDVHARATAAAAVKLGSGEVFRARLSGGPAATIDWLRSLPGPVRAVYEAGPTGFGLARAARAAGLEVIVCAPGAIPRQPGDRVKTDARDALKLARLHAAGQLRAVVVPAPELEALRDLVRAREDLRGDLMAARHRISKLLLRRGLVWAGPGTTWNDGHLRWLGRISLGDPLADVVLGEYLACHEVLLARRDRLDALIAEQATHRPWAQTVARLRCLRGVDTLTAVGLIAEIGDITAFAHPKQLASYLGLVPSEQSSGERRRQGAITKAGSTHARRLLIEAAWHYRRRPAS

SEQ ID NO: 491795 - protein, 300 aa, unidentified
MGYFAGLDVSLEETTICIVDNAGKIVREARAASEPEALVAFFRACGMKMERVGLEACSLTAWLHAGLTEVGIPAICIEARQAKAAMGAMPNKTDRNDARGMAHIMRAGWYRAVHVKSPSCRSWRALLTARRMVLNKRRDVENGVRALLREVGLKVGTPSRKDFPARVRGLAAADPVLVSLTESLLSVIEVMTREVERLTKRALDEVRVEPTCRRLMTVPGVGPLTALALRATIDQPGRFRKSRDVGAHLGLTPRRYQSGETDVQGRISRCGDELARTALYEAAHSLLIRCTKWSALRAWA

SEQ ID NO: 491796 - protein, 391 aa, unidentified
MVCVGIDVAKDKHDCCILDSDGTVRADCFTIPNNMDGFKQLLQTIRDCTKKSDKIKVGLEATGHYSYNILGFLLDNDLAVYVMNPLHTNLYRKSLSLRKTKTDRVDARTIATMLLSDVDLKSYTDIAYHNEDLKSLTRYRFDKVQERAKLKQSVSRLATILFPELEQLVSSIHGTSIYALLGEYPGAKQISEVHLTKLTNLLTTASKGRYGKEKAIQIREAARTSIGSVMPAKSLELKHTIKLIQELASEINEIEDSIQKIIDELNPPILSIPGMGVNSAAVILAEIGDFSNFSSPDKILAYAGCSPSTYQSGKLTNCYAHMEKRGSRYLRHALYNATKYVCYWNPVFAEYLAKKRAEGKHYNVALSHAMKKLVRLIYALQKSGKAYLASA

SEQ ID NO: 491797 - protein, 317 aa, unidentified
MNNSSKTLNVIGVDVAKRKLDLALGDNRFMTIDNNEQAFKVFLDAIDIPFDQLLFVMEATGGYERPFEHYLLTHSISTSVVNPKRVRDYAKAMGKLAKNDRIDAAVIREYAKVGKLIYATQKTPQEQKLRALLNRRKQLLKHLIVEKHYLETTTDKDALLSVESMIKLFEKRLEKMDEQIQSYLDQDASYQHKKQLMTGVIGIAEQTASILLIKLPELGNLSNKQIAALVGVAPFCNDSGQYKGKRMIWGGRKEIRTALYMPMLSVIQFNPVIRSFYQRLVNQGKVRKVAVIASMRKLLTILNSMIRNDTEWDTNYV

SEQ ID NO: 491798 - protein, 400 aa, unidentified
MLLFFEVITMIFVGIDVAKDTHYAAVSDNSGAVLVKPFAFQNNAEGFCLLLKKLSEFDRSKLLIGLESTGIYSENLICFLYESGFRLAVINPIQTATLRKTAIRKTKTDKVDTMLIIKSLMVNSYRLYSLRDADSLKLRTLCRFRQNLKKSKARLKIQLAGYVNLVFPEFGKFFKSGIHIAASYALLKKYSSPKEIAALRTSTLCTLLSKASHGRFGKDTAEALKSLALSSVGVKNPYISIQIAQTIAQIELLEQQIKDLNSAIEEAMESINSVLMTVPGIGAVNAACILGEIGDIKRFSKPCKLLAYAGLDPTVRQSGQFTAKSTRMSKRGSALLRFALINSAWQLTLNDTTFKAYYDLKRSQGLNHYGALGHVAHKLTRVIFKLLTSDTPFNPAKLVA

SEQ ID NO: 491799 - protein, 455 aa, unidentified
MSKKQQSKKQQNKQFTTLQLGIIYPGAAGIDVGSMNMMVSYPGAEGIQTVKEYGAYTEDLHAMANQLKESGITHVCMEATGVYWMAVYEILEQYGFNVTLVNARHYKNVDGQKTDVKDCQWLQQLHAHGLLRASHIAEEQYRELRTYIHERGVLQKNKSDTLNRIHKVLTQMNIKVQHIISDIEGVTGMQIVERIAAGVNTPQKILEGLNIHKLKAGKEDLEKSLKGVFKPWYVKVLKQHLTAYHFYKKQMLAYELEIESTLKTLLPSPAQQITIEKKTVKARKNQYHFNLKKYLHEIAGVDLTEIDGLDENTVLTIIAVVGLNMHKWPTAEHFTSWLNLSARPKKSGGRTIGHQRRFTNNSATQAFRMAAQTMWQQKGTLGHLYRRLSHTKGTKKAIKAVARRLAVIFYNMVKKQTAYDPKIVALDEAKIKARKISRLQKEAEKLGCRIEILVA

SEQ ID NO: 491800 - protein, 365 aa, unidentified
MQFVGVDLHTNRFTCCYRDEVKDKKETVTFELTTMGIADFCRMLTKETYVLVEATNPTFTFTRMIEPLVKEVLIANTYELKQISLARKNTDKIDADILCRTIKMQVLSGEMFISPVDVPPVEIQELRGLFTTYRLYRKQTTQLKNRIHSLLKEKLYGFTQEEIFGKKDREMIRTLERGSVMSFQINELCDVLEYMEVRITTLEEKILEHAEPYLREIQILTSMKGIGVLTAIAIITDIIKVDRFKNSKAFTSYLRSAPKVANSNTSVNIKGTNKKGRKLAATLITQSLTHILSSSVKLSRWYEEKTKQKKPGLVRTALRRRVFAEIYQMLKKGEFHYGRNAQLHEAKMLHYKRFLEKRKNLLKTA

SEQ ID NO: 491801 - protein, 379 aa, unidentified
MDRAISGTPAETVLYGALELSKNSWLLALQFPDRAQPSLYPIRGGDTEGLMAKLMAARDRWAKVSGKTPSIVLCYEAGYDAFWLARFLKARGVECVVVDAASMQVNRRARRAKTDRIDVGMLLRALIAWAQGDRHVWSVVRVPSVDEEDLRRSHRERDRLVRERTAHINRIKGLLFGQGIRGINVKSKYKTLQIDKLVTGDGRPLSPRLASEIKREIARLSLIQEQIAALEGERDQAPTPCKATEKKRVQLMCLTGIGPAIAAVMTREVYYRQFDNRRQVAGFLGLATSPHDSGDVERSQGISRAGRGQVRGTIIQAAWLWLKHQPKSAITRWFVQRTAGQSGRIRRIMIVAVARKLAIALWRFLEQGLVPQGAILANR

SEQ ID NO: 491802 - protein, 428 aa, unidentified
MDGVDRIRLEQFRQMRREIRGSEGYLVVGIDVGKEKHHAFFGTATGKTLLRRMVFENSREGFEKLFAQVEAMKVQGVLGREVFGLEPTANYHKPLADYLVRRWGQVVLVSGVAVKANRKSLDGRWDKHDVKDAANVADLVSQGKCMFYEYPDPRLRGLRDLLVLKRRLRREEHGYRVRIRNHLVAKYFPELDRYYGQSERVSLAVVRWCLNPEYLSGLEFEEFLRMVVPGCRNGGQRERIQKIWEMARGSVGCVMGSAVEFEAKVMVEGLKRIREVIAETEGQIEECCEEFPEYESLLSIPGFGPDISAKVLGAIGDAGRFENGAQVLKLAGLDLEAERSGKSADLARPVISRKGKADLRYALYQAAMIASTKNQHFIVYFTNKLRGREREPGIKTKMRVKLAAKLLVIAWTLMKKKEPFNPDYLNLE

SEQ ID NO: 491803 - protein, 344 aa, unidentified
MVYYAGLDVSLRSCAVCVVDGNGAVLHERDLPCEIEEIAGYLTALSFPIERIGFESGTLSQHLFYGLKAEGFDVVCMEARQVSAALSAMRNKTDRNDARGIAQILRTGWFSPVHMKSREAHGVRALLSTRKALLSKTIDLANEVRGLLKIFGIRLPKTVKHGSFDGVVRPMIEMDEVLAHAMLPLLDARLVLYQHFLELDRRVKRAASQDEVCMRMMTVPGVGPIAALTFKAAVDDPARFKRSRTVAAHFGLTPRRYQSGEHDNPGRISKAGDRDVRATLYAAANALLMRTMAGSQIKSWGMRLMRTKGRRRAVVAVARKLAVLLHRMWADGTEFRSEKVEGMA

SEQ ID NO: 491804 - protein, 406 aa, unidentified
MFQRENKKACVSLDISKGSSHVQAFYSVGQKANDVCIIKHTKSGFQQLSTIIDTLENSMGEKCVVVFESTGVYSKPVENYLQKVGKKYYLIPPLLSAKVRKSDIRPTKTDSKDCETIANVYYLKKLKATKPYEKIHEKLKGYCSYYLFLSNRTICMKTKYRHFLDNVYPRIDDYFNVYSPYFMELILKSPNPHKTMKKTDEYLYKLLTSYAYCGNSKAMAFIHSFHRYFDDAAIDINEDDSAIDILVSTTAKLKEDMKSLENLLNEIILLGMKTEEYKYLITIPGMSKNTAARIAAEISGIDRFPSPSQLVAFAGIDPTVKSSGQMTGNHLPITHKGNQRLRCLLYLVASGTSKSKSEGNPVRDFIIKKKSDGLPPKAAIIAGCNKLARIIYAVCSKREPFSLQNQ

SEQ ID NO: 491805 - protein, 389 aa, unidentified
MNIQRSRWNSVILRRFHDVQGMVEDIAEKQGKTAVIPGMEPTGHYWFALGKFLQDSGMKPVHVNPHHVKKSKELDDNNPNKNDRKDPKTIAALVNEGRFSYPYIPTGIYAEIRSLSNLRFQTQEELTRIKNRIARWFAIYFPEYKDVYGDLMAVSGRMILKEAPLPEDIRILGVNGVNQIWRNAKLRGTGMKRAKILVSAAEHSVGSKEAPEAARIELKNLLNDMDVYVSRMEELLQTIEEKLKTIPYVDKLMEIKGIGLITVSGFIAEVGDIGRFDNPKQLQKLAGYAIVANDSGKHNGESRISYRGRKRLRYVLYEAAISLVGKNAEFKEIHEYYRTRKENPLKKMQSVVAVACKIIRVFYTILTKGVDYDPMKLMSDIRRPQLQAA

SEQ ID NO: 491806 - protein, 430 aa, unidentified
MTMVIEEEEAAALPAVRERCAGLDVHRSTIVACATFPLGGGRLKKMWNEFATTAAGLAHLAAWLKELGVTHVGMEATGVYWMPVYAVLEAAGCFDITVVNPHHAKALRKRKTDIKDAEWLAYLVRHDLVNKSFVPAKPFRDLRDLTRYRRSLVEAQASERRRLIKLLEAADIKLAGVMSDVFGVSGRAILRVLISGGQSAAEMAKLARGHLRKKRPQLVEALSVDVDAHRRQLLAIQLARVEAAETDIGVLDKQIAAHLAPYQDHVALLTTVPGVDWVTAAIIIAEIGVDLSSFPTVGQFAAWIGVCPGNNESAGKSKAIGARRGNPYLTAALCNAATSAARRRGSFFKAAYHRLKSRRGGGRAALAIAHKLATAVYHMFTRGTPFHDLGEAHHDTKHVRRSARRYVERLERLGFTVILQPIESETVAVS

SEQ ID NO: 491807 - protein, 414 aa, unidentified
MAEEETISWFAGVDWGSERHQVCLLDARGTTVGEREFAHSGEGLAELGNWLLSMASGASTVAVAIEVPHGPVVDALIDRGFVVYAINPKQLDRLRDRFSVAGAKDDRRDAYVQADGLRTDRRLFRRLQVVDPRLIELRAWSRLAEELRAERVRLSNRVHHQLWRYYPQMQKLTNDLAAPWFLELWAIASTPAKAGRLRKSTVERLLKRHRIRRMDAETVLRILREPAIRVAEGVAEAASIHMRSLVARLRIVNRELREAERKLDELCTAISEIEQTSGEGLQRRDVAILRSMPGIGRINLGTLLSEASGPLSRRDYEGLRTLSGAAPVTKRSGKSLIVVRRYAAHVRLRDTVYHWARVATQRDPKCRARYTALRKRGHSHGRALRGVADRLIALACLLLQRQTLFDPYFGRPTT

SEQ ID NO: 491808 - protein, 344 aa, unidentified
MKITRVGLDIAKVVFQVHGVNEHGAVKARKTLARAKVLEYFVQLPPCLIGIEACGTAHYWARELSKLGHTVRLMAPQYVAAYRKRGKNDANDAEAICEAVGRPNMRFVAIKSEEQQSVLMVHRARTLTMANRVARVNQLRGLLGEFGIAVPKGVARLRRELPGILEDAENGLSDLAREVLCGLLEQLRELDGHISAYDRKIRALAEASEPARRLMRIEAIGPQTATALVATVGDPHVFKNGRGFAAWLGITPRQHSTGGKGRLGQITRQGDGYLRTLLVHGARAYLRVVDKKTDAKSEWARRLKQRRHVNVAAVALAAKHARIAWAILAHGTEYRPAEPTAAAA

SEQ ID NO: 491809 - protein, 371 aa, unidentified
MGHHSEAFIGIDTAKLRNAVAIAEAGRRGEVRYLGEVDSSEAATRKLVAKLAAKYERLSFCYEAGPTGYGLYRLITSLGHECQVAAPSLIPKKPGERVKTNRRDAEGLARLLRAGELTAVWVPDDRHEAMRELTRARDAARQDLTRKRQQVSSMLLRLGRHYPGLKTWNARHRSWLANLKLDHREQRFVLEELLQAERQAGERVERLEQAIREALADWSLGPIVPALMAMRGIDLVGAVTILAEIGDLSRFKNPRQLMAYLGLVPSERSTGESVKRGSITKAGNGRARRALVEAAWAYRHPPRVGYEKQPQVAAAPRRAREIAWKAQVRLCKRFRMLSRGGKKSTVVVTAIARELAAFVWAIARESHPSRA

SEQ ID NO: 491810 - protein, 455 aa, unidentified
MAKKGKKNTPTLENMPLIHPHAAGIDVGAEEHWVCVPADRDAQPVQKFSAFTCDLHRLADWLTTCRITTVVMESTGVYWIPLFQILEARGFEVALVNARHVKNVPGRPKTDRFDCRWLQKLHMYGLLAPSFRPPEDICQLRSLLRHRDNLIQMTVKHIQHMHKALDQMNLHLHHVISDVTGVTGLRILRAIVAGERDPRTLAQYRDYRIKSSPDTIVKALEGDYRPEHVFTLTQSLALYDFTQQQIAACDQEIERVLGTFASLVDLDAHPLPPPTTAHRQPQRHEPAFDLRAHLYRITGVDLTQVPGFQALTIHTILSEVGLDMSKWPTDKHFASWLGLCPDNRISGGKVLATGSRRVQNRASRALRMAAQSLRKSPSYLGAFYRRMRSKLGPAKATTATAHKLAKILYHMLQEQTPYRERGAEAYLHKDHERQLRQLRKQAQHLGFALVPQTSN

SEQ ID NO: 491811 - protein, 358 aa, unidentified
MVDKVTEAAVVGGVDTHKDLHVAAVVDQNNKVLGTQYFSTTRQGYRQMLAWMTSFGTLKRIGVECTGTYGSGLLRYFQNAGLEVLEVTAPDRMERRKRGKSDTIDAECAAHAAFSGIRTVTPKTRDGMIESLRVLKTCRKTAISARRVALQIIHSNIISAPDELREQLRNMTRMQLIRTLGSWRPDASEYRNVTNVYRISLKSLARRYLELHDEIADLDVMIAAIVDELAPELIKRNAIGYESASQLLITAGDNPQRLRSESGFAALCGVSPVPVSSGKTNRYRLNRGGDRAANSALHIIAIGRLRTDAKTKEYVARRLAEGHTKMEAIRCLKRYISREVYTLLRNQNRRINSIPITA

SEQ ID NO: 491812 - protein, 414 aa, unidentified
MEAVYRSVAGIDVHKKMLAVVVRQERGEQVEYEKRQFGTNRADIQHLAAWLQAHGASEVVMESTAQYWRPVWNGLEPHFRLHLTHPLKTQAPRGRKFDFRDAQRLADRWSAGDLQESFVPGSEQRAWRWLTRRRVQLKRELSVVYSHVEGLLEQGGIKLSAVVSDLFGVSGWAMLEHIAQGVTDVEVLAGEARGVLRQKILQLKEALAGQLGPVYLLVLRQQMDQVRLVRRQVEDINQALAVAMQEHLAALHRLSKIPGVDLYAAQELVAEIGPKAAAFASAERFASWVGVCPGSQQSAGVNYSHRSAKGNPYLRRLLCQIAWAAIHTKDTFFASLFARLKPKVQGKGAAWAVAHRIAKVVWLVLHQEVEYQEKGSAPPNERTLVRKFKRMLREFRSLGLDVRALLDQQLPAAP

SEQ ID NO: 491813 - protein, 387 aa, unidentified
MIYVGIDIAKLNHYASAISSDGEVLLEPFKFTNDNDGFCLLDSKLKSFEKDQFIIGLESTAHYGNNLLMYLVPKGYNVCLINPIQTSTMRKNNIRKTKTDKVDTYIICKTLMMHPHRFVTLYDLGLMQLKNLGRFRQKTVKQRTRLKIQLTSYVDQVFPELQYFFKSGIHHKGCYALLKEAPTPDAIASMHLTHLTHLLKAASKGHFQKETAVELRVLAQKSVGSSDKSLSIQITQSIEQIELLDRQLESIESEMKDIVTSLDSVIMTIPGIGYINGGMILGEIGDINRFSNPSKLLAFAGLDPSVYQSGNFEAKHTRMSKRGSRALRYALINAAHNVVKNNKTFNTYYHQKLSEGRSHYNALGHCAGKLVRIIYKMLTDNVSFNLD

SEQ ID NO: 491814 - protein, 346 aa, unidentified
MLYVGLDLSRKRLDWQALDREGGVAAIGAVPPDRDGLAALARRLGDASPVLAVIESMTGARFVHDQLELAGWEVRIADAVKARGIAPLACKTDRIDCWVLAELARLELVPEIWLPDPSVRAERERARFRLHLVKHRSSLKNRIHAILFQHGIPNASSDLFGAGGRRLLERLALPEPWASTVRASLALIDSLDEQIDACALELRELGADHRYIPLLLSCPGIGWALAYTIASEIGDIDRFQSPRKLVGYTGLCPRVEQSGERDRRGPLRKNGPNYLRWAYVEAAHTAARCHPPYTAIRERMQARHGKKRGTKIAAIEIARRLAEANWHMLTTNKPFTPAGAAASLAA

SEQ ID NO: 491815 - protein, 369 aa, unidentified
MFDYTKTVVGLDVHKESIVAAVLPPDSDRVALTTKFENTPAALKTFVERLRLRGALTFIYEAGPCGYQVHRDLTAQGQDCVVIAPGLIPKRPGDKVKTDRRDAEKLAQLHRAGQLTAVNVPTREDEADRDLVRAREDVLSERLRSRHRLGKFLLRHGLVWRTTKAWGSRHRVWLKELRFELASETRTFEAYLRGMEEVEARLNGLDREVLALAENGTWNKVVANLRCLKGVDTLSAMTLSVEVRDFRRFASAREFMGYTGLVSREYSSGEGVNRGRITKVGNAHVRRVLVESAWAYGKSDKAGPTLLKRREDGSPEAVATARRAQERLCRKFRKMVGRGKPRQKAVTAAARELAGFVWHIGRLSQEVRG

SEQ ID NO: 491816 - protein, 322 aa, unidentified
MAKCTTICAGIDTGKWKLDVAIDGYREQLRVENMAEGHEAVIAWLRRHRVKRVGIEASGGYEQAVVTELRRKKFVVVVFQPAQVRAYAKFHMRRAKNDKIDAALIAACTAAVRKVHAAPDPRLLPFAEQLTMIDQIGEDIARLKNRIESCRNEAINRLWKEDIARLEQRERVALKALVASIRKHSDLAERLALIHSVDGIGLPTAVAILVRLPEIGQITREQAVALAGLAPYDDDSGERSGARKIEGGRKRLRRALYTASLAASFRWNPRLIELYQRLTASGKEHKQALVACARKMLIFANTVVARGTPWRDEPPIRPLPTS

SEQ ID NO: 491817 - protein, 384 aa, unidentified
MKKNSIAKLQVSKSQIRRMAAKQRLTVGLDLGDRSSRYCILNEAGEKASEDQLPTTKAGLESLFAKMAPCRIALEVGTHSPWVSRHLAGMGHEVIVANPRKVRLITQSVKKNDRMDAEQLARLARVDPQLLAPIRHRGPEAQGDLAVIRARAELVDCRTALINTVRGLAKPMGERLKSCDADYVKESLADGLNEATQNAIRPLLKSVEEITKQIGVYDKKIQEIEKRYPETKLLKQVNGVGTLIALTFILTLEDAERFEHSRDVGPYLGLTRKQRDSGDSQPELGISKAGDVLLRRLLVQAAHCILRDGAPDSDLKAWGLTKVQAGAKTGSGKKGSKRRKKKAAVAVARKLAVLLHKLWVTGEVYDPQYNRKAVEAAKGKAKAA

SEQ ID NO: 491818 - protein, 417 aa, unidentified
MTKSNIARQLAQVQPRTLHAGVDLALEKNVVVVINEKAERLDHFSFPQDRGGYDYFLRRLEGLRQKNQASEVVVAMEPSNYFWKLLARELEEKKITYHLVNAYTVKKHREGDQLDRSKDDRRDAGQIAELSRNGKYTKTHLQQGVYEEIRQYATLYTQGVRSTQRERIILWGLVGQVFPELSQVFKDLDGGTCQALMMSCACAALICQNTEEAWIAQVRAVFNGKNLYVSKLRQVYQLAATSIGVSDGLQGIQLAIQLHMAHLRILQEQVEQVSKAMTGCLKTLPEAPYLLSILGEVSTALFLADVGDPQRFHAAAQWVKLAGIQPVPNNSGRKQRSQTPMSHQGRSRLRTLLYFTCLRMIQHDEHFGQIYRDLQRRQKNPLTKMQALGVLMNKLLHILWALVQNQTYYNPSFAQFL

SEQ ID NO: 491819 - protein, 355 aa, unidentified
MNSEKYIGLDVHQATIVVAVRDSTGKLVMESILETEATTILQFFAGLRGNLAVTFEEGTWSAWLYDLLNPHVEKLVVCNPRKNALLKDGNKSDRIDARKLAELLRGNQLKPVYHGENGVRMLRELSRSYLAIVKDLSRVMNRLKAVYRSWAIPCAGRDVYYRRHRAQWLDKIREAGVRRRAERLYEQLDMLQHLRQQARRELLAESRKHAITARLRQIPYLGPIRSALAVALMQTPHRFRTKRQLWAYSGLALETRISAEYRMVEGQVRRSKKLLSIRGLNKDHNHDLKGLFKGAATMASVHPGPFQDFYQAALAKGIKPTMARLTLARKIAAITLTLWKKGESFDAEKLKSQAA

SEQ ID NO: 491820 - protein, 392 aa, unidentified
MFYLGIDIAKVNHVASLIGEDGSILVKAMKFTNSNEGLQKLINSISDYDQSQIYCAMEATGTYWLSLFSALSDKEFNVSVFNPYQIKSFRGAYSNRKQKNDVIDSIIIAEFLRFNGIQQTSLPNDDLLALKNLTRYRSNLVDNISKAKIQIKGILNKVFPEYSDVFSDTFGEASKQILLNCPTPSEVMNFNTRKLANLLKKASKGRHGTDTVRKVKDLAKNSFGIKFTGDACSFEIKQLVNQIIFLETQVDELNLKIKEIYSKLDSHLESIPGIGKATAPIILAEIGDINNFSSPNKLTAFAGVDPSENQSGNKKSTDEKTSKRGSPYLRHAIYQAAFIASNNDPVMHDYYVKKRAEGKHHYVALAGVERKLLGIIFHVLKENRDYRPPVCS

SEQ ID NO: 491821 - protein, 321 aa, unidentified
MEAVWVGIDVSQEWLDVGIWPGAEHFRVSNAATAVAALATRVRALAPRAVVLEATGGPEVLAASELHAAGLPVAVVNPRQVREFARSLGTLGKTDRLDALVLAQFAQASESNGRLTPLRLAEAAEAELKALVARRRQLLDMLVAESNRRLRATKVVRKSIVQHIKGLKRAVAGVEHELKQVLASAPAQQAKAALLSAVPGVGPQLSFTLLAELPELGQLGRRQIAALVGVAPYPYESGKFKGRRTIWGGRARVRTMLFMATLSAVRYNPPLCAHYQALLARGKAKKLALVACMRKLLITLNAILRDATPWNPNHLDFQHSR

SEQ ID NO: 491822 - protein, 419 aa, unidentified
MKSASTTPNNKLPDQPVNRVTAGVDWASEDHAVSIVDDRGREVARKSVEHTAAGLRALVKFLVNHGVGEVAIERGDGPVVDALLDADLTVVVISPNRLKNLRSRYGSAGNKDDRFDAYVLADTLRTDRTQLRPLTHDSEATKTLRATVRARRELVKHRVALCNQLRAHLQAAFPGAVGLFKDLDSQISLRFLARFDSQERADWLSVKRLAAWLSSVGYCGRKDPADLFAHLQTAPRGPVGPDGAARAHVTRAMLNVLNELVEQIATLEAQIAEQLELHADAHIFQSLPRGGTVRAARLLAEIGDVRGRFPDAASLACLAGVAPSTKQSGKHKAVTYRWAVNKELRDAVCDFAGDSRRANPWAAKIYNDATARGKDHPHATRILARAWLGVIWRCWQNDTAYDPDQHGALRALLDAADAA

SEQ ID NO: 491823 - protein, 495 aa, unidentified
MSSQEKSVQERLQHLESHYTGRVAALRQHLAQVGYERTLVVLLDIGKNVHWLTVLTAASRELIRPRKLPATRSGLRRFFGLVEPLIHSSDFDLVLLGHEPTGVYHEPWARTFMNRYAPYFDRTDPQLRYIFFNPYQVKLARLQTHLRHRKNDPRDLAAMFDLMTRGLGQPAFLPTGTELHVRNEIGFIRAQSRLLGRLQRQLFQQLDRLWPGAVVNVAKFARAHPELDPPTPIVQTHPFQRKRLRVLLQHCPDPYDLRAMSDREILALYRKHVGRAGAALVNVLRTWADNAVLLPPQVSVSLAEQLHRLFAQYLYVETLIEDAHGRLEPLIPHTAARHIPAIPGLNENDAARYLAGIGSANRFQRAAEVWALAGFDPVTDGSGDAPDRVGHISKHGDPAFRDTLYQMGYRAALHYAPIGLTFLDAYDRGLSEVEATIHAAHRVNRICFHLVHQDEPFQNQSTPELERERAHRWKLFQAAKKRRRSRRKRGKKRRR

SEQ ID NO: 491824 - protein, 401 aa, unidentified
MKYGVGIDVSKGKSTIAILSIEGEVIEMPFDINHDLTSMSSLEEKLGKIPKEDIKIVLEQTGTYHLPILTYLVDKGYCVIAENALKIKKYLDRSLRKAKTDKKDSLKLAEYACDNWYKLKANKIEEEKYQQLKFLSRQYFSFNDIKVQQKVDFSNLCDILFPGYYQLLKEYNFILGLKIFEKYNDPEKIRNMKEDKFIKDIDKIAQKIGQQRAGRTFAIKVYNLAKESYSSCPSSEYTQLIIDKSVAALILSIESAKEIITKMNELAKTMEEYGSVREMSGVGDRLTPILIAEIGDIRRFKNAGSLIAYAGIDAPPYQSGQFEAVHRHISKRGNKHLRKAGYEVMKSIKSFCSDGNEFYDYMLKKESEGKCKKSAKIATLNKFLRQYYGTIKKKYIELGTW

SEQ ID NO: 491825 - protein, 421 aa, unidentified
MTTIPFTTDQSTWVGIDIAKKHNDVLIERPRRRRQHFKVANQLEDYRRFAKFLGDLEERPVIGFEATGNYHRTLAFFLAEKGFALRLVSSVAAARTREALYNSWDKNDPKDAQVIIHMLKTGVTQHYHDPLTHGINELQELSKTYFQISLHKVRIQHSILTHYLPLYLPEAEKYMKSRRAQWFTHLLERYPCHAAVAKFSREEFIEDAWVYVERKVNKTAFLEDFYATASQTIGLPVSEESEAIRMFRIVLREHQRLCEIRADIEKEAESFLGENADYVRLKTLPGVGPILALTILAEAGDLRRFPHHRQFLKFCGLDLSSQQSGQFSGKKKLSKRGNRHLRYAFWLAATVAIRMRENSFRDKYARYVASDPTNPDLKRKAFTAVAAKMARVAHGMIKHETNYRPFHERAVPGGIIPAKGR

SEQ ID NO: 491826 - protein, 399 aa, unidentified
MAASPRVVIGADTHLDTIHLAVITDAGKPLADSEFPTSPAGYGEALRWARSFGIIVIAGVEGTSSYGAGLTRVLQAAGVEVAEVSRPDRAARRRQGKSDPLDAYSAGRAALAGHGLAVPKDANTGALRALLTARRSAVKAHTAATNQIHALLVTAPAELRERYRRHTATALVKALARCRPAAHSDPTTMAVLTAAKALAQRAELLEHQKQDLSAHLDVLVRQLNPALRAAYGVGADTAAQLLVTAGANPHRLPNEASFAALCGAAPVPASSGKITRHRLSRGGDRAANNALYRIALVRMSAHPQTRDYVQRQDTNGRTKKEILRLLKRAIAREVFRLLTRPGPIDDYSDLRPARQAKNLTLATVAHHFGVPIITVSRLERGHQRNDTLASNYRQWLDAA

SEQ ID NO: 491827 - protein, 341 aa, unidentified
MEEYVGLDVSMKETSVSIRRAGERIWRGKCASDPRIIAELIRKRAPAVKRVVFETGPLSIWFYHSLRTEGLPAICIDARHAKAALDMATNKTDANDADGLAQLAEVGFFREVRVKGFDSMLTRTLVGARTRLVRITTELSNQIRGVMKTFGLLVPAGKGSIFEKNVRSLLTDQDGLASIVLPMLEAWRGIRIRAAELGRQLVRDARQNQACRILMSIPGIGAITATAFTTAIERPDNFKKSRSVGAWIGLTTRRYQSGEVDYDGHISRRGDAHLRGLLYEAAAVILTRSSTDSTLRTWGLKLRERIGFKRAAVAVARKLAVIMHTMLKSGELFNPNAGAAA

SEQ ID NO: 491828 - protein, 461 aa, unidentified
MSKGSGTTRGDRRRNARRERLRQVLPRDGAVIGIDLAEDKQAIAVIDHDLRVLARKTVRVKAFRLGEALDWAVAQARAKGFASVTVACEPTGPRWLQVQRLCGERGLPLVCIQPLMSHIAREQQDYTTHKTDEADCVLIARLAVELHCYLPEQLEETWAHLRHLGRRRAQLITAATASAQRIQDFMSVAWPTVTETCARPLESNTWLAAVQLVTSRCGGQPGKLAVMGPEAFTTLVRGAVPGWGGKKAWGTICGRIFAALTDTEGVVVSSRRGLLRRCADELGDLQRTRAQLRAVEADMVAVLDELGLSRLADIPALTAVGAAAILAETGDPRRYDSSSSLVKHAGMSPSDNASGAFYGQAHISRRGRPGLRLAVWRAVWPMLRFNPVMAAKYAAMTSAADDAAQADAGSRQATAAGAAARARRAKARVACAASLLRWIYSMVVHDAGWDPGAASCPAEAA

SEQ ID NO: 491829 - protein, 457 aa, unidentified
MEDTLAQRNRISPPRSGKTRAALSLTHPNAAGIDIGSASHYVAVPADRDDEPVREFQSFTADLHRLADWLAACGVDTVAMESTGVYWIPLFELLDARGFTVLLVNARHVKNVSGRKSDVLDCQWLQQLMSFGLLRGAFRPADEVCALRALSRQREMLLRSQSRHVQHMQKALTQMNLQLANVISDIVGATGQKILRAIVAGERDGRTLAALKDARIKASTNEIAQSLQGSWRAEHLFALKQALALFDFYATQLAECDAAIEAQLQVLAAHSADPQPGKKRSRSRNAPKFDLRSRLFRMCGVDLTRIDGIDVTTALVVVSEIGTDMSRFPTVKHFTSWLGLCPGTKITGGKLLSGKTKRCANRAAQALRLAAAALRSSKSALGAYFRRMCSHMDKPKAVTAAAHKLARLIYTLLTKGEEYTDQGQDYFEERYRERVIRQISQRAAKLGLSVVPTPHAA

SEQ ID NO: 491830 - protein, 340 aa, unidentified
MNEITTVGLDLAKNVFQVHGVDAEGTTVLRKQLRRAQVLAFFSRLPRCLVGMEACATAHYWARELRTLGHEVRLMPAQYVKAYVKRNKNDAADAEAICEAVARPTMRFVPAKTAEQQAAVLLHRGRERLVRQRTMLVNALRGHLAEFGVIAPQGLRNVGRLIAIIRDEEDARLPGLARQLLQVLAVQIEQLEAAIAALEKQLMGWHKSNPVSQRLATIPGIGPIIATAIAAMVAEPSGFRSGREFAAWLGLVPRQNSTGGKNRLGGISKRGNQYLRRLLINGASANLLRSKATNADPWVIGLRRRRPSLVVAVALANKTARIAWAVMHRQENYQRMATAA

SEQ ID NO: 491831 - protein, 343 aa, unidentified
MDKVSTLGIDIAKNVFQVHGVDEASEIVVRRQLERIQVLKFFAKLPACLVGLEACATSHHWARELSKLGHDVRLMPPRYVKPYVKRNKNDAADAEAICEAVQRPNMRFVPIKSPEQQSVLMMHRTRQLFVRQRTSLINAIRAHMAEFGIVAGIGRNGVEKLLHIITKAQDKRVPETARESFLALAAQLELVKRQILQADRRVLAWHRTNKTSKRLEAIPGVGPLIASALVASVPDPSAFRSGRDLSAWIGLVPKQNSTGGKDRLGSISKAGNRYLRQILVVGALSVIKRAKQLGYTRHPWLVKLMERRSPKIAAIALANKIARIAWAMMVRNESYRTPLPASV

SEQ ID NO: 491832 - protein, 328 aa, unidentified
MSASPMVPLGIDISKVSFDVALLRDGKRAKRAKFDNTAAGFEQLIEWLNAQDIEQTHACMEATNTYGHALARYLHHQGHQVSIVNPARIKGYGKSQLSRTKNDAADAGLIARFCRDLKPSLWHPAPAEVDKLQALTRRLEALEHMMTQEKNRLQLCDDDTLKADIDAHIEFLEAQETALKKRLQQHIQAHDRLAEQQTLLESITGVGTQTAMTVLGEIGSIEVFGSARQLAAFAGLTPQEFQSGSSIHGKTRLCKIGNARLRKALYFPALVMIRYCPEIQAFRQRLLDAGKQKMQVVGAVMHKLIRIIYGVLSSGEEFDPTKLVPQNT

SEQ ID NO: 491833 - protein, 427 aa, unidentified
MPYRIAGIDVHKRMLAVVIADVAVEGEYEFERQRVGASPGELRTLAEWLVEQEVEEVVMESTAQYWRPVWSALEETWTTRRRSREEAGPMSGMLHLAQAQSNRGAAGRKKDFPDAERLVKRYVAQELTLSFVPDGEQRLWRTVMRRKSQVTCNRVQLQNRLECLLEEARIKLSSLVSDLLGQSARRMLQALADGETDPSQLAALADWRLRATPEQLCDALGACRDLHPVYRQLLQMTLEELRLIEAHLHKLDQQMASWLIAHQDAVKRRAEVPGLGVDSAQQIIAEVGVSAATFPSAKQLASWVGACPGDSESAGVSYSHRSPKGNRPMRRVLNQAANAAVKTKGSIFELVYRRMVVRLGHAQTIGAITHRLCRLIWKILHQGVRYEERGPAVTRERRQKRAAKMIRDLKSLGYRVEFVGSRSGSPA

SEQ ID NO: 491834 - protein, 370 aa, unidentified
MLNTTTFVGLDVHARSIKAVALDAMTGEVRSATFGYDAAEVAGWVSSVDPSAKCVYESGVTGFDLQKRLASMGIDCVVGAVSKMIKPPADRKRKNDRNDAEFLARMLSVGNVVEVWVPDDGCEAARDLSRALDDAREDLKRRKQRLSKFLLRHGYAFSETTPTGRRKGNWTAAHWAWIKSISFPEKADDDVLAYYVDAVRQAMEDKARLERLVEAEASKPRWKKRVDSVRCLKGIDVTSAADLVFEAGEFSRFKSARSFAAWLGLTPSEHSSGESVRQGGITKAGNKHLRRVLVESAWHYLGCSPHSKDLAKGQVPDPAARRHAAKGVRRLVERRRAMLERGVHKNKANVATARELACWCWAVGRMIENG

SEQ ID NO: 491835 - protein, 343 aa, unidentified
MNIVSVGIDLGKVTFHLVALDDHGKVVVRKKFSRNHLLAYTANLQSSLIGMEACAGAHFIGAALRDQGHDVRIIPAQFVKPFVKSNKNDFIDAEAIAEAVTRQNMRFVPIKTEDQLDLQALHRIRERLVQRRTALINQIRGFLLERGLTFAKGASHLRKNMADIVEDADANLTRRMRILLDRLWVEWRQLDYDIEMASDDIERIASEDEACQRLRQIPGVGPLVSTATVAAIGNGAAFRKGREFAAWLGLVPRQHSTGGKTKLLGISKRGNGYLRRMFIHGARAVLLRVKYDTGNFGQWVRQLEARAPRNKVIVAVANKLARVAWAVLFNGVPYHYEAVCGQP

SEQ ID NO: 491836 - protein, 407 aa, unidentified
MDLLKTVFGIDVSSRKSNVCIMVNGQKVNDYAISNDMVGFNRLLGDLKQVTKPQIIFEATGVYSRRLQAFLDMHELRYVMMNPLEAKRKTKDDLHQNKTDKLDALYLAKLQSEHPQRLAYVQNKEYQELMANNRIYEQASHDLITNRNRLHKAIQLTFPEIEHLLANPRGKNYWSIVLRFPHPDIVLETKEADIIDFLKGLTGIGKKRANDIAQSLIRLAKVACPAVKKNSAHIRGLKMAINNILSAEEECQTALQEMAKLAPKRDLEILTSIPGIGENTALRIISELGDIRRFNNPSQLNAFVGVDPQVYESGNLTAHLSISKRGTAIGRKVLYLAINQIQSAKKAGNPCHIADYYEKRKRSSETASHKKAAIASIHKLLRTMFALIKNDQLYSYDVAKHNQRLLS

SEQ ID NO: 491837 - protein, 435 aa, unidentified
MLGGSVPAFSSLFLRRRFCCVKVVFPICCGVDVHKTFVVATIITTPADSLQPIYQKKRFSTFNSDLNRFADWLLEHGCLDVCMESTGKYWVPVFNILEKRGIQVVIANPKWVKAVKGNKDDTKDSKWIGDLFRIGLVKSSFIPDLNIRILREFTRYRYKLISMKSSEKNRFQNAFTVCNVALDSVVSDMFGKSATAITDYLTSDESFDPEHCVSLLQRSLKKKAEQVLESIDGFSIAEEQKARIKIIREHYDFIEKMIAKVDTCVNEMVVTYEGEINFLCTIPGIDRNSAITIISEIGTDMRQFGSSKRLCCWAGLTPGNNESAGKKKSVRISRAGVYLKPALVQVAHAAVKDKENPYYALKYERIAKRRGKKRAIIAIARMILTAIYSMLCTGEIWNPVDLYKIDMPEHLKEQQLAKAIKQATRFLEKHGLSVA

SEQ ID NO: 491838 - protein, 365 aa, unidentified
MKGYVASALDQEYDGRQFVGIDLHRARSVVVRTTETGDVLEAVQIPNTPLALAQVMTRAGEHPEVVLESTYGWYWAVDTLGDLDNEPAVHLAHPLGVKAFEYRRVKNDLRDAADLADLLRLGRLPESWIAPAATRELRELVRHRAKLVALRSHCKAQVHAVLSKNGVQVPMSDLFGLAGTALLDGLLAGAALPRPYAARIASLRRLMDSLDFEIDVFEKLTRGRLATEPGYRVVQTIPGIGPVLGAVLVAEIGDVHRFTTADKLTCWAGLTPTHRESDTKVRRGRITKQGSRLVRWAAVESVKKLPARSRIGDFRSQVAARRGKNIGTVAAARRQLEYVYYALRDGRVRALTPTVAAPAAAGKVA

SEQ ID NO: 491839 - protein, 339 aa, unidentified
MQEKKKMIWAGFDVGKETFSASLDQVTENGKAKITSLPCRDFKRTPEGLTKFFQWAAGFVSGKDLHIVMETTGCYSQQLIDWINLSHPEVKVTIENARNIHAFIESLNLPHKTDKLDAQAIARFGTERQPHPTKRPSKTILTIRELSRERTALIKNRVDLQNRRDTITSSVVRKINAQTIATLTMQIEKIEQEIKACIVEDEEILTEIHIMTTMPGVKFVSAYSILAEIGSLKQYSIKELSAISGLAPRIRQSGSSVHSSFMSRRSSGRLRQILYLDSLPGVPKIPVLQDFQQRLLAKGKTKMTVRCACMRKMLLMLRSMVVHNRAFDEKFLKNLAIST

SEQ ID NO: 491840 - protein, 340 aa, unidentified
MEKRFIGIDLHRNRFTCCIRLENERTYVTEWELEDLGKFVKKLRASDEIAVEITGNTRLFFDAVAGHVARVVVVNTNQFKVIRQSVKKTDPHDARALALYLSKNMLPEVRMKDKEHGQLASLTQTRDTLVKLRTALKNKINNILSARGLNLAKEALSSEKKLAEVLELPFEEIVRIELRVIVEQIRSLNKSIAELEKTIGEEGSKLEGHTGLSSIKGIGKITGAILLSVIGDVNDFADEGHLASYFGIVPRVSNSNQTERSGRIHKRGTKLGRTALVQSALIAANYSPYLKRFYEQVKARRGAGKAIIALARKFLGIIYRTLKNKWVFDDFPNFVLAEAS

SEQ ID NO: 491841 - protein, 344 aa, unidentified
MSKVTTIGLDIAKNVFHAHGADERGTMAFSRKLSRGKLLDFFATQPRCVVAMEACGGAHHWARELTRLGHDVRLIPPAYVKPFVKRQKNDAVDAEAICEAAQRPGMRFAAMKTEAQQAAGLVFRTRDLLVRQRTQLINAIRGHLTEYGWVAPRGPAHVAMLADLLDEEEMASTLPEAARPMFAIMVDMLAELDKRIATLDREIAKRARDDEAALRLMTIPGIGPITATAIIALAPPMETFRKGRDFAAWLGLTPRQHSTGGKQRLGSISKMGERTIRRLLIIGGSSVVRHACRRGAPAGSWLEQMLARKPRMLVSVALANKMARTVWALLTRQEDYKAPAAVAA

SEQ ID NO: 491842 - protein, 386 aa, unidentified
MQADANQTESSVAVRTDLAAIFVSLELSRSKWLITSLSPGAGEKMSKFVVPGGDVSALLERFEHLQRKASARSGRSFRIISIQEAGLDGFWIHRVLEDSGIESYVADPASIAISRRRRRAKTDRIDGETLVRALLAHKRGEPRVCAMLHVPTPDEEDSRRLVRERKALINERIRHVNRIKGLLFSQGVSGYEPLNRDRRERLEALMTGDGRPLPKALKAQISRELARLELLIEQIGDVEEARDAVLAEAEHSTRGPALLLNLRGIGPEFAAVLWSEGLSRRFDNRRQVAAYAGLAPTPWQSGQISQDQGVSKSGNPRLRATLIQVAWLWVRHQPTSALAAWFKARVSQNGGHRKKSTIVALARKLLVALWKYVNAGVVIEGAVVRT

SEQ ID NO: 491843 - protein, 427 aa, unidentified
MTDHVQSKAYNSWMAIDIAKDFNVVMVETVDGNTKRFRMANSASDHDRLVEVLRSLPQPCRIGFEATGNYHRTLAFRLVTEGFDVCLISSLASARFREVMFNSWDKNDPKDAGVLLELLKQGVVQTYVEPMQSGFHDIQELSKTYYHITLSRTRLQHSILTHYLPLYFPEMGKWWSSTRSAWWVNYLLHFPTPASVTQYSVEEFCAIASPVIGRKVNKAAKLLELYATAQHSIGLPIREYSVACQTFRLQLQRYQELTTLRQQLEQQAESVLNGHPDYVVLKSVPGIGPIIALTILAEGGDLRRFAHHRQFLKYCGLDLAKNQSGTFRGQEKLSKRGNARLRLALYMATTNAIRQTENSFRNKFHRYTLASPNDADLKRKGMTAVMAKMARVIHALIKSGTPYQGYFEALPSGSIPLCGAVGAYRTP

SEQ ID NO: 491844 - protein, 333 aa, unidentified
MQNFYFIGIDVSKKKLDICVMSNSKVLKEEQVSNHPQAIATVIAGIKEELSMSNDSLIICAEHTGQYTYPLICACKSVGSKLWLENASQIKYCSGVTRGKNDKVDARRIAVYAMRFFDKAKPYQRPTEELMRLKQLEAERSLYLTDLAKYKAQLSDQEGFMEDKIFKRKAKRLKEMIKSLEKTLKEIAQEMADVIYSSEELSRQMRLLKSVEGVGPVVAMNMIIATEAFTRFDNPRQFNCYVGVAPFAYTSGSSQHSRNRVSQRAVKYIKCLLHMAAVAIAHKKTGDLKTYFERKVAEGKNKMTVLNAVRAKLVARMFAVIRNNRVYQPILSV

SEQ ID NO: 491845 - protein, 359 aa, unidentified
MGLRRIIALDLGKFKTVACVMDALDRAHVFETIEMSPASVHELLARHATEDPADTLVVCETCDCCGWVYDACVALGLPAKVVAANTEAWHWRRVKRKTDRDDALKLARLALLEQLNVVHMPSPAQRQRRRLVLHRRSVVSRRTMSRNAIRSIFSQQGIALARGGKQWTRAGVAQLKSYARPLADCADDLDLWRGRLHAELQLMADADAQLKVFDAKLDALSAGDARVALLQTVKGVGPRTAEAVVMHLDDPHRFATADHVAGFAGLVPKQLESGQTSRFGHITRRGPGLLRSMLVESAWSVYRHNDWARTLVQKVSRGSKARRKIAIVALARRLLTILWAMLRDNQPFRAPGAMSLTGG

SEQ ID NO: 491846 - protein, 409 aa, unidentified
MLFVGDDWAEDHHDVEVQDERGRTLRAVRLPEGVDGVARFHDLVAGFLPEDASPAQVLVCIETDRGPWVRALVAAGYQVYGVNPKQAARHRELMSISGAKSDKADARTLADMVRTRRHQLRQVAADSDIAEAVKVAARAHQTLIWERTRHTLRLRAALREYFPAALQAYEVLTLTGSDTLELLAKAPTPAAAAKLTVAQISAALKRARRRDIPTKAAAIRQALRTAHLGQSEIVTGAYAATVRATVAILQTLNTEIRTMEGQVEAHFGQHPDAEVYLSQPGIGAILGARVLAEFGDAPGRYTDARSRKNYAGTAPITRQSGKTKTVHARFVHNDRLVNALHMQAGAAILHDTAVRAYYNELRARDVSHPAALRQIGNRLVGILHGCLKTNTHYDQTTAWSHRTALPTAA

SEQ ID NO: 491847 - protein, 327 aa, unidentified
MNTIGIDVDSVNLVCRIRRDGKDFPEMIFANNDAGHQKLIRWATRGGKQARICLEATGVYSLPLALALDSATNIEVMVVNPKAIKNFATAIMQRGKTDSMDAATIRNFLERMPFQAWHAPSNELLEIQHISRRVVQLTTEVTRERNRHIAAKRVGTHGTVVTNDTAVNIRHLERRIVHLEQVARDLISCVPALADKLALITSTTGIARKTGPRILAELLVLPDDMLGPQWVAHAGLDPKPHQSGTSTNKPRRITKAGNRYLRDALYFPALVASRRDPNVKAYYDMLIERGKKPMQALVAIMRKLLLAIWGMLKNNQAWDGNKFFKLA

SEQ ID NO: 491848 - protein, 431 aa, unidentified
MSDGMASRGRDAGAGVGVPFVLGEEPGAIVAGFDVHRRQITVDALDTATGEVWRGQIDSTPAAVEEWLAGFPGRVVHVAVEACTGWLFVSRALERRGAIAHLAEPVETSALRGRKRRAKTDRTDAKWLRQLLYDGRLPEAWAPPEHVRQWRSRARLRNTLVAERTGWVQRIRATLYHHGIPGAPDDLRTLAGRRFLAGLELPVDARERIGVALEMIDLLEIQIAGIERDLRPLARRQAGCQALMAQYGMGEISALVTLCELGDVTRLHASRQAVRLAGIDIGVHRSDRHAQLGKLTRQGSAPLRWALFEAAQSASHKGSPDYHDYHALKARGLSHTRATLTIARKLARRSYHILRALGPAALDPPTTPDQRSDQAHPSPMRSQRAASSRSYRGTHALRGGPPKTERPQSLHRNDRSTIKSPASTTRGRGPR

SEQ ID NO: 491849 - protein, 322 aa, unidentified
MLNEKGKKLKSGRVANYRSELEKFLDGRGEVKAVVEAGRSSYTMVDLLDELSIDVTIAHPKQVKAIAKAKIKTDKRDSFMLAHLLRTDLIPEVYKRSRENRGYQRILRQRAFYVGSTTRTKNKIRALLAQQGEELRDKVSRKKNLFTGSGVKFLKTLNLPDTDKKLLSALLKTFSHLDERKKETNGLVEKLYLQIPEARLIHTVPGYGVFLSVLTAVEIADIERFSEVSKFHSYAGVIPSTHSSGGRTYHGKIVKQGNRWLRWAAVEAVWPSLKADFDMRCFYNKLKKRKGPNPAKVAAARRMLTIIFRILKENRPYIPYKR

SEQ ID NO: 491850 - protein, 316 aa, unidentified
MSENKTPCFVGIDVSKNKLDICILPDRLFWEEANTGDFKELIEKLKSYSPKLVVMEPTGGHEKAVLKALIQANIPSAREHALRIYHHAKSRGKRCKTDPIDAESIAHYAQCYWEQIQILQEMPECQEELQQLMRRRLDLVELSTQEKNRFQSPQLCERVKSSSETIIKALEEEFRNIEMELEQRLTQDKAMSKKKELLLGVPGLGEVSANMLLIHLPELGKQSHKSIASLVGVAPYARQSGQYRGQQKISGGRAEIRSVLYMAALSAARFNPILRDFYLRLKARGKKPKVALIACIRKLLHILNAMIAKQEAFKAS

SEQ ID NO: 491851 - protein, 457 aa, unidentified
MYRELHSLRQALREELKGTLPPLPGVESDKLLETYLNQLTLYVGLDVADKTVTLLALNANQEELGHLLDAPNTLKGYTQIGDWLESLRVQHHLRIIAVACETTGVFYWGIWDYLAQRPNLGRVLYNPRTTEHMGEVLSKRVRTELVDALLLAEQLRLGSTPEVVLTENVELLSARLCSRAARDAAQTINRKKNQLRSLLRGYNPVIAQVFQGQKLHHPAVYALLKQYVFPDEFVAAGVEALTTILTEHSRSAFGAEQAQQLVNLCRDHLPRPIRHAIVRQRVQDLIEEITLIRKHQTAMLKAGYVLIKDRPEAKRLKASTGAGISNTLALVSEIGDIQRFPDGEHLASFLGLTTSKHISGTTIFHSKHITKQGAPNGRYAAVNMALHLAVRVPKYQAMYKAIKSRKPPRKGHFIALVAIARDFVTNVLYDMWRHDRPFFIKVEDYRQYRKEHSRDKQ

SEQ ID NO: 491852 - protein, 417 aa, unidentified
MDVHRDFCEIAIAEPDGQVRSAGRVNSKVEELELFEGSLAADDVVALEATSGAGLIAEIIQPHVAAVVVANTRKLPQISRAKAKTDRLDARTLARLAASGFLETVWAPDERTRALRRLCARREALVRARTRAKNEAHAVPARNLCGRPPATDCFGKKGRAWLAELQLPVDERLTLDGCLRQIDFLDGEIGALEAALATQALGSPEILRLITVPGVNLHTAAAFMAAIGDIRRFPSARQLVGYLGLDPRVRQSGNADARHGRISKAGSSLARGMLGEAAWSVAQTPGPLRAFFERIRARKGPQVAATATARKLACLFWCLLTREEDYAYARPSMTRSKIRRLELAAGAPPRKGVRGIAGNKNAQTREAEREIARRAETAYRRTIADWKATAPTRAGAGATPGRASSRPTKGKAARQTP

SEQ ID NO: 491853 - protein, 395 aa, unidentified
MKKIVHYIGLDVHKDSIAVAIAPQNSTEVRRYGIIGGTLQAVDNLLKKLAKPNLELRLVYEAGPCGFVLCRHLRSKSIHCDLVCPSLIPKKASDRVKTDRRDADQLARLYRASELTPIHVPDQEDEAIRDLIRARTAAVCDQRRARNRLKGFLLRLGFRYTGKTSWNDAHKRYLSGLLMPRPAQQIVFQEFIHAIDDAAERVARLNTAVADALPGWKWEPVVRALMSLRGMQELSAMTVIAEVGDLSRFENPRSLMHFFGLTPSEHTSANKRVQGPITKCGNAHCRRVLTEAAWHYRLKPLVSEAMQKRQEHQTKEVRMLAWKAQERLHKRFKHLAAHKKSVVALTAIARELVGFVWAIACKVKPAQKPPAPEVIRTCQGKVYRLNPQKKMPKTQ

SEQ ID NO: 491854 - protein, 318 aa, unidentified
MVYIGVDLHRKVSEVAALKSTGALRWNRRIRSQPEDFLRIFGDLKEAPAGVAFEATYGWGWFADLLAELGLPAHMSHPSGTKAISAARVKNDAVDARTLAHLLRTNLLPEAWIGPPACREARRLVRTRTALVRFRSGLKCQVHAILAEHGVQLPELTDLFGKRGRQFLERLSVPQLSRCCVDAQLRMIDGLGLEIRGLERELVTLLRNDARIQRLRAIPAIGFFTAAAVVAEIWEVTRFLSPDRLCSWAGLTPSARSSAGHTRRGHITKAGSCLVRWAMVEAAARAPRHAPHRQFFVRIMRDDLAGATSPGSRSPGVS

SEQ ID NO: 491855 - protein, 386 aa, unidentified
MQDHEPKGQTAIRTDLGAIFVSLELSRSSWLITSLSPGGGEKMSKHSVPGGDISGLLTLFLRLRERARKRTGKDFPIIVIQEAGLDGFWVHRALEQEGVESHIVDAASVMTSRRRRRAKTDRIDGEALLRALMAYKRGEPRVCAMVRVPTAEEEDRRRISRERKTLTAERVAHVNRIKGLLFSQGIAFKPLYGNRHARLEQLRTGDGRALPEHMKRQISRELDRLELLLEQIKAVEAERNTMLTALEGEKIPTPAKMLIRLRGIGSESAMVLWSEGLFRHFDNRRQVAAYAGLAPTPWQSGTIDREQGIAKSGNHRLRTTMIQLAWLWLRHQPGSALSRWFHERVERSGGRFRKTMITALARKLLVALWKYATAGVVIEQAAMKPL

SEQ ID NO: 491856 - protein, 360 aa, unidentified
MFEVTYAGLDVHARSVVGAAIDGVSGEIRSLRLAPETDAVVAWVVSLPGPVAAAYEAGPTGFGLARALTVAGVRCVVVAPSKVERPPGDRVKTDRRDAERLARLLRIGEVPAVRVPTEAEEAARDLVRAREDVRGDLMRARHRLSKLLLRHGLVWQGTAWTQEHESWLRSLSFERPGVQLAFEEAFDTVLSTHARRGRLDGAIEQMAAVSPFAPVVGRLKCLRGVSTLTAFGLAVEVGDWHRFTGATIGSYLGLVPSEASSGQRRVQGAITKTGNSHARRLLVETSWHHRKRYRPGRELMRRQAGQPPAVRDRAERGNRRLNQRWKRFDARNKRPTIAAVAVARELAGWCWSLAVMDEPS

SEQ ID NO: 491857 - protein, 451 aa, unidentified
MDNKQISLEVVNPNAAGIDIGSRSHWVAVGQNAEDVKEFGVYSQDQLAMCDWLRSKGVTSIAMESTGTYWQNLFSTLVGQGFDVILVNGRQTRNIKGKKTDIKDCQWIQKLHSLGLLSASFLPDSETDTIRTYSRHRNNLLNQSANCTKRMQKYLRLMNMRLDVVVRDIVGLTGQSIIKAFINGEHSGRKLAELRHFNCRKTEEEIAKALQYNGRKDYLFALSQEWESYQHIQSQIKNTDAQINQLLKDIIDKDNNKKQHVAQEKPHKRKNKNGITDTDMNRISCQYFEGVDLMEIEGFNEGLVMCLISEVGMEGIKKFQSAKQFTSWLRLAPNNKISGGKILSHHLPKGSSRLKIAFRNTANAIGNLKDGWLVDFFKRINYKKGREAAVSALARKLAVIVWNMITKATNYNPPSKYMYLDEKRKLNIVKHIKKQIAKFDLSKEELGYAIA

SEQ ID NO: 491858 - protein, 373 aa, unidentified
MTQSTTKLFVGLDVHKDSIAVAYAPQGRGAEIISIGSFGTRQCDINKFLKKLLAHSRNIVFAYEAGPCGYWLYRYLTKKGHTCLVVAPSLIPKRPGDRVKTDRRDAIMLARTLRAGDLTTVYVPNVVDEAIRDLSRAREDAKKDLKSAKHRLKSFLLRQDIRFEGKAGWGPKYLRWLGNVACETPAQQIVFQEYVRAITERHERVERLEAELRDQVDGWRLKPVVIAIQALRGIQFITAATLIAELGDITRFDNPKQLMGFLGLTPSEYSSGRKRKLGGITKAGNSHARRVLVEGAWSYRFPARVSRHLQYRLERVPQEIQDISWKAQVRLCKRYHRMIAGGKNKNKVVVAIAREMAAFVWSIAMRTPLEDVN

SEQ ID NO: 491859 - protein, 347 aa, unidentified
MTTLEATRGITGGVDTHRDVHVAAALDPLGGVLGSESFPTDVAGYQALLKWLEAFGQVTKIGVEGTGSYGSGLAGYLRRSGIEVIEVDRPDRQKRRRTGKSDPLDAVEAARAALSGRATGKPKSRDGAVEAIRVLVVAKRSARQARVKALLQMRHLGITAPDQLRCRLSGLSVEALIAEGIKLRPTRSGDPVMSATKASLSSLAHRICALDDELAELDERIEGLLVATVPSLLDLFGVGPDSAAALVVAAGDNPERLHSEAAWAHLCGASPIPKGSGKSSGRVKVHDGGDRQANSALWRIVVVRMAHDPETRLYVERRLKEGKNKHEVIRILKRYVAREVYRHLPRG

SEQ ID NO: 491860 - protein, 343 aa, unidentified
MQAVTTIGLDIAKSVFQIHGVDAAGNVIVRRQLKRRYVLPFFQRLPPCLIGIEACASSHHWSRELKALGHTVRLMPPAYVKPYVKRQKNDAADAEAICEAVTRANMRFVETKTPEQQSCLMLHRTRHLFIRQQTAVINAIRAHLAEYGIVAAVGRNGVEELLGVVADPSDKRVPEIARACLAALGAQLRMLKAQILEFDRMITAWHRSNETSKRLDAIPGVGPALATALVASVPDPKAFRSGRNFSAWIGLVPKQHSSGGKDKLGSISKQGDRYLRSLFTAGALAVIRYAKIHGTKHRPWLTALLARRPAKVAAIALANKIARMAWAMMAKGERYKEPVALAA

SEQ ID NO: 491861 - protein, 415 aa, unidentified
MVDVIVERCAGLDVHRDTVVATVRVPGSRKSRRRRLQETRTFGTTIGQLERLSDWLAECGVTRVGMESTGCYWKTVFYALEDRFDCWLVNAKHLRNVPGRKSDVIDSRWCCELVELGLVRPSFVPPPEIRRLRDLTRLRSTQVQERTRAIERLEKVLQDAGIKLTSVASGVYSVSARAMLEALLAGVTDPAVLAELAKGRMRKKIPQLQEALASRFDIGHHGVLVAGLLAHIDALDQAIGNIEARIGIATAPYAELIELVCTIPGVGVRIAEILIAECGVDMSVFPTVAHLASWAAICPGTNQSGRKRGSGKTRNGDTWLCTALTQAAHAAVHTKGTYLASHYWQLRGRRGDAKAIGAIRHDILTAYYHIVRDRVAYRELGPDWLTRRHSPEHRTRRLVKQLEALGHHVTLQPAA

SEQ ID NO: 491862 - protein, 430 aa, unidentified
MEEVDEQELHVERLAALDLGKAVLEACVRVPHDSKPGRRMQEVRTYPTTTAALLQMADWFRCWGVTRVVMESTSDYWKGVYYLLEAEGFECWLVNARDVKNVPGRAKSDKLDVAWLAKVGERGMCRPSLVQPKPIRELRNLTRYRRSLIRDRTREMQRVEKLLEDAQIKLSSVVSKLFGVSGRAMLDALAAGQTDPKALARLAKGRLCPKVPQLQEALRGFFTDHHASILAMMLANIDRLSAQVATLDTMIEQAVVPFTHQAQQLAEITGAGPIAAQELIAEVGVDMDRFPSDARLVSWAKFCPQTHESAGKKKNKGRAKGNPWLAATLGNIAASAARTGEGFLGARHRRIARRRGPQKAIVATGNAVLVIVYHLLSDPTARFRDLGADYFTTRIDKNRRARNLAAALQAVTGQKITIRDGQAIIEPQAA

SEQ ID NO: 491863 - protein, 430 aa, unidentified
MPLIYPICAGMDVHKDTVTVCLRWSAATGERQQDLRTFRTMTNDLLAMRTWLVENHCHVVALESTGPYWRPIWNVLEEVEMELFLVNPAHLKRAPGRKTDPEDSIWLAKRLEDGAVEGSFVPTELMRDARELTRYRRRLIQDQTREVNRLQKILESANIKLASVATDIMGVTGRALLKELIAGKTPDVEHCAKGRLRQKMDELREAMVGRLRPHHRLLLGQILQHIEFLDAAIAQCDQEVEELFRPFAAVIALMCKTPGIQRRAAEDILAEIGADMSHFPSAKHLCAWAAICAGNHQSGGKRLSGKTRKGNPWLRAILVECAHAAAKTKGSYLQKLYRRLAVRKGERRAAVAVAHSLLESLYYILRDHVEYQEPQRVLSVSQRERKIRHHLQQLVELGVDAPQVEQLLKAGIALIPAGTDTNTPSEAAVA

SEQ ID NO: 491864 - protein, 344 aa, unidentified
MRIAVLGIDLGKNVCSVVGLDDGGRVVLRRRTRRDTLIALIGKMPPCVVAMEACCGAHHLGRLFAAHGHDVRLMSPEYVRPYVKAHKNDDRDAEGIAEAATRPTMRFVEVKSEAQLDMQTLHRSRDRLVGERTALINQLRAILLERGLVVPQGKRKLEQYLVTMMDEHEGRGLSVRIKTLVADMRTQWRELDRRIAAFDAEFVSWARENADARRLASIPGVGVMIATALIAAVGRAESFARGRDLAAWLGLVPRQSTTGGKPRLLGISKRGNKYLRKLLIHGARAALPHVAERDTPLGRWAKELLGRAHQNVAVVALANKLARIAWAVLRRQEQFDAEGELAPV

SEQ ID NO: 491865 - protein, 454 aa, unidentified
MNQKRAIGIDPDAKGFQCILLTEGIQKGESKHFTVSKDDLQKFVKWIQSLKDVIIAIEGSNGQSKPIEQALRTNKIIFYSFKASDVEKYRRAVIGENKDNDRDAEAVASLALSLEKQNRIAFYKRVWFPDEGLQLLTRNYARLTKNKTAEINNLWKLIRNGSPDFYLMLKDAKMAGKDGKISKMNNKSLLTLLYSKSDLSEWKNLSDKEIFEAMGGKNYRGINEIIIRIKKIAKAITHTDESIYELIKISAETILSIKKQRSAIEKQIARKAAKDLGIQNLTEIKGVSMITASTIIAEIIDIRRFLKNDNLASMAGFGRRKYSTGDKSKEKSAYNYNRRLKNIFITAAKNFVLYNPDHHLTGFYRNLRKTGMKKIEAYKRVARSLVRMFFKRLYSIVRVVDVIVSVDKIEGSMAIGKTRNTIVSSYIPPSRNITTKPKKGEYRSGKRKSFIKSA

SEQ ID NO: 491866 - protein, 354 aa, unidentified
MMIIGCDYHPGFQQIAFVDTETGELQERRLEHREEAEKFYRDLVTQGVKVRVGMEASGHARWFERLLSELQFELWTGDAAAIHAKRVRKQKTDRQDAQLILRLMLKDDFPQIWVPNWENRDLRQLLWHRHRMVQARTRIMNQLQAVALNEGLRCKKRLWRDAGREQLESFRLAPWASRRRLDLLALLDRLTPTIAELTAAIEQEVERCPAAQRLQTHPGVGALTALGFVLIIGRAERFQCGKQIACYLGLVPLEDSSGQRRRLGHITKQGNSLLRFLLVEAAQVTVRSDPEWRSRYFHLAMRRGRKIAKVAMARRLAVRLYWMWRKGWDYQQMTKFSSHAGEPGNRHGVKLNTE

SEQ ID NO: 491867 - protein, 350 aa, unidentified
MNILALDIGKFNTVYCDYICENGKHEFGKVKTTPQAIHDLIVDKEPERVVMEVSEIAGWVVDIARALGKETETANATHEAWRWKNVKKKNDKEDALKLAKLSTMNQLPTVHIPAKPVREKRALIKYRQRLVKHRRSIQLAIRALFSAQGITGVPRGTSAWTQEGLGWLRQHARPLEDIVDVEQLWRGRLHVELETFEAVSQSLKKVEDKLNKLGSADARIRRLQTIPGVGPRLAETVAAFLDDPNRFRNCKHVGSYVGLTPRQYQSGQMERQGRISGQGNKLLRNLLVEACWVSLRYNPWARATYNRLLRGSPSKKKIAITALARKLIVKCWAMLRDEEDWKYEIHEDAA

SEQ ID NO: 491868 - protein, 377 aa, unidentified
MQSIIYVGMDVHTENFTFASYEYGKEDVFAVNQVIGATWKDAIKYMKTLQKQRSEEEIHFVCGYEAGCFGYSLYNELMSAAVTEKDLSLQCVILAPTTMAIQGNAPKTDRRDARMIAKNLAYGTYSSVYVVSEEDNGVRDFLRMRDDTKKKLKTTKQQINALCLRHGKYYTANKWTGTHYEWLQKLELGDIYSNITLKEYLHQLTQLEENISRYDKEIEEIAKRERYATAVAKLRCLKGIETVTALALVAEIGDYSRFPTAEKFAAFLGLVPGERSSGGTINRTGITKRGNSFLRRLLTEAAQGYSKGTPYTKSKRLKARQVGQDKEILDYCDRARLYLGKKYIRLKEKGKNGNVCKTAVARSLACFIWGLMTDNIA

SEQ ID NO: 491869 - protein, 345 aa, unidentified
MKITTVGIDLAKNVFQVHAVDEHGKVALRKQLRRDQMTAFFVNLPPCLIGMEACGSAHHWARTLQGFGHTVRLMSPQFVKPYVKSNKNDVADAEAICEAVTRPSMRFVPVKSVEQQAVLSLHRARQGFVIARTAQANQIRSLLGEFGLVIPKGICHVAKQVPELLEDASNQLPGTFRRLIARLTEHLKELDKLVNEFEDQIKAWHRSSELSLRLEKIPGIGPLGASALVASIADANSFENGRQLAAWLGLVPRQHSSGGKPTLLGISKRGDVYLRTLLIHGARSAIVATQRKAVNTNVWLASLLNRRHPNVAAVALANKNVRTVWALLAHGREFRPNYVPPQLAA

SEQ ID NO: 491870 - protein, 410 aa, unidentified
MHVLYPRCCGIDVHKASISACILIQGPGGKERHLRRFGTMTHNIAELADWLAAHGVTNVAMESTGIYWKPIWNLLEDQFELLLVNAQHIKTVPGRKTDMKDCEWIAELLQHGLLRGSFVPREHLRELRDLNRNRTILMQQRASVSNRIEKVLEDANIKLASVASHVLGQSGRSMLRAMVDGISEPARLAEMARAKLRNKIPQLCLAFNGRFEERHRFQMRVLLDQLTFLDTKVAEFDQQIGERSQPFQDKIQLLMTIPGVDRITANSMIAEIGDDMTQFPTAQHLASWAGICPGNNESAGKQYGGKTRKGSRWLRRVLCQAAWAASHTKKTYLAAQFRRLAAKRGKQRAIVAIAHSILVAAFYILKQNEAYREAGGDYFERSNPAALQRYLVRRLERLGLKVLVEPASTA

SEQ ID NO: 491871 - protein, 362 aa, unidentified
MAHSVIFAGLDVHAAQTHAAQLEAATGELSVTRLAGGSDPAVAWLRRLGPGVRAVYEAGPTGFTLARAAREEGIDLRVTTPALVPKRPTDRVKTDRRDAVRLARLLAAGELRFARVPTVPEEQFRDLIRAREDVRGDLMRARHRLSKLLLRREIVYPGPGRAWTLTHLAWLTRLTFDDTASAITLTDYLAAVEALVQRRGTLDAAIAELVPTSPCAATVPVLRCFRGIDTLSAAGLCAEIGDFARFAHPRLLAGFLGITSSEYTSDDTRRQGAITKAGPSHARRLLVEAAHHYRRRPHVGVTLQRRQAGADPRVCAVAWRAQQRLYRQWQRLHGQRRKPPGVVAVACARELSAFLWEAATMT

SEQ ID NO: 491872 - protein, 310 aa, unidentified
MESIITVGIDVAKDRLDVAVRPGGEVFTVERNAAGLVQLCGKLKSLAPRIVALEATGGFETVAVAALAAAGLPVVVVNPAQIRAFAKAIGQRAKTDPIDAAVIAHFAEAIKLEPRPLPDEATRQLADLVARRRQIIEMIGAERQREKRATPRLKKSIVRLIRALEKELTSVDTDIDDAVRGSPAWRDKEDLLASVPGVGPTIARTLIAELPELGTLDRKKIAALAGLATFTRQSGQWRGKSFIGGGRTAVRTALFMGAMVAKQHNPVLKAFFDRLVASGKPKMVALIAVARKLLTILNAILRDCRPWQNA

SEQ ID NO: 491873 - protein, 356 aa, unidentified
MNNVSRLDFTGQQIYVGMDVHKKSWSISIFTDQFEHKTFSQPPEVGVLVNYLKHNFPGAAYKSVYEAGFSGFWIHDSLREQGVECIVVNPADVPTKDKERATKTDRVDCRKLARSLRNDEIEGIYVPPRPKAEDRSLLRTRHGMVKKQTRCKNQIKSILCFYGINIPDELATSHWSKRFINWIDSVRMERASGNLALKVHLSELTHIRQTIAELNRAIRALANTEDYRNNVRILKTVPGISILTAMTLLTELYDISRFKTLDKLCSYVGLIPNTDSSGEKDHKTGMTGRRNAQLRVILIESAWTAVRKDPALMMAFNELCKHMTKTKAIVRIARKLLNRIRYVLKNQQEYVPAIVQ

SEQ ID NO: 491874 - protein, 407 aa, unidentified
MDLQHPKCAGLDVHQHTVVACARVVTGASVRHERRTFGTTTAELLALSDWLTAHDCTHVAMESTGVYWKPIWQVLEGQFTLVLANARHIRNIPGRKSDVNDATWIADLLAHGLIRGSFVPPAPVQELRDLTRTRKQLVREITQHTLRIQKTLETANLKLTGLLSNILGMSGRAILRALVAGETDPERLADLVHGRLKASRADLVAALHGRLTAHHRFLLQLHLAQVDALEQAVHDVEVRLGHALVPFRAALDRLITMPGVSETVARVVVAEIGFDMTRFPTAGHLVSWAGLCPRLDESAGKRLSTRTRPSNPWLKTTLVQAAWAAARTKDTYLRAQFLRLKSRRGPKKAILAVASSMLTAAYHMLKHDLDYRDLGADHFDRRDKTKLAHRLLQRLQELGLTVEVRAA

SEQ ID NO: 491875 - protein, 320 aa, unidentified
MDAVLGIDIAKAKFAAALLRPDGKVRHKSCANTPTGFADLAAWLRRQQVTCVHATLEATGTYGEALALWLHDAGHVVSVVNPSVIHAYARTQLARSKTDRIDAELIARFTASHQPAPWTPPVPEIRQLQALVRRLDALQGMRTQELNRLASGVTIAEVRVSIETVIASLDAQIAHVHQLIRDHLDRHPGLRAQRELLTTIPGIGEATAAVLIAELFDKRYASARQAAAFAGVVPRLVESGTLRGRSRLSKIGPGRLRKALYMPAVAALRWNPTIRAVRARLAAAGKPPMVIIGAAMRKLIHLAYGVLKSGRAYEPTCAHP

SEQ ID NO: 491876 - protein, 323 aa, unidentified
MIDKEGINNEAQCFVGLDISKASVDALSLPDGEYKRFENTDCGLQQCLAWVQGKRHCLCVVEASGGYETALAGVLAAAGVPIAVVNPKHVRDFARGMGILAKSDRIDARVLALFAQKRRPPIRALPSETQRGFIDLVDRRRQLVSMRGQEQTRLTQAKGRPRKSIQAHIKWLNGAIDDVDRNLNDTLRGCELWLVDSQLLDSVPGVGKVTICTLLARLPELGHLDRAAIASLVGVAPFVRESGQWRGRRFIWGGRAEVRSVLYMAVISAIRCNPVIKAFYHKLLSARKAPKVALTACMRKLLTILNCMMRTRTPWNPPLAQNT

SEQ ID NO: 491877 - protein, 371 aa, unidentified
MSQTSAVTFASFIGVDLHKSTVSLHAVDPRGQRIGRLTCSTKCVEQIEKFLLALPRPCHLAVEAVGFVEWFIDRFRSCVDRIDIADATKLSDLRGKRRKTDRNDAADIASRLARGDCPLGWIAPEEVMQLRKLGRHWRHLSRTLTRAKHAMKSMLLAANLAGPKFDGAAAQKWLLAHGHLLKEVQRHAFGDFVDIVQLLERQREVLRRQIIAANRSPRFEPLLAVLKSVPGIDEIWGCIIAAEIGDFARFPNADALEFWSGLTPDNQESAGRTTSGHITKAGSAALRWALGKAGITLCRSDARQEAIRQRLITRVGKPKANVAMGRRLERILFAMVRDGALYQPGPATGHERKASRARAQQRLRRKEKQAA

SEQ ID NO: 491878 - protein, 354 aa, unidentified
MSQTQNAAIAVVGIDIGKNSFHIVGHDERGAIVLRQKWSRGQVEARFANTPPCLVGMEACVGAHHLSRKLNSLGHNARLMPAKYVRPYSRGQKNDFRDAEAIAEAVQRPTMKFVATKTADQLDLQALHRVRERLVSQRTGIINQIRAFLLERGIAVRQGQRFLRAELPRILATPPDVLSSRMVRIIEDLAGDWRRLDERVEGLSNEIKTIARQDAGCERLMSVPGIGPIISSAMVAAIGAGDVFTKGRDFAAWLGLVPKQISTGDRTILGKISRRGNRYLRVLFVQAAWVVLIKPKSWERHGLKPWIEAARKRLHHNVLAIALANKLARIAWSVLAGGRAFEVRKINQAAPEPT

SEQ ID NO: 491879 - protein, 377 aa, unidentified
MREKLRFLGLDVHAETIAVAVAEPDGEVRSLGTIANREDSIRKFIKKLGSPEHLRACYEAGPTGFVLYWQLTQLGVECAVIAPTLVPKKPGDRVKTDRRDALKLARSHRSGDLTAVWVPDEDSEALRDLVRQREAAKQDQLRARHRLTKFLLRTGQRPPLGLKAWTERWMRWLAQVRYTQPAQEVTRLDCMNEVEHMTARVKRLEEAILEVVKLAPEPMQELIRGLQALRGVAHISAVTIASELGNISSRFPSARKLMGYCGVFPSEDSSGKRIRRGGITKCGNAHLRRIVVESAWCYRHLPRVGEKLRKRHQGVPAEITEIAWKAQNRLHKRYMKLTMAGKDQRKVMTAVARELLGFIWAIGIKAEAAASRQQLAA

SEQ ID NO: 491880 - protein, 482 aa, unidentified
MKKRNIYQNQSQELLHLFEAAGSGAKVMCVPMDYAKKDHLAMLCNGHGAILRKPFSVKNSPDGIEYLVDQVTRSCRRRGIKKKHVFFGGEDANSFAENFVSTLRYKGWLVAGVNAQDAKKQRANLQASTDRIDLMGIATMLLNCRANCCPAQSGIYRNLRTLVRHRRKLVAMLTEVKNRVHGIVDRLFPGFLNESKCGIVPFTQSSLYLMEDRFSPKQIRRRKREKLIEILKRFGTSKAQETAFKLQQYASQVLHTPVEYVDTLQLSLAQHVKHIRCLQESVAQMEKEIALNLAQTQGAFLTSVRGIGLILAAGVTAEIGDPNEQKPLNNLVSYSGIIPRVKQTGGTDGKTYTGKVAKRCNRILKDYVVQSGHHMGLHGPEDLMTDHKRRDASGQHADFGIGRRYLRTGMSLMRTSQIYLPPWLRKADGTREERAGYYLMTWPYLREKWKKFGALEVAFAKDRPLGLWRRMVQELYDIKLKL

SEQ ID NO: 491881 - protein, 354 aa, unidentified
MFFAGIDAHTRYVVVVIINRMGERVLGPTRVPVGQPERLVALLGPYQPVEAIVETSSSWPWLHEVLTGAGVSFVLAHARRLRAIAEANYKRDDIDAELLGRMRLAGLIPTVYPTPFAQREWATLLRHRTTLVAQRTALVNRMHAQLHGHGLHLERGRLLTRAGRQWLRTAAWPHFGIEQRALVRTHLRVIAGLRPLIRALDRRIGTVAATIPQAQLLKTIAGIGPQRALVICAEALPISRFRTPGHLASYAGLVPRSKQSGERAVRHGAIPAGANRWLRGALVRAVVSHVQHAPDSWLTQYYVALKARVGWPTARVAAARKLARAIHAMLRTNSCWTNAPVRGELVRTHAAPTA

SEQ ID NO: 491882 - protein, 388 aa, unidentified
MTDGICFAGLDVHARKTAGAAVQLGSGEVFKAQIAGSPLEAIGWLQSLPGPVRAVYEAGPTGFGLARAARAAGVEVMVCSPGAIPRQPGDRIKTDTRDALKLARLLAAGQLRAVLVPEPELEALRDLVRCREDLRGDLMACRHRISKLLLRRGLVWAGPGSAWSQRHLAWLGALRLGDPVVELVFAEQLACHEVLLARRERLERALGEQAATGPWAPTVERLRCLRGIDTLTAVGLVAEIGDFAAFSHPRRLASFVGLVPSERSSGARRRQGEITKAGSTHARRLLIEAAWHYRRAPRVSLDLRRRQAGQPPAAIEAAWRAQLRLHGRWAHLDAARQEAHHRRGRRRPRAGLLCLGDRQPARRLKAHDTPFEVGVAAGARHPGSAMSL

SEQ ID NO: 491883 - protein, 331 aa, unidentified
MFPVGIDVSKETLDLCMLYDGMKGRVKTRNIRNDRSAVEHILRWLRLQHCGPEDVHVVMEATGVYHERLATALHDAGFFVSLANPHRSREFARGMGIMTKTDKVDAYMLACYALLKKPHRWEPPAADIRFLSALLRRRDVLLADAVREENRLEKYQSTETPADVVSSCIRMAQLLREEVRSIERQVKAHIQASPDLKRDYALLTSIKSVGPQLGMHMLVVLRSHHFESADQAAAFLGVVPVEKRSGTSVRGRPRMSKIGPPQLRAKLYMSALCGKIHNKRMRNIYEEMCLRGKPKMVAIGALMRKLVHWCYGILKTGTAFCDGDPRAALNS

SEQ ID NO: 491884 - protein, 337 aa, unidentified
MEYFAGLDISMKETHICVMDRHGKVILEAKAATLPAAIAAELAKAPAAQRIVFETGRMATTLYHGLEALGLPVVCIESRHAYQALKSLATHKTDRNDARGLAHLARSGFYKPIHVKSLPAHAVRALIIARKKLVGQRVTLENQIRGLALVFGVRLPRGLSPAFAKQVNTASGELPALAGALRGLLAARDALLGAIAAINRDIKRLAHSSEACQRLMTIPGVGHLTALAFVAAIDEPDRFRSSRDVGPYLGLVPRRWKSGEIDYTGSISKVGDRRVRTLLYEAANVMLTRYRGDLALKDWALRLGRRSTMRKARVALARRLAIIMHAMLRDGTEFQVA

SEQ ID NO: 491885 - protein, 422 aa, unidentified
MLEETQDREEIIERVAALDIGKAELVCCARVPGAPGNSKRVQEVQTFRTMTRSLLVMVDRLRELGVTRVVMEATSDYWKPPFYVLEAAGFETWLVNAKDVKHLPGRPKTDRLDAVWLCKVAERQMLRPSFVPPPPIRVLRDLTRYRSDQVAVRTAEKQRVEKLLEDAQIKLSVVASDIFGVSGRDMLAALIAGQRDPRVLAQFARGRMRGKLTDLEEAFTGRFSDHHAFLLAKMLARVDQVSADIADIEDRIGAEIAPFVAAVARLDEIPGIGHTAACVIIAEVGVDMDRFPTAAHLCSWARFAPGVKESAGRKKGNGATGHGNRYLARVLGEAAVSAGQTDTFLGERYRRIARRRGKKKAIVAVGRSILIIVWHLLSDHDAGFRDLGSDFYDTHLNTNSKKRNHIRQLEALGYKVNLEPAA

SEQ ID NO: 491886 - protein, 400 aa, unidentified
MLSIGIDVSKGKSTVCGMKPGGEIVYAPFEVQHTREGMSELVSLLRSSGEEVRAVLESTGSYHCPVVAALLENGIFVSVVNSLRMKRFCSQSIRKVKTDRIDAMQIALYGLAYWQELQPTRLPEDTYRELQLLARQYYQMTSLLIKAKVDFNAICDQVLPGMQELMNDHAGRHKLSDFVLRYRHTTHILEMGETRFRKDYCKWAEKKGYRNCERMAALIFATAQNGIPVLPNAPSTQIVITEAIRVLHTVEASRDAILTQMQALAKTLPEYSLVREMPCIGDTLAPRLIAEIGDVRRFHSKRALIAYAGIDAPPYQSGKFCANNRHISKRGNRYLRKTGYEVMQSYVMHKPANDPIFTFIEKKRGEGKSGKLAMVAGLNKFLRVYYGKVTELYRSLPAIE

SEQ ID NO: 491887 - protein, 320 aa, unidentified
MDAVLGIDIAKAKFDVALQYPDGRVRRKSCANTPAGFRDLDAWLRRHGVTHLHACLEATGTYGEALATWLHDTGHTVSVVNPMVIHAFAASQLSRTKTDRTDAALIARFCATQQPSVWTPTPRDIRELQALVRRLEALHDMRTQETNRLASGAATTAVARSITTVIDTLTDQIAAVQQQIRDHFTQHPGLRSQRDLLTSIPGVGDTTAAVLLAELFDKRYSSARQAAAFAGVVPRIVESGTLRRPGRLSKIGPSRVRKALYFPALAALRCNPTVQSLRGRLRAKGKVPMVIIGAAMRKLIHIAYGVLKSQRAYDPQYERA

SEQ ID NO: 491888 - protein, 415 aa, unidentified
MMEKRNKVCGVDIHKKFLIATILSRDGAKIQKRYSTDIDDLLNFRDWILESNCDCVAIESTGVYWYPVNAVLENKVELILANAHQIKHTPGRKTDSIDSEWIAEVALNNLIDPSRIFPKEERDLRRLTRTRESLVKIRSQFKNQVHQGLESCSIKLSSVLSDNFGKSGRHILDGLIQGKSIDSIIEEIPSKRVKKNEGQIRSAIRTGLDETQIFLIQSHLNTIDALTKKLDEIESEIKQRISKKKDDLKIAMSVPGIGFKAATTILAEVGNYRDFSTPDKLASWCGIVPNVYQSADKLITGSITKQGSKHIRWMLVQVAQAALKKRDSKLRKFFLRIKARKGHNVAVVALARKILCILYHLLMNQEMYQEDGVTKSRQSKVDWSSARTDPMSLQTMIEIIAKAGYEVKKIEGHGG

SEQ ID NO: 491889 - protein, 314 aa, unidentified
MSSLVFVGIDVSQARLDIAVRPGAPFSIVHTESALATLVEQLRALSPTLIVLEATDGMEIPLTSALATAGLPVVVVNPRQVRDFAKASGRLAKTDALDAQVLAQFAEVMRPQPRPLPDAEARALAALLTRRRQLVELLTAEKNRLLSDAAPIRTRLRTHSTWLERELQHTNTALAEAIRQSPVWRDKDELLQRVPGVGPVVTSTLLASLPELGILTHKQIAVLVGVAPLNRDSGTLRGRRTVWGGRAQVRAVLYMSALVAARFNPVIRAFYQRLCRAGKAKKMALTACMRKLLVILNAMIKQRTPWHQAEVPLA

SEQ ID NO: 491890 - protein, 481 aa, unidentified
MLHNLRMSMEESPMGHNRSRSRQPGGKKFKHPSLLKRINRNAAGIDCGSEAHYVAVPLERDPEPVRSFKTFTADLHRLADWLGACKIKTVAMESTGVYWIPIFEILEERGFEVVLVNAQHIKNVPGRKSDVLDCQWIQELHSVGLLRGSFRPAAEIVSLRAYLRHREKLVQSAASHIQRMQKALVQMNLQLHNVISDITGVTGMHILRDIVAGVTDPMALAAHRDPRCRASQDEIAASLTGNYRAEHLFVLRQHLELFDTFQQQIQACDTEIECLLHKLAARQRKSKTPIPFPRCKLRFYDNEPRFEIRDPLYRLAGADLTQIDSIGPFTALKLIAEIGTDMSRWPTYKHFTSWLTLAPKNKITGGRLISSRTQPSANRAATVLRMCAMVVGRTSTALGAYYRRIAYRIGKPKAITATARKLAILVYRTLKGELDYADPGASAYEEQHRERTLRNVRNRAKRLGFGLVDLETGELLQGAVS

SEQ ID NO: 491891 - protein, 414 aa, unidentified
MSEKKSVEIRVSVDVGYRRHSVAIGLPSGEVLEEFEIAHRPEGFAEFFSRIEKHQKIRGCEVAVAMEGFNGCARPLDAMVRRRGYRLYNINNLKLARFKEIFPGAAKSDRIDARKGLELFQLSDHLPMAKEVLQEVKGTPRENEVLKRLTRRRRRLVDERVRVISNLQTDMQAVCAGLLEITKNAGNQWFLNFLVSAPTLSQLARLRPATLRKIPAVGRKYAGLIEDWQKRAHFSEEVEWVGEMIQEDAKRCLELDEKIKALRAKIKEVAKDSKIAKTLLSIPGFGTICTAELAGEIGTIERFSKEGSLALYLGMSTLDNSSGKYQGSKQPKHVNTRAKAAMMVALDRPSKVCARVAEVLREETKRGEKTQSGDSSSGTPPLPNHLQAAQRRTGVRDTPRKGEYQEQGQSEIVD

SEQ ID NO: 491892 - protein, 433 aa, unidentified
MKVLYERVAGIDVHKDMIKVAIRSPGDKPWTRKTEILEFRTFYGVLQEMGRELRRRGVTHVVMEASGVYTEPVYYALCEQDFEEVAVINPAHAKALKGHKTDARDCARLAELFECGLLHGSYIPAPELKEVRDLTRYRIKTVQARTSEIQRLGKALESAGIKLGSVASSITGASATAMIEALIDGERRGGVLADLARGRMRDAGKLADLSMALTGRFTGHHALLCHLHQDRIAGFDAAVAGLDERIAGKVTRWQREAGLLTSVPGFGDVVAQAWLGEIGPAPHLHFATHEKLASWVTLCPGNNISARKRKHGRTGDAGTYIKPMLVQAAWNAIRVRGRLQARYHRLVRRFGGDKNPGAKKKAIIAIAHTLLKIAYQVLKSGTPYQDLGADFYTRRESPEQKQAWLERQLQKLHPGRTITITISPPEAALAPGA

SEQ ID NO: 491893 - protein, 347 aa, unidentified
MNYCGIDLAGVSSYAFVTDEKGNKLWSGPIATEKVAFERLVKKFAGGGLSIAIEAGNQTAWVHEELVKLGAEVTVVHPTKVKLIAESRRKTDKIDAKILCELLRLNALPHPVHMPGPAARELRGLLVARRQLVSARSKLSNVVRGMLRQTGVRLPAGGLSTLVGWKRLLAAGFEQEHLLLIVSAYYDSFRALTKSIRELDQQLAQHEKNEPRAQRLKTIPKVGRIASLTFLAAVDDVKRFSSSRKLVGYSGLAPTVRQSGERTEYGAISREGRSELRAVWVQIAHLVARDQTKATQPLRTWFSRVARKRGKKTALVALARRLLVIAYQLLRTEQDFDVGRLKKKRAA

SEQ ID NO: 491894 - protein, 324 aa, unidentified
MSDSILGIDVSKETLDAYCARGQRKQGRTFANSPDGWKLVRAWLKAMGSKQAHVCMEATGRHSLGVALALHEAGHVVSVVNPAQIRDFARTKLGRNKTDKVDAALICEYAELFKPEPWTPPSPAMRRLCELQTMRAGIIRSRTEWKNRIGSGLGDSTATKLAAATIDHFTSQLEAIDRAIGETIEQDAELRGRRDLLLSVIGVGETLAASLMAEMPEPGVLRRSGEMVAYAGLNPSHHRSGTSIDRPTRISKIGNATLRSSLYMPALSAMRFNPAVAILVARLKSAGRLKPKQIVVAAMRKLLVLCFGVLKTGKRFDLAIAMPA

SEQ ID NO: 491895 - protein, 348 aa, unidentified
MVVGIDVHKRAHVAALLDERGGELGTLSFVNSPGGMRKLRDWLIAHDAGEAVVGVESPAGYGRLLVASLEAAGHEVLNVPAWRTHRERRRHGPGKTDPGDAIAVAQVVLRKRAELGPALEPELIRALALLELQRRRLVRDRTQAIQRLRADWNQVDPVGEARVVNLTRQRELRRLRRISFGEGLVEQVATRCIRDLARDIEDLNQRIASLDAEIAQLLAEHGNPIAELHGAGTQIAAAVIAHAGDVRRFRDAAAFARFCGAAPIPCGSGQTAGRHRLHRGGNRQLNAALYRIAIVQARHHPPARAYLARKIAEGKTPREARRALKRHLANVIYRRLYAWAEATPALNT

SEQ ID NO: 491896 - protein, 322 aa, unidentified
MAMQTRTVIYGVDVSQQWLDVCRHGEAETRRLANTKRDINHWLKSLPPGSTALAVEATNTYHELLVAQARHFGLTVYLISGYQLKHYARSLNVRMRTDAVDARLLARFLEREIDDLRPYEPPSPRQRRLLQLLRRRALLVKQIQQLRQSFAGVAELSRSVNSVIHRQQHLIALIDKRLHELACELRWNSDLRHLRSLPGVGPLNALALCAAFRSGDFVHRDPFIAFLGLDVRTKDSGKHRGRRKLTKKGCPEFRRLLYNAAMAATREQAYFHGYYLSLQTRGLTKTAALVVVSRRIARLAFALLKNHTSFDPKLHREACSTT

SEQ ID NO: 491897 - protein, 339 aa, unidentified
MEIKRIGLDLAKNVFEVYGVDEAERVVLRKTLRRGKVLEFFAQLPACVVGMEACGGAHHWARKLSELGHDARLMAPQFVAPYRKSNKTDRNDAEAICEAVGRGSMRFVPVKDEQQQAVQMLHRMRSLQIAERTALVNQTRGLLAEFGIVVAQGLGRLRARLPEILEDGENALPDLARELFADLRERLVALDAQIGAYDRRIEQLARASEVAQRLMRLEGIGAVTATALIAGAGDGRQFANGRQFAAWLGLVPREYSSGGKIRRGRISKRGDAYLRTLLIHGARVVYRHLGERADRKSHWLRQLAARRGVNKAVVALAAKHARILWALLSRGGDYQPMAV

SEQ ID NO: 491898 - protein, 373 aa, unidentified
MSSNGCHQIIYLALELSSSSWVIAYRLRENDKAKLHRLEAGDGEGLLAFIAGLRRQLDPDDASTLVVSCFEAGRDGFWLHRLLTAHGVINYVVEPTSILVTRGARRAKTDRLDAVGLLRVLAAKFAGDPGACRTVVVPSVEEEDAKRPHREREFLVQERVRIENRIAALLATQGVRERPSLRSWDADMRALTTGDGRPLPTHLVAELNRLRRRLSLTLDMIRELDAVREQALEEQHDSASRTVKALCTIRGIGVNFASVLTREVFYRTFDNRRQIASYLGLAPTPFQSGGMDRDRRINRAGNSRARKTLVQLAWLWLRYQPESSHAAWFRDRVGSLQGRIRRITIVALARKLLIAIWRFVTLGLAPEGAIIAA

SEQ ID NO: 491899 - protein, 355 aa, unidentified
MVGSISEAKSSVSGVTDPYCRTEHCGKIHPYRCDKEVEVLGIDVSKDNLITSRGGKYENNLKGYEKILDIKPCTIVLEPTGVYSIKPSQYFKEKGIRVLQVSPNMLSREKDFREKKTDFYDAEKLENMVDKAKEYEYNVLRELVTLYLFLKDMEVKQKNRLKRALFLVSDNDKINKERLKRLASGDFAQEVLYQLEYTPIVLEEVKILAKALFETQEKLKEVKEMIESQVPEDHVLLTIPGVGKLAAGIIIGVVGDIRRFPKPESFVAYCGLDPVVERSGKAVVSKGISRRGNKYLHSLFYFLAQMNCSKNPTLLRFYESHKDKLHGRKLYTALARKLAKVVWSVWYNNKSYEPK

SEQ ID NO: 491900 - protein, 412 aa, unidentified
MDVVVERCAGLDVHRDSVVATVRLPGTGRRRREQKTHSFGTTIGQLETLADWLESFGVTLVGMEATGVYWRPVFYVLEQRFECWLLNAQHLHNVPGRKSDVIDSVWCCQLLEHGLVRPSFVPPPEIRRLRDLTRLCSTEIEERTRAIQRLEKVLQDAGIKLSSVASSTYSASARAMLEALLGGVSDPAVLAELAKGRLRAKIPQLQEALANRFDIAHHGVLVAGLLAHIDALDQAVATLDTRIADATEPHTELVALLCTIPGVGLRTARVLIAECGLNMSVFGNAEHLVSWAGICPGVNASGGRRRNGKTRHGNRWLKKALTEAARGAARSKNTYLASHYWQIRGRRGDAKAIGATRHDILIAYYHIVRDQVPFRELGPDWLARRYSPEHRSRRLVKQLEALGHTVTLQAAN

SEQ ID NO: 491901 - protein, 334 aa, unidentified
METHYFLGIDISKKSFEAALTTDGKHFHQVQVENLSKAIESFFKNLKSQLTSFSNLIVCLEHTGIYCQPLLDYLVKNEIKVCVEPALQIKQSQGITRGKTDQVDAARIAVYAVKNRENLTFWRPQRHCIQKLKALLAVRERLIKTKVQLEVPVNECTDFIEPALRKEVVKHCRKTVLSLKTEIKQIERVIESLIHQDDKLTEQCELVTSVPGIGKITALNVIVSTNEFTKIREAKKLACYAGVAPFEYRSGSSIRGKTRVSKMANMTLKRLFHLAALSAIQYCDELKVFYHRKIAQGKNKMSVINAVRNKLISRIYACINNNRRYQKEYQTALV

SEQ ID NO: 491902 - protein, 418 aa, unidentified
MTAPNSTTSTLLVAIDISKHRHEILIGIPGKKRRRRMTIRSTLDDFQRLTAALASYDLPVRIGFEATGNYHRPLAHHLGQAGFELKLVSSVGLARTREALHNSWDKNDPKDAQVILHMLEIGAVQFFHDPLVTGTADIQELSKTHEIVSRSKTELWHRILTHYLPLYFPEAERFHRSSRTDWFLAFLEKYPTPHMITTMSREAFIADAWQVVGRKMSKERLLSDIYATAKGSVGLPVHPDSDAVRMFRLVLAEGRSLVRQRNEIETRAVELLSDHPDYQLLTTIPGIGPINALTILAEAGDLRRFRHHRQFLKFCGMDLATVQSGMFRGQSRISKYGNARLRRTFWMAGQVAVLKRTNSFRDKFERYIARDRHNAHLRRKAYTAIAAKMARTVHAVIKHGEPYRPFFEGVSPSGRTLV

SEQ ID NO: 491903 - protein, 431 aa, unidentified
MDIVHPRVAGIDVHKKVAWVAVRLPGDAPGERKVITKRFKTFWRPLQKMAAWLAELGVTDAAMESTGVYWWPVYHALAGAGIEVCVCNAAHMRNVPGRKRDIADCQWIAELHEHGLLRPSFIPAVEVAALRQRTRYRKRLIEQRTSEGQRLSKVLEDAGIKIDSVASRLLGVSGREMIEALIAGERDPGRLADLARGVLRRKTEDLQMACDGRFTAAHAQMCRLHLDAHDHLTAAIAELDALIAEAAAPFAAVIARLMTIPGIGQRTAQVIVAETGGDMTRFATGSRLAAWAGLAPGDNESAGKRKHAAARKGNQHLRAAMTEAAWATARTRTRPGARFRRLARRFGKGHEKKAAIAVAHTLICIAWAVLSRGEDYAEAGEDYYEQRDRRNREHLIRHHQQALARLGCQVTLTPPGDGPPPADGPAQQPAA

SEQ ID NO: 491904 - protein, 343 aa, unidentified
MNEVITIGLDLAKNVFQVHGVSDAGTVMISKRLRRRQVIPFFKKLPSCLIGVEACATSHHWARALGALGHEVRIMPANYVKPYVKRNKNDAADAEAICEAVTRPTMRFVAVKTKEQQSLMMLHRTRSLLVRQRTMLVNAIRAHLAELGIVAPVGLRGMKALLAVIADAKDQRLPPLGRICLDSLVASLMNLEQEIAFAEQHIYAWHRSNEASRHLESIPGIGPIIATALVASVSDPSIFKSGRELAAWIGLVPKQNSTGGKERMGRISKQGDKYLRWLLVAGAMSVIRHGRKTNFKNNPWLADLVYRKPAKVAAVALANKNARTAWALLANGETYRQPAAAKA

SEQ ID NO: 491905 - protein, 420 aa, unidentified
MEKEVEKWLFVGIDVGKRRHDACFLEGDGKVLKYMQFDNRIESFKRFLSNIEQFSKEGFKVSVTVEATGHYFLNLYSFLTKRGIEVTVVNPIQTDSVRNVFIRKTKSDRRDSFIIAELARLGRARKSNIDSERSRISNIKMLTRFRMEYVSKVSNIKKKLSSDVLRVFPEFFDVFKGFNTRTSLMILRNYPTPRRLLREDRTILYALVKSWSKGRMGEEVVDRLISLAKDSIGSFIDIDAMEVEIPFIVDEIFFLEEDIKEIERHIEEQSSEIEEIELLKTIPGISTVSAASIVGEIANIDRFDSAKKLRAYAGIDPSLKESGDSVRGRSTISKRGSPYLRRTLYYAANVSRRFSPTFKEYYKRKLSQHPNRERYAIVYVANKLITVIYYILKSKKPFDPFYEMKIKGIRPEITTVNQES

SEQ ID NO: 491906 - protein, 390 aa, unidentified
MTYYVGIDIAKYKHDSFIADDSGCVIRDSFSFSNDKDGFDVLLSILKELKPKGQIKIGFESTGHYHFNLKLCLEANGYDYVEFNPLLVHKFSSTQTLRRTKTDKKDASMLAKYLMTIDYKPYVNSFYHINNLKSLTRLRETLITDRTRFLNQITSYLDQIFPEFKPLFENGLNESAFYLLTHYMTPAKMSKLDSNKYSKMKSELRHPISYQKICQIKDAAINSIGHTSKALEYALKSSLNVYLYLDNQIDELESKIIEIYDSLNCHIHTIKGISKLTAAGILAEIGNFTKFLTPAQIQAYAGLDPSKNDSGTHDGLGVMVKHGSSYLRQYLMNSAETFYVYNPSISDFYWKKRNEGKHHRVALSHVARRLINTIFYLEKHNQDFDSKLVK

SEQ ID NO: 491907 - protein, 385 aa, unidentified
MQKLNDLSRSPSPLDPDGTLIAVIEMSLSSWLVAGIVPGVERQPLKKLAVDESALLKLLHRWREEAAKAGYRIKRIAVAFEAGRDGFWLARWLSARDIEAHVIHASSVAVSREHRRAKTDRLDTELLKRAFLGWLRGERDHCKMVAIPTIKDEDAKRPNREHESLVGEQSRIVNRMKAALIRLGIRGFNPKLKKAAERLDGLRTPEGEPIPPNTLAELRRDMVRRRLVSDQIRQIEDARLERLKQAPSDGPHAMVRLLARVIGVGVETADMLVQEVLSRSMRDRRAVARYAGLTGSPDESGRRRREKGLTRSGNARVRRGMIQLAWRFLMFQKDSTLAQWFRARTESARGTRKTMIVALARKLLIALWRLVQEGVVPDGVVLRPA

SEQ ID NO: 491908 - protein, 342 aa, unidentified
MDIHVVGIDLGKTLFHLVAMDATGKVIIRKRCSRTQLLTFTANIRVWRIGMEACSGSHFLARALQQQGHDVRLMPAQYVKPYVKTNKSDYIDAEAIAEAVQRPSMRFVPLKTEEQLDLQAVHRVRERWVMRRTAVINQVRGLLLERGITLPKGRSHLEEALPEILAEAHIRFSESISVLLAQLRFELDDLGTRIEEMDALIARISKENEACQRLTTIPGVGPVTATALVAAIGNGSAFKRGRDLSAWVGMVPGEFTTGGKQKLLGISKRGNSYLRRLFVQCARSLLRFRERQGAPFGVWLAQLIGRAHQNVVVVALANKLVRIAWAVLFRNETYRSPVPMSV

SEQ ID NO: 491909 - protein, 369 aa, unidentified
MEKTTRFVVLDVHKASIAVAVADAFGDPEDHGQIANDPSAVRKLIDRLGGADIGLSVAYEAGPTGYALQRQLTAMGIACVVAAPSLVPRKPGDRVKTDRRDAAKLARLLRSGDLTPVWVPDEAHEALRDLVRARDDAKTDLLRAKHRLSKFLLRRGIYPPTGVRAWSRAHETWLSRLTLDRRADQIVLDDYWSVVRDGRDRVRRLEAALVACAAESPHAQVLAALQAIRGIGFLSAVTIVAEAGDLRRFPTARAFMAYVGLVPSEYSSGTARHRGRITKTGNRLIRHVLGQAAHNARYRPNVSSALRARQSLVPPAVADLDRRAQARLHARYRHLAGRIGVNKAVTAIARELAGFVWALGQLLARPVAA

SEQ ID NO: 491910 - protein, 370 aa, unidentified
MSNATTFVGLDVHARSVKACAFVPETGETIRRSFGYEPCEIASWASSLPQPAKCVYESGVTGFHLCRELRSMGVDCVVGAVSKMHKPAADRGRKTDRRDAQFLAVQLALGVVTEVHVPDAECEGARDLTRALADARDDAVRAKQRLSKFLLRHGFVYDERNSAGQRRNRWTRDFWAWVGRIDLGDGAAMATLDHYCVRVREADAAKAALEAKVKALAQQPRWKPTCDALKCLKGVDAVTAVSIACEVDGFARFAAASGFAAWVGLVPSEHSSGESQFHGGITKAGNKHLRKLLVEAAWHYKGASRSPKGLVKGQIVDEATRRHASAGVRRLVDRRRAMDDAGKQSSVANVAVARELACWCWAVGRMAEGA

SEQ ID NO: 491911 - protein, 331 aa, unidentified
MWYFTGIDVSKEKIDIGWLRDVATGKKKTKVFRNTAKGHQQVADWLLKNINVPADEIVVALEPTGVYHEALLYFLHECGFKVLLVNPGKARKYAESVNLIHKTDKLDAVMLAYYAHDQHNRLTLWQPEAPEVRELKVMIRRLDALEKDLQREQNRQEATLVSLSSDRVTQSLKDMIETLEAEIKRLQKDIDDHIDSFPELKRNRQLLESIKGIGPVMSRELVYLFAAKKFKSARQAAAYLGLIPKLRESGKFKGRTMLSKIGSARIRSKLYMAAVCASTYNPDIKAQKQRLLKKGKLKMQALGAAMRKLIQICFGVIKHQSEYQPQLALIS

SEQ ID NO: 491912 - protein, 387 aa, unidentified
MIRIEYLRGSVFCQSFIKCFTTKTYIHGIKEFIKVAVYQGNENTASIEKVIRNDKGQIQKFYKRLKKEYNIRACYEAGSCGYVFYRWLKEIGVKCEVIAPSLIPKRVGDRIKTDQRDAQNLGRLYRAGELVAVHIPSEEAEADRGVVRLRDQIRKEIHQSKQYILKFLQVRGLRYEGVKNWTQKHWDYIRIIKFENKADQFTWCRYIEILEYKLQELVGVEERIKELAFSKKYEEVVKKLRCLRGVDVLTAITFATEIIDCKRFSQPREIMAYLGFIPSQYSSGKKQRYGRITGTGNSRLRRILVEAAWHYRHAPRISKELKKRQEGQDLEVINYSWKAQKRLYKRFTNLGFRKNKKIAVVAVARELTGFIWSLMVNENNYSGIKTA

SEQ ID NO: 491913 - protein, 389 aa, unidentified
MLLDHPSDGLTAIRTHIGAIFVSLELSRSTWLITSLSPGQGEKMSRHSIAAGDIAGLLALFAELKRKAAIRTGQSYPIITIQEAGLDGFWLHRVLQQEGIESHVVDPASIATPRRRRQAKTDRLDGETLLRALLAYKRGEPRVCAMVVAPSPEEEDRRRLCRERRTLIEERVIHTNRIKGLLFAQGICDYVPMRRDRRARLEALRTGDGRELPAHLKAQISRELDRIELLLEQIKAVEAAQDALLAAARRPASQEAAPDPVTMLLALKGLGPNFAAMLWSEAFYRQFANRRQVAAYAGLAATPWQSGGIRHEQGVSKAGNPRLRTTMIQLAWLWIRHQPQSVLTRWFKERSQQGRKRAIVALARKLLVALWKYVTQGVVIEGAMMKPAA

SEQ ID NO: 491914 - protein, 339 aa, unidentified
MKQIKFFVGTDVSKEWLDMSIISGGKVLHHARIANKVVAVRRWLRQTQKEFGYTLQDTLFSMEFTGLYNHHVLEVLHALNASVWLIPGLQISEGSTNGLKRGKSDKQDAAQIALYASKNLEQVRLWKRPRKVLEQLQTLLMVREKLQRTKHQYETTLKEYKSFSNKEQYCIIRDCAETILKTTGKELVNIEKQIEQLIQTDEKLRELNGYITSVDGVGQVTAANMLVTTNEFLNIKEAKQYACYAGVAPFKDESGKVKRREKVSHKANKKMKKLFHLLAMSAIRMKGEMKMYYERKLAEGKNKMSVLNAIRNKIILRIFSCVKNKKLYEKNYVYSLAKP

SEQ ID NO: 491915 - protein, 461 aa, unidentified
MVAVMIGVDPHKASHTAVVISAAEEPLGEVRVRACAAQAERLLAWAAAWPERAWAVEGADGVGHLLAQQLLAAGERVLDVQPKLSARVRLLAAGATGKNDPNDARSVAVAALRSPSARAVAADDHAAVLRVWSKRHRDLSRTRTQVACRLHAVLCELLPGGLATQMTAGQAAQLLGSITPGDAVAAARRELAAQFTADLRGIDAQMRDTKRKLTVAVRAAGTSLTGLFGAGPVIAATVIGDVRDVSRFPSRDHFAAWNGTAPVEVSSGKRKIYRLSRRGNRRVNHAIHMAAVTQIRYRHSPGRAYYDKKRAEGKTGKEALRALKRQISDAIFARLQADARRAASTNGPGGQPGNDSDSSAAGSHPAHRLFGQATPGPATQPMTPAIGQPAPAGPSRLAAIPRERAGGSRTGQGPAAPRRPQGVLDPAAREPTIPKAGKRTRQQPKAAARPAPNRTRPARSS

SEQ ID NO: 491916 - protein, 351 aa, unidentified
MATTTADSTEIIGGVDTHQDLHTAAIVDLDGAVLGIESFSTTRAGYRAMLRWFRSHGEVLRVGVESTGSYGAGITRHLALSGVPVLEVTGPDPAGRRAKGKDDALDAVAAAEAARTRHRVQVAKDRSGAVEALRVLRTTRKTAMKCRRAALQQLHNTIVAAPEEVRDQVRNLTRMRRLRTCAALRPDAVGYRDPVVATRLALKYLARRVLDLNDEIAELDRFIVPLVEELAPNLLKLEGVGTENAGAMVVAVGENPDRLRSEASFAMMCGVCPIPASSGKTQRHRLNRGGNRQANSALHMVVVCRMRTDERTRDYVARRTREGLSKREVIRCLKRYVAREIYRVVTVSPPT

SEQ ID NO: 491917 - protein, 341 aa, unidentified
MKKILKEVVGVDVDQKKLVVSLGRLYEDLEQEIYAHKVFDNKATGFHALVSWVSKLTNPEVEVCFVMEATGVYHESFAYFLDENGQKVSIVLPNKISNFFRTLEVKTITDKSSSEAIAKFGLSRTLSRWKKPDPTLKKLKQLSREREQLIAERTLVKNQLHAETAEAEPYKASLQRMEKRIAFLTKQEKEIQQEMKLLIDSDNKISEQVKLACTIPGVGILTSAIVLAETNGFEHVKNKRQLASYAGLDVREKQSGTSVKGKPRISKRGNRYLRKAMYLPALAAIRSNEHYRGIFARLVARHGIKMKAAVAVQRKLLELIYVLIKNNTVYDEHHLKPVHAA

SEQ ID NO: 491918 - protein, 349 aa, unidentified
MVVVGADVHKRTHTFVAVDEVGKELGHKTVDATTAGHQAAVRWAWDRFGRQLRWAIEDCRHLSARLERDLLTAGQSVVRVPPKMMAEQRRIARTRGKSDPIDALAVARAALRDPDLPVATHDEASRELKLLVDRRDDLVKYRTATINRLLWRVHELDPAWAPPAHGLDLAKHQQILAARLASLDGIVAELARDELAEIVELTSKINSLGHRITGLAQAAAPTLLLLPGVGPLTAAKLVGETAGVTRFKSEAAFARHAGIAPIPVWSGNTAGRVRLTRSGNRQLNAAVHRVAITQIRLDGLGKTYYLKKKAQGMSTPEALRCLKRRLARIIFNHLTTDHTAVATHLAAAA

SEQ ID NO: 491919 - protein, 400 aa, unidentified
MIDTSDIDVFLGLDVGKGEHHATAVTPAGKKAFDKRLPNTEPKLRELFAKLRAKHGTVLVVVDQPASIGALPLAVARDMGPVAYLPGLTMRRIADLHPGEAKTDAKDAFIIADAARAMPHTLRAIDGEDETIAELEMIVGFDDDLAGEATRVANRLHGLLTQIHPSLERVLGPRLQHPAVLALLERFGSPAQIRKAGRRRLVTLLRPKAPRMAERLVEEIFTALDEQTVTVPGTEAAALIVPSLAGSLTAVLDQRKLLAGRIEELLEAHPLSKVLRSMPGVGVRTGARILIEVGDGSTFPTAGHLAAYAGLAPATRNSGSSIRGEQPSRRGNKQLKRAFFLSAFAALGDPASRTYYDKKISQGKHHTQALLCLARRRADVLFAMLRDGTFYEPQPSASVT

SEQ ID NO: 491920 - protein, 402 aa, unidentified
MAYDFVIGMDVGKYFHHACVLDSQGRQVLSKRINQHEGSLRKLFGKFLADDASVLVIVDQPNNIGRLTVAVAQDMGADVRYLPGLAMRQLSRIHAGNSKTDVRDAYVIAHAGLKLPDALRSVDRVEEVFIQLKVLNGIDEDLARAYTRLINQMRSALVGTYPAFEHVLRGQVIHRKWILHLLAKYGGPTKIRRVGRARLAAFARSHRARNPEPVIDAMLAAIHGQTVSIAGAEYAELGVAMSAKDALAKLEHRKEIEAQVLKLIQDIPHTEILLSMPGIGPRSAAQILMTVGDMSDFPDAAHLASYAGLSPRTNQSGTSIMSNSPNRAGNKRLKNALWQSSFASIRFHERSRQFYERKRKEGKRHNAAVVALARRRLNVLFAMMRSGELYRDISTVQQATAA

SEQ ID NO: 491921 - protein, 327 aa, unidentified
MAQKMDVVGIDVSKATLDAYALASQQARQFANDPAGHQELVAWLQGLGVDVAVFEASGGYERAAAHSLRRAGLAVHVVDPKRVRHYAKAAGQLAKTDRIDARLIAEFGAAFLLAAPGGMIGADDPARQDLAHLVGARQDLVDHKIAFQQQADALPAGVARRALLAVLKRVDREVEALERRIAVAIARHAPFAELARRLDTVPGLGPLSIAALIAWLPELGQLGRRQVAALVGVAPFADDSGTRTGQRYIQGGRRKLRNVLYMATMGAATRHNPVLRAHYRRLLDNGKKPKVALIACLRKLLTILNAMVAHQQDWNPIGRPAAELVAP

SEQ ID NO: 491922 - protein, 345 aa, unidentified
MKIIGCDFHPSFQQIAICDVETGEFQERKLSHADGQAERFYRELGEPALIGIEATGNSQWFLDLVQRLGHEIRVGDAAKIRASYVRKQSTDKRDAGHILKLLLEKRFPQLWTPSAAMRDQRQLLRHRDKLVEVRTKVKNSLQHLAMNQGMQKKSRLWTRQGMEQFQQLAMPGWAGTRRRDLLQLLKELNGQIEPLDQAVKQAAEQHPQAQLLMTQPGVGPVTALAFVLTIGDVARFAGSKQLTSYLGLVPSEHSSGCKRRLGAITKQGNRFLRKLLVEAAQTVVRKDEGFRKEYQHRCRRRPKGVAKVAAARKLAVRLYWMLRSNVSYPEIVRVESNPRVPLGDV

SEQ ID NO: 491923 - protein, 343 aa, unidentified
MGEVSTIGLDIAKSVFQVHGVDVDGAVMIRKRISRAKVLEFFAALTPCLVGIEACPTAHYWSRELQALGHTVRLMPPSYVKAYLKRSKNDANDAAAICEAVTRPSMRFVPTKSEQQQSALMLHRSRQLLVRQRTMLSNAIRGHMAELGVISAKGRNGTAELLEIIAKDEDDRIPGVARLSLTVLARQYAAITTEVGNIEKHIHALHRSCEESRRLAEIPGVGPIVATALIAEVGDWTAFSSGRSLAAWIGLVPRQHSTGGKDRLGRISKQGNRHLRWLLVAGAMAVIRYARQHGTKRLWLVRLMGRRPVKVAAVALANKIARMAWAMMVRGERFNEPKLQSAA

SEQ ID NO: 491924 - protein, 351 aa, unidentified
MRRFYTKQHRFYCGIDLHARLLAICIIDHDTASVVCRVQIPADKQMLLDTLAPYRADVVVAVECLFAWYWVADLCAAEKIPFVLGHALYMKAIHGGKAKNDDIDAEKIGRLLRGGNIPVAYVYPKGLRETRDLLRRRMHLVHQRAGLITHIQILNAQNNLPDFGKKLSYARNRAELQIAERFLIPHVRKSVEVDLALIDALDVQIADLELYLERTARIEDPTTFHLLKTIGGVGKILGLTMLYEIHDIRRFAEVGEFLSYARLIRCTHESSGKKLGIGGAKIGNAHLKWAFSEAVCLLIRNYPAVKAWQAKKEKRHGKKKTLGILAARLGRAVYHMLRKREAFDVRRFLGQ

SEQ ID NO: 491925 - protein, 415 aa, unidentified
MQERTKSSAGIDWAKDEHALCVVEEAGGRKIFEGRFDHRERGLTKLCRSLVEMGVERVAIERPEGVLVERLLECGIVVLAIHPNQLKASRPRFRASGSRSKSDSFDAFCLAELARTDHHRFRALVPDSDETKALKVLTRAREDLVAIRVASANRLRAELEAFWAGAASLFSEIDSSISLAFLERYPSPKDAARLGEKRLSGFLTKKGYSGGRSARELLGRIRKAPKGRAGKAETEARREAVLGLVGTLRVLAERIKHLEDEIAKALRAHPDGEIFLSLFRSPNSTLTAASLVAQIGHCRERYPTNEALAAAAGMSPVAVESGKRKVASFRRACDKRLRRAFATLSESTRQHHPWAEDVYRRARGRGCDHAHAIRILGRAWVRVIFRMWQDGLPYDPERHGGFERLRSGEGLPQGV

SEQ ID NO: 491926 - protein, 349 aa, unidentified
MIIIRACNKFACVDTRTGELSERRLAHREQAEQFYRELGQQKVAVRVGMESSGHSRWFERLLHELGFELWIGDPAEIRTKRVRKQKTDRQDAQLILQLMLENRFPRIWVPDAENRDLRQLLWHRHRLVQMRTRVMNQLHVVPLNEGLRRKKALWRPAGRKEPESIALAPWASRRQQGLLNLLDQLTPKIQELTRALGEEVEKRPVTRRLMTHPGVGPLTALAFELVIGTPERFHCGKQLASYVGLVPEEKSSGDRRRLGHISKQGNVLLRFLLVEAAQVTVRSQPEWRSKFFDLAMRRGRKIAKVAMARKLAVHLYWMWRQGLDYDQSRSSVRTRESPDISMVCSKSST

SEQ ID NO: 491927 - protein, 339 aa, unidentified
MKLYAGIDLHSNNSVVSVIDEHDRVVAEKRLPNELERIVLFLAAFKQALVGIVVESTFNWYWLVDGLMEAGYRVHLANPAAMRQYEGIKHTGDEHDARWLAHLLRLEILPEGYIYPRQARGVRDLMRRRMQLVECRSQQLLAMQTQIMRSRGHSMRVSELKALELEQIEALVKGERNLASALCANLAVAQALTTQIERLEREILGQVKLAAQFQPLLSMPGVGNILGLCIMLETGAISRFPGVGNFASYARCVDSQRLSNGKKKGAGNAKCGNRYLAWAFVEAAHFAVRYNARIKRFYERKAAKTNSMVAIKAVAHKLARAAYHIMRTHERFEEARAFA

SEQ ID NO: 491928 - protein, 335 aa, unidentified
MQIYGIDLAKEKFDVSFFDLTSKKVSNQPSHKVVMNNLKGIGKFFKGLPSDAVLVAEHTGVYGDTLLKCCMDSNVKIAFVGGYVIHRYRATPDRAKTDVLDCALLRDFGERYPDKLKYKTFPEEALYELRQLARHREMLVEQRKQLITADRSEDCRPIRSLAVKRSMDRIKEMLDTEIAETEKEMLKVINGHESIHHNYELVKSVDGVGLITAVELLVKTENFTKITTARQYAAYAGTAPYEKSSGKMDKGAHISKIGNRRSKTLLYICAESARLHNKEIKLYYERRTLIDKKPRHYVLNAIANKLLRIIFTLVEKGEYYDANFIRQDPRVVKYN

SEQ ID NO: 491929 - protein, 331 aa, unidentified
MRFKEIIGIDVGKLNNELRIQSNQKPYGFKNTKTGCIGMGKWVLKNTSFKKQEILFVFEHTGIYTYPLSCYLQENGFPFVLVPGLAIKRSLGIARGKDDKIDAKKIALYGYHRREELTPYELPSQDIQDIKNLLSLREQLVKQRAGYKARVGEFKLFLERNGNEVMFEVQEKMIEDTTLQIDKVENEIDRIVKSNEKLKLLFGLVTSIKGIGPQTALFLMVFTNGFTQFKTWRKFASYCGIAPFPNRSGTSLRGKTKVNNLANKKIKSLLDQCAKSAIQHNREMKNYYQKRLDEGKSKMSTINVIRNKLLSRAFAVVIRRTPYVDIMKYAA

SEQ ID NO: 491930 - protein, 315 aa, unidentified
MMAQNGLVVVGIDVAKDKVDACIRSLSLRQTFPSTAQGHRKLAAWLCKHPVNKAVMEASGGYERAWARMLREGGIEVRIVDPKRVRSFALSAGRLAKNDVIDAEMIAWFAETFSEAPSQTHDAAREELQTLVKARLSLIDVRMRLVSQSEHAAPGLVHIMKSLASEIAKLEAAICAKVKSTPDFAERAEIIESVPGLAGTSSANIVAGMPELGQVSDEIAAALIGVAPYDDDSGKRRGERHIKGGRRWVRNAIYMPCVGAATLNNPVLKAYYQRLIAKGKEPKVAIIACMRKLIIILNTMIARRQKWDPSRYALS

SEQ ID NO: 491931 - protein, 356 aa, unidentified
MYNLSKLDFTGQHIYAGIDVHLKSWKVNIMTEHSSYKSFSQPPNPAVLSNYLQRNFPGATYHAAYEAGYCGFWIYDRLKELGIGCIVVNPADIPTKDKERSGKTDKVDCRKLARCLRNGELDGIYVPARANIEDRGLLRTRRSMVKKQVRCKAQIKSMLAFYGIHLPEDMIHRNRSSKFIHWIESIQMERASGNYVFKVYLYELSQLRQLVTALNRQIRILARRKEYKTNVQLLKTVPGIHTLTAMTLLTELFNIDRFPSLDKLASYIGLVPDTDSSGEKDAKKGMTNRKNQFLRFLIIEDAWAAVRQDPALLMAYERLTKKMKKTRAIIHIARKLLNRIRYVLKNQKEYVPAVVQ

SEQ ID NO: 491932 - protein, 419 aa, unidentified
MVRVVDSDGRTVYKPFPIRNNCSGCNTLLERLRKLTNQKSDFVVAMESTAHYWLALYTRLRKEGYRVVVLNPIQTNAMREMLMQDAKTDDIDTLVIAETIRFGRYKASSVPQEKLLAMRELCRNRFYLVDMGSDLKRKIIALLDQVFPEFETQFDSIFCKSAVAVLKQYPTPEKLSRAQLGKLTEILQIASNGRFGEWKARQLKELARDSFGIQDCEGAYSTLLLLYLDQLQSLQDGAASLERRIEDIFSQFDSTLTSITGIGPVLGAVILSEIRDIASFPSADKLAAYAGLDPKVKQSGETRSSAVHMSKRGSPYLRRAIWMAGTIAVKYDPMFKAYYEKKAAEGLRYMNIIGHVSKKMTSVIFRSCGTPRYTSLFCPLRNGGMAYFLTAHCGGLSSLHPLSSPVHSTLSEFLYLTNP

SEQ ID NO: 491933 - protein, 405 aa, unidentified
MYYVGVDIAKDKHYVCILDESKELACKPFWIYSDILGLRELLKRLADLSLDNDDFIIGIESTGAFSENFYSYITDADYKVVLLNSYQTAKYRDFSTLKKIKNDSIDAYVIAELIASGKYKVSYISNEEYHNLKVLNRLKKSLDDKIKTIKREISTVVATVNPEIEKVFPNIFTKTAIVIIKAYPTALDISRATPEKLTKLFRHIKGNNFSDEKAKYLIDLAKSSIYTGRANESRALMIKTNIKILELYIQEKDEIEKQIHDLINNQLDNDSTNIDNLKSIPGVADKTIAAILGECGDLRRFESAKAFIGFLGLYPTLYQSGKSSSTGTLAKRGIPIAKHALYLAAVSSVRHNSELHKLFRDKVSSGKSKKEALIIVAKKLASIIYSLFKYNQEYNPSRVLIQHKR

SEQ ID NO: 491934 - protein, 414 aa, unidentified
MSLKIVYKICCGIDVHKTFVVACIASTNSNGVTTYKSHRFSTYTQGLKHLLQWLLDSNCRDVCMESTGKYWIPLYNVLEKDCSIVLAHPKYVKAIRGKKTDKKDAKWIADLFKHDLVVGSFMPPADIRQLRDLMRYRHKLTCFMSSEKNRLQNCLTVSNIQLGNVVSDTFGKSSMNILDKILENPLDISFDIKPLIHGSMRKKLPELKLAVDGYISPEQAGKLKIIKRHYEDLESRKAELEKLILALASPYQQELDLILTAPSFKNPFSAITIISEIGVNMEAFPSAKHLCSWAGLTPTNNESAGKKKSVRVSKAGCYIKPLLVQCATSVVKSEKHPEIRNRYLHIKKRRGHKKTIIAIARMLLTALYNMLKNNKPYNAELYKKSDCLPVEREITVEQAILIAQRQGYKIKSAV

SEQ ID NO: 491935 - protein, 370 aa, unidentified
MRHILSFDIAKGKSVYCFIDELRNVIIDASLIEHKKDEFDLLFNKVKNYSNLIVIMESTSIYHLPVETYFRSKGIETIIINPKLVKQFKDTLNKSKTDKLDCFKIARCFLGTIDDFYQKQDEYFMYNPLARQYWSLIEGQTRLKNRYRQLIDIVFPEFALIFNDLYDDLALNFIHDFPHPVLFVNRRIDYLMNYLKEKNGTTQAYRFKNKVLKMKELASNSLCFVAFDSYQVQNLVQVIEMIQYHKSEINKIKNQLINEMKDKKLFKIINSIPGFGEFSTALFLAEVGDITRFDDKYQFISFIGIDSVTSQSGVSAYHGPISKTGCKFGRTILFNIVTTILQISAHSDKTNPIYLFFKKNNLKVNIIISV

SEQ ID NO: 491936 - protein, 335 aa, unidentified
MKNYLFHVGIDISKLKLDVVIVKADSINSAEHFVVENTQKGVKVIVDLLLKRRIDLETTLFCCENTGVYTFPLSAYLSEKKYDYWIVPAIEIKRSKGISRGKNDKIDAKDIALYSIRNIDKLKLSSIAEKEIQQLKLLYTERDKVVKTLLLFGTSKENEAFTTKEIYKTISQINTKTIKALKSSLKIIETKMKDIIKNDADLNQQMNLIKSVPGVGEQTAIYLIIATKGFKAFDSSRKFACYAGVAPFEYSSGSSVRGRTKVNHMADKKMKSLLQMCALSAIKYDPQLKEYYLNKKEEGKNGMLVLNNIRCKIISRVFSVVNRQTPFINTYKFAS

SEQ ID NO: 491937 - protein, 358 aa, unidentified
MIVVGTDTHKHSHTCGAVEGLTARALGERTVSARRQGFEELLVWARALGPERVWAIEDCRQVSGALERFLVGRGERVVRIAPKHMAGARRSARERGKSDSIDAFAIARAALKERIETLPTAHLDARALEIRLLLDHRDNLVQERSRDQNRLRWHLHDMWPELDVPDGALARDKWLSIVIRRLAHAPQSAQVRIARELVIQIRARTRKVRALAAELERLVSAYAPQLLDERGCGPLTAAKLIGEIAGAERFASDAKLARASGVAPIPASSGNTRRHRLDRSGNRQLNCALHRLAVNRGKYDPETAAYLKRKQAEGKSRKEALRCLKRFLARRVWQLLCAPTADDHGPLPKEPICAIALT

SEQ ID NO: 491938 - protein, 350 aa, unidentified
MPQLNVPRSAAVYGIDIGKNIFHVVGLGSDGVPVQKVRFRRDTLLQFFERAAPAIVGMESCAGSQWIARKIKALGHKVRLIPAQFVKPYVKSNKTDIIDAEAIAEAATRPTMRFAALKSEEQADLQALHRVRDQMIGTRTRLINQMRAFCLEYGIALRQGAGLFKLDLPQVLEDKSNDLSSAMRKLLADLFADLRQLEQRIGDVTREIEAIASREDVARRLMTIPGIGALGATALLAAIGNGRQFQKARDLAAWLGLVPREYSTGGKQKLLGISKRGNRYVRKLLVHGARSCFRHLDRTRDRLGNWLDGLQARMHPNKAVVALAAKMAGIVWVVLTKPGALYERRDPAFT

SEQ ID NO: 491939 - protein, 321 aa, unidentified
MDYLGLDIAKANFNAALITATQKRHARFANSEAGFAQLLAWLAGHRPQGGDDLHACMEATGNWGLDLAGFLVEAGITVSIVNPRQVKAFGESELSRNKTDKLDAALIARFCHAHTPRPWTPPLPEMRELREMVRRCAALKVSRVQEINRQKAGLASASVALSIERMLAHLDAEIAAVTAGIQAMIARNAELQASFALLCTIPGLGEVTAAVILAELPNITEFTPKALAAFAGLSPQEDSSGNRRVQRGISRIGNARLRAALFMCALSARRHNPALKQVVQRMTSAAKPNKVVLVAVARRLLVFAHAVLRSQQPFRAQGEPA

SEQ ID NO: 491940 - protein, 438 aa, unidentified
MEEAGDEPLFCERAAGIDIGKQVVSVTIRVPSDTRRGGRQQETREFGTTRRQLLEMADWLRCWQVERAGMEATGDYWKPVYFLLEREGFDCLLYQASQVKALPGRPKTDRLDSAWLARITGQGSLAGSFVPPEDIRRLRTHTRYRRRLTQARTAEKDRCEKLLEDAHLKLSSVISDIHGVSGRDMLRAIIAGERDPEALAQKARTRMRRKIAQLREALDCSFFTSDHAFVLQMMLDNIDQLTAQIAVLDERIAILCEPYERQVAQLDGIPGFGVRTAQDLIGEIGVDMTAFPTAGHLCSWARLAPRVRESAGRRKGKNATGRGNPYIGGTLGEAAAGAGRTQTFLGAKYRRLCTRMPKKKAQGAIMRDQLVITHALLSDPEAGYRDLGTGYYEQRERTRRRASSHVRSLERLGYKVTIEPLAPDADPETGELITRTAG

SEQ ID NO: 491941 - protein, 402 aa, unidentified
MNAVGIDVSKGKSMVAIMRPFGEIVSAPFEIKHTAGDIHSLVELINSVEGESRIVMEHTGRYYEVLAHQLSKANLFVSAINPKLIKDFDNDSLRKVKSDKADAVKIARYALDKWQNLKQYNVMDELRNQLKTMNRQFGFYMKHKTAMKNNLIGILDQTYPGVNTYFDSPARSDGSQKWVDFASTYWHVDCVRKMSLNAFIDHYQNWCKRKKYNFSQSKAEEIYGKAKELVPVLPKDAITKLIIKQAVYQLNSASTTVESLRTLMNETASKLPEYPVVMAMKGVGTSLGSQLMAEIGDVSRFTHKSAITAFAGVDPGVNESGSYEQKSVPTSKRGSSDLRKTLFQVMDVLIKTHPEDDPVYQFLDKKRAQGKPYYVYMTAGANKFLRIYYGRVKEYLSSLPES

SEQ ID NO: 491942 - protein, 350 aa, unidentified
MTKIIRIGVDTSKSVFVLHGVDSAERPVLRKTLRRRQFLEFFAKLEPTKVGLEACGAAHHWARELQKLGHEVVLLPPQYVKPYVKRNKNDAADAEAICEAMSRPTMRFVPVKTAGQQAALMLAGTREALIRRRTQLTNTIRGYAAEFGLTAAKGLDKIEPLLVRIAADDSLPELAQELFAEYGQEYARLQRQLQKIEAKQLAWHKGHEASRRIAEVPAVGPIGASLTVMKVPDPKAFRCGRDFAAWIGLTPKDHSTAGKTRLGVITHAGDETLRSVLVAGATSLIQQVRKGRGHPSPWLLQLVRRKPPKLAAVALANKNARIIWKLLVSGERYNPTRISRGGGTTAKIAA

SEQ ID NO: 491943 - protein, 415 aa, unidentified
MNSNPLIAGVDVHRKTNTYCLMTQEGREVVPRFTLDNNRPGTQRLIEKVGQIMETNGFSELRLAAEATGWYWFHLFESLRNNPELQTWPHELFLLNPRLTANFKKSYVDLDKSDPIDAYVIADRLRWGRDITTPFDYDENLLALRFLTRYRYHVVHQLASEKAYCTSILYLKASEYSNDDKQAFSNLFGAASRAVIQEFVSMEEVATLPFDELVTWLDEQGKHRFPDPAENAKRLQQIARDSYPLSEALQPSVNLVLSLSLKNISNLEALSKRLDTAITEQMETIPNTLTTIPGLGSVLTAGLIAEIGGVERFDCNQAKVAKFAGFKWRKSASAEFQAEESHLTRTGNPYLRYYFCEAAFSVQRCDREYGAYFQRKFKEARTHRHKRATVLTARKLVRLVVRLLATNQPYQPRRL

SEQ ID NO: 491944 - protein, 344 aa, unidentified
MLQVSTIGLDIAKHVFHVHGADGKGRAVFSKRISRGKLLDFFAALPNCTVALEACGGAHHWARQLTQLGHEVRLIPPAYVKPFVKRQKSDAIDAEAICEAAQRPSMRFVAVKSEEQQAAGLVFRTRDLMVRQRTQLINAIRGHLTEYGWIAPKGPSHVATLADLIEEEAMASSLPEAARPMFRVMLDLLAELNGKIADLDKEIARRAREDEVSRRLMTIPGIGPISATAIAALAPPIETFAKGRNFAAWLGLTPLQKSTGGKQKLGATSKMGERTLRRLLIIGSSAVVQQASKRGAPKGSWLEQMLTRKPRMLVTVALANKMARIVWALLVKRENYRAPVSAKA

SEQ ID NO: 491945 - protein, 333 aa, unidentified
MLYVGVDHHTKTSHMTVVDESGEVVRRKGISSNGDDVRKALQDFNEPIKAVLEAGYNWGKMYDWLDEVADEVVLAHPKKVRAIAEARIKNDKIDSMTLAHLLRADLIPEAYACPADIRATKRVLRQRMFLVRIQTMLKNRMHALIHQYDLKKPNVTDIFGAAGTIWLRSLALPDPDASILEEDLLLLGEVSERIASTEGLIKELSTGDQAVRWLKSIPGIGDFFSVLIRYEVGDMARFRSAGKFAAYTGLVPSTYASGERLYHGKITKQGNRYLRWAFIEAVTPAARVSPGLRAFHERIARKNCKKAARVATARKLAEIVWHVWTEQRFYEVR

SEQ ID NO: 491946 - protein, 346 aa, unidentified
MKIVGCDFHPSFQQVAILDISTGEVEELKLMHATGEAERFYRDLASPVLVGMESMGNSLWFERLMERLGHELWIGDAAQIRASYVRRQKTDKRDAAHILRLLIEKRFPRIWVPSHLERDQRQLLLHRHRLVQMRTRVKTELQHLALNQGLQQKRSLWSVRGRADLEKLPLEGWTRRRRLDLLKVLDMLETQVGELDEAAGKVASANAGARLPMTQPGVGPITALAFVVTIGDVARFKRGKQVASYLGLIPSERSSGQKRRLGAISKQGNVFLRTMLVEAAQSAVRHDEQFKKEYAHRCHSKPKGVAKVAAARKLAVRLYWMLRNQTPYTHAVHNEGSPSHPVVGAS

SEQ ID NO: 491947 - protein, 352 aa, unidentified
MLIIGCDFHPGFQQVAIFDNRTGEIEEKRLQHRAEAEQFYRSLAGQEVLVGMEACGHYPWFERLLQELGMELWLGDAARVRAAEVRKQKTDRRDAEHLLQLLRQDRFPRIWVPSLEVRDVRQLLVHRHKQVQARTRTKNQLQAMALSCGVQKKYKLWTKAGRAELEQLPLLPYAAQRRQCLLEALGGLEAEISELDRRVAEEARQRPEAVRLMTHPGVGSVTALAMVLTLGPAERFASAKQVGSYFGLIPSEDSSGGKQRLGRISKQGSSFLRFLLVEAGQTAARLDPQLKRFYRRLAARKNRSVAKVAVARKLATRLYLMLREDWTYAQLSQAVMQVGPSHSVAGKQEPSV

SEQ ID NO: 491948 - protein, 376 aa, unidentified
MNAPGAAQGKHTGEARALYMAFELGEKNWKLALGDGVSAPSRYSVAAGDTARVLECIAKAKARCGLAKGAKVHSCYEAGRDGFWLHRWLIAQGIDHIVVDSASIEVNRRARRTKTDRLDGDKLLAMLIRYHAGERRVWSVLRVPTAQQEDERRVHREVERLVRERTAHINRIRALLVMHNLRVKYVGGRLWQRWWSTHAEELLPGVRAEIEREGERLALVRAQMRSIEAQQHQAVAGGREAQVARLVKLRAIGVSSGWVLVKELFGWRRFRNRREVAGCLGLVPSPYASGESETEQGISKAGNRRVRALMVELAWCWLRYQPQSELSQWFSKRFAAGGKRMRRIGIVALARRLVIALWRYLGDGLIPAGAKLKSIG

SEQ ID NO: 491949 - protein, 347 aa, unidentified
MNISMIGLDTAKSVFQVHAVDEAGKVEIRRKLRRSELVPFFEKQEACTVVLEACGAAHHWARMLTGLGHDVKLIAPEAVRPFVKKGCKNDAADAAALCTAASRPDMKFVPAKSLEQQGVLTLHAARTLLVKQQTMLANAMRGLATEFGVTVPQGIGKLGELMALGDADEAFPKKARQAIRGLLDHCDALAESIETFEAEIVAHARHDATARRLATIPGIGPITASLIAVTVADISVFKSARHFAAWLGLVPRQHSTGGKTRLGRITKTGNREIRRLLVLGATSMVYRAPQWNSAAGVWTRAILERRPVRLVTVALANKMARIAWALMTRSEVYHAKGRVATVAEAVA

SEQ ID NO: 491950 - protein, 381 aa, unidentified
MGDHIAAFVAFDTSKLRNAVAIAEEGRTGEVRFLGEIDNTAEATAKLVTKLAAKYARLAFCYEAGPTGYGLYRQITDLGHECMVVAPSLIPKKPGDRVKTNRRDALGLAKQLRAGELTAVWVPDGRHEAMRELTRARGAAVQDVRQKGQQVSAFLLRLGRHYDADKKTWTKAHMNWLASQKFEHPEQRIAFEELLLAVHQARERVARLEEAIRQAVPDWSLAEVVPALMAMRGIDMVTATAFLAEIGDLSRFRTPRQLMAYLGLVPSERSTGDTVERGPITKAGNRRARRLLIESAWAYRHPPRVGKDKQAKVAAAPRAVREIAWKAQHRLYARYRALTRKGKLKTVAITAMARELAAFIWAVNREIANTGGAAAQQGIRG

SEQ ID NO: 491951 - protein, 354 aa, unidentified
MSKDIILTVDYHDRACVIRRLNRSSVEEQVLTEIPTTAESLNKVVDQARREVGRRGRVIWIQESTTGWARVQKLLGERVEFTLANVLQMPLPPKARRRKTDKVDTARMQREYLAGNLPLAHQPAASWRQLRRSVAYREGLVSRRTAVRNWIDRYLAHETWFDRTALWSPKGQVRLRTLVRDLPRTDGLVIEQKLEELRRLEEQLGVALSELVLAYDDSPEAQRLDAILGIDVVSGISIVARVGPIERFRNSDALIAFAGLAPGIQESDQTRRNGRIGGGGTDRHLRHYLIEATVWARKIPRYQGTYERVKKRRGPKVGRIVVARMLVRSIYKILKKGVAFDPGVTTQASTTAAC

SEQ ID NO: 491952 - protein, 352 aa, unidentified
MIIIGVDFHPEFQQIAAVDTDSGEFQEKRLAHRDEAENFYRALAGHKVRLGMEASGHARWFERLVAELQFELWIGDAAEIRTRRVRKQKTDRQDAQLILRLLVEDRFPKIWVPSWENRDLRQLLWHRHRMVQARTRIMNQLQAVALNEGLHCKKRLWREHGRQQLESFRLAPWASRRRRDLLELLDRLNPTIAELSQAIEQEVEKCPEAQRLRTHPGVGALTALAFVLIIGKADRFQCGKQVASYLGLVPLEDSSGNRRRLGHITKQGSSMMRFLLVEAAQVTVRSVPEWRSKYLHLMMRRGRKTAKVAMARKLAVRLYWMMRQGWDYPQWSKFGSHAGQPGHRHGVQSNTE

SEQ ID NO: 491953 - protein, 343 aa, unidentified
MEHFAGLDVSVKETSVCIVDDTGKIVREVKVASEPDALLAELRNPAHRFKRIGLEAGPLSQWLLSALAEAELPVICVETRHMRAVLKAQINKTDRNDARGIAQMMRVGLYRPVHVKTLRSQKLRMLLTHRKLLQSKAIAIENDLRATLRNFGLKVGIAGKVKFEARIKELVENQPDLAVLVEPLLIVRRVLREQIGILHRRLLAVVRDDEVCRRLMTVPGVGPVVALTYRATVDVPARFRKSKAVGAVFGLTCSKYQSGEIDRSGRISRCGDEMMRVMLYEAAQSMLFHSTKWSWLKAWAMKIARHRGMKKAIVALARRLAVIMHRIWVDGTEFRWTKEVVTA

SEQ ID NO: 491954 - protein, 340 aa, unidentified
MEWTVAVGVDTHKDAHVCVALDRLGRQLERASFPASEAGYGACLAWALALGEPAFAVEGCGSFGAGLARVLTGAGLPVWEAERPRRRERRRGKSDTLDALRAARRLLSDGEGLSELRSLPGREAVRVLLVECRSAVSARTQALNQLHGLALTAPTRLRERLETLAGGRLAEAALRLRPAERADVDERVLVEVARRLGRRAQALTRELAALDARIAELVRSLAGKLLAEPGVGPVCAAQLVVSSGDPARLRSEAAFAALAGTSPVEASSGRQKRHRLNRCGDRRLNEALHVIALNRIRHHPETAAYHARLLERGKTRREARRCVKRVLARYFYRQLCALLA

SEQ ID NO: 491955 - protein, 412 aa, unidentified
MEANMEVVYERACGIDVHKEEVVVCLITGQRKAETRKYGTLTKELREMVEWLKEEKCAIVAMESTGSYWKPLYNIFELEGMEAIVVNAQHMKAIPGRKTDVNDAQWIAKLLRHGLLRASYIPDKDQREFRELTRYRDSRIAERSRDINRLQKMFEGANVKLGNKVSDIMSRSGNSLIKLIISGKEITVEQVRSARDPHCKSSADEMLDSLTGIISPLQRELFAQVMRIIDEQTEQIERIEAMIRKYIAQAYDAAATALDDVPGIGRISAEQIVAETGIDMSRFPSADHLCSWAGLSPGNNESAGKRKSGKTTKGNKTLKKTLVQCATSAINKKDSYFHAQYQRLVVRKGRNKAIVAVAHSMLIAIYHVLSGKKYKDLGADYYNRFNPEKKKQYLLRELKKLGWELPCPVAAT

SEQ ID NO: 491956 - protein, 342 aa, unidentified
MSGDYDGRQYVGIDLHRRRSVIVRTTEQGEQLGWVRIDNDPVALGLELAKAGPDPEVVLEATYGWYWAVDALQTAGAHVHLAHPLGVKGFAYRRVKNDVRDAADLADLLRMHRLPEAYIATPHERELRELVRHRAKLVALRSGLKAQVHATLAKQGQLPAASDVFGRAGMAWLRSAPLELVYRQRIDSLLELIDAYDGEIETFRTMIANRFTGHRGYRAIQQLSGIGPTFAAVFVAEIGDVTRFSRPEKLCCWAGLTPRHRESDTTVHRGPITKQGSKLVRWAAIEACQHTRAGTKLSADRSRIIAARGRNVGIVAAARRLLTLVFYGLRDGEIRALAARAG

SEQ ID NO: 491957 - protein, 410 aa, unidentified
MELLHRRCCGLDVHKETVVACLRLVSDGKVTTEVRTFQTTTADLLRLSVWLAENDCTHVAMEATGVYWKPVWHILDDGEFVLVLANAAHVKNVPGRKTDVNDAMWLAELLAHGLLRASFVPDTQTQEMRSLMRTRKQLVREQTSHVLRVQKTLEDANIKLDSVLSDLMGKSGRAMLEALIAGETDPAKLASLASRRVKASPEELREALRGRVTKHHRFLLRLHLNQIDALDAAMATLDAQVEADLGPFRTAVELITSIPGVKNLGAHVIVSEVGIDMHRFPSAAHLISWTGICPRNDESAGKRRSNRLRKGAPWLKTMLVQCAWAAVRPKDSYLQAQFYRIKARRGPKKAIVAVAASILTAIYHMLKDGTMYKDLGRDHFDRRSTDRQKRRLVKRLADLGYSVVIKPLAA

SEQ ID NO: 491958 - protein, 391 aa, unidentified
MYFDSNTQPASDARVQVGIDAAVVAHHHVCVRSVDADGHVNVSRFHVPPTLTGLAALTKRLAPYPGVLAVAEPTSMTWLGLAVALQDAGSDLALVGSRHAARRRGEISGKNKSDVIDPDVLARAGDVFELHPLVLPSPPQLALRRACTRRGAAVIDGNRYLRRLISLARWAFPDLWSAFSGSLPTAVAVLDRWPHLDSLAAARRSSLTGVVAEHTRGVSDVPARVEEIRSTAAAWAHFWAGRLDLDALAWDVNEHLADMAVANARIERATAATQRYWEQLYGDDPLLSSVPGVGPVIAPTIRGFLIDGTGFVNAKQACSYVGMTPSNWSSGNTLDHSGRAITKEGPTVLRLAFYQAANVARTLDPQLAEFYYRLMVAHRHCHTHSVAATSA

SEQ ID NO: 491959 - protein, 415 aa, unidentified
MEDLGLRALYRRVAGIDVHRMLHVVTVLLEQPDGSMQRQTRQFGGFRRDCRELAAWLAELRIELVVMESTGIYWKSVYAHLENAGVPAWVVNAHRVKHVPGRKTDTADSEWLAVLARFGLVKASFIPPKDLRELRLVSRYRRKLNAMRASELNRLHKILDDGGIKLGGVVSDIDGVSARAMVTALIAGQSIEQMLGLARGKLKQRREELGASLDGDLSARHLFVLGHIEAHIETLQREIAEIDSYMLAALQPYAWAHELLQTIPGIDEIAAALILIEIGDDMARFGRAQSLACWAALSPGNDESAGKRKSGRTAHGNSVIRSILCECANAARMTKSTLAAKYRSLMVRKSHKKSIIAVAHKMIRLIYLLLSRRLPYIDQAIDYAAMSARKNAPRWIKQLKCIGRWPSPKPAAASA

SEQ ID NO: 491960 - protein, 427 aa, unidentified
MKYTQNEKIMQISEEILVVGVDIASEIHYARAFNNRGIEVGKLIRFTNSEEGFIAFETWAEELKVKYNKNQVIVGMEPTGHYWFNFAQHLKDHGIKIVLVNPFHVKRSKELDDNNPTKNDRKDPKTIAMLVKDGRYMVPRIPEGIYSELRTAMETRWQIVKQLNTIRNRVKRWISIYFPEFNTVFGDWEGKAALIALKEFPTPARVVEIGVEGIVSYWKKEKIRAVGKRRAVELIEAAKKSIGIREGLAAANNELLTLLEDYEMKIKQYERIMALIEQLTLQIPGMEEILKIKGVGLTTAAGFIAEVGDISRFEHPKQIQKLAGLSLKENSSGKHKGKTAISKRGRRRLRALLFQGIMPIVATNEEFGELHRYYTTRDKNPLKKKQSLILLCCKLIRIFYALLTKKVAYDPQKMMSDIKRPILQEVA

SEQ ID NO: 491961 - protein, 343 aa, unidentified
MIYVGMDVSSKSFEIYAVNAKGKKVFKGPIESTRQGLKQLANDLGREKKVFIFEAGNQMKWIAETVKKLNEIAHVVHPNEVKWIVKSNGKTDKVDAKKLAELGRIDGLPRPVVVAEGKERRLRELISARNNLMVKRVAFINSIKGYVRQEGRKIPKGFFTNGAEWTLPLSEMKITETLKDIIASLMNAVESLKKSEDELSEKINCVADKKIELIKTVPAIGDFSARVLFLAIMNAKRFENKKKVANYGALTPTIYQSGNVTNLGHINRDGRGEIRRVLLQCSHTVARMKSADSKPLREFFERIEKKRGKKIAVIALARKLLTTVYGVMKSGEVYDPRKLAAHV

SEQ ID NO: 491962 - protein, 339 aa, unidentified
MSTQLKPSEPSDKPLFAGIDVGAEELILVIRKDGVPRKAQTFSNTAVDRAHLAKKLAKLPGIIVCMEATGIYHLDLSIALHDAGVKLMIVNPKASHNFAKVLMKNNKTDAVDASTLAELAARMDFVAWTRPSNERLTLRSFSRRINALTRDKAAAKNHLHALSFTRATPQSVLRDAKLAISQLEKRIARLTRDALSLIKRDTEFNHVFELLLGVKGIGETSAIALMGELMLLPPGLSHREWVKFAGLDPRAYDSGKSVHKAGRLSKAGNRHIRSALYMPALSAKQHDPYVKAYFQHLLDNGKKPIQAVCAVMRKLLHAIHGMLKYDKPFDNTRFYAIPA

SEQ ID NO: 491963 - protein, 394 aa, unidentified
MVQSGRVVIGMDPHKRSVTIEVMAGDETILGGGRFATDPDGFTTLREYVRAWPDRVWAIEGCNGIGHHVALRLLAEAQEVVDVPPKMSARARVFATGQGRKTDATDAHSIALVGTRMAGLRPVIDDEQLAVLRTLADRRRALGQEHTRMVSQLHHLLLELVPGGAKKFLSAAQAKEILSKVRPRDAAGKVRRRVAAELVGDLERTYKRKKAADKELTELVRATGTSLLDLTGIGPSGAARLLVEVGDITRFPDRAHFASWTGTAPIDASSGDHVRHRLSRGGNRQINRVLHIMATVQLRSPGIGRDYYDRKKADGKTSMEAMRALKRRLSDVAYRAMLDDAVAHTTDARTGPGGHRGTSLTSSATGSHPHTGTSDQSLPGPVTHDPRTALPAAS

SEQ ID NO: 491964 - protein, 315 aa, unidentified
MTSTQVFVGVDISKAQLDLALRPEGQFSVPNNEAGFAQVLEHLNAVHPTLVVLEATGGLELPLTGVLAAAGVPVVVVNPRQVRDFAKATGRLAKTDALDAQMLAHFAEVMRPEPRPLPDEQTQALAAILARRRPLVEMLPAEKNRLGTAGKPVRKSLRTHIAWLERELSHTDRGLAQTIRESPVWREKEALVRSTPGVGPVVTTTLLATLPELGTLTGKQIAALVGVAPLNRDSGTWRGKRTVWGGRAQIRAVLYMAALVAARCNPVIRACYQRLRAAGKAKKVVLTACMRKLLIVLNAMLKHRTPWRAELVQCA

SEQ ID NO: 491965 - protein, 429 aa, unidentified
MSYRIAGIDVHKKMLAVVVSDVEIEGEFQFERRMFGSNPDQLRALVEWLQQQKAEEVVMESTAQYWRPVWETLERYWKPTRQKREGARSTSGTLHLAHAQSNRGRRGRKKDFLDAKRLVKRLVARELNLSFVPDAEQRLWRTVTRRKCQLRQNRVRLQNRVESLLEEAHIKLSSFVSDLLGLSAQRMLRALADGETNPAALAALADRKLHATPEQLCDALGACTELNVVYRRLLNMMLGELRLIDEQIGQLNQEMANLLSEHQDAVQRLAEVPGLGVDSAQQIIAEVGATAATFPSAKQLSSWVGACPGEEESAGVNYSHRSPKGNRNMRRILNQAANAAVKSKGTIFEIVYRRMVLRLGHKQTIGVVAHRQCVLIWKVLHDGVRYEERGPAVNKESKQRRTARMIRQLRSLGYRIDPPNPQPRQAPAQ

SEQ ID NO: 491966 - protein, 325 aa, unidentified
MDIVGIDISKAKFDAALLVGERVRHGAFSNTEAGFEQFFAWLGRHRPDPAAPLHACMEATGNWGLDLAAFLHGRGVRVSVVNPARIKAYGASELARNKTDKLDAALTARFCRAHAPSAWVPPAAVLRELRELVRRCDALKAARVQEMNRRAAGFASPAVAASIKAHIDWLDEQIEAVMGEVRRLVASDPALSKNLALVRSITGFGEVSAVVLLAELPNIAEFTPKALAAFAGLSPSEHSSGTSVRRPGKISRIGNQRLRGLLYMCALSAKRNNKALADFVRRMIDAGKLPKVILVAVARKLLIYAHAVIRTQKPFTSFPDAPSPT

SEQ ID NO: 491967 - protein, 353 aa, unidentified
MRTYYVGMDVHRASIVIVVLNGAGKIVMQSVIETGAERVRGFLKQLRGKVYVTFEEGTQANWLHDVVRSLVTAVVVCDPRHNKLLQSGNKNDRVDAQKLAELLRNGSLRAVYHGDNGVRTLKELVRTYDCLVSDTTRVMNRLKAIYRGRAIACGGHDIYRPDRRGQWLEKLREPGAKQRAGFLYRQLAALKPLRHEAKREMVKEARRQAAYPWLLSVPKLGSVSVAQLMAVVGTPYRFRSKRQFWTYVGLAVVTCTSADHEVVNGVMRRSTRPIATRGLNRNHNHLLKRVFKNAATSACHSGPFKAAYDARVAQGMAPSLARLTIARQLAATTLAVWKRGEQFSSERMEQQAA

SEQ ID NO: 491968 - protein, 371 aa, unidentified
MNKNTIFVGLDVHKNSTDIALADAGRDGDVRFYGSIGGDLDSLHKVVRKLQGIGATLRFVYEAGPCGYDVYRFLTMKGLDCVVVAPSKIPRKSGDRIKNDRRDALNLARLHRSGELTSVYVPKVEDEAMRDLTRGREDAVKALRTARQVLLAFLLRHGHRYSGLSYWSKTHWTWIAGIKMPHRAQQITLQEYVHAVHEQLDRVQRLTRQIQELVSQWNLAPLVKSLQALRGVSLIVAATTVAELGDLARFDSAKQLMAYLGLVPSEHSSGGTVKRGSITKTGNSHVRRALTEAAHTYCHPARESRVLLTRLAGLPQEVRQTAWKAQVRLCGRFKRLMARGKNRNTVITATARELAAFMWAIARSLLPVIET

SEQ ID NO: 491969 - protein, 375 aa, unidentified
MKKNSKTMRPRKNATQKTATTLSTRTIGIDVGDQTSCYCILDEQGDVVSEGTVRTTEAGFREQFRRMARARIVLETGTHSPWVSRYLERLGHEVLVANARQVRIIYDNDRKTDKVDARTLARLARVDKSLLHPIRHRSAEAQADLAVLRARDLLVAVRSTLINCVRGMVKSVGGRLPSASGAYFSTKVRDQLPGCISGALLPLLEEIENLTIRIRVYDKQIEELAKTKYPKTELMRQIPGVGVVTSLAFALTIDDPNRFHKSRDVGSYLGLRPKQSDSGSSKPQLSISKAGDHLVRRLLVNCAQYVLGHWGPDCDLRRWGLSLMAHGGKNAKKRAVVAVARKLAVLMHKLWVSGEVYEPMRQASEATQTQAAPAA

SEQ ID NO: 491970 - protein, 427 aa, unidentified
MDRFLLISQQVVTFSSTRNVRNLNMRRAYTMYIVGIDIAKRKHEAAVIDGEGTVIIKPFSFTNNCSGYNRLLAMLTKAKLPLDEVSFAMEATGHYWLALFTRLQKEGFRVQVINPVQTNSIRSFYIRQAKTDPRDALLIAEVIRFGHFSESTLHPENIYELRELCRGRHAIVSMQADVKRKVVALLDQVFPEYETAFTNLFGDTSMAILQTCPTPKELSEMPLEELCHLIEVSSHKRFRMAKAQELQELARNSFGFAMAGDVFSTMIRLYAKHLDFLKQQVREMDCKIAEIMDTLDTPITTITGIGPTLGAYILSEIGDISRFSSAAKLAAYAGIDPTMRQSGEYNGVRNRMSKRGSPYLRHAIWLAASSAVLHDPALKLYFQKKRDEGKPYMASVGHACRKMVSIIYAVMRDNKAYTPYIPNEISA

SEQ ID NO: 491971 - protein, 356 aa, unidentified
MTSTKYVGMDVHKESISIAVMNSAGKIVMECVIETKASVLLQFFNGLRGDVRVTFEEGTWAAWLYDLLKPRVSEVVVCNPRKNALLKDGSKSDRIDARKLAELLRGNHLKPVYHGEHGLRTLKELGRSYLTITKDVTRVMNRLKALYRGWGIPCAGHEVYVPRHRSEWLGKISEAGVRRRAEHCYQQLDALRLLHQQVRRDLLLESKKHQAWRLLGLIPGIGPIRAALLIALIQTPHRFRTKRQLWTYCGLGLETHDSAQYRVVEGQLQRSKKSVTLRGLNQDHNRDLKDIFKGAATKVSSSNSGPFHDFYEHLLAQGRKPTMARLTLARKIAAITLIVWKKEVRFDASYLKSQAA

SEQ ID NO: 491972 - protein, 383 aa, unidentified
MGPAPSLKHGGPVMKKDTLFVGLDTDKKHIDVAVAEPLPRGEVRYWGRTANTPASVDRVVKKLGQGRRELVVCYEAGPCGYGLYRQLTGKRGVRCLVVAPSMTPQRPGDRVKTNRRDALKLAKLLRAEELTEVWVPDAAHEAMRDLVRARSSVVSALTRCRQHISSFLLRQGIPYAGKPWTNKHRAWLGTLKFEHAAHRLLLAELLLALDQAQARRDRLTDHIRELVPSWSLAWLVEALQALRGYDLINAAVMVAELGDPRRFDKPRQLMGFVGLNVSEASSGETVRRGRLTKTGNKRARKALIEAAWTYTRPAATTSKPAAARLPAAVQQIADKARHRLSRRYRHLVRRGKLKQVAIAAVARESLGFIWAIAHAAAPGSAQS

SEQ ID NO: 491973 - protein, 445 aa, unidentified
MPFVGLDLHKQVIEAAIVDEAGKFVHKSRFPATREALLAFAKRWLNQETSVAVEATTNTWPVVDVLEPLVREVVVSNPMRTRAIASAKIMTDAISAPTLAHLLRMDYLPRVWQPDERTRHQRELVTERTTLTTDRTRIKNRIHSVLHQRMIPAPAGDLFNEQNLAWLRALPVCDEGLNENGRRVLDRYLAQLEAIEKEAAELDTLIAKHAYAEPRVRLLMTLPGVDMAVALGLMAALGEPSRFASADKAAAYFGLVPSTKQSGRHCYHGRITKQGNAHARWLLVQAAQHVAEHEGPLGVFFRRLAQRKNRNVAVVAVARKLVTIAWHMLRRNEPYRYAHPATTAIKLAKVRIVATGKRRRGGVPKGTPRPESYGTGKQLRRMPSLDAVYAKEGLPPRQKLGQGEARMIAERGLEEFLGRIAEQQTTPKAPPSGKRRGPYHVRPIG

SEQ ID NO: 491974 - protein, 532 aa, unidentified
MGKRRRKGHGRGTKCRKKIDNSLRQRVRKIGGDRFGVLVVDSSKKNAELWFTDFYGEPLWDESRTVPITRGHLDEMMNVVGGTCRAHGLKDLVVGIEQTGRYHRPIKRALEKRWEVKTIHPFVTKQLRQPASPGVKTDGVDLEAMTRAIIGGYGDDPRPLPMLYARWQLVNRAREDAVDRRTRLKQQSQERLHAFMPGYTGLFEHFWDTPAALTIAEAYGSAKRLLTVDVESIRERLRAKGMRIMRPTINRVLAWAADAPSPDPGGALNRRIWRDNVRLIEHLTRDITRYERQLTGYLVQTPFVLLLSIPGINVVSAAGYGSEVGPITNYIKPSHINGRAGIYPSRYQSDETDCADGPMVGGRNARLRDAVMEVITNLILHNDYFQGWSALRTKRGWSKKKIHVAMANRFNRIAYHMVAGQMLFDHPCLKKRHPVLKKVAVFSLAHGIKPETTMSLVVKAARQLPSDAVAGELGALQDGLANLPTSEGVPVAVLKETRLLLPALVNQLNHDNKHPGDDDQGAIAETPYRVKV

SEQ ID NO: 491975 - protein, 478 aa, unidentified
MAVECEVNTEAKTNRRQRREQQRKIWTDNPGLDVVHPDAAGVDVGNSEHYVAIAPDKSAEPVRRFGCFTADLRDLARFLKEHGIVTVVMQSTGVYWIPLYDVLEEAGFEVYLVNARDTKNLPGRKSDVQESQWLLKLHTYGLLRNSFRPTSEIRVLRTYWRQRAEHIHTATECVQRMQKALTQMNLQLANVIADIMGLTGQKILRAILAGERDADKLAKLRNGRIRASHEEIVSSLTGNWREELLFALKQEMERYDFCQRQIRECDREIEKHLGRLPSRPQEPGEPVPPGMPLTKKRKKAQGNSPEFDIAGELNRIAGVDFTRIDGISVLTAQTIVSEVGLDMERWKTEGHFASFLGLCPFNAVSGGKVLRRGTRKVINRAATAFRIAAFSLKSSNSYLGAQYRRFRGKLGAPKAITAMAHKLAVLFYRMLRFGQEYVDRGQQFYEDKYRQQQVSLLNKKAAQLGFSIMPATNSEVPA

SEQ ID NO: 491976 - protein, 367 aa, unidentified
MKDSITVVGLDVHKNSIQIVTADTDGAMEVRHFGRIGGTMDALDRAVRKLVSRGSTLRFVYEAGPCGYEIYRHLTGKGFSCKVVAPSKTPKKSGDRIKNDRRDAETLARLERAGELTAIYVPREEDEAMRDLTRAREDAVKALKTARHQLNAFLLRYGQRYPGKASWTPSHLRWLSDIALPHPSQQIVLQEYINTVTVDTERTTRLTDQIAKLLPEWRMFPVVKALQALRGVAPIVAATTIAEIGSMSRFETPRQLMAYLGLVPSEDSSGESTHRGSITKTGNGHVRRALLEAAHAYGFPARVSRHLLKRQEGLPQPVLAIAWKAQVRLCGKFRRLMARGKLKTKIVTAIARELCGFMWAIAREVEV

SEQ ID NO: 491977 - protein, 424 aa, unidentified
MKNTAAMKRRQVPEEYLIIGVDPHKKRHAAVAITQDFATQAKFKFDNTREGLEAMLERARVEMVKSGCRGVMFAIETGGHYWRNIAYYLDERGIPFRFINQYTLKRRREGKDLNRRKNDYRDSEVAAQLLCTGEFTESKLPQGVYAELRTSHSAYQRLVKERTRITNLVKGLLDALFPEFTRVFKDPGGLTALSVLSTCPIPRAIAGMTEDEFVATIEARHKGRRLMRKKLKALHYSAKTSIGIGAGARSLSSEIAFLVDKFELIRRQICIMEGTLVRLVDETEEGKYLLSIRGLNYIAVAGLLAELGCFKLYRSAKQMIKMAGSNPTESESAGKKRSKTPMSKQGRPLLRYCAWTSVIPMLRFNSDFRAWAKQRRERPAHANPLSGREVVGAALNRLLRLAFALVKNQTYYQYVKPALIPVAV

SEQ ID NO: 491978 - protein, 321 aa, unidentified
MTYIGIDVSKDTFVVAYSPDKNSKTKTFKNTTKGIHEFIGTISKSEHHCVMEATGNYSALLVYLLSEAGITTSLENPLKVKNFARAMLSTVKTDEIDARLIALYGEKMQPAPYKLRSDAILTMKQKRTVIRQLKKQLIATRNLKGSMEVLPFFDDKCKKSVEKTITFLERQIKDLEEDLASLAKSEYKKQMDLLTSVKGIGVTLAAALIMATGGFTYFDNAKQLTRHLGLAPTYQQSGTSVNFKGHINRNGDSSLRSQLYVAAFASLRCNTECKACFDRLRSNGKPGKVAVIAVANKLIRQAFAVVTQEKPYVDGFISSKG

SEQ ID NO: 491979 - protein, 401 aa, unidentified
MLFCGVDWASDHHDVCIVDVDGTVRWRRRIAHDPSGIAELRTAISTHEPNPANVCVAVEINHGLLVGALVEAGYVVYPINPKAAERFRDRRKPSGGKNDRLDAEILAQAVRTDRASLRALLPDSDLASEIAVLARDRHALVREHTRLLNQLRSALGEYFPAALVAFDLDADSTLAFLERYPTPEAAAKLSGFQIAAFLRARRANRDLAAKAAAAKEAFHAPALRARPQIARAKARLVRVVCAQLRALRPELTAYEHELERLLKTHPEGELLQSLPGLGVILASRVLAGTGDNPQRFRSAAGLCAYAGTAPIVLQSGKRAVVKARSACPKEFRDAVQQWADQSRRRSAWAAEFYRRHRDRGHAHNESLRALGNRLLELLFDLRRRGINYDESVHAANIRWAA

SEQ ID NO: 491980 - protein, 316 aa, unidentified
MAQNVIGFSRVLGCDVGKDGVVVFDSASKRISHFANRAETLAEFAASLNADCFVVCEATGGYELTLLAALLDAGVPAHRADARKVKAFIRSFGTLGKTDAIDARALARYALERGRELPIWQARDEIRLKLQAFVLARRDLVADRLAYQNRRDAPGAEPLSPHYDCLLSAFEARIEALDAEIQALTESCKPIAAAVKALTAIPGLDLKTAAALIGLLPELGTASNKRIASLAGLAPHPIQSGTADRYRFVRGGRPEVKRSLFMAALSARKHNPTLSAFYQRLIAIGKKPIVAIVAVMRKLVTYANAILKAQAGAVAS

SEQ ID NO: 491981 - protein, 318 aa, unidentified
MTSQHLVLAAGIDVGQRFLDVGLAPSGKTFRVPNAADGIAAILERLTHEGVGRVVLEAIGPYAQRLVSALAIAGFEVGLINPRRIKAFREFEGRRAKTDRLDARLIARFALAMTDAIRPLPSAEQLALKALSTRRRQLTEMIAMEKTRLKQTAEPLLLDSHRVAIAALTAQCRSIEAELARRIAGDPQLASIFEILTSVPGIGERVATALITELPEIGRADRRAIASLAGLAPHISQSGNAPPRAAIAGGRPCVRTALYMAALVASRHNPEMKRAYLNLRSQGKPAKLALVAVARKLLVTANALVKNNVRYTPQQLDS

SEQ ID NO: 491982 - protein, 342 aa, unidentified
MKVTTIGIDLAKNVIQVHGVDERGKTVLKKQLKRNQVAAFFASLPPCLIGLEACASAHHWARKLEAFGHTVKLMAPQFVKPYVKTNKNDVADAEAICEAVSRSNMRFVPIKNGEQQAVLALHRARQGFVKARTAQANQIRGLLAEYGIVIPQGIGHIAKRLPEILEDGENELPGVFRQLLQRLGDHLKELDRQAGELEVQIQSWHRESEASKKLAQIPGIGPITASALVASIGDAKIFENARQLAAWLGLVPRQHSSGGKQVLLGISKRGDTYLRTLLIHGARAVIRVAENKVGHADSWLARLMGRRNQNVAAVALANKNARTVWALLAHGRDYEANYGVAA

SEQ ID NO: 491983 - protein, 459 aa, unidentified
MNRKQRREMMRKVQSEDLSLQVVHPHAAGIDIGNESHYVAVPPSRDPQPVRCFGCTTAELKKMAEWLTQCGIRTVAMQSTGVYWIAVYDILEEAGMEVYLVNARETKNLPGRKTDVQEGQWLMKLHTYGLLRHSFRPSQEIRTLRTYWRQRHDLVRSTGRHIQRMQKALTQMNIQLANVISDISGVTGQTILKAILDGQRDPRELAAYRDCRVEASEEEIVQALEGNWQEDQLFVLRQEQAGYEFCQKQITECDQQLAQYLARLEDQTQGATLPEETRKGRRKKKKGNPQFNLREELFRMTGTDLTQIDGIDVMTAMTVVSEVGWDMSKWKTENHFVSWLKLSPDNKISGGKVIGKGRMPTNNRATTVLRMAATTLRESDSYLGAQFRRFRTRLGPPVATKAMAAKLARLLYRMLRYGMQYVNQGAEFYEAQHRKQQVIHLKRKAAQLGLEIIEVAAAA

SEQ ID NO: 491984 - protein, 376 aa, unidentified
MKKNSAGSPRFVGLDVHADTIAVAVAEPRGEVRSLGMIANRPEPVKRLVKKLNAEGAWKACYEAGPTGYALYWQLAALGIECEVIAPTLVPTKAGDRVKTDRRDAERLARSFRAGDLTAVWVPDAAHEALRDLVRAREAAKRDELRSRNRLGKFLLRYGRRPPEKMRAWTKQYLEWIKREVKFELYAHECTLEDYLNEVEHCSLRITRLEEQIDKAVETAPAAMREVVAALQALRGIAKVSAVTIVAEVGQLSRFESARQLMGYSGTVSSEYSSGKKTLRGGITKTGNAHLRRIVVEAAWSQRCRPILSRILKLRQEGLDPEIQEIAMKALHRLHNRYMHLLAEGKCPQQVVTAVGREMLGFIWAIGVAVERKQIA

SEQ ID NO: 491985 - protein, 356 aa, unidentified
MSRDLKYIGMDVHKEAVVIAVRNSTGQLVMESIVETKASSLLQFIHGLQGELHVTWEEGTWAAWLYDLLKPHVQEVLVCNARRNALLKEGSKNDKVDARKLSDLLRTGMLRPVYHGEHGLRTLRELARCYQTISQDQSRVMNRVKALYRGWGIGCAGTQVYAPRYRQEWLEKIQHAGVRRRAELLYQQLDSLQALRRTLRSELLAESRKHKASKLLRQIPCIGPIRAARLLALMQTPHRFRSKRQLWTYSGLGIETRDSAQYRFVRGQLQRAKKPQQIRGLNQNHNHEMKEIFKGAATRASCGVSPLRDFYVALLAKGMKPEMARLTLARKIAAIALTLWKKEERFDAEQLKPQAA

SEQ ID NO: 491986 - protein, 465 aa, unidentified
MTPHKDFFLDPRPPVPTLPPPSVLSEALQVCNPHAAGIDIGEAEHWVAVPPGCDPQPVRRFGTFTADLDALADWLIDCGVTTVAMASTGVYWIPLFELLEARGVQVLLIDPRQAKRAPGRPKTDRLDCQWLQRLHAYGLLAGAFRPADQVCVLRGYLRHRHMLLTYAAHHIQPMHKALQPMNLKRTQVVSDITGVTGMAIIKAILAGERNPVTLAKLRNPHCQHDEDTIAKALQGNWRAEHLFALRQAVELYEVYHQQMAQCDQQIKTHLETFGDKSAGQPLPPKARRHKKINAPRFDARTPLSRMAGVDLTTIEGIEEGTALVILSEIGTDMTRWPSVKHFCSWLGLCPQHKISGGKVLSRRVRPGAHRVTVALRLAARSLHHSQSALGAFFRRMKARLGTPKAITATAHKLARLVYSLLQHGSAYVQQGLDAYEAHYHERKVKAMAKQAKALGYTLVSLAAQG

SEQ ID NO: 491987 - protein, 307 aa, unidentified
MNKAVVYVGVDVSKAYLDVAWAERSRRFANNKSGLSALMKWIQQSAVHLICEASGGYERGLLEAAEQNAIKISLVQANRVRQYARAAGILAKTDEVDARVLCAFGGALQPKALAPLSAQQKQLRELETQRRHYSRMLTAEQNRLAQLKDKELQRSTRRLLAALKKQMAAIEARIATLIAQDQALDEKAQKLTSIVGVGTRTAVLLLAQMPELGTLNRAQVAALAGLAPFNRDSGTLRGKRTIFGGRRALRSGLYMAALVAARRNRILRDFYQRLRTKGKPHKVALTAVMRKLLLALNQTLKPTACFA

SEQ ID NO: 491988 - protein, 433 aa, unidentified
MLKINYMSTLFVGIDVSSKTNSVYAMDFEENKYLSTSFGNNQPGADELVNRIVACMQKHKHLDTLLIVLESTSVYSVHISNFLASSEVLMPYKPYVFCVNPKATANYRKSYIGMEKTDPTDAYLIADFGRVGRTKKLEPWRGGLFIALKRLTRHRMHLSECITREKTYMVSNLYLKFSELQLLEGDDKPFGNLYGATSSAILTEFLSPQEIINMPEEDLLAFLAQKSRNRISDLSKTSELLRKAARDSYRLDKCMYEPLSISLASSFNCIQAYQKEIRLIEQAIDKCIKGMNTNALLILQSIPGIGPVWASGILSEIGDITAFHSSDALAKYAGLYWPKGDSGDFISEDNQMSKAGNPYLRYYLGEAANSVRKHIPEYADFYARKYAEVTKHQHKRALALTSRKFVRLVFGLLAKNQLYTGEKLDTEYNTWSN

SEQ ID NO: 491989 - protein, 406 aa, unidentified
MKATYFLGIDAAKHKMRAALSNRSEHVLFEKDLSVQATGLRQLLAAIKRQVNDPEQLLVLIEATGLLHLNWSAALTKAGYAVVVINPLIARRLYTLQNSIRDNKSDPIDARGLCTIGLLHGEKLLVHYRFSLRPEQFALQRLQSVRKALRSALTNLKKTYQSLLDLSFPELGHLLELDGVGIRQLLIQAPTPAAIAGKRLCTLEKNWMVRPKAAALKTLAADSMADPDLAAASGPALVALLQSVAAMEARLHALDQQIAKLACTSVDAQTKALIETIPGFGPVNAAKTLAWLPTEILHSGSNRKVATRLQAFMGNDPRLRQSGQWKGHTKMSKRGVEMLRTAFFQSAFSAAHNDPELRTYYQCKRAQGKTHEVALSHLMRILTRRLVAVLRSGKPYQSHYNLKNAA

SEQ ID NO: 491990 - protein, 341 aa, unidentified
MSDYSYFCGIDLAKNHFSLHAVDQNGKVILHKSVTRSKLLTTIANMPLMRIGVEACGGAHYWARTLNKLGHDASIMAVKYVVPYRTKGKNDLNDAVAICEAVQRPSTRFVPVKSPEQQAILSVHRMREHWVRERTALMNRMRALLSEFGLIIPVGRSSLMKYVPLMLEDAENELPHLARTVIADAYHHLGELNQRITDTEQVFDSFAKVSANVQRVMTVRGIGPQTATAILASIGNGSQFDKSRDFSAWLGLVPKQYSTGGKPRLGRITKHGDKYLRTLLVHGARTVIANLGDKQDKLSQWCRGVLERRGMNRAIVALAAKNARIIWSLLHNQTEYENYAA

SEQ ID NO: 491991 - protein, 315 aa, unidentified
MYHNFIGIDISKKDFAIAIHGDKKTSKLDNNLDGFEKLLENYPMITDNCLVVLETTGGYEKELILFLLANDIKVHRANTRIVKHFIKSTGKFGKSDSIDATGLARYGFERHASLKCYKPNEDKLQRLVKYTLRKQDLKKLLVAEKNRYQAPDQEFTKDSHLRTIEFLEDEIKLVEALMKDVIKDCEYLTEAKDLFIDEVAGLGDATATSLLALIPELGTVDRKQIASLAGVAPHPYESGQKIGYRRTYGGRENIKPILFMSALTAARSKGKLGIFYRELVEKGKKKMVALVAVMRKIIVIANAKIRDLRLKMQIS

SEQ ID NO: 491992 - protein, 306 aa, unidentified
MCSYVGVDVSKDELVVHVMPSEQRHTFANSPTGLAELLQCLSPLQCKRIVFEASGGYERDLLDALHQANLPGTRISPARPRALANAMGIKAKTDPIDARVLAVTAQLLPLENTQPLSEQTEQLREWLQLRTALVCERDGFRRRLKQTRHPLVRAQMQTWILSYRAQIEQVDQQIKALMAEQPAPLHKAPGLGPVLSATLAARLPELGTLDRRKITALVGLAPYNRDSGKKAGLRRIGGGRADVRRVLYMATWAAIRAKTPLAQTYQRLVELGKPKKLAVTACMRKYLIMLNAMKRDNAPWDPKQMV

SEQ ID NO: 491993 - protein, 312 aa, unidentified
MTKIICGVDVSSEKLDARIGHDGPSMSVECSEEGVSALGAFCKNHGVELVVMEATGGYEKLPFALLWGQGLPCAIVNPRSVRNFAKGMGFLEKTDRIDAGIIAWFGEAKRLVAQEPASDAQKRLRALVTRLRQLTELRTGQTNQRRLLSEAEVQASIDELVAFINRQIRSCEKAIVALLDSDPLWRVLDKTFRSVKGVAGRTVARLMAELPEIGTISNKAITKLAGLAPIANDSGKRKGKRPVRGGRTHVRSILFTVAEVVRRYVPEFAALHRRLNDAGKLKKVVRVALARKLLVWLNAKARDARKEFACAT

SEQ ID NO: 491994 - protein, 393 aa, unidentified
MIQRKNVESEPVRIKKFASFIAISGLPACLNPDPDSRLASIVKVIGLSSSPFFLKSVKDKRMENFYFIGVDVLKKKLNFCVMFEGKVVHEEETSNHQGAIMSLLHHLEEDYGIASGQMLVCAEHTGQYTFPLACACKAVECRLWLENAAEIKYSSGVQRGKSDKVDAKRIAIYASRFQDKVRYYERPTEDIERLKQLESERTLYVTDFAKYKGQMKDQKEYMPKSLYERKMKRLQALMDDLEEAIQSITDEMDEVIASCPVLFRQRELLMSIDGVGRVVATNMIIATEAFTRFDDPRKFNCYTGVAPFSYSSGSSQHSKARVSHRADKVMKRLLHLAAVAVTHRIGGELKKYYERKVAEGKNKMSVINALRAKIVARMFAVIKRNERYKPILS

SEQ ID NO: 491995 - protein, 349 aa, unidentified
MAVFGEKGEEAIYERQLNNDTALLIKEVKRFSQEGEVVVGYEAGCLGYGIQRAMEKAGITCHVLPANKVAKKRSDRIKNDKRDARLIGRELRSENIRPISVPDENDEATRDLLRCREDISEDLRRAKQWILKFLLRHGYRYPEEGKNWTWAFWKWLDGLTFERGYEKVVFEEYRSQIKTLEDRLRRLEKEVEEAAESPRYQAKVNRLRAFKGVDYIIALSMVCEIGDFKRFGDAKAFMSYLGFVPSENSSGSKRRQGGITKAGNGHLRRLLVEGAWSYTRSSRPGKRLVQRRKDCPANVIEVADKALHRLHKKYIRLVLKGKHVNTAVTAIARELAGFIWAVQVSSPQG

SEQ ID NO: 491996 - protein, 313 aa, unidentified
MSESVYVGIDVSKDTFHVATCPALIKTCLANTPQGHRQLCRTLKEHSVALIVLEATGGYERPLTAELLEASLPVVVANPKQVRDFAKGMGQRAKTDPIDAQMLAQFAQIVKPAAKTHATTQTNELSELVRRRRQLNDLRTQESNRMQMIHHVKVRKSIQKMIKTLDFQITEIDTLIREYIDADDDFRHKDRIIQSTPGVGPQTSAMLISNLPELGKLNRQEIAALVGLAPWVRSSGKYDGKAHIGGGRKEVRAALYMAAFTARRWNPVIREFADRLQQEGKAYKVVITACMRKLLTILNLMIRNQTLWTPKIN

SEQ ID NO: 491997 - protein, 399 aa, unidentified
MFVGIDWAKQAHEVCAVDASGKVCHRATIPHSQDGLDQLVRHLHRWAAKGELLVGIERPEGRLVDRILEAGHPILLIPTFAMKDFRRRYAIGGAKSDRGDCYVLADVARTDGHRLRRLEPLSEHTKALRAVVRTRDDLVDQRRGLANQLRATLEAYWPGAAAIFADVDSEICLTFLERYPTPDSAARLGEARLASFLTKAGYSGRRPAAQLLARLCAAPAGVLGVEAEARADTVRAMVRVMRALLGSIKDLDRSVVAHLGEHPDAKIFTSLPRSGQINAAQMLAEWGDCRQAYPQADSAAMLGGLCPVTHASGKHRDVSFRWACNKRLRQAMTTFANNSRRASPWAAEVYRQAIARGCDHPHAVRILARAWARVIWRCWQDHTPYDPALHRAARRLKAA

SEQ ID NO: 491998 - protein, 323 aa, unidentified
MEFLGIDVGKADFHCSLLSDGKAHANSFPNSAKGFERLLQWLRNRKVEDVHACMEATGGWSEELALFLHEHGHVVSVVNPTTIKSFGQSELSRTKTDKADAALIARYCRAMRPRRWEPPSPSQQRLQRLGRRRSALVEMRTQEHNRLEGPGVKEVRHSLEASITFLDRQIAEMDAEIASVIDNDPDLRNKRDLLESIPGIGERVASTLLGELPQITEFRSGKALAAFVGLCPREFRSGSSVKASWLSKVGNAHVRRVLYMPALTAIRCNPILADFAARLRTRGKHAKQIIAAVMRRLLVLAYGVLKSGQAFNPTWALDAGHGI

SEQ ID NO: 491999 - protein, 354 aa, unidentified
MNNIKYIGIDVHQATSVFSIMNQQGKALGEGFFETKQQTITDFLKSQRGTLCVTFEEGTYANWLYDVIQPHVAKLVVCDPRKNKLDGNKTDKIDARRLADLLRMNALKPVYHGQHSTRPLKELARSYVTLQQDSTRAMNRVKAIYRARGIQCRGTSLYQPKNRKEWLGKLNEDGARHRAELLLKQLEFLQKFRLEAQKSLVRESRKHKESKILRTIPGLGNIRVALILAFVMTPHRFRNKRQFWTYTGFSVVRRGSAEYEITEGIVKRTKKKPLPRGLNRNCNHVLKNVFKGAALTAAYRGAFQDLFKQRVDSGAAPNLVLLTLARKIASITLALWKKGERFDIERHRLSEQKT

SEQ ID NO: 492000 - protein, 404 aa, unidentified
MELTAIYRCVAALDVHQSKLTVCILYENESGEIITELKEFGGFKRDRRAMADWVASFQPELVVMESTGIYWKSPYAALEKQGLTIWVVNARHVKQVPGRKTDFADAQWLAILARNGLLRGGFVPPAIFRELRLIARQMQKLTGILSGEKNRLHKILSDGGIRLGVVVSDLHGKSAKAMIKGLLAGESPEQVLKYASKRLKASEEELLDALAGDLSPSHQFVLTKLMAHIDELEARIETFRQVLLQGLAPYQAILRSLQTIPGLDETGAALLLVEIGDDMSAFGTPERLASWAGVCPGNNESAGKKKTGKTRKGNPYVRRILCEASNAASRTQCRLQDMFKGLLIRRGRKRAIFALAHKILKIVFLLIERGDYYRDATVDYEKLSVQRNAPRWIKTLKKYGYIAA

SEQ ID NO: 492001 - protein, 482 aa, unidentified
MKKRNIYQNQSQELLSIFEAAGSSAKVMCVPMDYAKKDHLVMFCNGHGDILRKPFSVKNTPEGIKYLIDQLTRSCRRRGIKKEHVFLGGEDANSFAENFVSTLRFKGWLVAGVNAHDAKKQRMNLQASTDRIDLMGIATMLLNCRANCCPVASGIYRNLRTLVRHRRKLVVMLTEVKNRAHGIVDRLFPGFLNETKSGIVPFTQSSLYLMEDRFSPKQIRRRRRQKLIEILRLFGTSKAEETAFKLQQYAEKVLHAPDEYVDTLQISLAQHVKHIRCLQEGIVQLKKEIAVNLAQTQGAFLTSVRGIGIVLAAGVSAEIGNPYEQKPLSNVVSYSCIIPRVKQTGGVDGKTYTGHVAKRCNRILKDYVVKSAYHLGLSGPEDLMADYKRRDASGQHADFGIGRRYLRMAMSLMRTSQVYLPPRLRKADTALEERAGYYLMSWPFLRDKWKRVGALETAFSKDKPLGLWRQIVQELYDIKLKL

SEQ ID NO: 492002 - protein, 355 aa, unidentified
MTSTKYIGLDVHKESISIVVLNSAGKVVMECVIETKASTLLQFIHGLGGDVHLTFEEGTWAGWLYDLLKPHVTELVVCNPRKNALLKEGSKSDRIDARKLAELLYMSKLSSVYHGEHGLRMLKELSRSYLTISKDLGRVMNRLKALYRGWAIPCAGTQVYAPHHRSEWLAKIHEAGVRRRAELYYQQLDALRLVRQQARKELLAEARKHRATKLLRQIPGIGPLRAAHLLALMQTPHRFRTKRQLWTYSGLGLETHDSAQYRVVEGQLQRSKKPVTLRGLNDNHNHDLKDIFKGAAMRASTAAGPLRDFYEALLAKGRKPTMARLTLARKIAAITLIVWKKEVRFDANYLKQQAA

SEQ ID NO: 492003 - protein, 364 aa, unidentified
MLGAFDNTNHPGKSVEAKTIAIDLAKNVFELAIADEAGKVLDRKRLNRSQLQRYFQNHAPVRIVMEACGTSHFWGRWFLERGMEVSLLPPLYVKAYVRRNKTDRADATALLEAARATDIIPVQVKSAEQQALQSMHRVRSAWRCTLTDRVNCLRGLCREFGVLAPLGVQRGLKELGAQLADDESTIPKIIRSVLQRLVEEIRSAQERLKQIDAELAAIAEQSDVCQRLQKIPGVGPLSATAFAGSIADIRTFRNSRCLASWLGLTPREHSSGNIRRLGSISKRGDSYLRRLLVNGGRAVLYSANMAQRAGRPLDALRDWGLRLRARVGHNKAAVAVANKLARLIWATWYQGRDFEFREPMPQPV

SEQ ID NO: 492004 - protein, 402 aa, unidentified
MNAVGIDVSKGKSMVAIMRPFGEIVSTPFEIKHTASDIHSLVELINSVEGESRIVMEHTGRYYEVLAHQLSEANLFVSAINPKLIKDFDNDSLRKVKSDKADAVKIARYALDKWQNLKQYNVMDELRNQLKTMNRQFGFYMKHKTAMKNNLIGILDQTYPGVNTYFDSPARSDGSQKWVDFASTYWHVDCVRKMSLNAFIDHYQNWCKRKKYNFSQSKAEEIYGKAKELVPVLPKDAITKLIIKQAVDQLNSASTTVESLRTLMNKTASKLPEYPVVMAMKGVGTSLGPQLMAEIGNVSRFTHKSAITAFAGVDPGVNESGTYEQKSVPTSKRGSADLRKTLFQVMDVLIKTHPQDDPVYQFLDKKRAQGKPYYVYMTAGANKFLRIYYGRVKEYLASLPES

SEQ ID NO: 492005 - protein, 315 aa, unidentified
MQDLIPCCAGLDVHKETVVATVINGTLSKSPITVTETFGTMTSDLLALSDWLTNHGCTHVAMESSGIYWKPVYNILEPDFEVMVVNARHIKHVPGRKTDVKDSEWIAQLLRKGLLKASFIPPKPFRELRDLTRYRKKLIHQRTAERNRILKFLEDANIKVGSVLSDVFGVSGLRILKALLNNESLTARELEEMVHGNVKPKITKLLKALQGNLTEHHRFLLNTILTHLESLEACILSVETKIDEALATYNELVERLDAIPGVDRNVAAVIIAEIGIDMTKFPTAQHLASWAGVCPGNHESAGKKKVHAQPKGIRQ

SEQ ID NO: 492006 - protein, 405 aa, unidentified
MSELEKGLVFAGVDTHKDTHTLCLLDHMGRAIGTFRFAADAKGYDALAGKIGGPATCVGVGVEGTGSYGAGLTRRLLELGYRVHEVMVPGRARRKPGRPKSDPADAEVAARQVLARVNLSKPKDQSGWTEELRQLMIARDRLVQATSAMINAAKSLIVTAPEDLRSSLEGLSRKSLRSALSTLDPAAGGIILALGSLGRAWELQDREADAIEERMKRVLEANAPALLAVYGCGTVSAAALAVAGGGNPERLESEAEFASLCGVAPLLASSGKTERHRLNRGGDRRANRALYQIAVTRMSYDQRTKDYVAKRKRDGKSKKETIRCLKRYIAREVFRALRRPLEVKGPSWKDLRPARQALGITLVEVGKALNVGFQKVSYAETGRLMNAKFLEEYDAWLKSQLRIVG

SEQ ID NO: 492007 - protein, 417 aa, unidentified
MLTGPLINLSFGVDIGSVKQYARAFDYRGREIDHVYRFMDCRDGYELFLDWMQGLQSANGMDRIIVGAEPTGHYWFGLRDFLDAAGIQLVLVNPLHVCKSKELDDNNQTKNDQKDPKVIARLVMEGRYSIPYIPHGVYAELRGMWILRQRVVDEEVKLRNRIARWFKIYFPEYTQAYSSFAAKSSIALLKAACLPEDILQLGADGIVELWRAMKLRAVGKKKAESLLAAAARSTGQKDGADAARMEMEMLLEDWGVLQKRHEKIDAKLRELCEQIPESKNLLAIKGIGLTTVAGFLAEVGDIQRFDSPKQIVKLAGLALRENSSGKHKGKTTISKRGRARLRRLLFAGAMPLLATNDAFRSLHVYYTTRQQNPLKKKQSVIAICCKLVRIFYALLTKGTAFDSRKMLGDIHRPPLAA

SEQ ID NO: 492008 - protein, 390 aa, unidentified
MIYVGIDVSKFKHDCVIINSDGEILVDVFQVSNNLEGFTKLKNIILENVPNNDLQKIKVGLESTGHYSNNIINFIHQNSFPLTIFNPLSTNLFRKAQTLRKTKTDKIDAIFIATMLFSDNSKPYSPKSYHMTEIKSLARHRFRLIDYRAKLKISYTRLLDIVFPELASVIWSVHQNSAYSLLLELPTTKDISLCHLTKLTNILSKASRGKYGKDRATEIKELAKNSIGTCSLGVSFELQQTIRLIKNVDDEIKLLDKKVKVMLDELNSPIMSIPGISYVLASIILSEIGDIQCFSTPAKLLAFSGLEPSTHQSGKYTASHSKMVKRGSKYLRWALLQAALLTTNKTQTFKSYFQKKKSEGKHHIVCLSHVAKKLLRVIYHLENTNTAFID

SEQ ID NO: 492009 - protein, 316 aa, unidentified
MSQSEVFVGIDVAKAHLDVAIRPTGDTWTAPNEEAGLAHLVERLNPLRPALIVVEATGRLELPLLGALMAAALPVVVVNPRQVRDFARALGHLAKTDRLDAHVLALFAERVRPTLRPLPDPATQELSALVARRRQVIEMLTAEKNRCGQAPPALQPDIAGHITWLETQLQQLDDALGRQIRNSPGWRAQDALLQSAPGVGPVLSRTLLADLPELGRLTRKQIAALVGIAPLNRDSGTLRGMRTCWGGRAPVRAVLYMATVSATRCNPVIQAFYRRLCAAGKAKKVALTACMRKLLTILNAMMKHRTPWRTQVSQCA

SEQ ID NO: 492010 - protein, 311 aa, unidentified
MSPTFIGIDVAKDHLDAHLLPQGEALTSAADAAGVTSLVDRLQAVRPALIVLEATGGYESLVAAELAAADLPVAVVNPRQVRDFARALGLLAKTDAIDAHVLALFAEKVQPPVRTPPDEREQRLKALVTRRRQLVAMRTAELNRRAQANPEVRKSIDAVLKILHRQIEDVEHDIDGTIRHSRLWHEKDILLQSVPGVGPGTSRTLLAALPELGRLNRRQIASLVGLAPFNRDSGRWRGERSIWGGRAEVRTALYMATLSAVRFNPVLRVFYQRLRAAGKKAKVALTACMRKLLVILNALLRTRQKWHPQNA

SEQ ID NO: 492011 - protein, 426 aa, unidentified
MKFTQNERILQVSNEKLIVGIDVASEIHYARAFDNRGIEQAKVFRFTNHREGFEAFVKWIDGVKAKSGKQDVIVGMEPTGHYWFNLAQHIRGQSMKIVLVNPFAVKRSKELDDNNPTKNDRKDPKTIAMLVKDGRYMEPYIPEGVYAELRVAMNTRWQLVKNMNSIKNQIDRWLRIYFPEFLQVFADWEGVAALVVLHEFSTPSQVVQKGVAGIVARWKQDKIRAVGIKRAERLVEEAKTSTGITEGLVAADMELKILLDDYDRKMAQYTELMNLVEKLMPQIPGVAEVLKIKGIGLVTAAGFIAEVGDITRFSHPKQIQKFAGLNLRENSSGKHKGKSGISKRGRKRLRAILFRAMMPLVAKNKEFKAIHGYYTTRQNNPLKKIQSLILLCCKLIRVMYAILAKAVRYEPEKLLSDMRKEELLAA

SEQ ID NO: 492012 - protein, 338 aa, unidentified
MTILTVGIDLAKNVFAVHGINEAGKPELVKPNVARDKLVELIAALPPCVIGMEACSGAHHWARRFEALGHTVRLIAPKFVTPYRMSGKRGKNDAADAAAICEAVQRPHMRFVPAKSLEQQSRLMVHRARQGFVEQRTATLNRIRGLLSEFGIVLPLKAATVRRKACECLEDLPGYANTVIGDLLSEVTRLDERVAQYDQHIKAMARDDERAKRLMQLSGVGETTATCLLAMIGNGHDFDCGRQFAAWLGLAPGQYSSGGKTRLGRITKAGDAYLRSLLVLGARALLAAAKNKTDSVSKWAVALAERRGYWKAVVAIAAKNARMAWAVLRKGEAFAMPA

SEQ ID NO: 492013 - protein, 408 aa, unidentified
MEVVHLRCAGLDVHKDTVVACARVVEGKQVEQEVRTFRTTTKELLRLSDWLTERRCTHVAMESTGVFWKPVWHVLEGSFELVLANAGSIRNLPGRKTDVNDAIWIADLLAHGLIRGSFVPPPPVQELRDLARTRTQLVREVARHTQRIQKTLEDANLKLTGLISDVLGVTGRAILEALIAGETDVDALANLRRRGIKASHEELVEALRGSVRDHHRFLLQLHLRQIDALDQAVRDLEGRMETLLVPFRPQLELLTTIPGVSETTARVLLAEIGFDMTRFVTSGHLISWAGLCPRSDESAGKRRSNRLRPGNTWLKTALVQAAWAASRKKDSALRAQYLRLKSRRGPKKAVIAVAASMLTSAYFMLQRGVPYADLGPSHLDARDPKKTAQRLVRRLNDLGFEVELRRAA

SEQ ID NO: 492014 - protein, 400 aa, unidentified
MDNKKRKVKLTVGLDAHPDSITAALVVGETPTEAVVDKISDAVAINDMERWFNKHVTRDAIVVLEASGNSFDVYCRLTAVGYRTIVLDSVQVGKVSKGYCNTDKISAVRIAKAYLSGLSDKVWVPDPVTRERREVFSAYQQAVKDCTRHTNRIKSMLNSYTIRLKKQDRNLTNEKVRTKIYACREWSETQRALFEEAFEDLDRATEKRGRMRRVMAAEVLREPKMLQLMRIFGINVIASYGIIAMIGEPGRFLNPKKLSAYFGLCPKVKQSGKVIHMGGISKKGRREIRVLLVQAAQTVLRHQSKANPLYHWAWKTKFRKGRNVAVIAIARKIAVAIWYLLMGKPFKAKENSSTIRRKLTGIAKIFGPQQVHSMGFDTYTLFVDHYLNLIENFACKGGHT

SEQ ID NO: 492015 - protein, 412 aa, unidentified
MLKIVYPICCGMDVHKSFVVACIATTNDHGVTNYKSKRFSTFTGDLRRCADWLSENNCKDVCMESTGKYWIPIYNILEHTCNIVLAHPKYVKAIRGKKTDKRDAKWIADIFKHDLVSGSFIPPADIRQLRDLVRYHWKLTNFNVGEKNRAQNCLTVSNIKLDDVFSDVFGKAASAITTRLLESNEPFDVKPYLTKNIKKPIEQIQAAVDGEMCAEQAEKLRIIRSHMDSLELCKLNLESLILSTAEKYIPQLNLVMTAPGIQSFAAIGIISEIGVDMSVFPTSKHLCSWAGLTPQNDESAGKKKTTRISRAGAYIKPLLVQCALCAIRTKQFPEVRNRYLALKKRRGHKKAIIAIARMLLTAIYNILKWNEVYNSELYRKADRPPAHREVSVEEAVFILQRQGYLVTAPAVT

SEQ ID NO: 492016 - protein, 345 aa, unidentified
MGKITRVGVDIAKAVFHVHAVDRFGERQWKRKYCRTKWLDAIEDRVPKGTEIAMEACGSSHYWGRELQKRGFKVKIIHAQFVKPYVKSNKNDAIDAEAICDAMSRPNMRFVSVKSSKQQDIQSIHRIRDKLMVQKASKANQIRGLVSEYGLVAPVGINKLREAIPLWLEDAENGLSALFRLLLRDLFDDLRQLQERVDTLDTLIEKEVKNDPVARSLLQLRGIGILCASALSCAIGDAKGYRKGRDFAASIGLTPRQHSTGGKPRLLGISKRGDGYLRKLLVHGARSVIRHAHRHDDNLSKWIEKLCAYKHVNTVTVALANKTARAAWAMVNTNESYDPGLIASA

SEQ ID NO: 492017 - protein, 390 aa, unidentified
MPKYEDLSRSLVAFDQDSTLVAAIEMGSEGWLVGALVPGLKRDPRKKLQPDGPALLRQLRRWCEEAAKAGHPIKRICVAYEAGRDGFWLARWLREQEIEAYVIHPTSIPVSREHRRAKSDRLDLALLLRALLGWLRGEVKHCSMAAIPTVEEEDAKRPLREREALTAEVTRLSNRMQSLLMLHGIRKFKVRQKKAEEKLFELKTACGEPLPPATLAQLRRTFAQLRLAQEQIATIDKERHQRLAAAPEAGVHPMIRTLARVYGVGLMTAESQVREVLYRNLRDRRAVARYVGLTGSPDESGKKRREQGLAKAGNGRVRRSLIQLAWRMLRHQPNCALVKWYRARTADGRRDTRKVMIVALARKLLMAFWELVHNGIVPEGMRLHPVKVAG

SEQ ID NO: 492018 - protein, 482 aa, unidentified
MAQRKKTTFQRLKEDRLNRKQRRELARKLSAEDPGLEIVHRNTAGIDVGNESHFVALPPGRDPQPVQEFGSWTADLQRMADWLKARGIEEVVMQSTGVYWIPLFDVLEARGLRVCLVNARDTKNLPGRKTDVQESQWLLKLHTYGLLRNSFRPPDQIRALRSLWRLRDRHVKEAARTVQHMQKSLTTMNVQLSNTISDITGVTGQAILRAILRGERDANRLAQLRDRRIQATPEEVARSLEGNWREDMLFELRQAVDAYDFVQKQIQECDKRLQTLLGNLPARAVTEVPVEDQNATAPNKKSRKRKPNQQKNAPRFDLEAELKRICGVNLLSIEGISVMTAQTVVSELGTDFSHWKDEDHFASWLNLCPVRPVSGGKVLKQGTRKKVKNRVASALRTAANTLQFSDSYLGARFRTFRARRGDPKAIKAMARYLACLIYRMFTRGQEWVDRGAKAFEDQRARRELAALERKAAARGLKLVSIA

SEQ ID NO: 492019 - protein, 312 aa, unidentified
MDATVIGIDVAKDRLDVCVRPSGESFVVARNGAGIEDLAERLKKLTPRVVAIEATGGFETVVAAGLAAAGVPLLIVNPAQVRAFAQALGKRAKTDPIDAAVIAHFIEATKAQPRPLPDETTRLLADLVTRRRQIIDMMIAEGQRDRRLANKRLKNSIARLRKALEKELAEIDSELDDHVRGSPAWAAKEELLASVPGVGPIIARTLIAELPELGTLDRRKIAALVGLAPWTRQSGQWRGKSFIGGGRKTVRTALFMAAMVAARHNPVLKTFRDKLVAAGKPKLVALIAVARKLLTILNALLRDNQRWKPKTA

SEQ ID NO: 492020 - protein, 391 aa, unidentified
MIYVGIDIAKDKHDCLITNSDGEILFPPFTISNNRIGFNDLFDKISSSTNDFSNVKVGLEATGHYSYNLLGFLVDKGLTTFVINPLHTNLFRKSLSLRKTKTDKVDAHTIATMLMSDVNLKSYSDTSYHNEELKSLTRYRFDKVKERAKLKSSISRLVTILFPELEKLVPSLHIASVYALLAEFPSASSIASSHLTRLTNLLLDASNGRYNKDTAILVRNAAKDSIGSNMPAKSLELKHTIKLIREITCEINEIEQEIKAIVDSLQSPILSIPGISYRMGAMILAEIGDFNRFDSPDKILAYAGLSPTTYQSGQLESSHSKMEKRGSRYLRYALYNSAKYVCLWDDTFKTYLAKKRSEGKHYNVAISHAAKKLVRLIYQLEISKQSYIKAS

SEQ ID NO: 492021 - protein, 338 aa, unidentified
MKDSYFIGIDVSKKNLDCCVLKNGSVVKQDVIPNHQKSIENYLSIICVEQNIDAEQIVICAEFTGLYIYPLAISCQVGNYKLWLEDPTQIKYSSGLQRGKNDPVDAKRIALYAYRYVDKLKIYNHPTISIESIKLLSTELNMLCVDRAKYQAQLSDQKEYMPDYVYKLKLKRLSLLIKELDKAISNIEAEIESIAAKDALLSHQMKLLLSIEGIGKKTSLKMILETQAFTRFTDSRKFCCHAGVAPFSYSSGSSQFSKNRVSQRANKSIKSLLHLAALSAIQNKNSGLRAYYDRKVGEGKNKMSVLNAIRAKLVARMFAVIKNDNHYIFNYNNQYSNQ

SEQ ID NO: 492022 - protein, 414 aa, unidentified
MELLHERCAALDIGKKDLKACVRTPSPKGKRSRRQEIRTFATTTNALLELRDWLVAEQVSLVVVEATGDYWRGAFYLLEDQLNVILVNAAHAKGLPGRKTDVCDAAWLCQLGECGLLRASFVPPEPIRQLRDLTRYRTTLTAERSREAQRLEKELEDAGIKLSSVATDITGVSGRAMLAALIDGERDPQVLAEMAKTRMRPKIPHLVQALTGNFGEHHAFLCRLHLQRIDELTAAIAELSARIAEQIRPFARQLEHLMTIPGVGQTVAEVIVAETGTDMGRFRTGANLASWAGVCPGHHESAGKRKSGKTRHGDRWLTGALGTAAMAAARTKDTTYLGARYRRLAPRLGKKKALVAIEHSILVAVWHMLTNNVDYHDLGGDYFARLDPERAMRRIIRQANSLGFTVRFDPIQAA

SEQ ID NO: 492023 - protein, 344 aa, unidentified
MSITMIGLDTAKSVFQIHAVNETGKAEIRRKLSRRDLIPFFKKQELCTVVIEACGAAHHWARILTGLGHDVKLIAPEAVKPFVKKGKKNDAADAAALCTAASRPDMKFVPAKSLEQQGILALHSARSLLVKQQTMLANAMRGLATEFGLTVPKGISKLEELAALVEADETFPVKARQAFTGLFDQCEALTESIMTFEAEIVAHARHDETARRLATIPGIGPITASLIAATVGDINMFKSARHFAAWLGLVPRQHSTGGKTRLGRITKTGNREIRKLLVLGATSMVYRAPQWNSAAGLWFRGVLERRPVRLATVALANKMARIAWALMTRKEVYQAKGRVAATAA

SEQ ID NO: 492024 - protein, 380 aa, unidentified
MKYVGVDLHKHIIVLCVAVLVAGRPKVVRRARFRCDQPEAVRAFFEALGPFQVVVEATAAYEWFFVLIEDLADRLVLAHPKKLRVIAESTRKSDKIDAEVLAVFLALDMIPQAYRPTPRVRQHRVLVRHRCWLQRRITSLKCKVRNVLGHYNADIAGLFTRQGEQYLEAVPLSPADRFAVQALREQLRLFQRQLREADRQLEQFAQTAPCAEQEARALLDTIPRIGPVTIDVVLSELGDWRRFRSQNAAVAFAGLDPGFRKSAGKCLELHISKEGSRLLRWALIQAAWRLTVHSPRWRQMLERLHANTGSKKKAIVGVARHLLCVMFAMLQSSRPYELLGVPNGNERPPKCQKAARASARARQKGAAPSRLRRRLVPAKG

SEQ ID NO: 492025 - protein, 347 aa, unidentified
MALAAISVLGIDLGKNVCSVVGLNSSGAVVMRRKMRRETVIGLAEKLPACVVGMEACCGAHHIGRMFAAHGHDVRLMSPEYVRPYVKAHKNDDRDAEGVAEAATRPTMRFVELKSQDQLDMQTLHRSRDRLVGERTALINQLRAILLERGFVAAQGKRKLEQFLAVLMDEQGGAGLSPRMMLLVADARAQWAELDRRIAAFDAEFVGWAKENEDARRLATIPGVGALIASALVAAVGRAESFERGRDLAAWLGLVPRQFTTGGKPKLLGISKRGDKYLRRQLIHGARAALPHIAERATPLGRWAKALLERAHRNVAVVAFANKLARIAWAVLRRQERFAAEKTVAAA

SEQ ID NO: 492026 - protein, 376 aa, unidentified
MSKLRFVGLDVHAETIAVAVAEAGGEVRSLGVIPNRLESVRKLVHRLGSMQDLRACYEAGPTGYVLYWQLTQLGVACEVIAPSLVPTKAGDRVKTDRRDAEKLARCYRAGELTAVWVPDADHEALRDLVRAREAAKKDQLKARHRLGKFLLRHGRRPDGIKAWTKQHREWIKSHVHFEQAALEATMADYLEEVDHVAERIVKLEKALDEAVQQAPAEIRAVIEALQALRGVAQTTAATIVCELGSVSRFQSPRQLMGYSGLVAREHSSGNRVQRGGITKTGNSHLRRVLVEAAWAYQHRPNVIGFLLRRQKNLAISQEAKDIAWKAQQRLHKRYKAMAARDKNKNQIVTAIGRELLGFIWAIAVKAEEQHRAAKAA

SEQ ID NO: 492027 - protein, 316 aa, unidentified
MDHQQAVYGVDVSKATLATVQYEGEAVVEVGNTPEPIAAWLASVPAGSAVAMEATGVYHRLLAQMAHAAGLTVYVLNPQALKHYAQAIGQRGKTDGCDARMIARYLVHERSKLRPWQPPVAAADTVSRLLVRRRALVGARQILAQSLTGMPMLKAPRQALLASFKRTIATLELLIRRELARVPEMAALHRRLKSIVGIGEVVAAQLVAALRTLCFTRAAAFIAYTGLDPRPDDSGQHRGKRRLSKRGPALLRCLLYNAAMSAAKSKVFKPVYMRLRERGLQSTEAIVILARKLARIAFALYKSGEMFDPQKHLKTT

SEQ ID NO: 492028 - protein, 426 aa, unidentified
MNCNLNDKIKQVEETSLVVGIDIGSTFHYARAFDWRKMELAKVFKFSNTLEGFEALSKWMNNIQALRGKEKVIVGIEPTGHYWFALGQYLQSKGIKLVMVNPYAVKRSKELDDNNQTKNDTKDPSVIAKLVIDGRYSIPYVPTGVYADLRIMFTNRTRITEEIGKIKNRFARWFAIHFPEYKEVFRDYESKGSLLLLKVAATPSSIVALGAEGINKIWRDAKIRAVGLKRATTLYETAKKSIGQTQGTAAAEVEMKLLLEDYEAKKRQYASIMVALEEAVKRVPGTDRLLAIKGIGLVTVAGFLAETGDLGRFESPKQIQKLAGLSLRENSSGQHKGETTISKRGRHGLRNVLFNAVIPLLATNDEFRKLHEYYTTRAKNPLKKKQSAIALCGKLIRVFYVVLVKGVEYDGQKMLSDIHRNENQAS

SEQ ID NO: 492029 - protein, 415 aa, unidentified
MQALYRCIAGMDVHRMLYVITVLVELADGTEEKHQRSFGGFKRDRRALVAWLVELGVELVVMESTGIYWKSIYSTLEKAGIPAHVVNARHVKNVPGRKTDLSDSEWLARLGRYGLVKPSFIPPEDLRELRVVSRYRDKAAQTLAGEKNRLHKVLDDAGIKLGAVVSDINGVSAQAMIDGLIDGTPIEQLPDLAKGTLRAKHELLDLSLDGELTPRHLFVLKNIREHIRYLESELASLDAYLIDAMAPYADYWRFLQTLPGLDQISAAMILVEIGTDLKAFDNVRHFASWAALCPGNHESAGKRKTGRIRKGNHMIRHLLCEAANAARRTNSVFRSFYQSLVPRKGHKKAIVAVAHKLLRTIYILFTRRQAYRDPGIDYQAMVVNRNAPRWIQALKKYGFWPKIGTFNAPIAAPAH

SEQ ID NO: 492030 - protein, 359 aa, unidentified
MASKAKRNTINFNGKMVNIGVDMHKQSWRVTALVEGEVAFTGTLAKPNYDSFRKLLARFEGNYLRIAYEAGPGGFGLYDRLTVDGIECIVTPPSLIPTESGSRVKTDKKDSLKLAKLLESNMLKKVWVLSPEERAHRQLVRTRRQIVDHRSDVMRQIKSLLFFHSMDIPFSMHQQWTGPFIKWLHELDLDDQCLNQSLKTLLHLFDYLSAEKKRLTHEVIELAREEKYAQRVKLLNSIPGIGTLSGMEILVELQEITRFKTADQLAAYLGLTPSQYSSGEHVRMGHITHVGNDRVRTTLVESSWILIGKDPSMRRKYENIKHRRGGKKAIVAIARVLSAHLRRMLLDQVPYEIGFQTAA

SEQ ID NO: 492031 - protein, 335 aa, unidentified
MNKSETAFLPCGIEISSQVLVINLSGKAPCEFANTPTGHQCLIRWLQLAGSQIRVCMEATGLYGLDLALALHAAGIAFMIVHPRSARNFARAMMQRSKTDRLDAIVLREYAARMPFEPWRPPSPQALHLMAIAHRLQALTRMITAEKNRLHAASLSRALPAVVRQDLARSIQSLQRALKRLTLAALELVLSDPQLARRNELLLSVPGIGVTSALNVLAEILRLGPDCGVRQWVAFAGLDPRHYTSGTSVAKKTIISKSGNAHLRRALYMPALVTVQHEPHFRGFYQHLVARGKTKLQAIVAVMRKLLHAIYGMFKHNQLFDGSKIYALDTSCAQN

SEQ ID NO: 492032 - protein, 336 aa, unidentified
MSHYCGIDLHSNNHFVVVIDEADKRLLEKRLPNDLSVTLETLSPYRETLQGIAVESTFNWYWLVDGLQDQGHEVELVNTLAIKQYDGLKYSGDRHDAFHLAHLMRLGILPTGYIYPREQRAIRDLLRRRLFLVRTACAQLISVQSQIWRSTGVRIKSTDLRKPDFEPRGLEGYTRQAAEAGLTVYQAVQREIDALERSAHRAVKLSDDFRILQTVTGIGVILAMTIMLETGTIERFAGPGNYASYCRCVDSRRDSNGKKKGEGNAKAGNKYLSWAFSEAAHFAVRYEPLAQRFYERKKARTNGIIAIRAVARKLARATWMMLKHQVPYEAKLMFPG

SEQ ID NO: 492033 - protein, 431 aa, unidentified
MNYNQNHKIAQITPKTLVIGIDIAKHHHVARAQDYRGIELGSTCFFDNTHEGFRTFIIWINQIKESHEMESVITGMEPTGHYWLNLAHILKEEQIKFVTVNPLHVKHSKELDDNSPTKNDIKDAKVIAQLVKDGRYAEPTIPQGVFAELRVAKKLRELLNVDLQIVQGQVHNWIDRYFPEFFTVFKSWEGKAAIHLLKLQALPEELVRYTEEELLEYLRQAVKRSIGIKKIQALKEAANRSIGIRQGAMMAKMELRTLIQKYELIQAKFEELDQTLDTLLQDIPGVDQMLEITGIGRDTVAGFFAEVGDLSEYNHPRQITKLAGLSLKENTSGKHKGRTRITKRGRKKLRALLFRASMILVAKNKAFKALHQYYTTRPDNPLKKMQSLIALCNKLIRILFSIGKKQFVFKEEKMLKDIPHMHAFIQEPIAA

SEQ ID NO: 492034 - protein, 449 aa, unidentified
MRKQEQTKEVTPDLQFEVKYSMAAGIDVGSMSMMVSYPGQGGKQLVKEYDAYTEDLAAMAADLRQAGVTHVCMEATGVYWMAVYEILENSGFTVTLVNARHYKNVAGQKTDVKDCQWLQQLHTYGLLRASHIPEEQYRELRTYIHERNMLQKSKSDTLNRMHKVLTQMNIKVQHIISDIEGVAGMAIINNIATGATSVNAILAGVNTKALKASNDALEKSLNGIFKPHFIKVLKNHLTAYHFYKQQMLEWEKEIEALLLKILPAGQDAVAPKKQKARKNQYNFNLKEYLHRIAGVDLTEIDGLDENTVLTIISVVGLNMHKWQTANHFASWLNLAARPNITGGKVTGYQKRFTTNAATQAFRMAAQTMWQQKGPLGQLYRRLAGKKGSPKAIKAVARRLAIIFYNMLKKQTAYDPKIVAMDADMIRHQKIARLQKEAEKLGCRVEIKTA

SEQ ID NO: 492035 - protein, 282 aa, unidentified
MKQYIGCDLHRDYSVFASVDETGRIAGPWRVEHDREGLRAFLRKFPAGTAIAVEATGSWYWMVDELEAAGLQPMLADSYEAKQRIRGPHKTDPLDARGLAILLRNGTLPCVWIPTAKLRDLRALMRTRLALVAQRTTIKNRIVAAVNRYGLRDDQIGDLFAGKGRLRLNVYIASMPKQTREAALEEWAVVDELREHIENLEERIAQNIGRIGYVRLLKTMPGVGETLGATIWLEVGDVERFPSAGHLASYAGLVPTVHASGGKVHLGPTTWVGHLWKRPARL

SEQ ID NO: 492036 - protein, 351 aa, unidentified
MNYIGVDYHKKYSYMVVKNEDGRVEGRGTVNNTKEEVQHFLEPYCPGMAVVEATRNWGLIYNWLDEVLDDVALAHPLKVKAIAEARIKTDKISADILADLLRANLLPRAYAPSKQTREIKNVLRQRMFFVRIQTMIKNRIHEILDRHPEVLCQAPEVSDLFGAMGMQWLNRIVLPGKDSELFASEIELFKFLREKVSQSNDVVKGLAKEDARTRLLKSIPGIGSFFSVLILYEIDDISRVRDEKKLCAYAGLVPSTYASGGKMFHGRITKTGSKWLRWAAIEAAQTAVRSDSEFRAYYQRIKVRKGTNAAKVATARRLLTIVYRLLRQGRFYERRTTTQEKIIIPAALVTS

SEQ ID NO: 492037 - protein, 323 aa, unidentified
MAKRTTICAGIDTGKRKLDLALDGSSEQLQVDNTAEGHKALLDWLRRRRVKRIGIEASGGYEQAVVAEMRRKGFVVVVFQPAQVRAFAKFHQQRAKNDKIDAALIATCTAAVKKIHAAPDARLLPFAEQLTMIDQIGEDIARLKNRIETCRNPRIQHVWEEDIVRLEERERIEFKALVRAICEHRDLSERLDLIHSVDGVGLPTAVAVLVRLPEIGQLTREQVAALAGLAPYDDDSGEQVGARHIDGGRKRLRRALYAAALPASFRWNPQLIALYKRLMAAGKKHKRALIACARKLLIFVNTVVARGIPWQHARPPIAAMPGG

SEQ ID NO: 492038 - protein, 411 aa, unidentified
MESITFRVLQRIDGETRWDEKSRSPERDAISSQVIHALEAQENKETGMKKISTTTAKAFRKMEKLTIGLDLGDRSSCYCVLDERGELVLEQKVSTTPKAMEEVFGGMPRSRIPLETGTHSPWVSRLLSELGHEVIVAHARNVRLIGESRRKDDRLDAKTLARLARIDPQLLCPVKHRSAKAQAHLTVIRARAGLVRARTALINVARGLTKSYGERLRGCSPRNLNKRAEGLSVELRTALGPLLEEIESLSERIREYNQRIEGIAQEHYPETALLKQVKGVGTLVALTYMLTLEDPHRFSKSRDAGCYAGLQPGRRNSGQSQPQMRISKEGDAYLRGLLVQSAHHILGPFGADSDLRRWGLKLAERGGKNGKKRAIVATARKLAVLLHRLWVSGEVYEPFYSSSRRVLVAAA

SEQ ID NO: 492039 - protein, 368 aa, unidentified
MAQRPSADQPDQPSHPLGAVVEVTGGVDTHRDTHTAAALDGQGRLLGHRQFPATAAGYAALLGWLRAFGRLVLVGVEGTGSYGAELTTHLHQAGVAVVEVDRPDRAARRRDGKSDPLDAESAARAALAGRADGLPKQRGGPVQALAALRVARRSAVDQRSDVTRQIKSLIVTAPEALRAQLRPLSDTQLIRHCATRRPDPTQAGDPQTATVLALRSLARRHQQLTDEINQLDKLITPLVRQINPTLIAIFGVGPDTAGQLLVTAGNNPDRLRSEAAFAMLCGAAPLPASSGRTDRHRLNRGGDRQANAALYRIVITRLATDPRTRAYVERRTADGLSKKEIIRCLKRYVAREVYAALIHTRKDLQPAA

SEQ ID NO: 492040 - protein, 346 aa, unidentified
MNYNPCITIDVSQGKSHIQGFIGYNNKNRKLDNITQPKVIRNSKQGYNKIIELISIIKSKTNWVLLVIFEFTGVYHKTLEKFLQKNNIKYHIVAPLRAAKSRQNDIRSIKTDKRDCLSFAGMFYDIKNDSLGKFDFESEFYESMKQLNRFYENIKLRQQELKVNFREYLAIIYPNYEITKSNLDGAFKNVYSKESLDFLKEFPHPELVVKKTIQEIEETIIKYLGKIHSKYSLSIASRLLDYCNDLVSGCSINQPLVDNIQFYISQIELYENVLNNTLDKLITIAKNTSLYHLLLTIPCVKVNLASRLVAKIGDINRFNSYKAIISFVGNDPKIYQSGDDLGLHKK

SEQ ID NO: 492041 - protein, 390 aa, unidentified
MIYVGIDVAKDKHDCCILGDDGNFLYPVFTITNDQVGFNELFSRIEEVTTDKTNIKAGLEATGHYSNNLLASLLDKGFPTVVINPLHTNLYRKGLSLRKTKTDKVDASSIAMMLMTDKTLKPYSMTSYHNEELKSLTRYRFEKVRERAKLKSSLSRLVNILFPELEKLFPTLHQKSVYAVLEECPGASYISGCHLTHLKTILTTSSKGHYGSEKARDLKWEAIHSIGTPMPAKSMELRHTIRMINILTEEIDEIESSIKKIMDESQSPIMTIPGINYRMGAMILAEIGDFSRFDNADKILAYAGLSPSTYQSGQMTSSHSHMEKRGSRYLRYALFNATRFVCNWDESFGLYLARKISEGKHYNVAISHATKKLIRTIYRMELTGESYSPR

SEQ ID NO: 492042 - protein, 410 aa, unidentified
MSTSNLQVTRYVGLDVHKRCVMVGAVDGQQQVVLPPRRLSWDEFERWRPQHLHPTDAVVLEATTNAWHVYDQLAPGVASVTVANPLLIKWISSACVKTDGHDTLKLARLLAAGIIPAVWVPSEPVRQLRALVSHRRRLIRQRTQARNRLHSLLHRHTILPPEGDLFGPAQRTWWRQLDLPPTEQLLVSQDLHLLDTLAPLIEQLDQQLRLESVREPWAAQLPYLVQHTGIGLLTAMVLLAAVGDITRFAHASKLVGYAGLGATVHDSADTHHRGGITKQGRRELRAAMVEAAWVAVIHNAYWKARFARLSRRLGSQKAIVAIARHMLVGVWHTWHEGQVDQHTDAVAIARKLMTWAEQGGKGMRPALSATQFVRLQLDRLGIGQELTELRYGSHTYALPAAHSVKVAQAG

SEQ ID NO: 492043 - protein, 343 aa, unidentified
MDHFAGIDVSLEQSSVCVVDATGRIVREAKVASEPEALITFLRGLNLPLVRIGLEAGPLSQWLQAALVKAGFEAVLLETRHVKAALSAMIVKTDRKDARGIAQLLRMGWFRPVHCKSAPAQEVRALLVARKQLQAKMRDVELSLRGLLRGFGLKVGEISKGQFAARVRTLVAGHTMLERIAEAMLQAREALQMEFGKLHRAMLAIVRADAVCRRLMTVPGVGALVAVTFTSGVDAPERFARSKGVGAHFGLTPRKHQSGETDITGAVSRVGDVMVRTALYEAAHILLTRAVRFSALKRWALEVAKRRGMKRAKVALARKLAVVLHRMWVDGTTFRWGREIAAA

SEQ ID NO: 492044 - protein, 421 aa, unidentified
MARTVEIVYPVCCGMDVHKNFLVACIAVTNQQSHTEHHIRRFSTFTGDLRRLANWLESYNCRDVCMESCGKYWIPVFNALEKAGINVCLTHPKYVKAIKGKKTDKKDAKWISELFKCDLVRSSFVPPPDIRQLRDLCRYYVKLTCFASGEKNRAQNCLTMCNFKLDDVFSDVFGKSATRVLDALLEHGNGDFELDGLISKKCKSSPEKIRAALDGELNPMQTEKLSLIRQHMDNLNDLKAALEKLIYTLATKYQPQIDLLMTVPGISTPLTAIRILVEIGADMSVFETAKQLVSWAGLTPQNQESAGKKKTTRIGRAGAYLKPLLVQIALAVSKSDKHPELKNKYLALKKRRGGKKAVIAISRKLLTAIWHILSKNEAYNAELYRKADKPPVSRELTTAQAVAFLRNKGFLIVDEETGEVS

SEQ ID NO: 492045 - protein, 352 aa, unidentified
MGLGDNQQQKEVATMYYTGIDLHKKTSFITTIDADGKIVTRANLQNVEEDILAYFAALDKETKIVIESMSSWYWLYDLITGEGFKVVISNPVKTKAIASAKIKNDKIDSHMLAQLLRADLISTVYVSSLKTRKLKELLRHRSRLVRDATRMKNRIHMLLMKNNLTSPFSDLFGVQGLSYLKEIDLPDYHRHQVETYLLLYEKLQEQIKPLSKTVRALVKKNHTAQLLMTIPGIGPITAMFIVAEVDDISRFRSYRNLASYAGLVPCLDASAGKEKRGRITKQGSPYLRTALVEAAQAAARMQNCRLRIFFRRRIVKGGYQKAVVATAHKILQYAFYVWKNQTPYKETYPVCA

SEQ ID NO: 492046 - protein, 347 aa, unidentified
MDQIIRIGMDTSKHVFQVHGVNAAEEPILRKKLRRQDMITFFEKLPPMVIGIEACGGSNHWARLLQSLGHEVKMLPPQFVKPYLKRGKNDAADAEALCEAMSRPTMRFVPVKTVEQQAALMLVGVRDRLIRERTQLVNVIRGYAAEFGLVAPTGLCRIEPLLERAKTEETLPALARELFEMHAVEYARLQTQLEEVEDRLMAWHRAHEGSRRLARIPGVGPIGAAMLVMKTPAPEAFRSARHFAAWLGLTPKDHSTAGKVRHGVITRAGDEILRSVLVVGATAVIRQLRRGQSAPASPWLVALLKRKPPKLVAVALANKIARIAWKLMVTGESYRAPPSVSAAACAV

SEQ ID NO: 492047 - protein, 341 aa, unidentified
MDEYIGLDVSLKETAISVRREGERVWRGKCPSDPRLLAEVIRKRAPSAKRVVFETGPLSVWFYHALSAEGLPAICIDARHAKAALDMAPNKTDANDADGLAQLAEVGFYREVRVKGYDSMLTRTLVAARTKLVRITIELSNQIRGLMKTFGLVVPPSKGGKFEANVRRLLADHDGLEAIILPVLEAWRSVRIRAADLGRQLLAGARRSRSCQLLMTIPGVGAVTATAFTTAIEDPANFKTSRSVGAWLGLTTRRYQSGEVDYDGHISRRGDGHLRGLLYEAATVILTRTQADSSLRAWGLKLREKVGFKRAAVAVARKLAVIMHAMLKSDAAFDRTAGVMA

SEQ ID NO: 492048 - protein, 412 aa, unidentified
MTVTNQFAAHVGLDWADKKHDVCVQFKNGERVFDVIEHTAEALDAWLTELHQKVKGRIAIALELKKGPVVYALQKYPFITVFPVHALSLARYRQAFSPSGAKDDPQDAELALELMLRYPQKIKAIEPDNADIRLLQQLVEQRRQLVEDKRRFVNRIINTLKQYYPQPLEWFSHRGSLLLCELIIRWPSLQQLKRARRDTIRNFLNAKGGRAMALTEQRVASIDNAIPLTTDPSVIEANALMATALATQIKVVSEIIKTYDERIETLFDTLPDAGLFKSLPGMGPCMGPRMLAALGDNRDRFNSAEEIQNYAGIAPVTERSGQKSWVHWRWQCAKFVRQTFVEWAAKTVNSSYWARLYYRGLREKGKSHQSAIRALAFKWIRIIYRCWKTKTQYDEAKYLLALEARKSPLLKP

SEQ ID NO: 492049 - protein, 316 aa, unidentified
MDHKQAVYGVDVSKAKLAIAQYEGEMVVEIDNAPEPIAAWLASVPAGSAVAMEATGVYHRVLAQLAHAAGLVVYVLNPQVLKHYARAIGQRGKTDGCDARMIARYLVHERSKLRPWQPPLAAVDTLSRLLVRRRALVNARQTLAQSLSGLSMLKAPRQTLLASFKRTIATLDLLIRRELARLPEMAALHRRLKSIVGIGEVVAAQLVAALSTLCFTRSAAFIAYTGLDPRPDDSGQHRGRRRLSKRGPALLRCLLYNAAMSAAKSKVFKPVYLRLRERGLQSTEAIVILARKLARIAFALYKSGETFDVQKHLKTT

SEQ ID NO: 492050 - protein, 342 aa, unidentified
MQVTTIGLDIAKNVFQVHGIDASEKVVVRKQLRRSQVLAFFKALPSCLVGMEACATAHYWARELTKLGHKVRLMPARDVKAYVKRNKNDAADAEAICEAVRRPTMRFVQVKSAEQQSQLMLHRTRDLLMRQRTQVINALRAHLAELGITAAQGNAGLGELLAIIAGTGDDRLPTEAHASLIVLAAELQAMRTLIASIEKRIIAQHRSDEASKRLRSIPGIGILGATAIAATITDPKAFRSGRDMAAWIGLVPRQDSTGGKQKLGPISKQGDRYLRRILVVGAHAVLKIARQKPEKYPWLTQLLARKPFKVVAVALANKMARIAWALLVKGGPYRARALVAAA

SEQ ID NO: 492051 - protein, 342 aa, unidentified
MEHYAGIDVSLECSSVCVVDGSGKIIRETKVASEPAALIGWLGSLGFGLGRIGLEAGPLSQWLYMAMKQAGLAVELLETRHVRDAFKAMPVKSDRNDARGIAQLMRLGWFRPVHCKSMAAQEVRAILTARKLVQSKLIDIENSLRGILRGFGLKVGKTTRTNFAGRIRELVKGHPNLKTVGEALLSVRAVLLGEFNAFEKRVRAMSHSNANARLLMSTPGVGQIVALTYISAIDDPARFRSSKRAGPLFGLTPKKYQSGEIDRSGRISKIGDTTVRAALYEAAHIILTKPIKGCSRLKSWAMRIARRAGMNKAKVALARKLAVILHRMLATATPFNDAAAAA

SEQ ID NO: 492052 - protein, 368 aa, unidentified
MNEYKLKAAPTAVSKEQNSQKNPKANRILIGVDAHLKSYEAARKIDNGAVGVAQSFRSKEAFLLYVEKQREQAEEVVVLYEAGPLGYTLYRELKASDIECLVCAPRSGEQKRKRRKNNSIDARTLSSDLFNYLNGNEQALQAVRVPSEAQEQARVESRQHDALVEERKRIGAMGNSLLLSQGYGSWSNWWRPKAFERLSKGVAPWIVKHLGRWVGILRELDQQIQQAKAELTQHYQGPRPKGMGAPSLAQLNAEVLDWTLYSSRRKIGCLAGMVPSEWSTGEAQRLGAITKVGVPAIRRIITEMVWRMILFQPEYKPVQKWREVLEGPNRGLKKKAVVAIGRQLIVDIWRLQTGRITAQELGLIMIEA

SEQ ID NO: 492053 - protein, 405 aa, unidentified
MRKVFVGLDWAEDHHDVFVEDDTGRRLGGGRLPEGVAGVARFHELVAGHVDDPVDVVVATETDRGLFIGALVAAGYSVVAVNPMSTSRYRERHSTSGAKSDPGDAKVLADLARTDAHNHRRVAGDSELAEAVKVLARAHQTMIWSRQRQTNQLRSTLREFYPAALEAFDELAGRDALAVLAIAPNPAAGRGLSRSKIAAALRRGGRQRRIDERAIEIQTAFRTEQLQAPALVADAMGATVTALVAVIAEMQTQIERLETELADRFEQHPDAKIIRSLPGLGMTLGARVLAEFGDDPNRYADAKSRKNYSGMSPITRASGKHHVVLARYARNRRLADACYQWAFATLTTSPGARAFYDQRRAAGDTHHRALRALGNRLVGILHGCLRHHTHYDEQTAWAHRHTAAA

SEQ ID NO: 492054 - protein, 340 aa, unidentified
MQITTIGLDIAKNMFQVHGIDAAEKVVVRKQLRRGQVMRFFEQLSPCLVGLEACATAHYRARELTKLGHEVRLMPARDVRAYVKRNKNDAADAEAICEAVRRPTMRFVRVKSAEQQGQLMQHRARDLLMRQRTQLINAMRAHMAELGMIAPQGREGIKQLLAIIANDEDTRLPVDARASLIVLAAQLEAMQTMIGSLERRIVARHRSHPDSKRLQTIPGVGVIGATAIAATVTDPAAFRCGRDFAAWVGLVPRQDSTGGKPRLGPISKQGDRYLRRILVVGAVSMLRRAKLNPEKYPWVTRLLARRPFKVVAIALANKMARVAWALLAKGGTYRPRLAAA

SEQ ID NO: 492055 - protein, 453 aa, unidentified
MAKKAKKIKTAKGLRLKIVNPDSAGIDIADGEMQVCVPEDRDGDNNRRFGSFTEDLHAICEWLHACRIKTVAMEATGVYWLSLYQLLKEEGFDVVLANPLQVKNLMEEKTDEADAEWLMLLHSYGMVRPSFQPENIVRQIRNITRHRATIINKAGQETQRMQKALEMMNVKLSTVITDILGKTGQSIIRAILAGNHDPVSLSQMTDKHCKASKETVAKSLEGTWDEDLLFMLRQSVECYDFYQGQLQACDQQIESLLARYVSQIDNEGAKQLERVKKRRSQKNAVAVDMEMYAHMIWGTNVMAIPGMSTNSMLQLVAELGHDFTDKFDTCAKFCKWCNVVPNNKVTGGKLVSSHIPKRKNPVGLVLRVCANSVKAEKSEMGTYFRRMKAKSGHMQAIVATAHKMARILYAMVKNKQAYDPAKVGCDEKELLIRKIERTKRALQRLDDRLRDTG

SEQ ID NO: 492056 - protein, 523 aa, unidentified
MATRCKSRARRSRRYLTIVKPSGSLHPRVQKVGPEHFGIVAVDCAKARSKWMLADFYGRILIPPSVVEHNKQGFDSAIAEIRRAMESHSLGDMLVAIERTGIYHLPVKRAFSSQSFDTRIVHPLTTKQYRLPADPGNKTDDTDLFAIHRATTNGFGLIELPLDEIHGPLRLLARYRRSLVRKNASLRNQIIALLDVILPGYTGIFDDVFNNQAALSIARSVQSASKVRALGSEGLAQILKELKVRYQRRTLKKILDWANGIDSTTEYSEMYHTILVHLDDERCGRLQHIAKLEQEMASFLVRTAYVVLLSIPGVSIVTAAEFAGEMGPITNYANDQAITGRAGIYPSRYQSDKIDRCDGPLVRRANRKLRGVIMMIADNLLSCNRFFQALKAPWVAAGMEQQAMCVRVAKRFCRIAYQMVAGGQVFRHPSCQKRDAILRKLSIFHSEHGSSMAQVMTDLQAATDHIPKSEHAPEAKSLYEELQPSNNRQQCGPRRLGEILPVVLAKLGVNPVDLSLKGENDLT

SEQ ID NO: 492057 - protein, 325 aa, unidentified
MILHVQDRKDNIMKSISQINVGVDVSKDSLEVFIHPINQRLTVDNSQAGVRSLLRQLRKYKVRGITCEASGGYEFFLNKFARKSDYPIWVADPRRIKAFIRSEGQRTKTDKIDAEMIARFGASKQAPQNFHSQQTDVLRQLVKRRKQLKDMIGDEQKRVQHPQLTFGVALIKKLITLMKKSLKETEEQIRKHIEKNDQLAQKDKIIQSMPGVGPVTAATLLGCMPELGLIGNKQAAALVGVAPFARESGRYKGQSRIAGGRADVRCDLYMCAMTCITFNKRFKEFYQRLRKNGKNGKVALVAVMRKIIVTQSAMVRKGELWSLEK

SEQ ID NO: 492058 - protein, 431 aa, unidentified
MLKINPLSTLYVGIDVSSKSNYVCALDFYKNKYINSSFANNQPGAEELALKILECLKEHPDITTIVAALESTSVYSIHIANYLSSCEELMRFKPYVFVLNPKCTANYKKSYIGLGKSDPIDAFVIADYARAGNIESEPWRGSQFLALKRLTRHRLHLVECMTREKTYLISNLYLKFSELQMLEGDDQPFCDIYGATSSSVLMEYFSPEEILDSSEEDLIAFLAKKSRNRIKDISKTADLLKKAARDSYRLDKALYEPLNVSIASSFNCIETFKREIKVIDNAIEKEIKGLNPNAFIILQSIDGIGPVFAGGIIAEIGDITAFHSSDALAKYAGLTWKSNQSGDFDGEDTPMIKAGNRYLRYYLGEAANSMRKHNVEYGTYYRKKYNEVPKHQHKRALALTSRKFVRLVYGLLARNQLYSGVSLDTSIKDSN

SEQ ID NO: 492059 - protein, 463 aa, unidentified
MKSKSKGKSKSIGTPKTQKSVSVPVIHEHAAGIDVGSRSHYVAVGQNLEEDVREFGVFDSDLRECSHWLKSRGVTTVAMESTGSYWQNLYDVLIESGFEVLLACGRQTKNMEFKTDAKDCRWIQFLHSVGLLTSSFLPDLDTEELRTLYRHRDFLLKQAAKYICKMQKSLRLMNFRLDVVLSDITGLSGQAIIGAIISGVRDPEQLASLAHYNVKASKEEIARALSYNGRVDYMYELSDSFDIYQSYIQRIEACEKKMEELLRSQIVKLGKPQTNPPSLEHKKRVNKNSPKIPLEKLSWQWNNEVNLMAIPGVSYSTVLTIISEVGLSIYKFATAKDFASWMCVSPNNRITGGKIISSHLRKGSNRVAAALRHAADSIGRQKDAPLYPFFQRILHRKGRCAAIIATAHKLAVIIWNMLTKNEAYKPYDTTKIESQIREKQIKKINKLMKVFDVKISEINLAPV

SEQ ID NO: 492060 - protein, 435 aa, unidentified
MEEVTDEPLYRDRVCGIDIGKAQMVATIRVPSDRDPARRAAETRTFGTTKREVLALADWLRCWQVPAVVMEATSDYWKGPFYRLEAEGFECVLADAKQVKNLPGRPKRDPADSRWLAACFERGAVTACFVATPEFRIIRLHTRYRRDLTEERTREKQRAEKLLESAALKISSVLTDLHGVTGRDIMDHLIAGQRDPKVLAQLARAAARRKISQLEQALEGAEFFTAEHAALLAKVLARIDRLSADVEDLTAVIEQLLAPHEEQLQQAESMPGWGRRAAQDAVAETGVDMTRFRTGPHLASWGGRAPQDHQSGKRAGRSKAKKGNKYLGAILGETAVAAGRTQTREGVRHRRLVRKRGTAKACVATGNTQLKVYHKLLSNPGMRYEDLGPDYYDRQRDVRRQIAHHVGKLGSLGFEVTLCRIPEPGPDGTAPTQAA

SEQ ID NO: 492061 - protein, 457 aa, unidentified
MGNARARKVPAQVIEDEDYQLRHERVAGIDIAKAKADVRTRLPPAREGGRRASRVEASVPATAAAILALAALLLADRVELVVMEATSDYWRIWYYLLEGAGLNVQLVSPSQARQLAGRPKTDRLDAQWIARLAEMGLLRPSFVPPPQIRALRDLTRTRLQLVRDRTREWQRLEKLLEGALVKLSSALSSLARVKSARAILEAIAGGERDARALAALADGHVKGGRAAVEESLAGMTLAACHPMLIGLHLDHITLLDRQASALDDEIEAALEAIPAARGVGADGVPSPDPGPGAAVLPADQRLAEIPGVSPELARSIIAETGLDMTRFPTAGHLVSWAGLAPAARQSGPRNRKPAKGQGDAYLKGYCTQAATGAARTDTFLGERLRRLSRRLGGTRARCAVGRSILVIIWHLLSDPEARFADLGPDWHDRKTDRDRKTRSHLRGLQALGYEVTITPAA

SEQ ID NO: 492062 - protein, 337 aa, unidentified
MFMQLYGIDLSMEKFDANFIDAKGNEKNKEVKNKVVSISKFLSSVAEDGILCAEHTGAYGDLLVSLCNQADIPIALVPGYTIKHSLGLLKGKSDPLDARRIREYGERFTDKLVFSEYDKESIVELKQLHTLRSQLVKARKILLTSDKGRCHLPMQSVSVHNHLQPVLSGLDTEITTVEEEIEALIKADEDLNENYELVTSIKGIGPVIATDLLIKTGNFKNIDTARKAASYAGVCPFPNTSGKMVGKSKTSPFADKKLKSLLYMGAKSAVKHNKEYQLYYQKKQIEGKPHYLIMNNISNKMLRTVYSVVKNKTPYSQDHICLDPRERNINSSTKKVA

SEQ ID NO: 492063 - protein, 346 aa, unidentified
MRFYDQQHDFYCGVDLHTQRMYLCILDRDGNKQLHRNMRAKPDEFLRAVEPFRKDLIVGVECMFTWYWLADLCLDENIRFVLGHALYMKAVHGGKKKDDKIDSEKIARLLRGGTFPLSYVYPREMRATRDLLRRRTFLMRRRSELLGHVQQVNQQYNHAPFEKQLQYACNRDVLDRFEQESTRQSVEADLQMIGHYDQLLKELESNLSRHARQQDPQASFLLQTIPGVGKLLSLVLLYEIHTIDRFATVGDFLSYARLVTPKHTSDGKVTGHSGAKIGNSHLKWAFSEAVPMMLRHCEDAQRFLARKEKKHGKARAMTTLARKIARTVYQMLKRKEAFDAVKFFAS

SEQ ID NO: 492064 - protein, 399 aa, unidentified
MSKSSCPEIRVSVDVGCHGHSVAIGLSGGEVIDEFDVDHNPEGFRHFFSRITHCERKYGFPVSVAMEGYNGYARPLDRMVRLRDYRLFNINNVKLSRFKEIFPGAAKTDRIDARKGLELFQLQDFLPAARGVLQEVAVTPEQNDLLKRLTRRRRRLVDEKTRVLCNFQADLQAVSPGLLEITGDASNVWFLRFITSTDDLRKLARMRRTSLLKIPAVGVKYADAIGSWQKRAYFSGEVSYVGEMIQEDATRILELRYKIKALDGRIAEVAGRSREAAIVSSLPGFGPTSTAELAGEIGTIDRFDNESSLALYLGMANLDHSSGKKKGSKTSKHVNTRAKAAMMAAVDRHRKCVPESQRYYEKKRAEGKKHNQAIRALGRHLCRTIFKMLKEEREYEIRD

SEQ ID NO: 492065 - protein, 356 aa, unidentified
MGKDITAVGGLTIGLDLGDKQTVGIVLTPSGDVEETFRVATTMAALGRTMAGFKPSRVVLEVGTHSPWVSRLVEQAGHEVIIANPRRVRLIAENDSKTDEVDAELLARLGRVDPGLLKPIVHRGERAQHDRILLLARDGLVRSRTQLINQVRGFAKSLGHRMPSSSTPAFPRRVREQFRTDLFPGQSAMLNMIDMLTEEIRGMDRAAEKLCKENYPETGVLRQVKGVGALTALGFVLTLEDPSRFAKSRTVGAYLGLRPRLRQSGEQQPQLRITKAGDALLRRYLVGAAHYILGPFGPDTELRRFGLKLAERGGSAAKKRAVVAVARKLSVLLHRLWVTGEEYQAIGYGQSAQEAA

SEQ ID NO: 492066 - protein, 449 aa, unidentified
MRTHRPKHLRSASLPYVNPHAAGLDIGSEEIWACVPDDRDAQPVRPFATFTPDLYALADWLATCRIETVAMESTGVYWIPVYELLEARGFQVYLVNAQHVQHVPGRKSDIKDCQWLQYLHTCGLLSASFRPEAERCALRAYLRHRATLLDDRAAHPQHMQKALHQMNVQLPHVLTDITGTTGLAIIRAIVAGERDPVHLARFRDRRCASSTEEIAKALTGHDRAEHVFALKQALALYDAYTAQVRECDAEIERQFQAITPVWDDDLPPLDCQDKALSHSKNAPAYDARSLLYQLAGVDLVAIPGLHASTVQTLLSEIGLDMGKWPNEKAFCAWLGLAPRHEISGGKVLRRSTRKTRNRAGQALRLAAQAAGRSHSGLGAFYRRMRARLGPKSAIVATAHKIARIVYHRLNHRTPFCDLSPEEYTQRSRAREIAAMRKKAARLGLTLVEG

SEQ ID NO: 492067 - protein, 351 aa, unidentified
MKYIGLDCHKQYDHATMIDTETGEIKAKRLAHIKEDFSDFIGDRAGTRMVIESCRDWSRTYELSEDLVEEIILAHPLKVKAIASAKIKTDAIDSRTLAQLLMADLIPQAHLRKAENRVKQRVIRHRAFMVVMRTRVKCRIHDLVDSQLLPPDVLKAKPISLFSKKGMKWLTSLEWARDENKKLVESHLRVMEAINQEISITNDMVKEIYEKDRDAQLLTTIPGIGVTLAILISTEIDGIERFRSPSKLCSYAGLVPSTHSSGGKTYHGKITSEGNRWLRWALVEAALPASYGDAEIKERLETLRAKKRANVAKTAMARWLLKVVYHVLKGKRPYITAYNNQTKARTAFYFA

SEQ ID NO: 492068 - protein, 415 aa, unidentified
MKNYSELTHFAGLDWAKDHHDVNIMDRQGQVVARFRFAHSGPGWQEWREKIQGYPALGVAIETSHGAAVEQLLASGVTVYPVHPQAAKAYRQRQAPSGTKDDELDAWSLGDALRMDGGHWRALSPQDAIVEELRLLCGDEAALIEQRTALVNQLQAALHEYYPAALEAFEDWTAPFTWAFVAAFPTPQRLVQSTVHRRRVFLHTHKLWRPGTAERRLEIFARADQFCGGDAVTRAKSRLALALCRSLDALQAQLDDYRAAIEKLFAEHPDHDVFGSLPGVGVTLGPRLLSGLGANREQYPEVQGLQCVAGTAPVSFQSGQIKRAKIRWHCDRFLRHTVHLWAGCSLKSCTWAAAYYAAKRKDGMSHACALRCLAQRWLKILWKMWQTHTPYDPEYHARNQQRHGSWVLQLNPKTT

SEQ ID NO: 492069 - protein, 327 aa, unidentified
MKQFIGIDISKKKLDCLWLRDPEQLKIKTKVINNDQKGHEQLCNWLLSTTKQAAADIVVVMEATGIYHETLAYRLYKAGFTVVVENPAQVKAFAKTLGAIHKTDKQDSLLIARYGYIHRPKAWEPEAPEIRELKALIARLEALEKDSRRESNRLEKAEFAGSSSTVIDSIQVMLEKLEQEKKRVEKQIDDHIDRHDRLKKDRRLLESIPGVGPVVSRVMLSIIHSRRFKKAEELAAFVGVIPQLMESGTFKGRSRLSKKGPSFVRAKLYMAAVVAGQYNEHIIRQQKRLLANGKTKMQALSAAMRKLVHLCFGVIKNQTEYSPKVIN

SEQ ID NO: 492070 - protein, 341 aa, unidentified
MQHIAIDLGSKESQICIRTEQGEILHEGKVQTSSLDRYLKRQPQSRIILESCAEAFRIADFALGCEHQVRVVPATLVRSLGVGSRRIKTDRRDAQVLSEVSCRIDLPSVHIPTDVARQRRSMCGTREILVASRTSLICCVRGWARTQLLKVRSGESETFTKRVLDAAATTPDGIPEYIERLLTSINSLHEQIAAADKELEQLTEQEPICQLLMSVPGVGPVTSMRFVAAIDDVSRFANAHAVQAYLGLTPGENSSSTRQQRTGITKAGPAPVRRTLMQAAWNIRRLRPLDPISQWAMEIEKRRGKFVATVAVARKLAGILFALWRDGARYEPNHQLRKAAK

SEQ ID NO: 492071 - protein, 346 aa, unidentified
MMIIGCDFHPSWQQVSWLNTETGECGEKKLVHALGEAKEFYQQLAAPVLIGMEATGNSQWFIELVEDLGHEIWIGDAAQIRASYVRKQKTDKRDAAHILKLVVQGRFPRLWTPDREQRDLRQLVLHRHKLVVIRSRVKNELQHLSLNKGVQRKHKLWSQAGQKMLRELPLKPWAACRREDLLGLLSMLNQQIGKLDDAVQTAAEENPQAKLLMTQPGVGPNTALAYVLTIGDVNRFRRGKQVASYLGLIPREESSGGRQKLGAITKQGNRMLRSLLVEAAQVAVMHDPGLRKQYLHRCHQKPKAVAKVAVARKLAVRLYWMLRSQVGYPEIVRIESSSGLPLVGAS

SEQ ID NO: 492072 - protein, 371 aa, unidentified
MQTITYVGLDVHKATIAVAVAEGRRGGEVRHVGVFPNRPEQIAKLVERLGKGGRPFSFCYEAGPCGYGLHRQLTELGHDRIVVAPSLIPMKAGDRVKTDQRDAVMLAKLHRAGELTSVWVPDDAHEAMRDLIRARATAVRVLGKARQHLQGFLLRHGRIYPGKKGWTGAYRRWLARVRFDHPAQQVVLQDYIHAVEDAEARVERLVAQIEDLLPSWSMRPVVEAVQAMRGVGLIVAVTVVAEVGDFSRFQNPRQLMAYLGLVPSEHSSGTSVRRGGITKAGNALARRVLIEGAWTYRMPARVSPKLHARLEAVPKNVRDIAWKAQVRLCNRYRRLAASGKAKAVVTTAIAREMVGFIWAIARQVQEAATTA

SEQ ID NO: 492073 - protein, 412 aa, unidentified
MERIYDNCCGIDVHKKLLVACFIHGREQEIREFGATTRELLEMADWLQQGKCEMIAMESTGSYWKPLYNILESVGLNAMVVNARHMKAVPGRKTDQKDAEWIADLLQHGLLKASYIPDKAQRELRELVSYRKSLVADKSRELNRLQKMLEGANIKISGTISQINGKSARNLLELLVKGQKIDRKKLAWMKENKQLANNLKATPEQLADDLNGVLTKLQRQMMKELLRHIDELDKHIANLDDQIDDHMKPEEKQAVEAIQTVTGIGSDSAKAIIAVIGTDMERFPTDSHISSWAGLCPGDHESAKKRKSGKTRKGNKLLRSTLVVCAHAAAKVKTSYFYAQYKRISAHRGKKRAAVAVAHSMLIAIYHMLKEGVAFEDLGADYYNQFNKERKINAYLKKLKALGWQDPTTTAA

SEQ ID NO: 492074 - protein, 396 aa, unidentified
MKQAPPALSKLRAVFDKRLKGGAMNTIYIGVDFHARQQTICYLTTETGELVTAELKHEPKTAVRTFYEQFSGQVIIGLEASGYSPWFERLLEELGHQVWLGDATEIRRRARWQQKNDRRDAELILDLMLHDEFPRLHRPSLQSREVMRMLRYRQKLIKMRTMSKNSLQSLALQSGIARRSRLFTREGEAELNAAVMSPAMAWQRAHWLQLLEPLNQQVLEAMTWLKAASQNDVSIARLRTHPGIGLLTSLCLVHTLQPVARFPNTRKVAAYAGFDPMERSSAERKHFLGISKAGSRVLRYLLVEAANTAVRKDEDLKRFYQRLAHRRGRPKAKVAAARKLLIRAYIMMRDEIDYAEFRRRAVAARLARLRQGPQIPAALIGQPASTERQELPPRGK

SEQ ID NO: 492075 - protein, 387 aa, unidentified
MYFVGIDISKFKHDCAIIDDIGDLVTPSWSFNNDCEGFSLLAELLKGLGKDVKIGLESTGHYGQNLKLFLESSNFTFMEFNPLLISRFVRSKSLRKTKTDSIDALLIAQYLMTVEYKPYPASFYHLDKLKSLTRFRDSLVRQCSRQLVELTNVLDKIFPEFKPFFKHRFSVTALYILSNYTTPEKIANMNARSYDTIRKLSRGKFTMSAFAQLKILAKNTVGQSDDYLLQEMDVLLELYNQLDAKIQEIEEQVFACIHGINPPMLSIPGIGALSAAIILSEYGDFHKFDSPAKLLSFAGLEPGYFQSGQSEHSGRMVKHGSSHLRYAVMNCCLSLITHEPVFAEYYAKKRAEGKPHRVAMTHVAKKLLRVIYTLQNSNVTYDPDLIR

SEQ ID NO: 492076 - protein, 482 aa, unidentified
MKKRNIYANQSQEILTLFEKAGNSAKLMCIPIDYAKKDHVVMFCNGHGDILRKPFDVKNTPEGIEYLIEQVSRSCRYHRIDEEHVFFGGEDVGSYAENFASTLRSGGWLVAGVNAQDAKKQRANLQASTDRLDLMGIAKELLNCRGNCAPAQSGIYRNLRTLVRHRRRIVAMTTEVSNRIHAVVDRLFPGFLNEKSSGIAPFSKSSLWLMEKRFSAPQIHRRKRTTLIEALRRLGTQKPDFVAAKLQEYAQRVLNTPGEYVSTLQLSLAQHVKHYRCLQESDDQLKKEIAVWLGQTQGAFLTSVRGIGIVLAAGVGAEIGDPFEQKPVNNLVSYSGIIPRIYQSGGPEGEIYTGKVAKRSNRILKDYAVQSASHLGLHGPDDLMMDHKRRDAAGQHADFGIARRYLRMAMCLMRTSQIYLPSKLRKKGIKPEERAGYYLMTWPYLRDKWRKLGALDAAFSEDRPLGRWRNMVQDLYEIKLSL

SEQ ID NO: 492077 - protein, 354 aa, unidentified
MSEITRVGVDLAKSVIQIHAVDAAGKLVTNRQLSRDKFLTWCAQQPVGCVVAMEGCGGAHHWARKLIALGLNAKIIAAHLVAPYRLQGKGGKNDANDAAAVCEAASRPNMNFVPVKTTVQQGVLCVHRLREGLKEERTACVNRIRGMLTEFGLVVSKSPEKLREKLTDLLEDASNDLSGLARLVIEEASGHWKEIDQRIKWCDERINAHVMDDAQAKAAKELMGVGPLTASAVVATVGDFKQFRNGAQFGAWLGLTPRQNSSGGKNSLGGITKRGDMYLRMLLIQGAKSAVMTAHKRDDPISNWLHQLREKSGWQKAAVAMANKNARILWAMMTKGCGFDPRYVSVKPAGGSHQ

SEQ ID NO: 492078 - protein, 355 aa, unidentified
MDSVKYIGMDVHKEAIVIAVLNSSGKLVMECVIETKANTILDFLKGLRGSLHVTFEEGTWAAWLYDLIKPHVTELVVCNPRRNALLKEGSKSDRIDARKLAELLHSNILRSVYHGEHGVRKLKELARSYLAISKDVGRVMSRVKAIYRSWGIPCAGKQVYAPRYRPEWLGKIQEAGVRRRAEFYYQQFDALRTLRQEVRRELLAEAQKHDAWKLLREIPFIGPIRAAVLIALIQTPHRFRTKRQLWTYSGFGIETHSSAEQRFINGELRRAKKPVSIRGLNRNHNHDLKNLFKGAATVAAAKAGPFKEFYDALVAKGIRPEMARLTLARKIAAVTLVVWKKGVRFDAKHLKPQTA

SEQ ID NO: 492079 - protein, 341 aa, unidentified
MSVRRILAKTIDTDLEYEAIGIDLAKNCVSAALLTTDGEVVCIDRLDYSELEKSAQALSPTTFAMEPCTEMNYLVQKLEAWGHRCLVIGGKNVQNYVENHFSGQKTDLNDAQALAFLAQDTQLRTIKAKDIEQQKYASLTTLREQYIKQYRQTIVSLKGICQAWGLNISKGISGKARLKDLIENHAAFPEELKESLVDMVTHAQTAQKALNKITKTLEELAKSDKVCQLIQTIPGLGSICSCRLRATVGDIKRFKSPKDFPAYYGLVPRSIATGHNERKGKITHRGDRTMRSLMVQAAGSLVNMATKGKLKSKQLTKWILKKQKEKMPWGKLVPCNNNIFA

SEQ ID NO: 492080 - protein, 331 aa, unidentified
MKNKEIVGIDVSKKVLDIYILSEKHHFKISNDPGGFADLIELCAMKLGERFENVFFCFEDTGRYSKLLSVFLQESQFQFAALNALDIKRSMGLTRGKTDKKDARMIALYAWRKRDELSVTNLSGPIIDQLKQLLTLREKLIKHRTAFKNAGKDLHDCYIDGEFSFIKERHTSMLLYLNSEINLVEKELLRIINLHEELADTFRLLLSIRGIGKVLAVYLITLTDNFTKFLSPRKFACYAGIAPFEYSSGSSVKGRTKVHSCANKQIKSLLNMAAMSSIQLNGEYKTYYLRRLSEGKNKMSTLNIIRNKLVFRAFAVVRRGTPYVDLYRFAA

SEQ ID NO: 492081 - protein, 412 aa, unidentified
MKKTDYIYIGMDIHKETHTAVLMNYMEERIGEVKIKNNLIGYRRLLAYVEKHRKNLVPMYGLEDVTHFGRNLAIYLQERDYIVKEVNSALSYMERMSYATAKKSDTWDSQCICSVLTRRQDVLPEAKPQDYYWTMRYLVNRRDALIKASTKLLQQFHDQIQNVYPSYKEFFHEVECSTALAFYEQYPSPECLKGITDEELAEFLRIPSHNTCSTKRANEILDLVEKDAIKVRDYQYARDGVIQSIVRTLRFQSEEMKRIEEVEAEMLKELNYQLETIPGVNTVTASALVAQIGDIKRYKSADKLASFAGVAPIYQGSAGKGKNYQNKSLGNRELYHVLYFLAIQQVHIDRKKSPRNPEMRAYFEYKISTGKTKIQALICIMRRLVRIIYAMMKYKTAYEMPEIREKEEVKVS

SEQ ID NO: 492082 - protein, 349 aa, unidentified
MNYMGIDHHKQYSHITVLREKGEVIKADRVWNIRREVKEFLYGLDEEITGVVEAGRSSYTMVDLMESLGVSMKVAHPEQVKAIAKAKIKTDKRDSWMLAHLLRMDLIPEVYRRCAENRGNQRVFRHRVSYVRMRTQLKNRIYCLLAQQEEEVRQMADQEDDLFTARGMKVLRGLALPGMDQEVLVSLLETLGHLDVKIKQSDALVNKIYRSCEQARLISTIPGFGKFFSVLVSTEIAEIKRFSTDSQLHSYAGLIPSTHASGDKLYHGRLVHRGNKWLRWAVVEAVWPAVRSDFDIRLYYQKRKKREGVNSAKVATARRLLTIIYRVMKEKRAYIPFKREKHTVAFART

SEQ ID NO: 492083 - protein, 340 aa, unidentified
MRMFAGLDVGFKRTAVCVVDEAGRIVWRGMVDTHPEALSRALQHWGEKLAKIGLESGSMTPWLARELAKVGFPVVCMDARAAADAVRSRRVKSDKADAHALAEMLRTGWYRTVYVKSEDSHRLKAMLGARDQLVRAKRALGNQVRGVLRPFGIRLPSRQGTKKFAEAAHQAVRRDNMLHASVTALLEALAAIEGQIARLDEQLKELARRSPVCWRLMSVPGVGPIVALAFMAAIEDINRFRRMRSVGAYLGLTTRRYQSGETDVVLGISRQGDAMARHYLYEAANVLLTTVRRPSALKSWGLKLMKRRGPKRARVAVARRLAILLGRIWKDKTHFDAVPA

SEQ ID NO: 492084 - protein, 262 aa, unidentified
MHVVTLGIDVAKQLFQLHGVDDRGQAVLSRRVRRSQLREVVRSLPFCVIGMEAYASAPHWGRVFEQCGHTVKLMSPKYVKPSVKTNKNDGRDAEAICEAVSRPTMRFVAMKTVDQADLQAVHRSRSLLIKTRTALINQIRGLLGEYGLVIARSREQVRPALVGLLNDEQTGLCPFARDTFSELYDQLVELEQRIVRVNQRLERVFRAHPVCRKLAAVPGIGPLTATALLAAVSRPDVFQNGRHLAAWLGLVPRQCSSGGHAR

SEQ ID NO: 492085 - protein, 317 aa, unidentified
MIDDSMIVAGIDIGKTWLDIACHPSGLALRVTNTPADHARLIDWLHAQGAGRIGLEASGGYERGVAAALRDAGFEVAVLQPRQVRAFALFRLKLAKSDRLDAALIARCTAELDEVRAAPDPQLEPLAEHLRLIEQLEADLARTRTRAEAYRTPRLQRALAREADRLARRVKAELLLLGKAVGAIADLARRMALIESVQGIGRRTALTLVILMPELGRLNRAEVASLAGLAPFDRDSGHYRGQRRIAGGRHRVRRALYAAALPASFRWNPALVDSYKRLRANGKNHKQALTACARKLLTFANAVLARGSQWTHADNGC

SEQ ID NO: 492086 - protein, 421 aa, unidentified
MSQVVIGMDPHKRTATIEVMAGDEAVAGQGRYATDAAGYAAMLAEARHWPQRMWAIEGCQGIGRHIANRLLADGEHVVDVPPKLSARTRLFATGQGRKTDATDAHSVALAATRMQGLRPAVDDQQLAVLRILADRRRSLGEDHTRMICQLHRLLLELIPGGAKKALSAAQAKALLARVRPRDAAGRARRMVAAELISDLERIHQRKKAASKELNELLKATATTLTTLHGIGPSGAARLLAGVADVTRFPDKAHFASWNGTAPTGASSGGQVRHRLSRAGNRQINRVLHIMAVVQLRNPTEGRACYDRKVAAGKTPMEAMRSLKRRLPASSITRWSSTPRRWERAREDTWGRLLAPARPACTPAPALRRSHFPDPPPTTLRQEGHPILLVVPGSLHQCRTATAVKRTLLDGGEDRRTLSSRK

SEQ ID NO: 492087 - protein, 430 aa, unidentified
MSDSFRFFVGIDLGSASHQVCVLDLSGQTLGKRAVAHCGADVAALFDWLATLTQAADPACIAVAAEMPHGAMVEAFLERGYAVFSINPKQLDRFRDRFSVAGAKDDPRDALVQAHALRTDRYAFRRLLLGDPRLLRLRELARAEESLSQDLRRAANQLWQLLQRYFPAVLALVPAADEAWLWDLLEFAPLPQKAARLRPATLQRLLHKHRIRRVSAQQLAELLAQPPLPLSPGAAAAIAEQVLLLLPRLRLLHQQHVQLGQRIERLLEELSGDETFREHRDVQILRSVPGVGRVFTATVLGEAVGPLAQRDYHVFRALAGVAPVTKQSGKTKLVSLRRACHPRLRHVVYHSAASYSQHDPRAHQHYARLRARGYSHARAVRGVADRFLALIFGSGPELADRWRSWRPVELPTELTSLGGSHEGTPPQCPY

SEQ ID NO: 492088 - protein, 375 aa, unidentified
MKRRSSDDKVFAPTKTEPSKERPMNTLKYIGMDVHMATTVIAVVNSIGKVVSETILETKATTILDFLKSQRGTVHVTFEEGTQAAWLHDLIRPHVAEVVVCNPREIPAQDNKADKSDAKRLAELLRTHGLKAVYHGEHGTQALKELTRSYGAILSDSTRVKNRLKGIFRGRGISCTGTNVYSKKGRDQWLKKLNDSAVRSRISKLFKELDCLTELRNEAEKELLAEARKHPATKILRSIPGIGPLRAAMILGFTITPHRFRTKNQFWKYCGLAVMSEITGEYALIDGRVVRSRKKPLVRGLNINYNHALKEAFKGAATTAAMGVWRSHFDTMVADGTRPSLVLLTLARKIASVVLALWKKGELYDSNKLRFMHAV

SEQ ID NO: 492089 - protein, 482 aa, unidentified
MKRKTIYHNQSQEILHLFETAGNRSKVMCIPIDYAKKDHTVMFCNGNGRIIRKPFSVKNSLEGMNFLTDQIKKSSRHHGILTEHIFLGGEDVGAYAENFVDALRSESWLVAGVNAYDAKVQRDNMQASTDCLDLMGIAKLLLTCRGNCAPAQSGNYRNLRLLVRHRRRIVTNTTEVKNRVHTVVDRIFPGFLNESKSGVFPFSNASLWLMKDRFSPQQIRRRKRSTLIISLKKQGTKKPDIVTDKLQRYAAEVITPNKDFVHTLQNVLSQHVIHLGYLLENAKRLESEIARSLALTQGAFLTSIRGIGIVLAAGVCAEIGNPNKQKPLSNLVSYSGIIPKVKQTGGKEGQTRIGKVAKRCNRILKDYVVQSASHMGKHGPDELMLDHKRRSSRGQHADFGIGRRFLRMAMCLMKTSQVYLPGKLRSSGCPVEERAAYYLKTWDNLREKWRKADALKIAFSTDKPLGLWRNIVQGVYGIKLNL

SEQ ID NO: 492090 - protein, 365 aa, unidentified
MTNYKIGCDAHKRYSQFAILDHEGHFLQQVRVNHMPGAIRDFLEDFPQGTPVALESVGNWYWIVDEIEAAGCLPLMAHAAKAKVMMGNVNKTDKLDAKGLATLLHLGSLPTVWLPPHEIRDERELHRTRMALSKQRTALKNRVHSTLAKYALSLDTDSDIFAPKWRPELTKACRALPPETQRCMHEHLIALDHVQGQIKELEERIKQRVEIIPNIQLLKTLPGVANILAIVIEREMGIVDRFSSSAHFASYAGTVPTVKSSGGKTRYGRLRKQSNQYLKWAFIEAANVVVRQRRHPNWRTKHVTILYERIRQRKGHSVAVGAVARHLSEAAFWMLRKQEPYKDPARKVVTRGKGQREPNMVRQKP

SEQ ID NO: 492091 - protein, 321 aa, unidentified
MEGTPVSARLEVFVGIDVSKHSWDVCILPAMIRQSFPATDEGLASLLELLRQHPATLIVLEATGGYERRLAAGLQDAGSEVAIVNPRQVRDFAKALGRLAKTDRLDAEVLALFAQKIQPRPCEKCPEKRAELDAFVARRRQLLQLRTMELNRLHMAEHKLTRKSIQKVIDVLRKQIDQLDAAIAKLIESDDDWRQKAELLESVPGIGAVTSTTLVAELPELGKLNRQAIAALAGLAPFNCDSGQYAGQRKVRGGRASVRTALYMAALTGRRFNPILKRFADRLQAAGKSAKLILTACMRKLLTILNTMVKNNTHWNPKLAS

SEQ ID NO: 492092 - protein, 343 aa, unidentified
MYVGLDVHKKYCYYAMVDGRGTVVKKDRFRTTVEELEEFASALPEGDQVAIEASASGCFVYEQLDEQGIAVHLAHPTMVRPFAKKHVKTDKVDAIVLAQLLRMDYLPESYVPDEAMRDLRTVVRHRAGLVRIRTSLKNRVHALLTMEGVQPPAVSDLFGKKGREFLETVKIRESRRLVLDNYLKVLDELNERITGVEQFLEEKAESTEEVAWLRTIPGIGLHNAVLILSELGEVSRFSRPQGLVCYAGLAPKVAQSGDQVRYGHINRQSNGFLRWAFVQSAWSAVLSSTPNRFQRIYQKVKARRGAKIAIVATARHLAESVYWVLTKQEAYKEPKAQRASSSP

SEQ ID NO: 492093 - protein, 403 aa, unidentified
MNSVGIDISKGRSTIAVMRPFGEVVISPFEVRHTGSELSKLAKQLKSLDGETRVVMEATGNYHASVAKLLHNAGLYVSVINAKLVHGYGNNELRRVKTDRKDAVKLANYGLDRWLTLPRYIPEEDTRLLLKNCYRQYRQYSKVQTVLKNNLISLLDTVFPNANRLFSSPIRGDGSEKWVDFVAEFWHCRCVSEKSERAFTSKYLRWCRKHGYNFREAKAHTIYAEASGHIGVMPKSETTKLLVEQAVAQLRATSTALAALKQEMQSLASVLPEYPVVMDMFDVGPTLGPQLIAEIGDVRRFYSKKALVAYAGLDAPPNDSGDVTGRHKSMSKIGASSLRRTLFLVMSVYLQTAPLDEPVCQFMDRKRAEGKPYRVYMMAFANKFLRIYYATVKAYLESLEHTV

SEQ ID NO: 492094 - protein, 321 aa, unidentified
MAELQVAPEGPELRRLASRYLAYGPVRAVIESMNGARFVHDTLELAGWDVEIADAVKVKGLAPLACKTDRIDAFVLAELSRRDLVPAIWLPDPGVRAHRERARFRLHLVHHRVELKNRIHASLIAFGHACATSDLFGVTGRRRLGELAFPEPWASDVAACLALIDHLNDQIAGLEGDLRREGATHPYVPLLLTVPGISWILAYTIAAEIGDITRFETAKKLCGYSGLCPRVYQSGNQDRRGKLAKNGPKHLRWALIEAAVHAARHPAYIDHYQRTKVRLGRQRGAKIARVEIARKLAEAIWHMLTKEEPFAPVGPKSRLAA

SEQ ID NO: 492095 - protein, 400 aa, unidentified
MRVVFGIDVSKVSSEVAILVNGEKVHGYTMSNDAIGFSRLLGDLKTVHKPEIIFEATGVYSRRLQTFLEDNGYAYTRLNPLEAKKQLDSLRVRKTDQIDAEKLAQSQFVLNRKPTYVQEEVYQDLRDLSRFYQNLTEDIVRTKNRLHKVLQVTFPELETILSTPTGEQYWNLVIAFPCKDFVLELSKDKLSESIRQSTSKRISDKRVAYLAEKLIALANQSYCAVKKTSPMLEEVRYYTKELLRLSEQRQTVLDEMVELAQPLPEYDILLSIPGIAETTATSIIGELGDIRRFQSANQINAFIGIDLRHYESGNFLAKEHITKRGNPYARKILFKCIHNIASASHTNPCHIADFYEKRKRQSQTTSTKPHTIASIHRLIRTMYYLIMHNKLYDYASTQNR

SEQ ID NO: 492096 - protein, 346 aa, unidentified
MRYKGMKNKSFIGIDISKNVIDASIFCEGTPIKDFPHAVFNNSRKGFGEMCTWLKKNHVVLSNCLFGMEFTGSYSMELEKFLYARNYQFCMLSTHVVKHYPMGSKDKSDKIDSAKIADFLYRYNGTECVKPYKMPDKTMQRLKTLMNERKFLVEQRTCFMNRRQLCITKEDAQLYDGYIKKFSRDIENIELEEQKLLATDDSLLSTYKNLLTIPGIGFVNAINAIVITRNFTAFETARQYASYVGVAPHSHTSGTSVRWRPRPSARCDGQAKADLSMAATVAVQYDAELQSFYNRKLGGKQDSDTKRKALNAVKFKLVLRMFAIGKQNRKWEPLDSKSSNEKLAIS

SEQ ID NO: 492097 - protein, 430 aa, unidentified
MKSNTQNAKIEAITETTLVLGIDVGSETHYARAFDFRGIEYSKKPFKFSNNEAGFMTFKAWILNIKEKHGKDKVVPGMEPTGHYWFNLGKFLQDNEMKPVLVNPHHVKKSKELDDNNPTKNDRKDPKVIAGLVREGRYMIPYLPDGVYADLRTASNMRFQLQAELTRIQNRISRWFNIYFPEYKTVYGQPDAKSGMMILKIAPLPEDILTLGIDGVNQIWRNAKLRAVGKARAKTLIEAAEHSVGSKEGALSARMEIRMLLEDYESRNARLQEVMALIEELVKQIPMAEKLLEIKGVGIKTVSGFLAEVGDISRFDNPKELQKLAGLALVENSSGKHKGETTISRRGRKRLRYLLFEVAMSLVAKNPEFRELHVYYTTRKQNPLKKMQSLMAVATKLIRVFYAMLTKGVDYDPKKMISDIKRPAVYLQAA

SEQ ID NO: 492098 - protein, 367 aa, unidentified
MKKVSTVAAKASRNISQPQLTIGLDLGDRDSWYCVLDEAGQIQREQRVRTTAKALGEVFGAMPRSRIVLETGTHSPWISRLLTELGHEVIVANARKVRLIGESRKKDDRLDAQTLARLARIDPALLSPVKHRSAQAQADLTMIRARTGLVRARTGLVNTARGVAKSYGERLRGCNVRNMNPEKAAGLSPELQRALEPLLSAIEELSERITEYNDRIEVLAQESYPQVALLKQIKGVGTLIALTFLLTLEDPHRFRKSRDVGCYLGLQPGRRNSGQSEPQMHISKEGDPYLRTLLVQGAQHILGPFGIDCDLRRWGLKLAERGGRNAKKRAIIATARKLAVLLHHLWVSAEVYEPLHNSSRTTVAAAA

SEQ ID NO: 492099 - protein, 446 aa, unidentified
MLKDKQVNVAPEACVAVLEMPTETRGSRREQAKRRRRVERISGKTLVIGLDVARERQALTFGRGREIIGRRRIDVAPQDLAAVIAPVVRQLCEREGLDRVVVGLEPAGCYWELAAEGFERAGLGYAVVHTLAVRREREATHYNLEKYDPRDADLIFGLVSDGKFTETRLPEMAERARFNALAREYLLVRKRAAGERTRLTNFWTRVLPEFFGVLKKLEGVTALAISRAMLPFSELAALTPAEWLARVRAHAEGRVLPSRTAAVQRHVRAAHQDPHRRSGEGMPVRIAMAAERHRLLEAQKQRLREQLLALYDQMPEAVWLNSIPGSDPLHSALTLALVGDFSLYDSPRALVKLAGSEVNWHESGDWRGKSRISHRGRSLLRATAYQQARRLVANGNHVYATRFHQLLHRTTRPALTLKQAYTALGNSYLRVAHVLVTQKQVWQEPK

SEQ ID NO: 492100 - protein, 402 aa, unidentified
MIFINCLGIDVSKSESVVAHYKDEVLVKEWVIQNNQNGYRHLENYIKHLDSLFILFESTGIYSRGMKRFCAVHKIDYLEMNPLEAKFKMSSLRSWKTDKSDAHKLALLAFRMKDSKVQRQSEEIYFELRERARFHLEMETNQNRLKVELVETLHQTFPGLEKLFTNRYSKIALNIAKTFPHPDYVSMLSDDELVEKVLHSTDKGISVNKAHKYAQKLIEIKNNSFPNVDKSSFLIKKVQYLCDKLLIAIEEKKVFDQEMINLAKNTTEFENIISIPGIGELTAALLIGELGDIRNFKTNKQLNAFVDIDIKRYQSGTSKSRDTINKRGNKKARRLLYLIIMNIIRGRNHYQSHIVDYYYKLREQPHGKPHKTAVIASINRLLKTIHYLIVNDKLYDYQKAPH

SEQ ID NO: 492101 - protein, 339 aa, unidentified
MSSVFKNFVGIDISKTWFDAVLVKADNSTIISHEQFSQKPEGFLKMQAWLLKQDVLLDEQTLFCMEYTGIYNTGLVQYLVKAKASLWVEMPLRIKKAGGFERGTDDKAAAVKIAWYALRYQDQVRLWQPIDSNIESIKNLIAQRDRIVTAINLLTVPVNELKAVGCTADAKTLAQLQKVPVAAMEKSKLAIETLIAITIQKDEQLNTKVKLVASIKGIGQVTAVALMVYTKGFTAFENGKQLACYCGVVPFTKRSGTSVRYKSTVSPFANKKLKKLLHLCAMSAIQNDVEMKAYFDRKVAAGKNKMSVINAVRNKLIHRVFAVLRDGREYEDNYVRKCA

SEQ ID NO: 492102 - protein, 375 aa, unidentified
MGTPSAQTLDDMGVRKMFQELKEVPMTMVGGLDVHRQQITVDYVDDDGLVHWGQIRPATRKTLRNWLAEHCPDRDGEFALEGCTGWRYVAEELAAAGVGVHLGDPAETAAARGPKKRAKTDRADARLLRTLLVEGRFPESWIPPAHVLEIRTLGRLYCTLMDERRAWQQRIHAQLFHQGCPPVKALLSQAGREALAQAELSAAGRQYVDTALRRIDELTAEIEPLRTQLVNFARRQIGCRALQRLYGIGWLCAAIMWAEIGDARRFHSSDRLVRFAGVDVTVYSSDSKRSPGRLSRQGSPELRWAAFEAAKCAARRGSPDYAYYHKLAAKRDGHNGKNPTLAVERKILRRCYHTLRELGDAALALPDTQPQEAAA

SEQ ID NO: 492103 - protein, 419 aa, unidentified
MNTLVSNTSLSGTLIALDIAKKHHDAKIRRPDGRTSYLRIENTLEGFNRLLALTASPHDDIIAAFEPTADYHRNIAWWLHKQGVKCHLVSSVRCARAREMLFKTWDKNDRKDASVIMYLLEQGLSSPFYDPLANGIIDIQEISNTYHQVTLARTRCLNSLVNHYLTLYFPEAEQFLHMSRAEWFCQFLLHFPTPSCITSLNRDVFVKQSWDVVGRKQYKKQFLEHLYDVAADSIALPLSEDFLAVTTFRLQLHRYVGLSAQRLQLEKQAENYLQERSDYRHLRTISGIGAIIALMIIAESGDLTHFAHYRQYLNFCGFNLSASQSGQKHSGYRLSKRGNARLRYAFWLAATVTVRTRENSFRYKYERYIRENGDKPDQKRKAMTAVATKVARVAHAIVKQDIDYKGYYEISHGTCFNGP

SEQ ID NO: 492104 - protein, 355 aa, unidentified
MNSEKYIGLDVHQATIVIAVTDSTGKLIMESILETEAATILQFFAGLRGTLYVTFEEGTWSAWLYDLLHPHVDKLVVCNPRKNALLKDGNKSDRIDARKLAELLRGNQLKPVYHGETGVRMLRELSRSYLSIVKDLSRVMNRLKAVYRSWAIPCAGRDVYYTRNRAQWLAKIPEAGVRRRAERLYEQLDMLRHLRQQARRELLVESRKHAITAKLRQIPYLGPIRSALAVALIQTPHRFRTKRQLWAYSGLALETHISAEYRLVEGQVRRSKKVLSIRGLNKDHNHDLKGLFKGAATMASVRPGPFQDFYQTALAKGIKPTMARLTLARKIAAITLTLWKKGESFDAEKLKSQAA

SEQ ID NO: 492105 - protein, 350 aa, unidentified
MTSLSEIVDVVIGVDTHVHTHSVAALDARTGGVLGELTVEATPDGYKQLVAFADEHSALRAWAIEGTGGHGSGLARLLGDRSEVVVELDRPERTKRRNGAKSDPLDAIRAAREALSRAKLGTPRSAGDRQALSVLLAARRSAVESAGDAQRQVFSLVIAAPEVLRTKFRGKKIPAMLSTATRLRVSSAWDVETATTATVLRDLARRSLDLSAEAARHEKAIVAIVRSWRPELLDQPGVGPIVAATLLCAWSHPGRVRSEAAFAMLAGVAPIPANSGQTTNRFRLNRYGDRQLNRALHTVVLSRLRYDKTTQVYAERRIAEGKTPREIKRCLKRYLARDFYRLLENPPSAA

SEQ ID NO: 492106 - protein, 400 aa, unidentified
MRSIGMDVHRSFAQVAVLDRGKVTEEFRVELDYDAVVAFGQKLRKDDEVILEATGNTSAIVRLLTPFVAKVVIANPLQVKAIAHARVKTDKVDARILAQLHAAGFLPEVWAADDDTLNLRRLVSERAALVRSVRRVKSRVQAVLHANLVPKYSGHLFGKGGRDWLSTAPLPRAERDLLARHLDELDWLKGKLEKLDGTMARIALDDTRTRKLMTIAGINSVVATAVIAAIGDISRFPTPDRLASYFGLTPRVRQSGDRGAIHGRISKQGNAIARTMLIEAAWSAASVPGPLRAFFLRIKDRKGLNVAAVATARKIANLIWELLTKEAPYRWARPAFVAMKMRKLELRAGAAKAHGPAGPARDYWIKEIRHREMELVAQAEAAYAAMVEAWRDRPPKPQKG

SEQ ID NO: 492107 - protein, 340 aa, unidentified
MDTIGLDLHKRESQLCVLTEAGEIVERRIVTSRERFTAVLGTQPPARILVEASTESEWVARHLESLGHEVIVADPNFAPMYATRRRGVKTDRRDARTLAEACRLGAYRPVHRASAPQRHVRAQLAVRDALIRTRTRYVSVVKALVRRDGLRLPPGNPVHTEAKLAALPLPAPLAGELAPLRALFEPLNREITAADERLAVVAAADPVVARLQTAPGIGPVTAVAFVATLDEVTRFASAHHVAAYLGLTPREYSSGEQQHRGRISKTGNARMRYLLVEAAWRVLRTKDPAAAALRVWAEGIAQRRGRSIAAVALARRLAGILYAMWRDGKDYCAPPSAALA

SEQ ID NO: 492108 - protein, 339 aa, unidentified
MIGLDLGKNAFQVHGIDARGNVVVRKQLRRSQIEKFFATLPPVIVGMEACGGAHHWGRVLGTLGHEVRMMPPAYVKAYRKRNKTDGRDAEAICDAMDRPTMRFVPVKSPENQAIAVLHSTRRLLVRQRTMSANGLRSGLAEFGIVAAQGLKGLQALMQLLADPATAIPDNARLGLQLVAEQWEVQNAQICKLDAAIVGAARSDAQARRLMQIPGVGPIGATAIAAMVPDARVFKSARDFAAWLGFTPRQFGTGGKQRSGSISKQGNRTLRTLLILGATAYLRHERTRRRDPWLQALLLRRPVKVVAVALAAKIARIIWAMLVSGENYRPRRHAVAAQAA

SEQ ID NO: 492109 - protein, 410 aa, unidentified
MEVMHQHCAGLDVHKKTVVACVRLASEGKVVTEVKTFATTTQGLLTLSDWLSENGCTHVAMEATGVYWKPVWHVLSDGEVELVLANAAHVKNVPGRKTDVSDAAWLAELLAHGLIRASFVPDGQTQELRALLRTRKQLVRERTRHVQRIHKTLEDANIKLDAELSDVLGKSGRAILNALVAGETDPVRLAALAYPNVKSPQAQLREALRGRLTSHHRFLLQLHLGQIDSLDAAIGTIDREVEDSLAPFRAAVDLVRTIPGVSTLGAEVIVSEIGLDMSRFPTVGHLLSWAGLCPRNDESAGKRRSSRLRKGAQWLKTTLVQCSWAAKNKKGSYLQAQYLRLKSRRGPQKAICAVAASILTAAYHMLKDGTVYQDLGPDHFNRRSKITQTQRLVRRLEHMGFAVDIKPIAA

SEQ ID NO: 492110 - protein, 349 aa, unidentified
MDYRVYCGVDFHARQQTICSLTTEDGVMSTHELKHQNKAELRAFYAQFSGPVLVGLEASGYSPWFEQLLEELGCEVWLGDATEIRRRARRRQKNDRRDAELILDLLIHNEFPRIHRPTVTSREILRMLRYRHKLVKIRTIIKNSLQALSIQSGLSLRAKLFTRTGLTQLRSTSMSPMMQYQREQWLQALEPLNQRIDEAVDWLEQQAVGDERIERLRTHPGIGLLTSLGLVHTLAPISRFSNQRKVAAYVGFDPKERSSGEKKRYLGISKAGSRVLRFLLIEAAQTACKGDPELKRFYLRLLHRQGKPKAKVAVARKLLIRSYILLRDGIDYAEFNRRAVAARLAREVA

SEQ ID NO: 492111 - protein, 317 aa, unidentified
MSSFTTWVGVDISKRFLDVAVAGDKPDRHDNSKAGCAALASLLQQKAPAGVVVEATGGWEHPLVSALIAAQVPVSVVNPARVRAFAEGTGRLAKTDKIDAQVLAQFGAYMKPPRAELPGAGRTQLKELLAYRSQITQEITARTAQLRGYASADLLARASDALARLKQERTALERQIKTLIESDPAMAHDFVLLTSVPAIGTIVAATLIAELPELGKLTRRQIAALAGLAPFPRESGERRGYRSIRGGRADVRCALFCAARVALRHNPRIAQFYDRLRGRGKGGKVAIVAAMHKLLTIANAMLKSNTKWAADPLPNAT

SEQ ID NO: 492112 - protein, 331 aa, unidentified
MKKVGFAGIDVSAKHLVAMIERGGKRTAAGVFDNDASGHKKLIRHLTKGGWEVRVVLESTGVYSLDLSLALHGADRIEVMVANPRAVSKFAGAMLGRSKTDPPDAEVLLEFALRMPFVAWQAPAPEILALRALSRRIAQLTKMQTQEKNRLHAASQPEGTHPFALESLETMIGLLGEQIEATRQQALALIADHERLRRPFGHLVSIKGIADASAIAILAELAVLPADMTVRQWVAHAGLDPTFYESGTSVRRRARISKKGNVYLRAGLYMPALVASNHEASVKAFYDHLLAHDKTPLQALTAVMRKLLYAIYGMWKHDCDFEGEKFYAIRA

SEQ ID NO: 492113 - protein, 434 aa, unidentified
MPQFIGLDVHKRVVEACAVDERGEVLFRERFAATRNTIEEFARRRIGRSDKVALEATTNTWPIAKLLEPFAAEVVISNPLRTKAIAEAKVKTDKVDAEVLAQLLRCDFLPKVWMPDAGTRDLRRVTHRRASLVSDRTALKNRIHAVLHERLIPIPAGVKLFGTKGRAWLRAIPLDPIGRASIDADLRLLEAIEAESAPIDQLLVNAGAQDPRVKLLLTLPGVDVSVAQTLLAALGDVRRFKSGDHAASYLGLTPSTKQSGDPEKRYHGPITKAGSGHARWMLVQAAQHLDKHPGPLGAFFRRILRKKNRNVAVVATARKLVVIAWHMLTKNEPYRYAQPRPTEAKLAKLRLRSGGERRVGGPPKGIKAPAKLPGGSRTVKALDDVYAFENLPPRGELPPGERAMLKRLKVTRFVRALEREHVVPRAKGVTDEEE

SEQ ID NO: 492114 - protein, 321 aa, unidentified
MSTRNSSEVFVGLDVSKAYVDVCALNVEGKLLWSERVRRTPAALKQLAERLDPQACVVLEATGGLEALPAAALEAAGIPTSVENPAKIRHFALSHGLLEKSDRLDARVLAEFARERRPRPRRRPDPRVEALSKLVARRSQLVRLRAAERTRRRSETEPFCRQSLEQTILALSQQIGDCEQEMRQRVGACPELSARARLLLSAPGVGEQTAYALLAWLPELGCFNRGEIAKLVGVAPLVKQSGRWRGRVMTLGGRARVRCSLYLAALSAVRRHGCYREFYLRLLDRGKAKKLALIAVARKLLLTLNQKLLTSSLWENSCDTA

SEQ ID NO: 492115 - protein, 369 aa, unidentified
MANDILFVGLDVHKKTISVATVLERPGESCRYYGSIPNTPDALRRLCQKLQADDASLYFCYEAGPCGYGVQRLLTRLGNRCDVVAPTLIPRKAGDRVKNDRRDAMSLAQNLRAGHLTEVWVPDEAHEAMRELVRLQALAKRDIRRARQQLLSFLLRHGVHYPGRHWSKAHRRWLSDLSFEYPAQHLVLEELVQRIERAEVLGERIEQSMVELLPRWALAPVVEAVQALRGISILNAITLIAEIGSFSRFENPRQLMAYLGLVPSEHSSGSTTRRGPITKTGNSLARTCLVEAAWTYRFPARVSRIILKRTEHLPEPIRAVGWKAQVRLCRRYRHLMATGKAAPKVVTAIARELVGFIWAIARMVEPVRT

SEQ ID NO: 492116 - protein, 350 aa, unidentified
MDATTVAVDLAKDVFEIAVANRAGRIIERKRLTRRQFERFVDTLPAGVEVIMEGCGTAHYWGRRCRARDVSVRLLPVQYVRPYVRRNKTDRTDTEALLEANRCGGIQPVAVKTVEQQAIQALHRVRTQWQATRTARINVMRGVLREFGLPIGVGARTALARIPVLLEDAAVELPGLVRHAVWLLLEEVRALDARIAAIDHELATIAREHPVALRLQQVPGVGVLTSTALVASVGHIHAFRRGRQFASWLGLTPRESSTGGRRYLGGISKRGDVYLRCLLTHGARAVLLTAQRTVGRTPQRATAFQRWAASVAVRRGHNKAAIAVANKLARMIWAVWHHDVDFRVESRVAA

SEQ ID NO: 492117 - protein, 388 aa, unidentified
MGQVVIGVDPHKRSNTALVLDDRERVLGKQRFANDRNGYRALRQFAAAHRDRVWAVEGAAGVGLSLAQRLVADGERVLNVPAKLSARVRALGGGSARKTDDTDAYAVAVAGLRGTRLAEVRQDDAITVLRLLCDRRTELVEQRIASVNRLHRLLVELVPGGAAARLTSTKARALLSTVRPRDAVGKARKQLALEHLADLNALDARIKEMKKRIAHVLDEHGTSLTELRGVGPVVAGTILGEVGDVRRFPSRHHFASYTGTAPIDASSGDAVHHRLNRGGNRRLNHALHIIAVSQIRHPGPGQDYYRRKIAAGKSPLEALRCLKRRLSDVVYRQQIADLRTTAETGPGGHSGASAQSCAAGSTPKASSSDKSLPGPAGEQANPDLPPAA

SEQ ID NO: 492118 - protein, 492 aa, unidentified
MNQPTSIYANQHPKIRKILEAAGSPSRALCVAIDYAKAQHVVLFCNGLGDVLKKPFAIDNSPQGLEKLLEEVRSTCSHRGIKTEHVFFGGEDNPPYVQNFIQALVDAGYWVARVNAWEAKHQRDNHQASTDNLDLPGIAKTLLHKSSYSAQEESKIILAIKELSRTRAYFVGQLSEQKFQIHHYVNRLCPGFLNQKKSGIVPFSRTSLALLGQRFSAGRIRSWPRASLVKFLQRQGQHEPEAAADHLKTLAGQVLDPSPDMVSCWQNSLGQYLLQYQSLAQSVSSLEKELARSLAQTSGALLTSISGIGIVLASGILAELGDPTAWRAVRCLCSYSGIVPRTSQTGGPDKPAQTGKVQRRCNRRAKNWIVQAGSLTGRCGPAELKAQHQELERNGQHADFIMSKRLLRIFKDLMRRGALYRPKPLLAPETPSADLVAYYLALWEQILTKWQGRIEWEVLVDPRYPVGPWRQMAQQLYKISLPVPKIRTSKAA

SEQ ID NO: 492119 - protein, 346 aa, unidentified
MLIIGCDYHPSWQQICWLETTTGETGEAKLEHGSGEATRFYRQLPGPALIGMESTGNCQWFVELATTAGHDVWIGDAAKIRAGETRQQKHDRRDAALILQLLLEGRFPRIWTPSGEEKDLRQLLMHRYKLVRLRATTKNELQHLAMNQGVTKKRRLWSKAGEKVLRELPLKPWASRRREDLFKVRAMLNEQIASLDAAVVEAAEKNEKAKLLMTQPGVGPITSMAFVLTMGDVNRFPRGKQVASYLGLIPREYSSGGKQRLGSISKQGNRFMRMLLVEAAQSALRYDPGFRNEYLHRCHTKAKGVAKVAAARKLAIRLYWMLRTNVGYPEIVRVESSSRVPLVSAS

SEQ ID NO: 492120 - protein, 351 aa, unidentified
MIIVGVDYHPSVQQVAFLDTETGETGERRLNHSDGEAERFYRDLQRRQVKVRVGIEATGHARWFERLLAELKFELWIGDPARIKAARVRKQKTDRQDAQLLLRLLIEGRFPQIWVPSPENRDLRQLIWHRHRLVQMRTRAMNQIQAAAMNEGVRRKKTLWSKTGRRQLEALPLAPWATRRRQDLLELVDRLNTTIDELTAAAEQEARKRPEVLRLMTHPGVGPITALAFVLVLGSPDRFGCGHQIGSYLGLIPCEDSSADRQRLGHITKQGSSLLRFLLVEAAQAAVRWDPDWRRRFVHLAMRRDRRIAKVAMARKLAVSLYWMWRKECDYPQTLQFGSHAGEPGFVHGVK

SEQ ID NO: 492121 - protein, 347 aa, unidentified
MRFYTTPHRYYCGIDLHARRMYICVLDAEGQIRVHRNGPATPEHFLTTIAAYREDLVVAVECIFTWYWLADLCAQEGIAFVLGHALYMKAIHGGKAKNDKIDAFKIAVLLRGGTISQAYVYPPEMRATRDLLRRRLYLVRKRGHLLVHIQNSHHQYNLPEPTRKIIHKSNRVGLAEHFDDPAARRSIAIDLELVAHYDKIINDLELYLVRTAKQHDANSFHLLRSVPGIGKILALTILYEIHDIGRFPTVQDFASYARLIKCAKESSGKRLGTSGGKIGNVHLKWAFSEAAVLFLAGNERGKQLLARLTRKHGKGKALSILAHKLGRVAYHMLQRGTAFDMEKFLAA

SEQ ID NO: 492122 - protein, 367 aa, unidentified
MKKNTTLKQSLSSTDVSTCTTVAVDLAKQVFQVAGEDALGQVLYEERLKSREAFHAFLRKLPPNIVVLMETGPGAQAWARQLQAQGNLARILPAQLVAKHRTGAKNDRNDVLAILRANRDQKIIAVPIKSAAALAMQALHRARQGYVRRRTATSNQMRGLLMEHGVALAQGDVAISQTLPRVLEDATQPLPDMLRELIDELLGEWHQLGERINVLTGRLEAAAKEDETARRLMTVRGVGPIIATAILAKQTEPERFADARRFAAYFGLVPDQNSSGSKVRLGRMCKRGDGYVRSLMVQGAHAVLRQLRPDSEQPDDRRLQRWLSRLGRKEAAVRLANRNLRIIWVLLQNDQTYRRHPADGRPAATSC

SEQ ID NO: 492123 - protein, 405 aa, unidentified
MFDSENVGVFLGLDVGKTTHHGHGVTPAGKKVFDKQLPNSEPKLRAVFDKLTAKFGTVLVIVDQPASIGALPLTVARDAGCQVAYLPGLAMRRIADLYPGEAKTDAKDAAVIADAARTMPHTLRSLELTDEITAELTVLVGFDQDLAAEATRTSNRIRGLLTQFHPSLERVLGPRLDHQAVTWLLERYGSPAALRKAGRRRLVELIRPKAPRMAARLIDDVFDALDEQTVVVPGTGTLDIVIPSLAASLAAVHTQRRAMEAQINTLLEAHPLSPVLTSMPGVGVRTAAVLLVTVGDGTSFPTAAHLASYAGLAPTTKQSGTSIHGEHAPRGGNRQLKRAMFLSAFACMNADPASRTYYDKQRARGKTHTQALLRLARQRISVLFAMLRDGTFYEPRTPKNVELAA

SEQ ID NO: 492124 - protein, 358 aa, unidentified
MNYIGCDCHISTLDCAVVNERGHETRKQKMNTSVRGLMKFVKSIPKPRKIIIEEGTLASWLLEVCTDYGEELIITDPKTNRWIGRADQKNDTIDASKLAQLARGGYIKEIHHPIGHRRRFRELVMLYHATVKSQTRIKNQLKGKFRQDGIKCNGETVYAAKFRNKWRKKLPQDKVVQMMVEGLWRQLDQVHEVREELFGHMCKQSRRYSEIKRFKQIPGIGPVHAATISAIVETPHRFANKKKLWMYAGFGLAERSSGEKVYSRSLTHNYNRLLKNALKQATEAAVIARDNQFRRQYLRLTIEKGIPSHRAKLTVARSILATLYGMWKSGEEYDATIDKRRIESDKTQVRAYHLVRTG

SEQ ID NO: 492125 - protein, 290 aa, unidentified
MDYYAGLDVSLEETSVCVVDGDGAVVHEAKVATEVEAIAETLRRFAGSLARVGLEAGPLSPWLHGGLHGVGFAVICIETRHLKASLWAMRNKTDRNDARGIAQMMCLGWVRMVHVKSPESHALRLLLTNRKTLQRKALDIENEIRGTLKAFGLKVGKVSRRSFEKKVCELIGDQPWLGEMVRPMLTARAVLLDQFTRLHRMMLDAVRRDEVCRRFMTIQGVGPVTALTYKTGVDVPQRFAKSKNVGAHFGLTPRRFSSGEIDYQGRISKCGDAMVRTALYEAANVVLTRT

SEQ ID NO: 492126 - protein, 385 aa, unidentified
MNHIGIDVSKYKHDCFIATETDHISFSFENNQEGFSKLLLALRKLTGQIKIGFEITGHYAENLKAFLISHNFPFMEIHAYLVKKFVESQTLRKTKTDKKDAQMISNYLKSVDYKTYLQQSYHIGALKELTRLRSKLISERTKYFNLLTKTLDIVFPEYKGFWPHNRFSNTSLYILEKFSTPLKISKMTDHHYETLRKLSMGKLSYPKFSKLKELAKSSIGVYQEFHKISLSIYLNNIHLLNDQVESIEVQIKHLMKSYPTKIETISGIGTISAAVILAEYGSISNFDNPAQMLSYAGLEPSVNQSGTQTFSGRLVKRGSRILRSTLVQASFYMLRVNPKFYAYYLKKKSEGKHHQVALIHLTRKLIRIIFYLETTQQDFNLNLLK

SEQ ID NO: 492127 - protein, 239 aa, unidentified
MEHFVGIDVAKDRLDVHLRPRGESFTVARDGEALASLAERLRALAPALVVMEATGGYETVVASALAAAHLPLAVVNPRQIRAFARATGKLAKTDRLDAAAIAHFAEAIRPPVRPIADAEAQALGELVARRRQVIEMIVAETNRRRRASQRRVIRAIERHLAVLQAELSDLDGDIDGAIRESPAWQADADLLISVPGVGKATLRTLIAELPELGHLNRRKIAALVGVAPINRDSGTLPNQ

SEQ ID NO: 492128 - protein, 439 aa, unidentified
MDGHDDVVELQIEVEQVSRVAAIDIAKASAMVCTRLPREDGSPRRVQRVWPAQATTNAIEQLADHLVCQSVELVVMEATGTYWKPFFYLLEARGLTVWLVNARDVKNVPGRPKTDRLDAVWLAKLAERGMLRASFVPPKPVRQLRDLTRLRKTLTEDRTRYRQRIEKILEDAQIKLSAVLSDLFGVSGRAMLDALVAGARSPCALAELARGSLRGKNSALIEALTGQFEDHHGYLIRLLLEDQDRLTAQIEALSVRIEQAIAEIDPAPPPDPEHPGRLPLLDRLDEIPGVGRTCAATIIAEIGVDMTAFPTPGHLASWAKLTPRTIQSGAKRGHGPAGKGNRWLKGPLGEAAVCTARTQTFLGARYRRIARHAPAKKAVVALSRNILEIAWVLINDPDTRFTDLGASWHERHVDQARRTRQHIRELEHLGYSVALTQAA

SEQ ID NO: 492129 - protein, 412 aa, unidentified
MEVVYPCCCGLDVHKKSITACVLWAAAKGKSRKEKKRFETFTHDLLQLADWLQECEVTHVAMESTGVYWKPVWNILAEQFEVLLVNAQHIKAVPGRKTDQKDSEWIADLLQHGLLRGSFVPPQPLRELRDLTRYRVSLVQETNRIANRIQKVLEDANIKLASVATDALGVSGRAILAAMLAGEQDAGRLAEMSKGLLRNKIPELRLALEGRMTEHHQFLLRQLFEHLRFTESKLREIEQEIDKHMRPFEDQVTRLCTIPGVDRVTAWGMLAEMGMNMNQFPSSGHLASWACLCPGNFESAGKRLSGKMRKGNVSLRRCLAQAAWAISMMKNNYLSALYRRIAARRGAKRAVMAVAHALLEIAYHMLKRKEDYRELGADHFDRIDVNRIRRSLVRRLERLGHKVTLEPLALTA

SEQ ID NO: 492130 - protein, 330 aa, unidentified
MKITHIVGIDVSKRTLDYHHYKGLEKSQTTTNDGKGYKTLLRWLKSSVSKNVSQVMIVMEHTGYYTYQLEQFLFKSQVSYCKKPALDIKRSCGMVRGKSDKADAKMISKYGWMRKEELTASTPVNDTQLELQQLMAHRDKLVADRASYQSRLKELTAQLADKLVTPIIKSSQNILDVLSVEVKQTEAAIETLIQKNEALNSNYLLAKSVRGIGFATAVHFLIATENFTRFDNHRKFACYCGVAPFENSSGTSVRGKTKTSSLANRKLKSLLTMAAICAIQHDPELKEKYQQKVKEGKAKMSALNIIRAKLIERVFAVIKRQSPYILSQAA

SEQ ID NO: 492131 - protein, 412 aa, unidentified
MKVVHEVCCGIDVHARMLVACLLLANGEKEIRTFSTMTDDLLRLRDWLVAAHCTHVAIESTGVYWKPVFNILEDALTVILINPEHTHALRGRKTDVKDAEWLADLLRHGLLKASFIPPPEIRELRELTRYRESLVRERSAVANRVQKVIESGNIKLGQVASDALGASGRAMLWALVRGETDPVKLAALAQRQLKEKVPQLRRALQGRLTVNQRFVLGELLQRWEQLEQADRRVTKEIGKYLQERPKLARARDILDSIPGIGPRAAEVIMAEIGVQIEAVFESDAHLASWAGICPGNKATGGKRLSGRTRKGNTYLRSALVQAAWGTTMKKNCYLSSQYFRLVKRLGRKKALVAVAHSLLVIIYHVLQRDQTYTELGGDYFDRNHVEQQRDYYIRRLQMLGLKVNVEELLQAA

SEQ ID NO: 492132 - protein, 413 aa, unidentified
MEVLYPRCAGLDVHKATVVAAVRLAADGKVAREVRTFATTTAGLLELAEWLAESGCTHVVMEATGVYWKPVWHILAEGGFALVLANAAQVRNVPGRKTDVNDATWLAELLAHGLVRASFVPDAPTQELRSLLRTRKQLAREKASHTLRLQKTLEDANVKRDGVVADLLGRSGRAMLEAMAAGESDPEKLAALAHPRLAATPERLREALRGRVTAHHRFLLRLHLDQVDALGAAVARVDREVEAHLAPFRAAVELLASIPGVGALAARVIVAEIGTDMGRFPTAGHLVSWAGLCPRSDESAGKRRSVRLRKGAPWLKTTLVQCAWAASRKKASYLQAQYHRLRARRGPRKAACAAAASILTAAYHMLKDGTAYADLGPDHFDRRSREVQARRLVRRLADLGYAVELAPLEPAPA

SEQ ID NO: 492133 - protein, 415 aa, unidentified
MEGLSALHRRVAGIDVHRMLHVVTVLIEQPDGSVVKHSWEFGGFKRDCRALAAWLTDLQVQLVVMESTGIYWKSVYAHLENAGITAWVVNAHFIKHVPGRKTDMLDSEWLAVLARFGLVRGSFIPPKDLRELRLVSRYRRKLGAMCSSQINRLHKMLDDAGIKLGAVVSDIHGVSARAMVRGLIEGQSEAVLLSHARGALKRKTEQLAASLDGDLSERHLFVLRHLSDSIDALQRQLADIDHYLMRAMQPYTWAHQLLQTIPGIDETAAALILVEIGEDMARFGCPERLACWAALSPGNNESAGKRKSGRTRHGNNAIRYILCECANAARMTKSTLAAKYRSLMRRKSHKKAIVAVAHKMIRLIYMLLSRREPYLDQGIDYAAISAKKNAPRWIKQLKAIGKWPTPSAPAANAAH

SEQ ID NO: 492134 - protein, 351 aa, unidentified
MQIHSVGIALGKTTFHLVALGAAGKVVVRKKFTQKQLLTYTANLQTSLIGLEACSGAHFLGRALRKQGHDVRLIAAQFVKPFLKSNKNDFVDAEAIAEAVERKNMRFVPIKTDDQLDLQAIHRVRDRLISRRTAVINQLRAFLLERGMVFAQKPAKLKAAMADILENAEADLTPPMRNLIDTLWGEWKLVEQQIEELNDELERISASDAGCTRIRQIPGIGPVVATAIVAAIGNGAAFRKGREFAAWLGIVPRQYSTGGKAKLLGISKRGNVYLRKILIHGARAAVLRIKRDRAPIGAWLDALDSRAPKNVVVVAMANKLARIAWAVLSAATTTDPSPRNSAEKTPAAWKR

SEQ ID NO: 492135 - protein, 315 aa, unidentified
MSDAPCFVGIDVAKAQLDIALRPSGERWAVANDASGVATLVDRVQTLHPTLIVREATGGLERAVTSALAAASLPVVVVNPRQARDFARATGQLAQTDALDARALAHFADVIRPTPRPLPDVQTQELRALLGRRQQLIVMRTAEQNRLAGTSERLAKAIVAHITWLNADIATLDNDLETTLRASPLWRENDDLLQSAKGIGPVCARTLLLELPELGTLTRQQIAALVGVAPLNGDSGTLRGRRTIWGGRAHVRTVLYMGTLVATRYNPQIKAFYERLLAAGKVKKVALTACMRKFLTILNAMLKHRTPWHAQEVEG

SEQ ID NO: 492136 - protein, 338 aa, unidentified
MYYTGIDLHKFTSFLTTVDSSGKIVKQQNIKNVEHNFVQYFSSIHGEHKSTVESTMTWYWLDDLFCTLKIPLVLAHAKYVKAIAYAKVKTDKVDSHTLAQLLRMDYIPEAYKISKEKRVLRDALRARLKTVQRHTSITNSMHLLLAKYNLDSPNQLSGISKYQYDQLSDTETLLREQILDLEKQLYPDLIPNEDVQRLLWIPGIGKMNAFNIVLEVDDINRFKDVKNFFSYCRLTPAARNSAGKSKQRSSKDGNKYLKMVFSDAAVHAIQYYPVIRKYNNSLMRKKNKQIAKTIIAKEIANIVFHVLKKKENFYNKFKGKDLEHTKSLRWPRVISPYA

SEQ ID NO: 492137 - protein, 314 aa, unidentified
MTDLTTSFSHFIGCDVGKREIVVHDSRDGKISTIANNPKALRAFAAGLDKNCLVICEATGGYEAALLDATLDAGIAAHRADARKVKAFIRSFGTRGKTDQIDAGALAQYGKERADRLALWQKPAQSRQSLQSLVLTRADLVKDRVAYRNRLAAPGAEASKTMLLEVIKCLDKQIAVIEAKARALVAAQPQLARDAACLRRIEGVGPIIATALLALMPELGTLNRRQAAALAGFAPHPNQSGSRDGYRKTRGGRPEVKATLFMGALSATKSKKTMGQFYQRLVAAGKLKKVALVAVMRKIIVIANARLRDAHITT

SEQ ID NO: 492138 - protein, 437 aa, unidentified
MGRKAARRLEVVHPDCAGIDIGGSRHYVAVDPERSEEPVRSFGSFTDELERMGRWLRECGVRVVAMESTGVYWIPVYEVLDRMGFEVHLVNPRATKQVSGRKSDVLDCQWLWQLMSYGLLRGAFRPAERVCELRSYVRQRARLVREKARAVQHIQKALTEMNVQLANVLSDVTGKTGLRILRAIVAGEREGRKLASYRDRRVKADEETIARSLEGTWREEHVFALAQALARYDFYQEQISECQARIIEASAKVSVNGETMEAVAERPTWEAQMGRGLRQMLGVDLTAIPTIGTETALVIASEIGPDLSRFPSAAHFCSWATLAPGTRISGGKSIPGRVPSAFNRVGQALRIAASTARHSRSFIGAAHRARLARLDKPRAIKATAHQLARLIYAMLTRGEEYVERGIEHYEAVRRDRQVRALHRRANQLGYNLVQQSA

SEQ ID NO: 492139 - protein, 320 aa, unidentified
MMAQNDRVVVGIDVAKDKVDSCIRALASRQTFPNTVQGHRKLIGWLRKHQVNKAVMEASGGYERVWTKLLREAGIEVRIVDPKRVRSFALSAGRLAKNDAIDAEMIAWFAETFSQAPSQKHDAAHEELQTLVKARLSLIDARIRLVSQSEHAAPGLVQKAHAHILKSLANEIAKLEAAICAKIKSMPDFAERAEIIESVPGFAETSSANLVAGMPELGQVSDQIAAALIGAAPYDDDSGKRRGERHIKGGRRWVRNAIYMPCVGAATQNNPVLKAYYQRLIAKGKEPKVAIIACMRKLIVILNTMIARRQKWDPSRYSLS

SEQ ID NO: 492140 - protein, 353 aa, unidentified
MTSTKYIGMDVHKESISIAVRNDAGKIVMECVIETKANSILDFIHGLRGELQVTFEEGTWATWLYDLLKPHVTKLVVCDPRKNTRQGNKNDQIDARELADRLYMNKLSSVYHGGAGVRTLKELARSYLTISKDLARVMSRVKAIYRSWGIPCAGKQVYALRHRAEWLAKITEVGVLRRAEFYYQQLDALRPLRHEVRRELLAESKKHKATKLLCQIPSIGPIRAALLIALIQTPHRFRTKRPLWKYSGFAIETHSSADYRSVKGQLQKSKKQVSVRGLNRDCNHDLKNLFKSAATIASVKPGPFQEFYAALVAKGMRPEMARLTLARKIATIVLIVWKKGVSFDAQYLKPQTA

SEQ ID NO: 492141 - protein, 345 aa, unidentified
MPIVGGLDIHRKQITFDYLDTGTGQVRRGQVSPADREHLRAWLARFAGREDVAFALEGCAGWRYVAEELAAAGITAHLAEPADTAFARGRKRHAKTDKTDARHLRMLLAEGRLPECWIPPRHILECRAVLELYNDLRRERTAWAQRIHAVLFHQGAPALGEGALRTERGVAELRAAAAAHLSPAGQLQVATAVEVIDALEARLHVVRHQLLDAARHLAGAKALAARLYGVGPVTALAITCWLGGAGRFSSSRQAVRFAGLDITVSSSDRKGPPGRLSRQGPPVLRWAVYEAGKAHARTSAPDHGYYAAVKDRKNSKRACLSEARKILRQAHHILAGLGDDALAVA

SEQ ID NO: 492142 - protein, 323 aa, unidentified
MNTAKKVYVGIDVSKATLDVALLPEGTLPGGEYFSVANDEEGLRQLTGRLLEATPTLAVLEATGGLERPLAAALFASGIACAVVNPRQARDFAKAIGKLAKTDKIDASVLARFAEAVRPEPKAPPEAEALEFSAILARRRQLIGMLVAEKNRLTANASKKVRSRLEAHIRWLEKELARVDRNLDEAIEESPTFKENEALLRSVPGVGPVLCRTLLAELPELGRLSPRELSALVGVAPLNRDSGIFRGRRGVWGGRARVREALYMAALIASRYNPAIKCFYERLTASGKPKKVALVACMRKLLTILNAMMRDRTLWRCPHALNS

SEQ ID NO: 492143 - protein, 516 aa, unidentified
MSVGKRQSTNARILQQPLQPTPTAPIVNPPPKDAQSQAITRPHQAAADLQRAARIAERLRAEAEACAKLAAQPVRHPHAAGIDIGDASHWVCVEATPDGSDTLREFPAHTPGLRQLVAWLRLCAVTTIALEATGVYGHVLYLTLLEAGFEVITAPPQFARQIKGRPKTDKRDCQWIQRLHKLGMLPSIFQPNEATHALRDYVRQRANLVRLSGQHIQRMQKALESMNLKLTKVLGDITGATGLKVIRALVAGQRDPAQLAKMRDRRCQHSAAELAQALDGRYRPEYLSELRNCLALWDSYQEVIAALDAEIAGHLRSMRRQTELPPLPPKPRVRGRKPHDPRFDVRTALYYATGVDLTTMEGIDELHALTLVSELGSDFTKWPTVKHFTCWLGLCPNWQKTGGKVKSSRVRRGKNRAALALRLAAWSLMRSHSYLGAYLRRQRSRLGAPKAITATAHKLARIVYHLMRFGETYMKQTEEAYAAQVRERLEKQLHRRARELGYTLSKVETTAPTAAE

SEQ ID NO: 492144 - protein, 347 aa, unidentified
MIKENYMYVGIDLHKETHTAVIIDCYNQKLGEITFPNRPADFPKLVAKVKKCNTAGKEVVYGLENAYGYGRALAVWLIDKGYFVKDVNTAISHRQAKHRGAMYRKSDSDDAKAIALATLNMLDKLPDACPNDAYWSLGQLAHRRDNIMKQRTRLVNQLHEQLCIAYPSYKQFFNDISRPTALYFWENYPSRKYLKGKSVEDLRAELVPVSHNKCSTKTCEKILDAVASDKVKNNNFQDARDMVTLSIVSDLQHYDSQLAEVDKMLEQMYKMLGCTLTTIPGVNVITAVKILAEIGDIKRFGNANKLAQFAGIAPLHLSSSGKGKDVATKQGNRRLQATIYFLAIQMV

SEQ ID NO: 492145 - protein, 420 aa, unidentified
MTVDLERGYKRRELCGPKQYLNLLLRSVLMIYVGIDVAKDKHDCFITNSDGKVLFPVFTIQNNRDGFDVLFSRIQSSSSDVSNIKVGLEATGHYSYNLLGYLIDKGLHTFVINPLHTNLYRKSLSLRKTKTDKVDARTIALMLMSDVNLKSYSDTSYHNEELKSLTRYRFRKVQERAQLRQSVSRLVTILFPELEKLVPSLHIASIYALLSEFPSAGTIASCHLTHLTKRLENASKGRYSREKAIEIRNAARASIGSNMPAKSLELKHTLRLIGELDSEISEIESEIKRIMDEIHSPILTIPGIGYRMGAMILAEIGDFSRFDSPDKILAYAGASPSTYQSGQMESSYSHMEKRGSRYLRFALINAAKYVCQWDETFGAYLQKKISEGKHYNVAITHAAKKLVRLIYAMEKSGKPYIKTA

SEQ ID NO: 492146 - protein, 410 aa, unidentified
MERVIERCCGLDVHKKTVVACVRVPGRTSVREQHVRTFGTTTAELLALRDWLGGYGVTHVAMESTGVYWKPIFYVLEDAFTCVLANAAQIAQVPGRKTDVKDCAWIAQLLEHGLVRGSFVPPVPIRELRDLTRYRAALIGEHTRETNRLQKVLEDAGIKLASVASDVLGVSGRAMLDALTQGTHDPDVLAELARGALRRKLPALRQALTGRFRPHHAFLVSQVLAHLDYLDEVIEALSTHLDEVMAPFAEEVSRLDTIPGVNKRTAEVLIAEIGVDMGVFPTAGHLASWAGLCPGNNESAGKHRSGKTRKGNRWLRGALIQAALAGGTRATKGAFAARYRRVMRHRGHKKAVVAVAHAMLVAAYHLLARHTTYQEPGADYYERRHAERVRQRAVQLLERQGYRVTLEPAA

SEQ ID NO: 492147 - protein, 338 aa, unidentified
MKLYAGIDLHSNNSVVAIIDEQDRVMFQKRLPNELERILLALASFKQWLAGVVVESTYNWYWLVDGLMHAGYAVHLANPAAIVQYQGLKYSADEHDARWLAHLYRLGILREGYIYPREARAVRDLMRRRMQLVQTRSAQLICMQTQFVRSTAHSPSSAELKRMLPEEIEVRLSEANVASGVRANSAVVHTLNAQIARLEREVLEQVKLAAQFEPLLSIAGVGRILALAIMLETGAIERFVKVGNFASYARCVDSQRLSNDKKKGEGNTKCGNAYLAWAFVEAAHFAVRYNARIRRFYERKAAKTNKIVAIKAVAHKLARAAYHVMRERVPFDEARAFA

SEQ ID NO: 492148 - protein, 342 aa, unidentified
MQTNIGLDIHKKFIYAVVLDSSGDLLLEKKVRNDPYELDKFLKGIDKDSKIALESCSCWEYIYDYLADKGFTNLVLANPSRVRLIATSRKKTDAHDARVLADLLRTNMLPTSYAPSTVIREQRQITRHRASLGRLKGVVKNKIHAILIRNGINQEFSDVFGQEGTRYLMSLDLSVVDRYQMDQYLELIRHYDIQIRKTEARIEEYVEYTPQVKLLMSIPGVSFYSGLSITGEIGDIRRFSSARKLTCFAGLNPSVSQSGDRCYTGHIAKQGDSHLRWMLNQCANIAIMHDSTLAKIYQRIKKRRGHNIAITAVARKMLCFIYTILTHNIKYQALQIHKAKAS

SEQ ID NO: 492149 - protein, 372 aa, unidentified
MDKYIGFDVSSKSITACVIDSRDDEQYETLPVDLPVLAEWLGRQRDRKDRVHLTFEVSGQSGWLYDGLIERVDTLTVSNPSELTWIFRTRKKTDRIDAYKQARLLKAGLIPAVHMPTADIRRWRKRIQHRRGLITSVVRTKNRIRALVKGQGYPRAPHRGSWWHQLNRAWLWEIAREGGVDWREDLEDLLEQLALYEDQLRRVTKRLDERLKHHEGAALLMSIPGVGPRTAEAVLAHTDEVERFRRGKEYCSYFGMTPKLDQSGTVCRQGHISKQGPSVVRWLLVECAWRAIRTSPSLRAFYERVLGGQKKRKKIAIVAVARKLLSVMRAMLLSGSVFEEHLVLQQEQIHRATEQRQQEAEEQSRRRKAFYQ

SEQ ID NO: 492150 - protein, 340 aa, unidentified
MTNATYFVGFDIASAQFYAAIGTRPWKLLVHGKEFANTPDGFVQVLEWLQHQECTPANSVLCMEATGVYGEALAYFLVAHSYRLAIEPPLKVKRAFKVSGPKTDPVDSEQIAEYACRYEDELVLWQPPQELIEHLQVLLATREQLVQQSVAQQNALKALRRKHLRTPFAETVYAHLLAELKAQIKAVEQEIRRLIDQHPTAQRLLILLLTIPGVGLLLAAQVLVLTQCATHPWSYPKLAAHLGICPYKHESGSSVHARPTSRHYGPSQPRKLLHLAARSVTTHNAHFRTYYERKLAEGKCKPLALNNVANKLLRIICAVLQSQRAYETDHYLAGALPVKN

SEQ ID NO: 492151 - protein, 372 aa, unidentified
MNYNTVYVGMDVHKESFTLCSCKYEDEKASHYQRTPASYKNVLRYLAFLRTIYGEDTRFVCGYEAGCLGYSLYHQLENFNVECVILAPTTMLEQRSKRRIKTDKRDAEIIARSLAQHNYSPVHIPTETDNQTKEFIRMRDDHKAELKKIKQQILSFCLRQGYQYDGSGNWTAKHVKWLRSLKPAGLYKEILDEYLLTYTILTDKLNRLDQRIEELASKEEYKESVSKLTCFLGIKTHTALSVIVEVGDFQRFVSARKFAGYLGFVPGQHSSGDDRNGLGITKAGNTHVRRLLVESAQSYTRGKIGYKSRVLRSRQAGNSPQVINYADRANERLRRRYYKMVLKDGKKYNIAKTAIARELACFIWGMMTDNIY

SEQ ID NO: 492152 - protein, 346 aa, unidentified
MEVYIGLDVSLASTAVCVLGEKGKIMTEVRVASAPEVLISFMHELPCEIVTIGLEAGPLSQWLHKGLTNAGFEAVLMESRRVKAALKAMPIKTDRRDAEGIARLLQLGWFRPVHCEAVSSQEMRALLTSRKSILDVLIKIELSPRGVLRNFGLKLGAVSKGRYEARVRELTAGNAMLEAAAEPILRARAALRCELAEIEKLVRKLASQDPVSRLLMTMPGVGPVVALTFMSAIDDPERFRRSKDVGPWVGLTPGRNQSGERDIVGAITKAGDAGLRTALYQAATVMLNRGAPNWLKAWALRLAVLRGRKRATIALARRIGVVLHRMWRDGTEFRFTREEAMAFRTA

SEQ ID NO: 492153 - protein, 313 aa, unidentified
MIITLRCVGIDVSKHHLDIFDEGIGVSERVANTPHAITELVARWRCDALVVFEATGVYDLELRAALRAADIRFARINPARARDFARASGQLAKTDPIDARMLAAFARAMRPATEQVSTPARNALARLAKRRDQLVLMRAQEKNRRSEAGDRAMVERICRLIEVLDHEIAEIEADISALITAEPEIADDAQLMRSLPGVGPVACMQLIAQMPELGHVGPKQAAALAGLAPFNVDSGAYRGKRKIGGGRKRVRNALYMAALNAVRRADRFKAFYAKLRQAGKPAKLALMAVARKLLTILNAIMRDRKAYIPAQQS

SEQ ID NO: 492154 - protein, 310 aa, unidentified
MDRIIAGIDVSKDRLDVCILPADERFAANNDEAGLDVLCQRLAASHVDLVCFEASGGVERAAVASVAAAGLTPVVVNARQVADYGRALGLRAKTDALDAWKIARFAQAISPQARPLPDAEARELGDLVARRRQLVRMRASERQRLQGVRDPLLVGSLKRVIATLSQEISALDDALDDRIRKSPIWRARESLLTSVPGVGSATARTLIAELPELGSLDRREIASLVGLAPHTRQSGRWRGKSFIGGGRTTVRTAIYVAALVASRFNPPLKAVYRRLLEAGKPKLVALVAVARRLIVILNAVVRDQKPWAPA

SEQ ID NO: 492155 - protein, 355 aa, unidentified
MDKIRYIGLDVHRDTISVAVLNETGRLIQQSVLMTRAAAILDFIDGVRGTLQVTFEEGTHSAWLYDLLSRRVEKLVVCNPRKNALLKSGNKGDAIDARKLAELLRAGLLSAVYHGETSALEVQQLVRSYLMLTGDTTRVMGRLKAVFRGQAIACTGRKLYGHKHRGEYLAALGACALARRTERLYQQLDALQQLRRQARHDLIVECRKHAAAKWLQTVPFLGPLRAAVLIGRVQTPHRFRTKRQFWTYCGLALETRDSAEYRVVDGQVERRKKPSRVRGLNWDYNHELKNVFKGAANAATIGQGVFRDFYLGLLEKGMRPEMARLTLARKIAAIALKIWKKGESFDAEHLKSQAA

SEQ ID NO: 492156 - protein, 318 aa, unidentified
MPPAASVFVGIDVAKAELVMAIRPSGERWTATNDDAGIQRLLPRLREAAPALVVLEATGGYERAAVAALAAAGLPLIVANPRQVRDFARATGQLAKTDRIDADTLALFAERVRPDPRALPNESAQALDALLTRRRQILGMVSAERNRLEHAVPAVRRGIVQHIRWLERQLHDVDDDLDRTIQASPVWRAKENLLRSVPGVGPVVSRTLIGDLPELGTLPGKQIAALVGVAPLARDSGTLRGKRLVWGGRAPVRAALYMAALVATRRNPVIRAFYQRLLTAGKPKKVALTACMRKLLTILNAMLHANTVWRHPAQTATT

SEQ ID NO: 492157 - protein, 417 aa, unidentified
MIAIGIDIGKGKHAAAVIDDAGRQLCRPAFYNNDREGAEKLVAALAKIAPPTEARIGMEATGNYWIPFHDLLVNAGYAVCVINPIVTSASISGDVRGRKSDKGDAEAIARVLLSGKAAPHARPDDVSRRLMALTRHRSFMVAQRADAKRHLQSLLDAVFPEFHALFDDMFCRFALELLRAHPTASSLARAHRPTLAKLVGKCCRGKDAAAEAERLVKAAKRSLGFGSEVSDAFGACIASAVECIGDLDRRIAGIEKLIDEAESPRIANVIAQIKGSGKLLPKVVAAEFGDVSRFEKDPKSGRTSGMYKRMLAFAGCEPRIRESGKWRGRVRMSKRGSGALRTALMQIAFTISQNDDFFKSIYEKHISAHQHHKVALSYVAAELLKVVCSLWKSNRAYTVQRPATQVINMPRSNVLEK

SEQ ID NO: 492158 - protein, 354 aa, unidentified
MPQSRTLYVGMDVHKESIAVAYVAQEHGAEVVSLGPIGTRQCDIDKLIRQLQSKSKQLVFVYEAGPCGYWLYRYLTKKGYVCWVVAPSLIPKRAGDRVKTDRRDAIQLARLMRSGDLTPVYVPAVDDEAIRALSRAREDTLRDLKAAKLRLKAFLLRHDIRYTGRAHWSPAHLRWLSEVVCPTPAQQIVFQEYVQTVTEQTERLGRLELELHEQIKTWRFAPVVEALQALRGVQFTVAVTTVAELGDLTRFANPRQLMNYLGLTPSEYSSGARRQQGSITKTGNSHARRALVEGAWAYRYPAKVSRHLHLRLEKLPTAIQAISWKAQVRLCTRYRQLMAKGKNANQVVVAIARE

SEQ ID NO: 492159 - protein, 344 aa, unidentified
MNHYAGIDVSLKSSAVCIVDGAGKIIREAAVESEPAALIGWFKRLGVELERIGLEAGPLSQWLYAAMQEAGLRVELLETRHVRDAFRAMSVKSDRNDARGIAQLMRLGWFRPVHCKSIEAQEMRAVLTARKLLQSKLHDIENCLRGVLRGFGLKARKTTERTFATRIEALAAGHSGLTLVVQALLEAHTVLLREFKKLDKQVQQLAKAHPQAKLLMTTPAVGPIVALTYVFAIDDPKRFRSSKATGAHFGLTPRRYQSGETDHSGRITKIGDASVREALYQAAHIMLTKPVKNCSQLKSWAMRIARRAGPRKAKVALARKLAVILHRMLADNMPFNPPAKAAAT

SEQ ID NO: 492160 - protein, 351 aa, unidentified
MMIIGVDYHPSFQQIALFVEETGECEDRRLSHNDGQAERFYRDLKQSNTSVRVGMEATGYSRWFERLLGELGFELWIGDPAVISKKRVKKQKTDREDARLLLQLMQEDRFPRIWIPSLENRDLRQMLWHRHRLVQMRTRIMNQLQALAMNENKCWKGKLWSEHGRRGLETLPLGFWASRRRQELLQLLDLMNPTIEELTAAAEQEARKRPEVLRLMTHPGVGPLTALAFVLIIGTPTRFACAKQISNYVGQIPSEDSSGGKQRLGHITKQGNSLLRFLLGEAAQAAVRSNPDWRRRYRHLAMRRQRNIAKVAMGRRMGVRLYWMWRNGCEYSPSLEFGSYAGKLGTGNGGQ

SEQ ID NO: 492161 - protein, 419 aa, unidentified
MEPRRSEMDVIVERPAALDVHKAQVTACVRLPGEGRERRSEVREFSTMVGGLLVLRDWLKAHGVTQVAMEATSVYWKPVWAVLEDDFECILVNARHVKNLPGRKTDVKDAEWLCQLLEAGLLRASFVPPKPIRALRQLTRYRKAQIKERQREANRLHKALEDTGIKLDCVASDILGKSGRDMLDALCAGTTDPEVLADLARGKLRAKLPALREALVGRFEPLHALLVSSILAHLDFLDEQIERLSDAIEEQLRPFEPAVELLRTVDGIETRTAQNILAEIGVDMSVFPTAGHLASWAGQCPGNDQSAGKRRSGRTRKGSKWLNTALNDAAMSAIRTNDSYLQAQYQRLRPRLGHGRALGAVKHSILCACWHMLSTGELYRDLGGDYFRKRDPERQTKRLIAQLERLGHKVTLETLPEAA

SEQ ID NO: 492162 - protein, 344 aa, unidentified
MNEAYDGQQFVGMDLHRRRSVLVRMTESGEHLGAVRIMNDPYALAAVMAQAGEHPEVVLEATYGWYWAADLLSGLGASVHLAHPLGVKGFAYRRVKNDFLDAADLADLLRMGRLPEAWIAPPATRELRELVRHRARLVHARTSLRCQVHAVLAGQGVQVPVSDLFGVKGGKMLRQLELSAVYRYRIDSLLRLIEAFDWEIDQTAQLTQERLRHDPGFAAVTTIPGVGSILGGVFVAEIGDVHRFSGPGQLASWAGLTPKHYESDTTVHRGRITKQGSRLVRWAAVEAVQRTQQGSRLAAVRDRVAARRGRNIGTVAAARELVEMVFYALRDHHVRRLTRPAAVA

SEQ ID NO: 492163 - protein, 375 aa, unidentified
MKEKVRFLGLDVHAGTIAVAVAEPDGEVRSLGTIPNRAESIRKMIKKLGRAEKLRACYEAGPTGYVVYWQLAELGVQCEVVAPTLVPIKAGDRVKTDRRDAEKLARCYRSGDLTAVWVPDEGSEALRDLVRAREAAKQDQMRARHRLSKFLLRSGQRPPSGVRPWTRPYLIWVAQLRFTQMAQEATRQDYLHEVEHMRERVARLEQAITEAVKLASPALRQVINDLQALRGIGDISAVTIAAELGQVSRFESARQLMGYCGAVPSEDSSGKRTRRGGITKTGNAHLRRIVVEAAWSYRRPPCIWYGLRRRQESISEETKEIAWKAQHRLHKRYRKLGAAGKDQRKIATAVARELLGFIWAIGTRAEAIVRQQAAA

SEQ ID NO: 492164 - protein, 338 aa, unidentified
MKVTTVGIDLAKQVLQIHSVDQLGRVVVQKPLKRKEVLPYFAQHSPCLIGMEACATAHYWQRELTKLGHEVKLLNPAYVKPFVKRNKNDARDAEAICEAVTRPNMPFVPNKSVEQQDVQMLHRIRSQAIKQRTAQANQIRGLVGEYGLVIPQGIASVKRCMPQLLEDADNCLTALSRELLADLLGELLSLDKRVTHYDAKIKAVMKSNEAYERLQSIPGVGPLIASALLMTVGNASSFKNGRHMAAYLGLVPKQHSSGGKQRLLGISKRGDRYLRTLLIHGARAVGYRVKDNPQHSNKWFYDLIERRGFNKAVVAMANKMARQAWAVLAREQEYTAYP

SEQ ID NO: 492165 - protein, 344 aa, unidentified
MDHFGGLDVSVKETSICIVDDSGRIVKEVKVASEPEALLKVLGNPTYRFKRIGLEAGPLSQWLFSALAEAELPVICVETRHMQAVLKAQINKTDRNDARGIAQMIRVGLYRPVHVKTLGSQKLRMLLTHRKLLQSKAIAIENDLRGTLRNFGLKVGMVGQVRFEARIQELVENIPDLAVLVEPLLIVRRVLREQIVILHRRLLAIVREDEVCRRLMTTPGVGPVVALTYRATVDVPARFRKSKSVGAVFGLTCSRYQSGEIDWSGKISRCGDEMMRTMLYEAAQSMMHSKKWSWLKAWAMQIARRRGIKKAIVALARRLAVILHRIWVDGTEFRWTREQAAAAA

SEQ ID NO: 492166 - protein, 351 aa, unidentified
MYTLGIDLHKKSSVWVLIDDKRTELWKEHVLCHPEYISIAVKKIPVSPKEIQVAIEPVAGWRWVSKQLEEVGMKVHVAHPRKMRLIAESTKKNDEEDSKTLANLLHSGFFPEAHRSSEEIYQLRLLLRERTFIVRQQTSVKNQLHGIATTQGLHFIKSGNPLHKKGREGIMTSDNFVLKQLHLLIESLKERITPFEEKLKEELKKYPTAKILMSIPGVGMITALTVVSEVDNFTRFKTGEKLSSFAGLVPRQRSSGETVRYGSITHAGSAPLRTVLVETAMRVREGNAPELFAFVKRLTPICGAKKARVALARKLLVIMWKLVTSNTIYNPKLLFSSCATKVSDLDTGSDV

SEQ ID NO: 492167 - protein, 318 aa, unidentified
MNTKINQSINVGVDTGKTQLDIHIRPLDLFFSVENNDKGIKKALKTIKSHSPERIIIEATGRLEMPFVLACAEAQLPIVRANPVHIKRFAGAIGRRAKNDRLDAELIAHYGEAIKPALTVIKPKNIRLMSDLVIRRNQLLSMQTMEKNRIQILPASLHPTIKPMLTTIKNQITKLEEKLVKLIEDSPEYQAKNTILQSVPGIGNIAAASIISNVPELGYITNKQAASLIGVAPITRESGRYKGKRVIQGGRAQVRTVLYMAMMSAMQCNPIFKATYARLLAAGKPKKVAIIACVRKMVVTLNSMLRDGAMWDENTAKN

SEQ ID NO: 492168 - protein, 353 aa, unidentified
MNSIGIDLHKASISVCVMSPDRQVLARQRMACNDPAGIVAFFQDWGPFQAVIEATASYEWLFQLLEPLAQRVVLAHPKKLRIIAESTRKSDRLDAQVLAEFLALDMIPPAFRPAPRQRQHRQPAVGDRRLVRHRSYVSGRITSVCCKIRVILADYNADRKDLFTPSGLKYLAQVKVSEADRFVLDQLVAERKRLRNQLAAVEKQLRTFARSAPVAEAEARAVTDRWLAVVDSIPYVGPVTVDVVVSELGDVQRFRSQKRAAAYAGLALGHRESGGRSKELGITKEGSPLLRWAMIQTAWRLVQRTQRWRNIFEPLARRRGKKRAIVAVARRVLCMIVSLMQSGQRYRHAMTSA

SEQ ID NO: 492169 - protein, 371 aa, unidentified
MKKSITFVGLDVHKNSINVALADAGREGETRHYGAIGGDLDSFKRLLRKLVSTGKELHFVYEAGPCGYDIYRYLTAKDFDCAVVAAPAGDPTKGGRKRIKNDRRDALTLARLHRSGELTYVFVPRVDDEAMRDLTRAREDACNAQRVARQQLSGMLLRLGFRYNGKTSWNLPHFRWLSGTKMPTPAQQVVFQEYIHAIKETTDRVERLTRQIEELAPVWRMAPVLYAYQTLRGVSLIVAATVVAELGDITRFDNPRQLMAFLGLVPSEHSSGEKTRKGGITKSGNGHARRVLVEAAHSYRFPARVSRRLFKRQEGLSKTICDIAWKCQVRLCARFRRLMAKGKNRNTVVAATARELIAFMWAIAKQTPVSA

SEQ ID NO: 492170 - protein, 409 aa, unidentified
MRRIRKKRSASHIVGCAPKCAEPHAETPESVLTAANQRRQTVEEFISSFVGLDVHKDSIAIAVAEDGREAPRFVGTVGYEIKQLLKALHSTGKPESQLVVYEAGPCGYGLVRQLRSRGYRCEVVAASKLSRRPGDRIKTDRRDALTLARLARSGDLVRVAVPDERDEAIRDLSRAREDALRARLKCRQQLKALLLRHGRRYTGRSSWNPAHERFLSTISFSQPAQDIAFAEYRLAVREGHDRVERLTQALRTQTEQWRMKGLVAALSSLRGIDFIAAVTLVAEIGDFRRFSHPSELMGFLGLVPSEYSTGERQRQGDITKTGNSHARRVLVEAAWNYRFQARLSRLMHIRQDGQPKAIRDIAWRAQLRLCHRFRRLRSRKLHQNKICVAIARELAGFIWAIAQQVTVAA

SEQ ID NO: 492171 - protein, 375 aa, unidentified
MLKNVRFIGLDVHAESIVIAVANSGDTPAEFLKIISYDCSRLLKELRKLAKLSDLRVCYEAGPTGFGLQRFLVGENVSCIVVAPSLVPVQTGSRVKTDRRDARRLAHFLRSGDLTPVWVPDEQTEALRDLERAREDARLAERSARQQLLKFLLRHGFLLRHGRRFTAGKTNWTQIHWVWIRQQSFDQQATNCVLADYVHAAQQAGERVQRLTLQIAQCVNDWALAPLVQNFQAFHGIQLVTAVGLSAEIGNFERFEKAGQFMAFVGLVPSEHSSGGSRKQGGITKTGNRHVRRLLVEAAWHYYDARPGVSAALTKRREGVSPEVVAIAEKARLRLSRKAMRMRASRKVPHKIVTALARELAGFLWAAAQATQLNI

SEQ ID NO: 492172 - protein, 346 aa, unidentified
MDCSATIAVDVAKSVFEVAVSTQPGRVSERHRLTRTKFEQFFQGRAQATVAMEACGSAHYWGRRIEAAGHRVLLLPPHAVRPYITRNKTDRTDAKGILEALRNDDIKPVPVKSEEQQALTALHRIRSGWMATRTARINTVRGVLRELGFVIPMGAGKVVPRVQELLSDADAPLTLPLRDALAALCSEIHELEQRIRAIERDLRTHARQSPLVRRLMSVPGVGLLSGTALVAFVGDVERFPSGRHFASYLGLTPRERSSGQVRRLGAISKRGDTYIRMLLIHGARAVLLSSKTMKSPDTLRRWVLRVEARRGHNKAATALANKLARVLWAVWRSGESYRGKAKAKRI

SEQ ID NO: 492173 - protein, 448 aa, unidentified
MRTRKPARAKKMNLPKHLQHINPHAAGIDVGSRSHFVAVPEGSCEQSVREFTSFTDDLHRMADWLLACGVTTVVMESTGIYWIPVFEILESRGLEVRLVNARHVKNVPGRKSDVLDCQWLQRLHSYGLLEGAFRPAEQVCTLRAYVRQRMNLVRYASAHIQHMQKALSQMNLQLANVVSDITGVTGMRIIKAVLAGERDALVLARLRHPRCKNDESTIARSLKGNFRPEHLFSLKQAVELYGFYQHQIGECDRQILDQLASFDAADGPANGPPANLEQALLRMSGVDLTRIDGIDTNSALKIISEIGTDMSRWKTARHFASWLGLCPGTKVSGGKVLSAKSKPVANRAAAALRMAAFTLFRSKSALGAYFRRQRSRLGAPKAITATAHKLARLVYSMLKHGTAYVDEGQKQYEERYRTRVVQNLKRKAKELGYALVEVVEKQPQPEAT

SEQ ID NO: 492174 - protein, 336 aa, unidentified
MAKHVFQAHGADIEGSPLFNRKLRRGEVLRFFEKLPPCLVGMEACGGAHYWAREIANLGHDVRLIPPAYVKPFVKRGKTDAADSEAISEAVIRKTMRFVPIKTAEQQANAMVLKTRALLVQQRTQSVNALRAHLAELGIIAAGGLPNAAALMAIVREDKDARLPVAARFALTAVADQIDALTDQINELERAIVMEAKRDEDMRRLTTIPGVGSITAAAIKALVPDPSGFRSARHFAAWLGLTPRPHSSGGKERLGGISKMGNFELRVLLVLGATAVLRIARNDDRARPWLKALLARRPFKMAAVALANKMARIIWALLNKGGIYSHPKSRSITAAA

SEQ ID NO: 492175 - protein, 368 aa, unidentified
MKHVTTYVGIDAHKKNLFVAMLSGQEKTPVTWQLANEPKAVGRLVRQLERDAPGPVRVFYEAGPCGYALQRQVTTPRVRCDVIAPALTPRKPGERVKTNRRDARKLVELGRAGLLTIVQPPTLADEAVRDLARGRDDAREDLQRCRHRLGKLLLRRGLHYAGRNWTRAHRAWIDGLAWTHAAERAVVDDYLLAIDHTEARLLELDARLAEIAEREPYREPVGWLRCFRGIDTLTAMLILAELHDVRRFASAPALMAYLGLVPGEHSSGDKQRRGRITRTGNALVRRLLIETAWHYQHRPSVGVALTRRRKGQPGRVIAIADKAQQRLCRRFRKLAGEHKPAPKIVVAIARELAGFLWAALHPVPMPLK

SEQ ID NO: 492176 - protein, 365 aa, unidentified
MTVIHYIGFDVHKKTISFCVKTAAGQIVEEGRLEAERTVLRRWAAARKRAWRGAMEATLFSAWIYDTLKPYAQQLSMGHPAKMKAITAGKNKSDQIDARTIADLLRCNLLPACYVLPPQLRDLRRLLRYRNLVVQQSVRMQNKVAGLLMESGTPFNKQKLHQKKYFSDLMKSLEEVPESVKDLLRMSRGSMEMFQSTQKQLVKRLLSEPALEQRVERLMSIRAVGPITALTWALEIADPHRFASIADAVSYCGLSAAFRSSAGKQQRGPISKQRNAWLQPVLIEAAKLAPLWNPQLAAVHARALERGHANRATLQVARKLVAYLLAVDKSGQPFQVHTPPPPASTKARKKPPRRSKKTVALAPAA

SEQ ID NO: 492177 - protein, 347 aa, unidentified
MRFYTSQHPFYCGIDLHARTMYLCILNQAGETVLHKNMKCDPKLFLDAIATFRPGLVVGVECIFTWYWMADLCAAEGIPFVLGHALYMKAIHGGKAKNDRIDAHKIAALLRGGTFPLAYVYPPAMRSTRDLLRRRLHFVRLRGALLAHIQSTNSQCNLPDFGGRIIYKVNRPDVAGRFEDPSVRKSVEVNLALIAHYDELIRDLELHITRTAKEHNADTFHRLRSIPGIGKILALTILYEIHDITRFPRVQEFSSYCRLVKCSRDSAGKHYGTGGSKIGNAHLKWAFSEAAVGFLRKNPPGQKLLERLRRKHGKGKSLSILAHKLGRAVYYMLSHHRVFDMQQFLNV

SEQ ID NO: 492178 - protein, 336 aa, unidentified
MYSGIDLHSNNSVIAIIDDADRVVAQKRLPNDITKIVDFLARWQDELAGVVVESTYNWYWLVDGLQDAGFHLHLANTAAIKQYEGLKHSGDETDAQHLAHLLRLGILPTGTILPREQRAVRDLARKRMQLVHSCTTHVLAVENIMARQLGGRMTSNQIKRLTADAVDSLPLAADVGLAVKANVAVIATLQAQIEVLEKRLQERVKPRPQYGLLTSVPGIGRTLATVILLETGPIDRFADVGNFASYARCVDSVHTSNRKKKGEGNVKNGNKYLAWAFVEAANFARRFCPEARRFHERKKARTNNIVATKALAHKLARASYHILKEGKPFDVTRCFA

SEQ ID NO: 492179 - protein, 346 aa, unidentified
MMSVLKQVVGIDVAQKELVVTLGRTLGDFSIELYAHKVFVNSDGGIKALMRWVDKLTDGSVCVSFVMEATGVYHQKFAYYLDENGHDVSLILPNKISNYMRTLDHKTITDRSCSRAIAQFGLERKLDCWHKPKEVYRRLQQLTRERDQIVHERSMVKNQLHAEQSEAYPYQKSIDRLKSRIALLTEQETEVKKDIEELINGDASLEAEINLITSIPGVGRLTATIVLAETNGFELIRSKKQLSSYAGLDVREKQSGTSVNGKSRISKKGNRSLRKAMYLPSLSAVKWDDRFKSVYARIVSRSGIKMKGLVAVQRKMLEMIYTLYKSRNKYDKLFLIKEDSAPIQNV

SEQ ID NO: 492180 - protein, 383 aa, unidentified
MRIVCGLDVHKDSIYLCILSSTGEIIEKVFGVLTCQLQEMRDLMLTHHVEEAGMESTSVYWIPVWRVLEPHFRLKLINPYFIRQLPGHKSDVKDAQWIAECMMKELVRGSFVPPERIQQLRQYDRRIYDLDDEIVRKLAKLDAVVQRCNIRLGNYVSNTDSKSYKSVIDRICEGVTDPKVLVEEIHGRIINRHGKDTIISSLTGCVTECDMDILRQLKAEIDMAGQHKQECMDKMQAICEREYSAALQNLQTIPGIKMRAATSLIAEIGTDMSHFQTANHLTSWSGLRPRNDQSNKTIKSRRITHGNRYLRRTLIQCAWGASRTQGCFFNRFSYHQTQVRRKNRMKVQVAIARKMLVCAWHILSRNVQYKDFDNRIGTSDENG

SEQ ID NO: 492181 - protein, 410 aa, unidentified
METIFDRVAGLDVHKARVTACVRVPAAGGAREQQVAEFATTVRGLVALRDWLEAHRVTHVAMEATGVYWQPVWHVLEDAFELILVNARHVKQVPGRKTDVSDAAWICQLMEAGLLRGSFVPPKPQRALRTLTRYRKTQIQERQREANRLHKALEDTGIKLDCVATDILGVSGRAMLDALVAGTTDPEILAELARGKLRAKLPALREALEGRFEAHHALVIGAILAHLDFLDEQIERLSDAIEEQLGPFATGVRLASTITGVAARTAEVMVAEIGTDMSRFPSAGHLASWAGRCPGNHQSAGKRRSGRSRKGCKWLGIALEEAALAATRTKGSYLQAQYQRLRPRIGHGRALGAVKHSILIAYWHMFTTGEIYNDLGGDYYQRRHPQPQIRRLVQQLERLGQHVTLETAAA

SEQ ID NO: 492182 - protein, 360 aa, unidentified
MRIIGCDLHARQQTLAMLDTVTGEVVNRTLMHEGNEVREFYSQLPHPVLVGIEAIGPMQWFLNLLEELGIDCQVGDATKIRAAEPRKQKHDRRDAELILKLLVEKRFPTIWMPRKEQLDLRALLLHRHHWVRLRTQIQNALQAIALANGLRRGPSLWSYDGQAKIAFLPLSPHASYRRSALQAMYRKMEEEIENLTRQVAEQAGQRSGARLLMTHPGVGPVTALATDVFLGDPQRFSDGKALGSYVGLIPREYSSGERQRFGGLTKQGSPLLRFLWGEAAAHAARRDPELQRFYRRKLVQKGLGKARMAVARKLGIRLWIMLRDQIDYEEFCRRGQKQSSAACAGMPETAFGANGHRPVG

SEQ ID NO: 492183 - protein, 341 aa, unidentified
MLVGVDTHLRGYQAARKIDSGVIGVVENFRSEEELRLYVAKQTTRAEQVVVVYEAGPLGYTLYRKLTAAGVLCYVCAPDSGEQRKKRRKNNKIDARSLTSKLFNYLNGDQNALQLARVPTEAQEQLRMASRQHDQLVEERKRLGAKGNAMLLSQGFGSWSNWWRPKAWADLSSKLPPWLLERLEIWVDVLKVLDEKIAQAKAAFARSCNGPRPKGVGALSQMQLQSEVLDWSLYSNRRKIACLAGMVPSEWSTGDKERRGSITKVGVPALRRIIVEMVWRIIFFQPQYKPVQKWLEVLRGPNPALKKKAVIAIGRQLMVDLWRLQTGRVTAQELNLIMVTD

SEQ ID NO: 492184 - protein, 365 aa, unidentified
MWEAPVKVQRTSVGLDVHARSVVACGLDGETGELFERRLTPDHGEIVAWLNDLPGPVAATYESGPTGFVLARSINAAGIRCSVAASSKLQRPVGDRVKTDIRDARHLARLLHLGEIVEVEIPSVEQESARDLFRAREACRRDLMAARNRLSKLLLRRGIVYYGGAAWSQNHQRWLRGQRFDDAGVAIAYDTAFDTVLATTARRDRLDAAITAMAADSVFTPVVTRLGCLRGVSTLTAFGLATEIGDWHRLTGRSIGAYLGLVPCEYSSGDTRAQGGLTRTGNTHARRLLIEAAWHHRPSYRPGEVMRRRWDAASPAARARGQAANRRLHARWLRFNERKKRPVVANAAIARELAGWCWSLAVMDD

SEQ ID NO: 492185 - protein, 373 aa, unidentified
MKKVVMCGADVHDNTLCLRIAVNKDKPETRVFHNTAHGREALLKYVKLLARKHGADRIVLAYEASSLGFGLYEECVGAGVECFVLAPTKMPQSEHGKKCKTDEEDAQRILEQLRAHILAGNDLACVWIPDAQTRDDREVLRTRLDVAEKLTEAKTQVRSLLKRHGVAKPRDVGQAWTKSDRHWLTRLTEEESELSAGARVALGSLLRQIASLEAEIERLDQAVEAVSKTTRYQATSGALVEGLQGVGLLTAMVYLTELGDLSRFRNRKQVGSFLGLVPSSHESGEIKDRKGHITRQGPSRVRKVLCQATWSRVSHDENEGRVYQRIVEKNAKRKKIATVACMRRLGVAMWRLGLEAQRKAGVFDQAHRAPKAA

SEQ ID NO: 492186 - protein, 354 aa, unidentified
MKRTTKYVALDVHQATTITSVREESGRVIARTMLPTEAEPIVEYVRGMRGAIHVAFEEGTQAQWLHELLAPLVDRVVVCDQRGQARQGNKGDQVDADGLSELLRRGGLRAVYHGDAHRATLKELTRGYQNLVEDATRVMLRLKALFRARGIQAPGKRVYHPANRAEWLARLTNRGAQCRAEALYAQLDLLRALHPKAKAAMVAEARRDPAWTLLQTIPFFGPVRVALLLAPMQTPWRFRTKRHLWAYAGLAVVTHSSAEYLLVAGRPVRRRRAPLTRGLNRNYNRVLKDVFKGAATAATTRPGPFQDFYQGRLARGMREELARVTLTRKVAAITLRLWKKGERFDPAKLTTQAR

SEQ ID NO: 492187 - protein, 354 aa, unidentified
MKRTTKHVGLDVHQATTVTSVREDSGRVIARSVLPTEGALLREYFRGMRGTIRVAFEEGTQAQWLYDLLEPEVDHIVVCNRRGDSTSGSKADQADADELSDLLRCNRLRPVYHGSAERRTLGELSRAYQNLVEDGTRLMNRLKALFRARGLKTSGRQLYEPARRAEWLGQLSEPGARVRAETLWAQLRTVQELRPAVKRAMITEAQRDASWAVLRRIPFLGPVRVAQLLATVKTPWRFRTKRQLWAYAGLAVVTRTSAQYEFRDARPVRRQRASLTRGLNRNHNRVVKHLFKSAATSAAARDSGLRAWYEARLAQGMREEMARLTLARKLAALTLRLWKTGEHYDSTKLSVQAR

SEQ ID NO: 492188 - protein, 337 aa, unidentified
MHYIGLDVHSKHFTAAVVDEQGRLLFRSTHPTSEHNLIEVVSSLQGRKRVAFEETTVAGWVYRTLRSVTEDVIVTDPRLNQWISRDADMDDDKAALRLANLARGNFVQRVHHTDDQTQAVFKELVLGHKKVSKELARAKNQLKAKFRQHGIVCDGDGVYSPAHAEDWLAKLKDEDSRFQARRYMRRIGHLTEEKQAYARRIAKRARAFPQIAAFEALPGIGIIRAATFFAIIDTPHRFANKRKLWTYCGLGIAHFSSDQMRGPVKLNPNGNRMLKELAKNAAQDAVRQGNNPFARHYQRLLANGVKSSCAMLTVARAIVATMWAMWRKDETYIPRAD

SEQ ID NO: 492189 - protein, 351 aa, unidentified
MLIIGCDFHPGFQQVAIFDNRTGEIQERRLPHREEAEQFYRSLSGPVRVGMEACGHYPWFERLLEELGFELWLGDAAEVRASVVRKQKTDRRDAEHLLHLLLENRFPKIWVPSLEVRDGRQLRVHRHKQVQARTRTKNQLQAMALSQGVQKKWKLWTKLGRAELEQLPLLPYAAERRKRLLETLDGLEADLVELNRQVEEEVRKRPEAMRLRTHPGVGPVTALAMVLTLGPAERFASGKDVGSYFGLIPREDSSGGKQRLGKISKQGSSFLRFLLVEAGQTAARYDPQLKRFYRRLAMRKNRGVAKVAVARKLATRLYLMLREQWTYPQLCQAVMQVSPSHSVVEPEKPTA

SEQ ID NO: 492190 - protein, 340 aa, unidentified
MNITTVGMDLAKNAFHIVGLDEHGHEKMKKQLSRGQVLRHFANHPACVIGMEACASAHYFARELRKLGHEARLIPPQYVKAYVRGQKNDANDARAIAEAVRAPSMRFVTVKTVAQQDVQSLIRLREGAINARTAAANRLRGLLGEYGLVRGKSLSTLRRALPEILEAASNGLTDVFRRLLAQERRHLLELDAHIDTLTAELTALSKQDDRVRRLQTAPGYGPIVASVFASVMGDGKQYRRGRDASASVGLVPRQHSSGGKNVLLGISKRGDRYLRSLLIHGARAVVNAAQKKDDPLSRWINHLREKRGTNKATVALANKLTRIGWAILRNGTTYQPAQAS

SEQ ID NO: 492191 - protein, 341 aa, unidentified
MSEVSIIGIGLAKRVFQLHGACANGAVIFRKKLTRVQLLAFMSKQPECTVAMEACATAHCWGREIEKLGHTVRLIAPNYVKPFVKRQKNDVADAEAIVEAASRPTMRFVELKSEAQQARAMLFRTRQMFIGQRTQTINALRGHLAEHGVVAPKGAIHVKRLADAVEDETIGLLEDVRELAQVYLAQIEGLNVQVAALDQRMKGAAKEAEAARRAQTMPGVGPITALAIETFAPSLNCFRRGRDFAAWLGLVPKQNSTGGKPRLGKTSKMGQRDIRRLLISGAMAVLQAVERFGTPHNTWLIAMLERKPRMLVAVALANKMARSLWAMVTKQEDYRTPAAMA

SEQ ID NO: 492192 - protein, 343 aa, unidentified
MGEVSMIGLDIAKSVFQIHGVDADGMVVIRKRVGRAKVLEFFAGLSPCLIGIEACPTAHHWSRELQELGHTVRLMPPTYVKAYLKRSKNDANDAAAICEAVQRPTMRFVPIKTREQQAALMLHRTRQLLVRQRTMLSNAIRGHLAELGIVSAKGRHGTTALLEIIADSNDDRVPSVARACLNALSRQYEVIAMEIGEIEKRIHAWHRSCEASRRLEEIPGIGPIVATALVAEIGDWKAFSSGRSLAAWIGLVPKQHSTGGKERLGHITKQGNRYLRWLLVAGAMAVIRYARKHGTKRPWLIRLMGRRPVKVAGVALANKIARIAWAMMVRGEKYNEPKLLLAM

SEQ ID NO: 492193 - protein, 386 aa, unidentified
MRQANDLSRSLAAFDQATTLIAVIEMSQSSWLVAGIVPGLERHPLKKLAVDEGSLLRLLQRWRDQAIRAGCRIERITVAFEAGRDGFWLARWLRTHDIEGYVIHPTSVAVSREHRRAKTDRLDTELLKRAFLGWLRGEADHCNMAAIPTIEEEDGRRPHRERESLVAERTRIVNRMKGCLARLGIRGFKPTLQRAPKLLSTLRTPEGTPLPPNALAEMGRDLARLHFVEGQISEIETARLERLEQAPTEKSHAMVRLLARVIGVGIETADMLVREILSRNLRDRRALARYAGLTGAPDESGSKRREKGLARAGNARVRRGMIQLAWRFLMFQKESALAQWYRSRTADARQGTRKSLIVAMARKLLIELWRFVTTGETLVGVEMRPA

SEQ ID NO: 492194 - protein, 370 aa, unidentified
MEKRSMFVGMDVHKESIDISLAEEGRDGEVRHYGGITGDLEALAKVVKALRAPTRRLRFVYEAGPCGFGIHRYLTAQGEACVVVNPSSMPKRSGDRIKTDRRDGDALARLHRAGELTAIYIPTADDEALRDLVRAREDAVGLSTQAKHRLKAFLLRQGRRYPGRAGWTQAYRRWLADLSFPLAPQHIALQEYRDTIDETERRVERLTDQLRQLTPAWRWAPVVDALQALRGVSFVTAVGLVAEVGDIRRFDHPRQLMAFLGLVPSEYSSGPSVRRGGITKAGNPHARRLLAEAAWAYQGIPRIGRQMLSRQEGLPKAICDIAWKAQLRLTSRFRKLVARGKAKPKVATAVARELTGFIWAIAREVPAPPA

SEQ ID NO: 492195 - protein, 359 aa, unidentified
MANKVKRNKINFKEKMVSIGVDMHKRSWHITALADGEIVLTVSLSRPNYDAFEKLLSHFKGNYIRIVYEAGPGGFELYDRLTADGIECIVTPPSLIPTQSGSRVKTDKKDSLKLATLLESNILKKVWVLSPEERAHRQLVRTRRQIVNHRSDVMRQIKSLLLFYSIEVPFSSRQQWTGPFIRWLHEVELGNKYLNGSLKALVDLFDYLSAEKKRLTHEVIDLGREEKYAKRVKLLKTIPGIGALSAIEILVELQDITRFQTADELAAYLGLTPSQYSSGGHIRMGHITHAGNDRARTTLVESSWLLIGKDPHMRCIYEDIKQRRGGKKAIVAVARNLSIRIRRMLLDHVPYEIDFQKAA

SEQ ID NO: 492196 - protein, 353 aa, unidentified
MTGTKYIGMDVHKESISIAVRNDAGKLVMECVIETKANLILDFIHGLRGELHVTFEEGTWATWLYDLLKPQATKLVVCDPRKNSRQGNKNDRIDARELADRLYMNKLSSVYHGGAGVRTLKELARSYLTISKDLGRVMSRVKAIYRSWGIPCAGKQVYAPRHRAEWLAKITEVGVLRRAEFYYQQLDALRVLRQAVRRDLLTESKKHKATKLLRQIPSIGPIRAALLIALIQTPHRFRTKRPFWKYSGFAIEMHSSADYRSVKGGLQKSKKQISVRGLNRDCNHDLKNLFKSAATIASVKPGPFQEFYAALVAKGMRPEMARLTLARKIATIVLIVWKRGVSFDAKYLKSQTA

SEQ ID NO: 492197 - protein, 408 aa, unidentified
MRSNSFTAVGIDVSKCKSTVAARRPGGEVVWLPFDISHDTKGIQRLLEKLNGLDGEIRIVMEHTGMYWRPVALALQQAGFYVSVVNAILIHDFSDNSLRKVKTDRADALKIANYGLTFWMDLREYSVEDETRQMLKIQSRLYERTTTTGIMLRNGLISLLDQTFPRANKLFRDESRNTKGHVKWVDFIIRFWHKECVAALSLNAFADTFQKWCKRTGYRFSTSDAERIYAAAKNAVATLPKNDSTKLLITQAAISLNSVYDTLQALRTEMDRLASLLPEYELVMGMEGVGKITGPQLMAEVGDVRRFSHKGALVAYAGMDAPPFQSGAFDAKKRHVSKRGSPHLRKVLFEIASMVLVHGNMENPVFCFMDKKRAEGKHFYVYTVAGAAKFLRIYYAKVTQFLNAQAVA

SEQ ID NO: 492198 - protein, 423 aa, unidentified
MMKLKYSICCGLDVHKNVIVATIVITNKDGISEYLQKSFSTINSDIQRFHNWLIENNCYHVCMESTGKYWIPIFNYLENDIDVCLTHPKYVKAIKGKKTDKKDSKWIADLYKFDLVRCSFIPPKDFRQLREIARYRFKLVCMKSSEKNRIQNCMTVSNVGIASVLSDPFGKTATEIMSYLLEHTADSIDEKAVRKLIKKGAKAKSDEIIEAIKGYHIETDQAKKLELACGHLEYLDDMITQTEVELYVRIKPYYEFVEFVSTMPGMTELSSTIVLAETGVDMNIFDDAKHLCSWCGLSPANNESAGKKKSVRIAKAGDYLKPMMVQCALAAIKSKKQPYFAIKYGRIKKRRGHKKAIIAIARMMMVCIYHMVSERNPFTPTDYEELMDPQNHVERVILNENNVFAYLESLGYDSSKLVKRNDN

SEQ ID NO: 492199 - protein, 451 aa, unidentified
MSRRKPPDPAAALHVVHPHAAAVDVHSDNHVACVGPDHVRTFGAYSADLHALADWFAACGVATVVLESTGVYWIPLFELLEARGLEVFLIEPSQASHCGARPKTDRLDCQWLQRLHTYGLLRPSFRPPEAVLALRGYWRQRQMLVRYASHHVQHMQKALEQMNVKLTEVVSSITGVTGTAIIAAILQGERDPKRLAKLRHEKCARSEDEIGLALEGTWRAEHLFALKQAFALYEHLHRQIDECDEEIARELDRLPARSGDEPIAPKPRRRGRKPNDARFDAPAKLTRALGVDVTAIEGIDTATALVILAEIGVDVSRFPTEKHFASWLGLCPRTARSNKTEKRRTPRKGKNRVAQALRMAAQAVGRTQTALGMFYRRIKSRIGGRGAITATAHKLSRLVYRMLRFGTEYVAQSLVEYEAKVREKLERSLRRKAQALGYELVPKGSVAPAPT

SEQ ID NO: 492200 - protein, 350 aa, unidentified
MIIIGVDYHPSDQYLALADTETGEYSERRLNHSAGEAEKFYRELAAAGVSVRVGMEATGYSRWFERLLAELGIEVWIGDAAEIKTKRVRKQKTDRNDAQLLLKLLLDNNFPSIWVPDPENRDLRQLLWHRHRLVQMRTRIMNQLQALAMNEGQRRKKKLWSEAGRAQLEALRLAPWASRRRKDLLELLDRMNPPIQELTRAVEQEARKRPEVLRLMTHPGVGPLTALAFVLIIGTPERFPCGKQIGSYVGLIPEEDSSAGHQRLGHLTKQGSSLLRFLLVEAAQAAARCDADWRRRYRHLALRRQRNIAKVAMARRLAVRLYWMWRNGWEYVQLVKFGSDAGQLGTGHGV

SEQ ID NO: 492201 - protein, 317 aa, unidentified
MDVETTADRFVGIDVSKARVDVHVRPDGTAFGCATDPEGLGALVARLKPLSPCLVVLEASGGYERVVAAALAEAGLPVAIVNPRQVRKFAGAIGRLAKTDAIDAAVIAHFAQAVRPTARPLPDDLSVRLAEFMARRRLLVVMINAEKQRLAKAHDRIAQRSFTALLKSLEAERARIDKAIDKLIEASPVWCAQQDLLKSVPGIGDVVARTLIAELPELGRVDRHQIAALAGVAPMNRDSGRYRGRRRIQGGGVEVRAPLYMAWLVAIQHNPALKSFYRRLREGGKPARLALVAAMRKLLTILNAMLRDRKPWASAQS

SEQ ID NO: 492202 - protein, 361 aa, unidentified
MFTERTSVGLDVHARSVAAAAIDGVTGEVFKARLVPDQQVVLEWLGGLPGPVATAYEAGPTGYGLARALRAAGVRCEVVAPSKLARPSGDRVKTDARDAMHLARLLRLDEYTPVRVPTEAQESARDLVRAREAARGDLMRARHRVSKLLLRHGIVYSGGAAWTAKHDAWLLGQRFELPGTRTAFEDAYESAVLASGRRDRLDEQVAVLATEGEYVPVASRLACLRGISTLTSVALAVEIGDWDRFTGSSIGAYLGLVPTESSSGTRRSQGSITKTGNTHVRRLLVEAAWHHRKPYRHTAILRRRWERATPAAVARAQAGNHRLHRRWVGYAERRKRPVLANVAVARELAGWCWSLAVLPDQ

SEQ ID NO: 492203 - protein, 344 aa, unidentified
MDHFAGLDVSVKETSICIVDDTGRIVREVKVGSEPEALLKVLGNPAYRFKRIGLEAGPLSQWLFSALAEAGLPVVCVETRHMRAVLKAQINKTDRNDARGIAQMMRVGLYRPVHVKTLRSQKLRMLLTHRKLLQSKAIAIDNDLRGTLRNFGLKVGMVGTVRFEARIRELVEDLPDLAALIEPLLIVRRTLREQVVILHRRLLAIVRDDGVCRRLMTIPGVGPVVSLTYRATVDVPARFRKSKSVGAVFGLTCSRYQSGEVDWSGEISRCGDEMMRTMLYEAAQSMMHSKKWSWLKAWAMQIARRRGMKKAIVALARRLAVIMHRIWVDGTEFRWTREQATAAA

SEQ ID NO: 492204 - protein, 400 aa, unidentified
MDEAQTAWAGIDVGKTHHWVCVLDAEGKKLLSMKVANDQTAITATIATVGALADHIAWAIDIIGAPSAMLLALLIQSGQSVRYASGRVVAAMSAAYSGEGKTDAKDAYVIAETARIRRDLTVIDPGTDLVRNLGLLIGHRADLIADRVRMINRLRDVMTSVFPSLEREFDYSSCKGALVLLTGYASPERLHRIGETRLAGWLQRRRVRNYATVAARAIGAARAQSITLPSQEIAAGIIAELATNTLALDQRLTELDAQIAATLNEHPQAEIIQSMPGFGPILGAALLVAAGDLAAFPSAGHLAAAAGLVPVPNDSGRRTGNLHKPRRYSRPLRHVFYLSAQTSMMRAGPNRDYYLKKRAHGRTHTQAVIALARRRIDVLWALLRDERTYTAMPPTLAQAA

SEQ ID NO: 492205 - protein, 408 aa, unidentified
MDLTAMHKRVIALDVHQAKITACAVVEHDDGRVEVTKRDFGAFKRDRRALAQWALELRPEVVVMESTGVYWKSPFAALEAVGIIAWVVNAHHVKTVPGRKTDMADAQWLATLARAGLLRASFIPPLEFRQLRLVARQRQKLVGMCSAEKNRLHKVLVDAGMRINVVVADIHGASARAMVKALIAGQPMHAVLDRKGRLRASREELFEALSTEQFSAVHRFVAEEIMQHIEQIEQRIARMDQYLLEGLKAWQPQLNLLQTIPGIDLQGAAMLLVEIGADMAVFGSAERLASWVGICPGNNESAGKRKSGRIRRGNAWVRRLLCEFAQAAARTRCALQAKFESLAIRKGHKKSIVALAHKMLRTIYAMLSSGTHYKDKTVDYEALSVARNAPRWMKMLRKHGFMAETAAA

SEQ ID NO: 492206 - protein, 341 aa, unidentified
MDYYAGIDVSLEYSSVCIVDANGKIVREGKVASEPEALTAWLGSAGLRLTRIGLEAGPLSQWLYAAMRKAGLAVELLETRHVRDAFKAMPVKSDRNDARGIAQLMRLGWFRAVHCKSMGAQETRAMLTARKLLQKKLGDVEASLRGTLRGFGLKVGKTTPKRFAGRVKELVVGHASLEAIAEALLAVHAVLLREFNGFERRVRTMARHDAKAQLLMSTPGVGAIVGLTYACAIDDPARFKSSKQVGAHFGMTPKKYQSGETDYTGRISKNGDKGVRTALFEAAHVILTKPVKSSALKSWAMRLAKRAGMKKAKVALARKLAVIMHRMLVDGTTFDFAAAAA

SEQ ID NO: 492207 - protein, 485 aa, unidentified
MKPVRESGRTLSLAQRSVAFCRKAGEHEKECLSFFSASTPGGRKDRMQIQYSRCCGIDVHMESLTVCVLVYEGSPEPQVRKRDFATHFKALCNLRFWLSAQKVTHVAMESTGVYWKPVWQALTGHFELILANPHQVKNIPGQKTDSRDSQWLAELLAHGLIRPSFVPPAETQQLRDLTRYRVKLAEERNRIHNRIHKVLEDACIKLDTVATDILGVSGRAIIQAIIHGQEHPDWLADKAKGSLRGKRSELRLALRGRVTEHHRMMLRELMEDLDFVERKIQRLEASIASQSDLEMVARLCTIPGVDLITAWTLIAELGTDMKVFATAKRAASWAGLCPGNNTSAGKRLSNRLRKGNRWLRRALCQAAWAATRKKNCYLAAFFYRKAGKHGIRKAIVAVAHRLLVIGYCMLRDGATYRELGGDYFDRLHPERTRNRLVRRLQRLGLEVSLRPSPLPPDTAVAPTPRPKRGRPCKCAERLIECKHIN

SEQ ID NO: 492208 - protein, 346 aa, unidentified
MSKHSVSAGDIAALLARFSELRRKACARTGKSFPIVVIQEAGLDGFWIHRVLLSEGIESHVVDAASIATSRRRRRAKTDRIDGETLLRALLAHKRGEPRVCSMVRAPTPEDEDRRRICRERKVLIMERVQHVNRIKGLLFSQGASGYEPLRRDRRARLDALQTGDGRRLPQHLKAQVCRELDRLELLLEQIKAVEAEQDALLAAARKPAGETAAPDPVTMLLALKAMGPNFAAVLWSEAFYRHFSNRRQLAAYAGLAPTPWRSGSIEREQGVSKAGNPRLRSMMIQLAWLWLRHQPQSALARWFKAHSQRGRKSAIVALARKLLVALWKYVTHGVVIEGAVMKPAT

SEQ ID NO: 492209 - protein, 334 aa, unidentified
MAHYCGIDLHSTNHVVVVINEEDERMFEKRIDNDLSLTLKALEPFKDDLVSTIIESTFNWYWLVDGLMENGYHVELSNPAATVQYDGLKYAGDRHDAWWLAHLRRLEILPTGYIYPPEQRAIRDMLRRRLQLVHMRAKQLISIQNQIWRSTGNKVASNQIRKKDFQLPLSGLLHQSAQANVTLFHAIDTEIIQLEQTVLSEIELDDAFKILTSIKGIGNILGMTVMLETGTINRFESVGNYASYCRCVKSIRMSNGKKKGKGNAKAGNKYLSWAYSEAAHFAIRFQPEAKRFFERKKSKTNGIVAMRAVAHKLARASYRMLKEQTPYDATKAFG

SEQ ID NO: 492210 - protein, 341 aa, unidentified
MKKQCVGIDISKDHLDCCIGCIDSDQNHKLQNNKRFSNNETGFKALLNWVSDLQVTENLMYVMEATGVYYENLIYYLTENDCKASVLLPNMVKHYVKSLNIKTKTDKVDAEVLCRLGLERRLGFWQKPSGIMRELKFLSREYREIKYKINQVKNQLHARFYSYQCPESTEQRLKRQIALLETHALEIEAEIRTLVMTDRSFYDKIQRVCTIPGVSFITVVCVVAETNAFALISNSKQLTSYAGLDIQQNQSGSREGKTRISKKGNSFIRYALYMPALCASRFNPSMKSFYKNLTERKPAKKIAVTAVARKLLCLIYVLWKKEEEFNINYEENKNTDRVSPV

SEQ ID NO: 492211 - protein, 344 aa, unidentified
MTYFAGLDVSLRSTHICVIDDDGELLSEGKTDSEVADIIAFLDELDADAIEVGLEAGTLTQYLTYGLQFAGYEIICMEARQVKAALSAMRNKTDKNDARGIAQLLRSGWYSRVHIKSIESHQIRALLSSRKAVLAKCIDLEQEIRGLFKIFGIKLPARLGHGSFDPKVRPLIEADQALSQSLLPMLDARLVLYRTFLTLEYRVRNLAKQDPICQRLMTAPGVGPITALTYKAGVDDPTRFKRSRTVAAHFGLTPRRFQSGEIDFDGHISRAGDANVRSTLYVAANSMMTRSSQWSPLKAWGMKLAKTRGHKRAVIAVARKLAVILHRMWIDDTQFRWSTEAARS

SEQ ID NO: 492212 - protein, 356 aa, unidentified
MYGLKHQKEKRSMDYFAGLDVSVKETSVCIVDDSGKIVREAKVASEPEALLSVLKNPAYRFKRIGLEAGPLSQWLFSALAEAELPVVCVETRHMQAVLKAQINKTDRNDARGIAQMMRVGLYRPVHVKTLRSQKLRMMLTHRKLLQSKAIAIENDLRGTLRNFGLKVGIAGKTKFEARIKELVENLPDLAELVEPMLVVRRTLREQIVILHRRLLAIVRDDEVCRRLMTTPGVGPVVALTYRATVDVPARFRKSKSVGAVFGLTCSKYQSGEIDWSGRISRCGDEMMRVMLYEAAQVMLTRTNKWSWLKAWAMQIARRRGMKKAIVALARRLAVILHRIWVDGTEFRWTREQAVAA

SEQ ID NO: 492213 - protein, 324 aa, unidentified
MLPTLGIDISKDSFHVELSINNKRRHRRFANRKAGFAELCVWLAKHKAGLVHACLEATGPYSEAVALYLHQQGHTVSIVNPAQIKAFGQSELLRNKDDRPDAGLIRRFCEKQQPTAWQPPPAHFRELQALTRHLENLLETRQQQVNRLEVTTTKEVRKSLRKLVAHLEAEIKRTEQQIDDHIDHHPDLRQQCQLLESIPGIGKRTATRLLAEIEAISRYKSARQVAAYAGLTPRNNRSGTMCGPTRLSKTGNARVRKALFLPAMVAKRHNPVVRSFCQRLARHGKNKMQLVGAAMRKLIHIAFGVLKSGKVFNPDHELLSNSVS

SEQ ID NO: 492214 - protein, 386 aa, unidentified
MQQPNDLSRSLAALEPNSTLIAVIEMGQSSWLVAGLVPGVERQPLKKLDVDESALLKLLNRWRTEAEQTGRKIKRIAVAFEAGRDGFWLARWLRARDIEAHVIHASSVAVSREHRRAKTDRLDTDLLKRAFLGWLRAERDHCRMVAIPTLAQEDAKRPNRERESLVGEQSRIINRMKAALARLGIRGFNPKLKKAVERLDGLRTPEGAPIPPNTLAELKHDMERHRLVRSQIRDIEGARLERLEQAPSDGPHVMVRLLARVIGVGIETADMLVQEVLSRNLRDRRAVARYGGLTGSPDESGKKRREKGLARSGNARVRRGMIQLAWRFLMFQKDSALAHWFYARTKNAPQTRKTMIVALARKLLIALWRLVREGAIPEGIVLRPAL

SEQ ID NO: 492215 - protein, 330 aa, unidentified
MNNYKIVVGVDVSKNSFTATVLYDNKKETFEVKSDPVEFEMKIKLYLKKFKKSDMLIIMEHTGVYHLKLANYLYENGYKVAVINPFSIKKFMEAKMTRVKTDKTDSYFIAQYGRTFFDGELYKPKPDVEKEIEIKLKILEDLQHQLTKLRNQRESLSHVPIPIKKLKENLEYYYELIEKIEKNIKELEKEIKELTKKNYQEEYKLLKSIPGISDRVIGMIISVYGNFKRFKSVKDASSFIGISPGIHESGTSVKKSGSIKKMGNPYARKILYMAALSAIRFNKYCRELYERLVSKGKAKKLALVAVAHKLLRQAYGVLKNRRPFDENFCT

SEQ ID NO: 492216 - protein, 310 aa, unidentified
MKPAYVGIDIGKERLDVFIPDHGASAYTNDKHGIRSLIKTLTILEGPIHVICESTAGYERKLATALWDAPIPVSIANSYRVRSFARSRGRLAKTDKLDARVLSEYGSVNEPKTSIKPDAKQLLMKQLMDRLDQLDHMRTQDLNRLHQCDPKDVAYKSLKAMLRTIEAQMEKLREQVKETIEDDPQLKAKADKMKTITGVGDQTAAKMLAYMPELGSLTRQQAAALAGLAPMNFDSGYMKNQRHIRAGRAKVRKALYMAAVCMSTYNAHAKALYDRLVLRGKAKKVALVAVMRHLIIHLNSLLKPPSLALI

SEQ ID NO: 492217 - protein, 320 aa, unidentified
MDAVLGIDIAKAKFDVALQFADGRVRRKSCANSPSGFAELSQWLTRQNAGHVHACLEATGTYGEALATWLHDAGHRVSVVNPMAIHAFAASKLSRTKTDRADAALIAQFCATQQPAFWTPAPRELRELQALVRRLEALHDMRTQETNRLASGVSTPAVRRSITTVIDTLTDEIAAVHDQIRDHFTQHPGLRAQRDLLTTIPGIGEATAAVLLAELFDKQYRSARQAAAFAGVVPRLQQSGTLHRRARLSKIGPGRLRKALYFPAIAALRFNPTLQAMRVRLRAAGKIPMVIIGAAMRKLIHIAYGVLKTQRAYDPMVARS

SEQ ID NO: 492218 - protein, 413 aa, unidentified
MEVVYPRCSGLDVHKRFLVACLSVVEPSGKRHKELRQVSTMTCDILALKEWLKASGCRQIAMESTGVYWKPIFHLLEDSFEIVLVNAQHMKAVPGRKTDVKDAEWIADLLQHGLLKASFIPGSEQQAVRDLTRTRMRLLQERTRLINRIQKVLEDANLKLASVVSDIMGVTGQAILRALVAGEVDPEQLAQLARGSLVRKTDQLQAALQGKLTPHHRMQLEELLQLIATLDRSIARFDREVAERLRQLDALIERIDAVTGLSRRSIEVLFGELGWDMCHFPDAAHAASWVGICPGQRETGGKQLSGRTRQGNRWAKTVLIQAAHAAGHTQTYLGEQYRRISARRGSKKAAMAVGHSILVIFYQMVKTGEPYHEKGADYFTTINKDKIQQRLVRQLERLGNTVILHPQSETTPA

SEQ ID NO: 492219 - protein, 357 aa, unidentified
MIIIGVDAHKAQHAAVAINEAGRELASWTAPNSPEGWAEVLAWAAAQASTSGAARQWGVEGAGNYGRGLAQFLLAAGEVVYDINPRWTARQRRHARRPGKNDRLDAQAVAQIVWREGATLPPLQAEDETAVLELLVEERDAAQAEATRLRNQLHALLLQLDPQYKQHLPALTSAAGLAALATYQTADPGVLQQERAAAVRRLAQRLRLATSQAEEVARQIRTRARAGFSPLTALTGVDWLTAGSLAGILGCGQRFPIEAHLAAYAGVAPLEASSAGHLRHRLNRGGNRRLNAIVYRIAITQARCYPPAQAYITRRLSEGKTKREALRALKRYIIRSIWRLWQTCLDLQQTSPSLEAA

SEQ ID NO: 492220 - protein, 343 aa, unidentified
MEHFAGLDVSVKETSVCIVDDTGKIVREVKVASEPDALLAVLTNPAFRFKRIGLEAGPLSQWLFSALAEAGLPAICVETRHMRAALKAQINKTDRNDARGIAQMMRAGLYRPVHVKTLRSQKLRMLLTHRKLLQSKAIAIENDLRATLRNFGLKVGGVGTVKFEARIKELVEKAPDLMMLVEPLLVVRRALREQIGILHRRLLAIVRDDDVCRRLMTVPGVGPVVALTYRATVDVPVRFRNSKAVGAVFGLTPSKYQSGEINRTGAISKCGDEMMRAMLYEAAHILLVRSAKWSWLKVWAMPIARRRGLKKAIVALARRLAVIMHRIWVDGTEFRWTREAAAA

SEQ ID NO: 492221 - protein, 313 aa, unidentified
MSEVFVGVDVRQAQLDVSLRPAGTLLSYPNTVTGIEQLIQALGPLCPTLIVMEATGGLERDLIAQLHAQSLPGVVVNPRQVRDFARSVGRLAKTDQVDAAILSRYAEAIRPPVRQLTDDLQQQLRAWVERRRTVSDMLVAEQHRLQRTRDVDVRSDIEVHIESLKGRRTFQDTQLETLLAQPAFAAVATQLQDIPGVGRILTATLLAHLPELGKVNRKEIAALVGVAPYNRDSGKMRGVRRIWGGRPEIRPVLYMATVASLRVNPTIRAKYDRLVAEGKPKKVVLTACMRSLLVMINAMCRTHAPWCPPALAA

SEQ ID NO: 492222 - protein, 356 aa, unidentified
METAYDGRQVVGMDLHRRRSVLVRMTEDGRRLGTARITNSPAGLRREIAKAGKSPRVVLEGTYGWYWAADTLAAAGAEVHLAHPLGVKAFTYRRVKNDERDAADLADLLRMGRLPEAWIAPAEVRELRELTRYRCRLVGLRTSCRNQVHGVLGKLGVPVTCTDIFGVAGSAWLDALGLPQPYAGKVTSLRQLAGELTTEITMLSEVIADLLAGHRGYQVIQQLPGIGPVLAAVIVAETGEVTRFKNAAQLCSWAGLTPRHRESDTKVTRGHVTKQGSRLLRWALIEAIQHAPAGSLPGAVRQRIIARRGKQAKNIAKVAAARRLLTLVFYGMRDGQIRCLATPSGSPPAPPRAQAA

SEQ ID NO: 492223 - protein, 411 aa, unidentified
MKSNTQNAKIEAITEKTLVLGIDVGSETHYARAFDYRGIEYSKKPFKFSNTEAGFATFKEWILELKERHEKDKVVPGMEPTGHYWFNLGKFLQDNEMKPVLVNPHHVKKSKELDDNNPTKNDRKDPKVIAGLVREGRYMIPYLPDGVYADLRTASNIRFQLQAELTRIQNRISRWFNIYFPEYKTVYGKPDAKSGMLILKAAPLPEDILTLGIDGVNQIWRDAKLRAVGKARAKTLIEAAEHSVGSKEGAVSARMEIRMLLEDYESRNTRLQEVMVLIEELVRKIPMAEKLLEIKGVGIKTVSGFLAEVGDISRFNNPKELQKLAGLALVENSSGKHKGETTISRRGRKRLRYLLFEVAMSLVSKNQEFRGLHNYYTTRRLNPLKKMQSLMAIAAKLIRVVLCHADKRCGL

SEQ ID NO: 492224 - protein, 348 aa, unidentified
MTVYIGVDFHARQQTISYLTTEEGAIQHLVLLHDNPVTVRAFYAQFAGQRVVVGFESSGYAAWFEELLEELGCELWIGHATYIRQFAKRRQKNDRRDADLILELLHTGDFPRIHRYSRTTREMLQQLRYRQRLVKMRTMAMNMLLFMASSRGVSLRTQLQSKRGQAKLQQLALPATLGTQRDELLSLLQTLNEKISTIERWLEQQTKADLAVQRLQTHPGIGLLTSICLRYTLEDAGRFANTRKVSAFAGFDPMQDQSDERNRMGAISKQGSRWLRFYLVEAGQVAIRKDADLQRVYQRVARRGGHAKAKVAVARRLLVRAFIMLRDEIDYAEFQRRGVAARSSRGTA

SEQ ID NO: 492225 - protein, 352 aa, unidentified
MLIIGCDYHPSMQQIALVDTETGERGERRLMHREGEAERFYRELKQRRVEVRVGMEATGYARWFERLLAELSFELWIGDPARIRARRVRKQKTDRQDAQLLLRLLLEEDGFPRIWVPSPENRDLRQLLWHRHRLVQMRTRIMNQLQAVAMNEGLRRKRALWSEAGRKQLESFLLAPWATRRRKDLLELMDRLNPTIRELTGAVEKEAENKPEVQLLMSHPGVGPLTGLAFVLIIGTPQRFHCGKQMGSYLGLIPCEDSSADRQRLGHISKQGSSLLRFLLVEAAQVAARVDAEWRRRFLHLAMRRGRKIAKVAMARRVAVGLYWMWRKEWDYQQVVKFGSHVGQLELRHGVQ

SEQ ID NO: 492226 - protein, 442 aa, unidentified
MNAQPHAEIPFAAYVAIDWADRRHAWSLYEVGSGAVEQGEIDHTPEAIDAWACRLAHRFGGRPVAVALEQSRGALLSMLAKYAHLRLYPVPPAMLARYRTAFYPSRAKDDPSDAALLLELLRTHRDRLRPLEPDTVPTRTLHFLVEQRRKLVDEKTRQANRLTALLKLYFPQPLGWFDEVDSELVGHLLERWPTLQALQKARPTTLDRFFRQHHYGEPRIQQRLQQIAQALPAIEDQAVLQFAVPAVRVLVRLLDTLRAGIAELDGQIRQLVSTHEDFPIFDSLPGAGPALIPRLIAAFGTHRERYRSAAQMQSYSGIAPVVERSGNKHWTHFRWHCPKFLRQTFHEWAGCSIRFSDWARTFYEQRRAQGQSHHAAVRALAFKWIRIAFRCWKDRTPYEERLYQHARQRRQRPLPTTELRQVELDFQWKTSTGFSKLAALSS

SEQ ID NO: 492227 - protein, 355 aa, unidentified
MSSAKYIGMDVHKETISLAVMNDAGKLLMESIIETKASTILQFFAGLRGDLRVTFEEGTWAAWLYDLLQAHVTEIVVCNPRKNALLNEGNKSDRIDARKLADLLRGNYLKPVYHGEYGLRMLKELSRTYLTVSKDLVRVMNRLKALYRSWGIAYSGKSVYMPSQREVWLSKIKEAGVRRRAEYLYQQLDTLLPLRKEVRGELLSESRKHRATEILRDIPTIGSIRSAHLVALIQTPHRFRSKRQLWAYSGLALETHDSAQYRYVGGQLLRCRKPQQLHGLNHDHNHDLKGIFKGAAHKAASSPGPFHEFYERLLAKGTKPSLARLTLARKIAATTLTVWKKGVRFDPEQLKSQVA

SEQ ID NO: 492228 - protein, 429 aa, unidentified
MEEIDDTDLVVERVAALDLGKAGLDACVRVPHTHHPGRRMQELRSYGTTTAQLLELAAWLRHWHVQRVVMESTSTYWKGVYYLLEAEGFDCWLVNAREVKNVPGRAKTDRADAVWLAKVAERGMCRPSLVHPPEIRRLRDLTRYRRALVQDRTRERQRVEKLLEDAQIKISSVLSDLHGVTGRAMMDALINGQRDPHTLARLAKGSARKKTARLEEALRGFFTDHHAMILQMMLANSDRLSSQIAELDGRIEEAVSPFCAQSARLADIPGVDVMAAAELIAEVGVDMTRFPSAAHLVSWAKFCPQTHQSAGKSKSQSRGKGNPWLAGTLGRVVFANSRSETFLGARYRRLARRRGKQKAIVATGNSLLTVVYHLLLNSDARFCDLGPGYYESRINKHRRARDLATQLQALTGQHIVIRDGKAVITDTAA

SEQ ID NO: 492229 - protein, 349 aa, unidentified
MTIVGCDLHTRKQQVAVLHTETGEVVEQELLHAGDAVEQFYRTLPRPVTVGIESTGYALWFHELMQHLGHTLLVGEAAKIRAMVVRKTKTDRRDAQHLLDLLKHDRFPAVWIPDPATRDLRALVTHRMRLVRMRTMVKNGLHAIAMNRRLTLGPSLWSQRGLAQLQGLALAPHTTQRRDESLQLLTWLTARIEALDDRVAAAAQADPGARLLLSHPGVGPLTALTTVVVLGPVARFPDSKHVVSYTGLAPAVHASADTCRLGQITKQGSPLLRFVLGQAGLIAAHAEVDLKRHYRTLLRRRGRPKAIVAIARKLLVRLYIMLRDQIDYEEFRRRGRTPRGQEVPPPALA

SEQ ID NO: 492230 - protein, 317 aa, unidentified
MTQTSMTTAGIDTSKGKLDIAVHGRAEQWQVANMLPGWRILTNKLTKAGVSRVGIEATGGYECGVVQYLRAAGFTVQVLQPVQVKAFGRMHLRRAKNDALDAVMIAACTAALDQVRDAPDPRLAELAEQLTFLEQIEEDIKRFKTRLEHTSEPRLRRMVLGEITRMTARRLAQLRYIAKQLRAHRDLAARLDLVLSIPGIGERTALAILIRMPELGRISREEAAALAGLAPFDNDSGQQKGQRRIAGGRARLRRSLYAAALPAAFRWNRALIALYQRLTAAGKAHNAALIACARKLLIYANTVVQRGTPWTERPLGA

SEQ ID NO: 492231 - protein, 322 aa, unidentified
MRTESCVGIDVGKSWLDVVQLPGREHRRLANGEEGWAELVAWLPPEPVVVLEATGGYEQGVVRALASAGVAVTVGNPLQLRRYAQSRGQRAKTDRVDAVMLAQYAEQMQPQPSALPDETARTVAAFVTRRRQLSQMRAEEKTRQKQPGLLAIVQQQLAEHITELSAQISAVDCLMAETVAADPHWQQRVNQLVTVPGIAQLTAVRLLVGLPELGQCSAKTIAGLVGVAPYPQESGQYRGRRVIAGGRRWVRHALFEAVMSTKRCDPTMRAHYAQLRARGKPHKVAMVACMRRLLGILTAMVRHALTWQQTKVGQGHFLLATA

SEQ ID NO: 492232 - protein, 413 aa, unidentified
MYIVGIDIAKKSHQAAIMKPDGTLVGRSFRFTNTKQGFEFLMDKLAAVDSSLENFEFGMEATGHYWLNLYTWLADNHATVHVINPLQSDALRNLYIRKTKTDSVDAKIIAQVIRIGQYSETKLADDRMLMMRDLCRQRFFLVDMVANLKRKIIVMMDRIFPEYQGFFSDTFGKSSTAILKHCTTPEEITLFGEDNLAQLLQVASNGKFGLKKAQELISLARNSFAARLSSKTLSLLVKQMMDQMELLQNQIGILEKHISSHFKSFGTKIMQIPGIGPVLGASILSEIGDISRFANPKKLCAYAGIDPSVKQSGQFLGNENHMSKRGSGYLRRCLWMASFVSVNHCREITIVYKSQVSKGKTHFQSMGFVCHKLLNIIYTVLKNDIDYSPMLCINPAITARTSRRIARAALKAR

SEQ ID NO: 492233 - protein, 304 aa, unidentified
MFGIGIDVSKATLDVAVHEEQFRQFSNDKRGFLRLIRWLKKWPIKQVVLEASGGYERAALDALYAAGLPVVRINPARARRFAQGTGRAAKTDRLDATVLAQMAHLLPLTRYVPPAPWQQRLAEFAQCRRHLVQMRVSEMGRLRRLVDPDLIAIKQRHIAQLSDDLKQLDKAIAEQLEGQPSWKDIGSLKGVGPILISTLACELPELGRLGSKAIASLVGLAPMNRESGTWQGQRRISGGRAVVREALYMAALTAIRYEPRLRAFYAGLKAKGKASKVALVAVMRKMLVILNARKRDAEVALGSP

SEQ ID NO: 492234 - protein, 461 aa, unidentified
MSRKKPAGKQKESVQKRVNWKALEIVHPDAAGIDVGGSEHWVAVSPDRDPQPVRRFRCFTADLREMARWLVDKGVRCVAMQSTGVYWMPVFEVLEQHGLEVYLVNARHTKNLPGRKSDVQECQWLLKLHAFGLLNNSFQPTNEIRIARTLWRQRGNLVAEASSTIQRMQKALTEMNVQLSNVLSDLSGVSGMKIIGAILEGERDPWKLAALVEPEVKAVPQDIAKSLEGNWREELLFVLRQHVELYRIYQDKITDCDLQLRKHLESLGSKLDLKTQPMGPRPKGKKGCRNTPCFDLRTELYRITGIDWTQINGIDVLTAQTVIAEAGADLSAFPSEKQFASWLGLCPTNEQSGGKILNRRTRKVVNRATVAFRNAASTLLRSQSYLGAQYRRLRTRLGAPKAITAMARKLACLFYRLIKHGQPYVDKGTEYYEGRYREQQIRSLAKRAQKLGLQLVIPTTA

SEQ ID NO: 492235 - protein, 465 aa, unidentified
MTPRKGKNFRTSAKIEDLTQTHAHAAGIDVHAAVHFVAVPTADVPAGFVNPDPKLPAGVRKFGAYTGDLEAIAAWLADCGVTTVAMESTGVYWIPLYELLASRGFDVILVDPRQTKHAPGRPKSDVLDCQWIRRLHSYGLLTASFRPADGIVAWRGFQRQRAMLVGYAAQHVQHMQKALEEMNVKLTEVVSDIVGQTGMKIIKDIVRGKQDALELAKHRHGRCQATEAEIASALCGNWRKEHVFALKQALELYEFYQGQLRACDQEIEACLRDFADKSGGAVLPPSVRRLQSQRNEPKFGARALLFRMAGVDLTVIEGISETTALVILSEIGTDLSKFAHEKNFVSWLGLCPQHRGSAGKIFNRRVRRGANRAARALRLAAQGCHHAKNALGAFYRRIQARCGGAKAVVATARKIAERVYRLLKYGQKYVAQAEQAYDEAYRLRTLKAMARKAESLGYKLVPATA

SEQ ID NO: 492236 - protein, 341 aa, unidentified
MDYYAGIDVSLEQSSVCIVDASGKIIREGKVASEPQALIDWLGSFGIVLARIGLEAGPLSQWLYAGMKKAGLAVELLETRHVRDAFKAMPVKTDRNDARNIAQLMRLGWFRPVHCKSIPAQEVRAMLTARKLVQSKLYDLEMSLRGTLRGFGLKVGMTTSTRFAARIRELVVENATLQVIAESLLAVHAVLLREFKSFEKRLRITARSNVEAQLLMSTPGVGAIVSLTVASAIDDPARFKSSKQVGAHFGMTPKKYQSGETDITGRISKIGDKGVRTALYQAAHIVLTRPVKGSALKSWAMRLAKRVGMKKAKVALARKLGVIMHRMLVDGKPFNFAAAAA

SEQ ID NO: 492237 - protein, 423 aa, unidentified
MMKLKYSICCGLDVHKNVIVATIVITNNDGISEYKQKSFSTINSDIQRFHNWLIENNCFHVCMESTGKYWIPIFNYLENDIDVCLTHPKYVKAIKGKKTDKKDSKWIADLYKFDLVRCSFIPPKDFRQLRELARYRFKLVCMKSSEKNRIQNCMTVSNIGIASVLSDPFGRTATEIMSYLLEHTADSMDEKAVRKLIKKGARAKSDEIIEAIRGYNIETDQAKKLELARGHLEYLDDMITQTEVELYVRIKPYYEFVEFVSTMPGMTELSSTIVLAETGVDMNIFDDAKHLCSWCGLSPANNESAGKKKSVRISKAGDYLKPMMVQCALAAVKNKKQPYFAIKYGRIKKRRGHKKAVIAIARMMMVCIYHMVSEKKPFSPTDYEELMDPRNHVERVVLNEDNVFAYLESLGYDSSKLVKRNDN

SEQ ID NO: 492238 - protein, 317 aa, unidentified
MTTGMYLGVDVSQERLDVGVRPSGEVFSDRNDTGGIGRLVKHIAELHPDLVVMESTGGLEVPFAVELGEAGIPYRIVNPRQVRDFAKATGRLAKTDRIDALVLAQFAESVKPEPKALPDAPRRALKAVLMRRAELVVARVSEENRLRTESVREVKQSLKQSIAFLTRQIRKLDEQIKHTIKNHPDFFGQSKLVQSVPGVGPNTAHMLVAALPELGTLSRQKIAALVGIAPLNRDSGKSSGRRFCWGGRPEVRRVLYMAALVASRFNPVIRAMYVRLRAKGKPAKVALVACARKLLVILNAIVRTQTPWRQTSPAAAA

SEQ ID NO: 492239 - protein, 413 aa, unidentified
METGQKGRIQTRKENIIYVGIDLHKETHTAVMLDCWNQKLGEITFENKPSEFHKLTKKISRFVTEEKTAVYGLENAYGYGRALAVWLLEKGCAVKDVNTALSYAQRKSVPMYQKNDSYDAEAVALVLINMLDKLPDAVPDDAYWTLSQLVNRRDNICSHQQRLKNQLHEQLCVAYPSYKQFFGDISRRTALYFWLRYPSPEHLKGKTAQELAAELRPISHNNCSVKRAEKILELVRTDGQTAREHQASRDAITRSIAGDLEHYQEQLEIVETAIETMMPSFNCTLMTMPGVDVTTAANMLAEIGDINRFPNANKLAKFAGICPVNFSSAGKGKDMCPKQGNRRLQAIFYFLAIQMIQVSTNGTPRNKVFREYYLKRVTEGKNKQQALICIARRLVNIVYGMLKNHTEYREPEQ

SEQ ID NO: 492240 - protein, 342 aa, unidentified
MQITTIGLDIAKNVFQVHGIDAKEKVVVRKQLRRSKVITFFKAVRPCLIGMEACATAHHWGRELTQLGHEVRLMPARDVKAYVKRNKNDAADAAAICEAVRRPTMRFVRIKSPEQQGQLMQHRTRDLLVRQRTQLINAMRAHLAELGIVAAKGDAGVTELLAIVADKKDTRLPIDARASVIVLATQLEGLGTVIGAIEKRIKSQHRANAASQQVETIPGIGVIGATAIAATVPDPTVFRSGRDFAAWIGLVPRQDSTGGKPKLGAISKQGDRYLRRILIVGAHSVVRRAKENPGKYPWITQLLARRPAKVVAVALANKMARMAWALLAHGGTYRAPELAQAA

SEQ ID NO: 492241 - protein, 339 aa, unidentified
MFYLISKVMKKKCFIGIDVSKETLDTYIHGANHYFVAPNSTSGFPFLLEECCKSLGCKFSELFFCFENTGRYSRQLAAFLSESGITFTMAPAMDIKKSLGLKRGKSDRIDAKAIALYAWQKRDSIEPTVLNSGMVAQLRQLLTLRDKLIRHRTSYKNAIKDLQDTFFEGETEFLKESQVRMIAHLNQEIELAEGQIEQIIANSENWKNNYHLIQSVRGIGPVLAKYLIIYTENFNRIDNAKSFACYAGIAPFEYSSGSSIKGRTRVHPFANKHLKSLLNIAAMGAIQLQGEYKTYYQRRTLEGKNKMSTLNIIRNKLVSRVFAVVKRQTRYVDLTKFAA

SEQ ID NO: 492242 - protein, 411 aa, unidentified
MRLFVGDDWAEDHHDVELMDQAGRVLARRRLPEGVAGMARLHELVGQQLGEDDRDAEVVIGIETDRGPWVAALAAAGYTVYAVNPLQASRYRERHGVSGAKSDGADAHMLADMVRTDSHQLRAVAGDSADAEGIKVLARTHKTLIWERTRHVQRLRHQLREYFPAALEAFEDLDASDTLELLGKAPDPARAARLTRAQVSAALKRARRRGIPDKATAILAALRGEQLGRPPGITAAYAATVRSLIAVITTLNEQVKSLQGQVEEHFGQHPDAEIYRSQPGMGAILGARVLAEFGDDPHRYADGKARRNYAATSPITRASGKKKVVAARFIRNNRLIDALNAQAFTSLNASPGARAFYDALRARGIEHNDALRRLANRLVGILHGCLKTRTLYDEATAWSHRENLPQSSAAA

SEQ ID NO: 492243 - protein, 310 aa, unidentified
MIIHPGFVGIDISKNRLDVFDATTGRSEQWANAAEAIASLVERLRASGTKLVVFEATGRYDTHLRMAFAAAGVDFARVNPARARDFARSLGLLAKTDAIDARMLAAMGQSLELEGHPAADPERERLALLHKRRDQLVATRKQEQTRLAEATADTCDSLNAHLAWLDEAIAGIDLLIAKLIARHAELEAARKLMCSVPGIGPVTSTTLLALMPELGARSHKTIAALAGLAPFNCDSGQARGTRQIQGGRRRVRQALYMAAVSVSRSKSRFAEAYRALRQAGKPAKLALVAIARKLLVTLNAIIRDEVPFHA

SEQ ID NO: 492244 - protein, 324 aa, unidentified
MIDGLLGIDVSKDTLDASMSSCNKVRAKSFANSPDGWRHLLDWLISQKIRRVHACLESTGRYSLGIACKLNEAGHVVSIVNPAQIRDFARTKLGRNKTDGVDASHIREYCELFKPSPWAPPSHAHRQLGELQTIRAGIVAGLTEWKNRKNSGMVDAVAQSLADATISHFTSQLGAVEKAIAQTIDNDSDLRRKRDLLLSISGVGETLASAVLAELPGPDVLRSSAEVVAYAGLNPRQHQSGTSIDRPTRISKIGNVVLRTALYMPAMSAMRYNPAIVALVTRLKARGRLKPKQIVVAAMRKLLVLCFGVLKTGKPFDPALAMGC

SEQ ID NO: 492245 - protein, 361 aa, unidentified
MTDAIRWVGLDVHADQTTVAVIDKATGELQRAKLRGSPSMVLDFIARYDGRVIAVYEAGPTGMTLARQAQAAGIDMRVCAPGLIPRKPTDRVKTDARDAEILARQLAAGGLSFARVPTIEEESLRDLVRAREDVRQDLSRARHRLSKFLLRRDLRFTDSGAWTQKHLHWISQQTFDDRSAQMTCAEYLNAVRVLVARRDLLEKTLDEVLPAAPYADTIYRLRAFRGIDTLTAFGLCAEIGDFARFAKPTQLCAYLGIVPSEHTTDTKRRLGSITKAGSSHARRLLVEAAWHYRRPPRVGATLERRQRDVDPRVVAIAWRCQQRLYDRHRKLRDERRKPAGVVNIACARELACFIWEAATLT

SEQ ID NO: 492246 - protein, 353 aa, unidentified
MPVYVAVDFHAREQTISWCDTAAGEVHRTKLRHQHDDVRKFYEQFKGEVIVAFEASGYSAWFEQMLAELGHTVWLGNAAEIRRKAPRKQKNDRRDADLMLDLMLKSDFPRVHTFSTASRTVLRQLRYRHKLVKVRTIAKNSVHAIGINAGLPLRGRLLTQTGLEQLQALPLSPVLSQQRDEWLALIRLMNKQIGAVEESLAQYAKDDEAVELLRTHPGIGLLTALALRYTLEPIARFTSTRSVVGYAGLDCVEEQSSERRRMGSISKQGSRLLRFLLNEAGQTAARKDPQLKQFYRRLLRRRNKPKAKVAVARKLLVRSFIMLRDQIDYAEFVRRGVAARVARETHSPKVTDL

SEQ ID NO: 492247 - protein, 350 aa, unidentified
MLIIGCDYHPAFQQIAFVDTDTGELQERRLQHREEAEKFYRDLAAQEMKVRVGMEASGHARWFERLLGELQIELWIGDAAEIRTKRVRQQKTDRQDAQLILKLMLKDDFPQIWVASWENRDLRQLLWHRHRMVQARTRIMNQLQAVALNEGLGCKKRLWREAGREQLEAFRLAPWASRRRQDLLELLDRLNPTIADLTQMIEREVEKCPEAQRLRTHPGVGPLTALAFVLIIGRADRFQCGKQIASYLGLVPLEESSGNRRRLGHITKQGNSLLRFLMVEAAQVTVRSIPEWRSKYFHLAMRRGRKIAKVAMARRLAVRLYWMWRQEWDYEQLKKLGPRAGKPEHRDGVQ

SEQ ID NO: 492248 - protein, 356 aa, unidentified
MSRDVKYIGMDVHKEAIVIAVLNDGGKLVMESIIETKASSILQFIHGLRGELHVTWEEGTWAAWLYDLLQPHVHQVLVCDPRRNALLKEGNKSDKIDAHKLADLLRTGMLRPVYHGEHGLRTLRELARSYQTISQDLNRVMNRIKALYRGWGIACGGTQVYAARYREEWLHKIEHAGVRRRAELLYQQLDGLQVLRRTLRSELLAESRKHKAAKLLRQIPCIGPIRAARLLALMQTPHRFRSKRQLWTYSGLGIETRDSAQYCFVRGQLQRAKKPQQIRGLNRNHNHEMKDIFKGAATRASCGVGPLRDFYVALLDKGMKPEMARLTLARKMAAIALTLWKKEERFDAEQLKTQAA

SEQ ID NO: 492249 - protein, 346 aa, unidentified
MPVVGGLDIHRKQLTFDYLDTVTGEVQRGQIAPADRVHLRAWLARFAGRDEVAFALEGCTGWRYVAEELAGAGIAAHVAEPADTAFARGRKRHAKTDKTDSRHLRELLAEGRLPECWIPPAHILDCRALLETYHDLRAGHTAWVQRVHAVFFHQGAPALGDGALRAGRCDLEALRAAAATHLSPAGQLQVATALDMLAGLEDRLDVLRHRLLDAARHLTGARVLAERLYGVGPVTGLAMTCWLGGAGRFSSSRKAVRFAGLDVTVWSSDRKGPPGRLSRQGPPVLRWAVYEAGKTHARTSAPDHAYYAAVKDRKDGKRAAISEARKILRQACHILAELGDDALTAA

SEQ ID NO: 492250 - protein, 344 aa, unidentified
MENYAGIDVSLELSSVCVVDAQGKILKEAKVTSEPNALVEFFETLGFAVKRIGLEAGPLSQWLHAGLQRAGFETVLLETRHVKAALSAMTVKTDRKDARGIAQLIRMGWFRAVHAKSIGAQEIRALLVARKQLLGRLIDVELSIRGILRGFGLKVGPVTRKNFEARIRELVAGQATLERIATAMLSARSALKAEYGRLHKAVLAIVRDDAVCRRLMTVPGVGPLVAVTYKSAIDDPHRIVKSKAAGALFGLTPKKYQSGEKDVTGGITLAGDEIVRTVLYEAANVLLSRITRFSKLKRWGMDVAKRRGSKRAKVALARKLAVILHRIWVDGTTYRWTEAGPIAA

SEQ ID NO: 492251 - protein, 448 aa, unidentified
MKKHNTEHGLPIIHVRAAGIDIGSRFHVVAVPTALAEEPVQTFQAFTADLERMAAWLIELGITTVAMESTGVYWVPVYEILETHGLQVVLANARDARAVPGRKTDVNDAQWIQRLHACGLLRASFHPEREIAALRSYLRLRERHLDYAAAHIQHMQKALTHMNLQLQHVVSDITGATGIRIIRAIVAGERNATTLAAMRDLRCQSSVETIQRALVGNYQPEHVFALSQALAMYDAYRVQISLCDEQIARSLQQLSRGKPLPSEALPKPRHRTRQPNALNFDVRTLLYQLVGIDLTQIHGIGPYLALRLVAECGTDLSRWRTAQRFTSWLTLAPGCRISGGKVLSAHTRKTKNRVTAHLRLAAVTIGRTNTALGAFYRRLSARIGKAKAVTATARKIAVLFYNAMRFGMEYQDPGADHYEQQYRDRVVKGLHRRAAEFGFTLQAIEGVS

SEQ ID NO: 492252 - protein, 320 aa, unidentified
MSKKKSTSFIGIDVSKRLLEVAAHQSDYQFRCANKASAFGELIVELIAWRPARIVLEATGGLEIPVVAALHAAGLPVVVINARQVRDFAKALGQLAKTDRLDARVLAHFAAAIKPPLRPIKSKDELELDALAGRRGQLIEMLTAEKNRRVSAATETVRKEIKEHIDWLKDRIAELDEQLQTLLKSSKLWRVKDEVLQSVPGIGPVVSFSMIADLPELGTLNRQQISKLVGVAPLNRDSGQQRGTRHIYGGRARVRSMLYMAALTATRCNPVIKEFYERLLANKKLFKVAITACMRKLLAIINVMVRDCTRWKTKDDPVST

SEQ ID NO: 492253 - protein, 345 aa, unidentified
MEIRTIGIDLGKTVFHFVAVNARGQVVVRKKGSRTQLLRFTANLPQCLIGMEACGGAHFLGRALREQGHDVRLMPAQYVKPYVKTNKNDYIDAEACSEAVTRPTMRFVPIKTDDQLDLQSLHRVRERWVVRRTAVINQMRGMLLERGITIRKGRHYIEVSLPGILEDADNKLSGALRVLLTQLRMEMQYLHGQIEQTDKLIARICGELEPCRRLVAIPGIGPITATATVAAIGNGAAFKKGRGFSAWLGVVPGEHSTGGKQKLTGTSRRGNKYLRKLFVQGAHTVLLQKTRQSSGLSTWLVNLTSRKRKQVATVALANKMARMAWAVLYKGEAYRPPTAPQVIAA

SEQ ID NO: 492254 - protein, 426 aa, unidentified
MWDARRRVLKIKSLKHGIIQDKRGNIMRTVFGIDVSKASSEVEILVNGEKIHGYTMLNDAIGFNRLLNDLKTVHNPEIIFETTGVYSRRLRAFLEEYGYAYTQLNPLEAKKQLDSLRVRKTDKIDAEKLAHSQFILNRKPTYAQEEVYQHLRDLSRFYQNLTEDIVRAKNRLHKVLQVTFPELENLLSTPTGEQYWNLVMAFPCKEFVLNLSQNELCKIIRQSTSKRISEKRIAYLTDKLIKLAKQSFCAIKKISPMLEEVRYYAQELLRLSEHRQVVLDDMVALAQPLPEYDILRSIPGIAEITATSIIGELGDIRRFQSTNQINAFIGIDLRHYESGNFLAKEHITKRGNPYARKILFKCIHNIASASHTNPCHIADFYEKRKRQSTIASTKPHAIASIHRLIRTMYYLITHNKLYDYSLTQNR

SEQ ID NO: 492255 - protein, 404 aa, unidentified
MNQQLFAGIDWATKTHAVCVVDQHGGIRARFGVPNTGKTFTGLVRRLAKLTVAGVAIERPDGPLVAAMLDAGLRVVVITPRTVKALRSRYSAAGAKSDPGDAYVLADALRTDGHRLAALVPDTDPTIVLRALTRTRKDLVKARVGLVNQLAAQLERCFPGALGLFRRLDSAVAVAFLRRYPTSAAAARLGHTELAAFLRRIRYCGRTPAVELLDRLRTAPPAGISPAEASGRAVCITALLDAIQILTRQEKELAAEIVERLEVHADQHVFTGLPKAGHGVRAARLLAEIGDVRARFPDEEALAALAGVAPVTRASGKARSVGFRWACDKQLRDALVDFADDSRNASPWAAHIYAQALARTRRHPHAVRILARAWVRVIWRIWQDHTTYDPAKHGGAVRLLATQG

SEQ ID NO: 492256 - protein, 334 aa, unidentified
MSLQLLAIDLGKRSFHIYGIDSDGVILSRKVSRAKLAEVVGNLAPATIAMEACASAHYWGRCWLAAGREVRLINPRFVKPFVKGSKNDAVDAEAIFEAAMRPTMRFVPVKSTDQQDLQSLHRARDRLICQRTALINHTRGLLAEYGIVLPQGPWRFTAQAPTAVADAELSDLARTIFGELLNQLDDLECRIKKLDATMVALCRTSEPCRRLAKLPGVGPVIATAIVAAVNDGRQFRSGREMAAWIGLVPRQYTTGGKPRLGGIGRRANHYLRRQLIHGARAVVSRLPKHDDRRSTWLNALVARRGFNRTIVALANKTARIAWALLNRKEEYAIT

SEQ ID NO: 492257 - protein, 329 aa, unidentified
MSRWYWTGLGRRLAVREFAATDAGNIQLAGWLAGFGQVSDAGVEGTGSYGYRLARLLAGRGVQVWEVNCPDRSRRRRKGKSDPAGAENAARAVLAGEATAVPKDRRGLVGELRLPVLTGRSADKAPTQASNQIKAFPAEAGDELRAGLHGLRKARSGRARAALQPADGLRRVLAALGRRRLALDAEARELEAQIAALITAHAPQLLARHGVGAVTAAQLLVTAGANADRLRGDAAPAALRGASPAEASSGKTSRHRLNRGGDRAASNAPWVIAHARTISDPRTRAFAAKRTATRNSRREITRMLQRYIAPELYPLITDALCAAANDRVT

SEQ ID NO: 492258 - protein, 345 aa, unidentified
MQSKEKVFVGIDFSKEKFDACVLLYDGGVMGNAVFENNKKGYARLLAWVRKTSELGRDYKLDEVLFCGENTGMLSLGLSEFLFVKGGRMWLENAYTIKLGSGLRRDKSDKADAETIAYYAYRFHDCARKVEFKPESLDMKKLRSLYEFRDRTMRERVALGNQINSQAFDFSPEVRRRSQKRHKALCEEETVLEHEIESHMKDSAEFSDNYRLLVSFPGIGLLSAALLIIHTSNFQRFTDARKFSCYGGMAPFGKQSGTSIHTRPHVSHLGHKKVKAALVQTARISMIHNSIIRDYALHLREMGKPEGVIINNVKNKILHIVFKMIESKTPWDRNYQSLHHGGSDK

SEQ ID NO: 492259 - protein, 468 aa, unidentified
MKEAKANRRVPGRKKKGLCQQDRPLIELNAAGVDVGAREMYVAISPDRDSEPVRVFLTFTADLEALVQWLLERGITTVAMESTGVYWIPLYQMLEDRGIRVCLVNARHMKNVPGRRTDWHECQWLQYLHATGLLRAAFRPEQDVCAVRTLLRHRNDLIKIAAQHVQHMQKALTQMNLQIHHIISDITGLTGLAIIDAILAGERDPGKLADLRHPSIHADEGTIRKSLQGDWREEHLFTLKQSRQMYTQYRSSIAACDEKIVELVGAFEPKVDIEVKPLPPHVGPSRKRRTKRTGDFRFDPRTEAYKLFGVDITRIPGLNELAIPIFSEVGRNLAARFPSADHFASWLGLCPDNDKSGGQVLWTGVRRVNNRTAQMFRIGASSLHHNRSHLGDFLRRMKAKLGPAAGITATAHKLAIIFYTVVTKQVEYDDSIWSARDAQRQKRFEQKLKRQARQLGYELVLVQAARVP

SEQ ID NO: 492260 - protein, 439 aa, unidentified
MKRRIDRVCGADVHKDLIVATITGDDVLPIRADFGTTKAELKRFRNWLVDNKCEQVAFEATGVYWMPIYDALSQTIDTIVANPLQIKTIPNDKSDSKDSKRIATLCLNGQIKRSRVFTEEDRDLRMMTRARSGYVKTRTQFRNRIHKYLSSSGIKLSSTMDDIFCKSGRYIMDGLAEEKPIEEILKGIPSGKIRKKKDLIRAALENGLNDTNRMLLIDALEILDNLESKIEKLSLEVLKKVQQKSKDLAIVMSIPGIGFVSASVILSEIGNYRDFQTPDQLAKWCGLNPGENESAGKKKKCGITKRGSKYIRVVLVQAAQTISNMGKTKLSRFFQRLIKKKERNVAIIAVARKLICLIYHLLINQELYQEDECKKRRSSQDKSCQSPSFQEEHLTDKVAAIVDAFYHLKESSRKNALMREIADISGIKVDQKRPSKGGG

SEQ ID NO: 492261 - protein, 481 aa, unidentified
MEGQRQQKPRKGVRRAIQRSWHEMNRKQRRELTRKIQAEDLSLDVVHPAAAGVDIGNESHYVAVPSSCDSQPVRRFGCMTAELRGMAAWLRQCGIRTVALQSTGVYWIPVYDILEEAGFEVYLVNARDTKNLPGRKSDVQESQWLMKLHTYGLLRKSFRPPQEIRTMRTYWRQRNDLVRSAGRHIQRIQKALTQMNIQLANVLSDVSGVTGQAIIKAVLAGERDPRKLAAFRDKRVKASEEVIACGLEGNWQDDLLFLLKQEQDGYEFCQKQIAECDAQLEQYLQQAPDRSQGASLPEEKRKGRLQKKAKNPRFDLRAQLFRITGTDLTQIDGIDVRTAATVISEAGWDMSKWENEDHFVSWLRLCPDNRISGDKVIGKGRLRTNNPLTNAFKLAASTLHASDTYLGAQFRRLRARLDAPVAIKAMAAKLARLVYRMLRYGMRFVDQGAQYYEETHRQRQIRALKRKAGQLGFQLIEAPAA

SEQ ID NO: 492262 - protein, 312 aa, unidentified
MDAIYVGIDVSKDRLDVAIRPDGESFAVQRSGAGIDELITRLKPLSIKLVTVEATGGFETVVAAGLAGAGLPVVVVNPAQVRAFAQALGKRAKTDPIDAAVIAHFAEATKPQLRPLPDATTQLLSDLVARRRQIVEMIAAESQRAGHVTLPRLKKSIARLRKALEQELAELDDDISDHVRGSPAWAEKEDLLASVPGIGPTIARTLIAELPELGSLDRRQIAALAGLAPWTRQSGKWRGKSFIGGGRSSVRRVLFIGAMVAARHNPALKLFRDKLVAAGKAKLVAIVAVARKLLTILNAILRDKTPWQPKIA

SEQ ID NO: 492263 - protein, 428 aa, unidentified
MAQTSRSAPVCVPADRDPNPVRQFGANTADLQEIAAWLKKCRVRTVALESTGVYWIPLFELLESEGFEVKLVEPGQLSRCGARPKTDVLDAQWIQRLHSYGLLRGSFRPPDSVLALRAYWRQRQMQVRYAASHVQHMQKAMEQMNIKLTEVVSSITGVTGMLIILAILNGERDPLKLARLRDRRCFSSEDQIALALQGTWRPEHLFELRQAYDLYQFHHRQITECDNQIQAELAKFPNRAGEKTWTAQPRRNGRKSNDLRFDATGILFQALGVDLTLIKGIDVATALVILAEIGADVSRFPTEKHFASWLRLCPPQDESNNTKKRRGRNKNTNRVAMALRLAARAAGKTMTPLGLFYRRIRSRTGALAAVKATAHKLACLIYRMLKYGQEYVVQSMEEYEAKVKTNLFKALERKAAAIGFQLTPITTQ

SEQ ID NO: 492264 - protein, 461 aa, unidentified
MRKMKSTGPQKGSARAKVDWKALDVVHPEAAGIDVGGSEHWVAISPDRDPEPVRRFGCFTADLREMAKWLIDKGVQSVAMQSTGVYWMPVFEVLEQNGLEVYLVNARHTKNLPGRKSDVQECQWLLKLHAFGLLNNSFQPTHEIRIARTLWRHRGNLVAEAGSAIQRMQKALTEMNIQLGNVLTDLSGVSGMKIIGAILEGERDPWALAALARPEVKATPEDIAKSLEGNWREELLFVLKQEVELYRVYQQKIVDCDRQLRQHLESLKSTVDLQAQPLGPKPKGKTRSRNAPQFDLRTELYRITGIDWTQINGMDVLTAQTVIAETGADLSAFPSEKQFASWLGLCPTNEQSGGKILNRRTRKVVNRATGAFRNAAVTLIRSQSYLGAQYRRLRTRLGAPKAITAMARKLACLFYRLIKHGQQYVDKGTEYYEARYREQQIRSLAKRAQKLGLQLVIPKTA

SEQ ID NO: 492265 - protein, 414 aa, unidentified
MFAVGIDVSNGRSTVAVLRSKTQAVCKPFEVAHTAEGLITLVEMLNALDGETRIVMEHTGRYYESVALFLHGAGFFVSALNPLVFKDYQDGITVRRVKTDKVDAAKIARFALDNWELLREYTPMDTTRYELKTLNRQFQLASKNRTACSNNLIALLEQSFPGIRSHFSSPPRADGSQKWVDFVGSFWHLDCVRGVSLNAFTERYQKWCARHGYQFSSAKAAEIYADAKNRIALVPKSDVCKMMVKEAVAQLNTVSHAVEAYRAEMNRLASQLPEYDTVMGMYGVGPSMGPQLMAEIGDIRRFAHQKSLVSFAGTDPGKDDSGDVNKKHNRTSKRGSPYLRKTLFVIMDILIQLQPQDDPVYQFLDKKRAEGKPYYVYMTAGGTKFLRIYYGKVRDALIAQGLWDRPVFEQTPSD

SEQ ID NO: 492266 - protein, 442 aa, unidentified
MATKLVNPNAAGIDVASNEHVVAVPEDKSKDSVRTFKGFTRDLHQLAKWLLSCKVETIAMESTGVYWFDLYTILLDYGFEVYLVNAHHVKNVPGRKSDVSDARWLQQLHTFGLLRASFQPDNLTRSLRNHVRQRKSIVQQMSRQTQHMQKAFDQMNIKLNNVIRDLNGTTGTKIITAILEGERDPKKLAQHRDRRIKASEQTLIKSLEGNWREEQVFNLQLAYDHYIFLQKQLKQCDAESEKIIKKMTSGNSPKSRTNKVQKSKNNPDFDVAQYLHAALGVDVTQIYGIKEVTALTIFSETGANLKEKFPTEKQFLSWVNVVPNNKITGGKVISSKVKKKKNVAGQAFRDGASALWRAKNPIGDYLRRKKAKSGAKKAVVATARKIAAIYYKMVTEKVEFSPLEISKGKEQYLQKRLKQLEMAKEQTQMLLSDYQQQNSLVI

SEQ ID NO: 492267 - protein, 407 aa, unidentified
MEVVYRCCCGIDVHKKVIVACLVNGGEQELREFGTTTSEIKTLANWLTESGCEMIAMESTGVFWKPLYNLFELMDLDAMIVNAAHMKALPGRKTDVKDAEWIADLLRHGLLKASYIPNREQRELREITRYRKSPTEERCREVNRLQKILEGANIKLDAVVKDITGKSARKLLQRIIDDDIPDSDEVSKLVHGRMRPKLEQIVASIEGITTPLQRKLLAQIIDHIDDLNRRIGELDKLVQEYMAEYEAAIEAIDEIPGIARRSAEVILAEIGLDMGRFPSAAHLCSWAGVCPGNYQSAGRRKHGKTTKGNKALKTILTQCAKSAKTVKSSYFFAQYQRISARRGKNRATLAVAHSMLIAIYHILKNKTAFHDLGSDYYDSFNRDRKINSYLKRLKALGWEPDAIPSSA

SEQ ID NO: 492268 - protein, 427 aa, unidentified
MQVGRCSAALIRQEVTAAVIYVGIDLGKRQHAVCFLNEAGQPVAKPLRVPHTGRGLRQLHAQLASLDEQHQVIMEASGAHWMGIARKLRAAGVTVHIVNPIQTAGLRKVGIRKTKSDAKDALVIADLARMGRARPSYVPDDQLLELRELERFRWHLADQLGDAKRHVLGVLDKVFPEFADHLGDPFGATGRALLNRCASAIEFAALELGDLEGWIRQASRRQLGRERAEALHAAAQDSLGVDCLGAAAHLELQALLAQITLLEQQMATLDAELAGRMQALPEYLLSVPGMAGLLAVTVLAELGDVQRFDNVKQVVAFGGLDASVFESGDFHATRQHISKRGSPHLRRALYLAALTAIRTDAELAAYFQRKQAEGKPFRVALIAVARKLLARIYVVLRDQRPYAPPSPAQPVSIHSLDEPMTSTPKTP

SEQ ID NO: 492269 - protein, 409 aa, unidentified
MAEGAVAGVDWAKDAHEVLIADADGERLWAATVTHDEAGLSKLCSVLRSFKVQRVAVERPDGLLIDRLLDAGLTVLAIHPNKVDAARDRFRPAGGKSDRFDAFVLCELARTDSHRFPALIPDSDQTKALRALTRGREMLVEQRVALCNQLRAELERFWPGAVEIFADLDSPISLAFLERYPSPVDARGLGAKRLAQFLARHHYCGRRPADELLARLRTTPTGRAAELESDARRGLVLALVAALKPIVEQIRLLTSEIAHALRSHPDGDIFLSFFKDPKSVICAATLLAEIGDSRERYPTAEHLAADAGMAPVAVESGRRKVACFRRGCDHRLRDATSTLADATRHWHPWAHRNYADARARGHDHPRAIRTVGRAWTRVLWRCWHDRTPYDPERHNALQRHLEIKIPARG

SEQ ID NO: 492270 - protein, 400 aa, unidentified
MDDIDDVGVFLGLDVGKSAHHGHGLTPAGKKVFDKQLPNSEPKLRAVFDKLATKFGTVLVIVDQPASIGALPLTVARDAGCKVAYLPGLSMRRIADLYPGEAKTDARDAAVIADAARTMPHTLRSLELTDEITAELTVLVGFDQDLAAEATRTSNRIRGLLTQFHPSLERVLGPRLDHPAVTWLLERYGSPAALRKAGRRRLVEVIRPKAPRMAQRLIDEIFDALDEQTVVVPGTGTLDLVIPSLARSLAAVHEQRRALETQIGQLLEAHPLSAVLTSIPGVAVRTAATLLVTVGDGTSFPTAAHLASYAGLAPTTKSSGTSIHGEHAPRGGNRQLKRAMFLSAFAALHDPASRTYYDRCRARGKTHTQALLRLARQRINVLFAMLRDGTFYEPRTPRLA

SEQ ID NO: 492271 - protein, 352 aa, unidentified
MAHLAPPRVTIGVDTHLDLHVAHAKDQLGRRLATVSVPTTPAGYRSLLAWARGLGEVEAFGVEGTGSYGAALARFLRAQGQVVVEVNRPDRQARRRRGKSDPLDAEAAARSVQAGEATVAPKAGDGVAEMLRCLRVARASAVKARTQAGNAIKALLVTAPAELREQLRGLPTAKLVATAAAFPAGKPATPTAATMLALRLLAVRHQALTAEVTALDRELERLTAKAAPRLRALFGVGAESAAALLVAAGDNPDRLHSEAAFAMLCGSAPIPASSGKTVRHRLNRGGDRQANAALHRVVIVRLRWHQPTRDYVARRLAEGKTKREVIRCLKRYVAREVFAALNQLDHDLAEAA

SEQ ID NO: 492272 - protein, 347 aa, unidentified
MNFYNTIHPYYCGIDLHARSLYVCIIDQDGNTCAHKEIPADPDKLQQCLEPYIGNIVVGVECMHCWYWVADFCDDIGVDFILGHALYMKAIHGGKAKNDRIDSFKIANLIRGGNFPLAYVYPKAMRATRDLLRRRMKIVHHGADLKAHVVNTTSQYNLPPNKVNLKNVNAREQLRYKFPDLSVQKNIDLDMVILDCYAEQLSKVEWYIQQQAKQHNPVHFHLLKSVWGIGPILALTIIYEIGDIDRFESAQKFASYARLVKCKAESAGKNYGTQGNKIGNAHLKWAFSEAAVLYLRGNEKAQKYLLKLQKRMSKAKALSALAHKLGRCVYFMLKNETVFDESKFLKG

SEQ ID NO: 492273 - protein, 329 aa, unidentified
MEQAYIGIDLHKAFFQVCAINASGERQWEQRWPTSDEGIAALVARCGAWSRVAVEASSPTWAFVDRIVDHVGAVQVVDTRKTRLKAGYAAKTDRLDARRLADALRRDSVVGIYYPPPAIRDLRELCRYRCHLARLQASLKQRIHALLLRQGVTQPGVRDLFGRRGTHWLDALQLDGWAGTSLDGLRRLLTDVRAQLVPVLLTIHRWAATDSIARILDARPGFGPVFSLTLRAEVGTITRFPDGPHLASYAGLVPRVERSGSRQWSGRITKAGSPWLRWILIEAAIHQFRRQDDFGRWARQLAVRKGMLKARVAVARALCDELFDTWPRA

SEQ ID NO: 492274 - protein, 375 aa, unidentified
MIAYVGIDAHTTNYTLSTYLEGSAAPVNTNAYSPSVSNIVNYCKGIRKKIGNDTEIIVGYEAGCLGFKLKRDLEEKGLTVKILAPASITGTEINRRRRKKTDKRDAEAIARSLKNHEYSEVYTPDEEDESVRDFIRMQQDHKKQLKVIKQQICAFTTRHGYKFTDGKNYWTKKHMKWLKELSLEGVNKETLDSYLLSYETVSDRIEQMNKRIEEIAESDKYREAVHKLICFKSVKVLTALAVIVEIGDFTRFVKAKNFAAFLGLVAGELSSSGDQNQTGITKQGNTFLRKLLVECAQSFSRASSGKSEALKKRQEGNTPEVIAYADKANERLWKRYMRLVLHNRKNHNKATVAVARELACFIWGMMTGNIHTVLA

SEQ ID NO: 492275 - protein, 339 aa, unidentified
MNEFTKKKHFIGIDISKDKLDLALVHAKSPEVFEDKVVKNNFKGFEDIQKWLSKQKIKFEDCLFCMEHTGTYGLLLFAWLSQMEIDFCVEPGLQIKRSLGMSRGKNDKVDARRIADYAYTNKGKLVSFSLPSTLLLQIKQLLTYRDQLTRIKVSLKNSLQSHDQYKRVSGLKSISDDIEDQIEECKCRIEKIEEEIKGLIRSDKTMKKNFDMATSVKGIGLVIAAFMLVTTNNFTGFENGRKYACYSGIAPFDNTSGKHKGKTQVSHLANKRMKTLLSNGANTARHWDPELKVYYERKIKEGKPHSLVINSIKCKLVNRVFAVVKRQTPYVHIYQQNFA

SEQ ID NO: 492276 - protein, 370 aa, unidentified
MKSIIYVGMDVHKASFTLSCFSVTTQETFATVKISPDAKAIKKYLDGVSLSRSEECEFVCGYEAGCLGYTLYHQLTAMNIRCVIMAPTTILRNSKRVKTDRIDAENLARCLAYGGYKSVYIPTAQDEAVRDYLRMRDDHKLMLKKIKQQINAFCLKHNKIYPGNKSKWTQAHVKWLNALEFDGYLQDAFNEYMITYRELTDKVERLESQIEQLAELEEYRDKVKKLICIKGIKTHTALSLIVETGDFSRFQSAERYASYIGLVPGEHSSSEDQNRLGITKAGNRHMRMLLIEAAQCYSRGVPAKKSKNLKSRQKGASPEVIAYADKASIRLRRKYIRMELVNKKKANVAKTAVARELACFIWGMMTDNIA

SEQ ID NO: 492277 - protein, 422 aa, unidentified
MLEESNDTEELIGRIAALDIGKAELVCCVRVPRPDTPGKRLQEVRTYATMTRSLLVLADRLGELGVTRVVMEATSDYWKPVFYLLEAQGFEVWLVNARDVKHLPGRPKTDRLDAVWLAKVAERQMLRPSFVPPPAIRRLRDLTRYRADLVGVRTAEKQRVEKLLEDAQIKLSVVASDIFGVSGRDMLAALIAGERDPKALAQLARTRLRAKRSQLEEAFTGHFSDHHAFLLARMLGRIDQASADIAELEAKIDQEVAPFAPAVDRLDEICGVGRTAAQVIIAEIGLDMGRFPTPGHLASWAKFAPGVKQSAGKTKGKATTGHGNPYLARVLGEAAVAAGRTDTFLGERYRRLAKRRGTKKAIVAVGRSILIIVWHLLADPTARFHDLGAGFYDTRINPERAKRNHVRQLEALGYKVTLEPAA

SEQ ID NO: 492278 - protein, 474 aa, unidentified
MVGKAHADLQVIPMLRHETLYVGVDIGKKTHVAGFISTTLLSRHQRFESCPALSFDNSREGFRALVDRIRSYVPLTQVYVVMEVTGHYHRPLLQYLQEVEIPTYVMHVQKRQEGLLKSDKRDALGLGNLLFNQLEKGVQVGDPMQAVRRLAPPTEAASQLRGMVQHRHELTVESTQRRNKLTSICDEIFPEFTQILKDPNLPTALAIRKRFPTPAAIATASLSALQGVRGKNRSLSDARLLELQQLAAQSIGTKDPARLRGLTFEQEQLIAELELIQRHLEQLEAEITQIVAHSREGKILTSIPGIGPSQAAAIIASISNIANFDRASQLKSYFGWAPSVSQSGYTLDHVKLTPRGQRQMKHTMYLAVWHAIQLKDSEWSKLYERLVPLKCSYNERTRQYTGRAKVMGRIAGQMISVIFVLLKQDAETLSKLPFGATLPEPVLYDLEVHRQHRAGHYRAFTQHKPSPVIELPPH

SEQ ID NO: 492279 - protein, 357 aa, unidentified
MKERRDYILRNENVFVGLEDSKKTWSLCVRSSGMVVHETSMPARYEVLRNYFNNKFPECHIQVMYEAGFRGFELLDQLVADGWEGVVTPPHTVTDEKCQRKKNDRTDCRRLAKNLENGDYRKCFVPDKTLREDRQVSRTCGQVQADIKRVLNRIRRMLEFHGLDSDLPAGRWSGAAYGRLRQHLAEIEISDSLRLSFEVMFRELEQVRQLQRELLLELRKLARSDRYKESVRLLMSAPGIGMLTAIRLALEWGDMSRFGRKEEFASFLGLVPSDYSSGDREHRGHITKQGNRSVRGWLTESSWVAIRYDPVLLDKFRRVLRNCGSKKKAIVAVARKLALRLRMVLLSGEPYVLGVVE

SEQ ID NO: 492280 - protein, 379 aa, unidentified
MNHATAFTIPENMLLGALELSKNSWVLAIQFPDHQQPSLYRINGGDTEGLMSKLTVARDRWAKISGTPPSIALCYEAGYDAFWLARFLKAHGIECLVVDAASLQVNRRGRRPKTDRLDVIMLLRAMIAWARGERHVWSIVRIPSVDEEDLRRSHRERSRLVHERTAHINRIKGLLFAQGIRGLNVKSHSRQLELDKLVTGDGRPLPPRLAHEIAREIDRLALVQDQIIQVERAFVDAPTSCEEIEKKRLLLLHLRGIGPIVSAVMAREVYCRTFDNRRQVAGFLGLATSPYDSGAVERSQGISRTGSGPVRATLIQAAWLWIRYQQKSALTRWFLERTKGQGSRIRKIMIVAVARKLAIALWRYVEQGLVPDGAIFSNT

SEQ ID NO: 492281 - protein, 313 aa, unidentified
MYYIGIDVSKKALSVFDGKTSLEFENKEGLRPFYRYLKKHFKQFDNLVLIFEATGIYSDNLREFCNIHKIKAYILNPQQSHNFAKSLGVRSKTDKIDARIIWRYQSLIPQERIQIPLIDQEAKMLASYLTSYQFIQGQRVSLSNHLESVINPPLRKLLKVELKRKQQLEDKLLSDIKTYISKHPGLAKDFKRLMSISGIGDKLAFSLLFLFRHYQGTNRAQITALVGLDPIYKESGSSVKGKIKISKNGNRYIRKMLYLPTLCAIKNNKKISLFYQRLIDNHKPKKVAVIAAMRKLLLVAHAVYNNKTEYVPG

SEQ ID NO: 492282 - protein, 368 aa, unidentified
MDSPFQDGIDCAKLEEQLTSVQPKGGVIMNRTTIGIDIAKNVFELYVEDGATQSVERKRLSRQKMLPWLANCPPALVGLEACGGAHYWARALTKLGHEVRLMAPQYVKPWVQTNKSDAADARAICRAVQEPGMRFVGIATEAQQEVQALHRVRSRLLRQRTALVNQLHGLLLEYGVAVPRGRAALRKALATFLADERGTPLLRQLLAEQLAELADWDHRLEAVTTRIEQEAAQQPVCHRLQTIPGIGPLSASALWVKLAGQAYQHGRHVAAALGVVPKHEGTGGKVRLGGMSKRGDRYLRSLLIHGARSVITHGREKQDPVSRWVRRLVERRGMNKAVVALANKNARVAFAVLFRQQTYMATHACRAA

SEQ ID NO: 492283 - protein, 409 aa, unidentified
MSHNIAGIDVHKKVLVVVVADAARPDVILQSRRFGTGAAELRQLSAWLSQSGAEEAGMESTAQYWKPVWLELEPHLRLHLAQAQSNKAPKGRKSDMADAKRLVRRFVAGELMLSFIPEPEQRSWRMVTRGRLQLIRERVQLHNQIESLLEEGRIKLSSVITDLLGVSGRRILRAMAKGETCPETLAGLGDPGLKCGLPVLVDALTGSMGVVHCQLLGQHLDRIELIDNHIEDLNRLVASQMKKHQEAVMRLIEIPGIGAEAAQEIVAEIGPEAAAFPSAQQLASWIGVCPGSNESAGENHSGRSAKGNRFLRRLLCQAAQAAVRTKGSHLEALFKRLVVRLGYVKTVWAVAHRICKIIWNVLRKGANFIESSEARSPRAVQRAINHHLKALRRLGYSIPLVPQPAAAKG

SEQ ID NO: 492284 - protein, 416 aa, unidentified
MKIVRPICCGMDVHKNIIVATIGITDKKTRITEYIQETFSTLNPDLLNLKQWLINHKCFDACMESTGKYWIPIFNILEDEINIYLTHPKYVKAIKGKKTDKKDSKWICDLFKHDLIKFSFIPPKEIRALREISRYRYKLVGMRSSERNRYQNCMTVSNIGIGSVFSDPFGKSAKAIMKEVLESDVIEDKKILKCIHGSCKNKDKILDSIKHCHIETDQRFKMNESMTHMEELQVHINNCEIEMIKRASPMFDQFMHITQLPGINTLSAILIISEIGVDMKQFESDKQLACWAGLAPANNESANKKKSVRISKAGQYLKPLLVQCALGAIKDKDSYFGIKYTRIKKRRGHKKAIIAIARMMLVSIYHMILTGEVFKPSDYETFKNPHPSVKQQELTEKSAIEFLKKSGFDVSKLTKL

SEQ ID NO: 492285 - protein, 316 aa, unidentified
MSEPVYVGIDVAKNSFEVAVTSESQTLNLSNDEAGHGELCQLLVPLAPRLVLLEATGGYERDLALALAAAGLRVSVINPRQARDYARCVGKLAKTDRIDAQVLRGFAAMLDAQGHAPRALADEQQRELTALVTRRRQLVAMLVAERQRLAVAHPRAKRSIVQIMDAIAQQLHDVDGELKTHIQAYHADLARLLTSVKGVGPTTASTLLAQLPEIGKLNRKQITLLVGLAPMNRDSGSLRGQRHIFGGRADVRRVLFVAALVGTRFNPTLKAFYARLLAAGKPKKVALVACMHKLLVILNAIARTKSPWSNEIAGVA

SEQ ID NO: 492286 - protein, 386 aa, unidentified
MQKLNDLSRSLTPLDPDGTLIAVIEMSQSSWLVAGIVPGVERQPLKKLAVDESALLKLLHRWREEAAKAGHRIKRIAVAFEAGRDGFWLARWLSARDIEAHVIHASSVAVSREHRRAKTDRLDTELLKRSFLGWLRGERDHCKMVAIPTTKDEDAKRPNREHESLVGEQSRIVNRMKAALIRLGIRGFNPKLKKAAERLDGLRTPEGEPIPPNTLAELRRDMVRRRLISDQIRQIEDARLERLKQAPSDGPHAMVRLLARVIGVGVETADMLVQEVLSRSMRDRRAIARYAGLTGSPDESGRRRREKGLTRSGNARVRRGMMELAWRFLRFQKDSVLAHWFRTRTENARGARKTMIVAVARKLLIALWRLVREGVVPDGVVLRPVS

SEQ ID NO: 492287 - protein, 411 aa, unidentified
MHNRQNYLYVGVDLHKEYHTAVIINCWQEKLGEIQFENKPSAFSKFLLEVETYVSDGLSVVFGLEDVGGYGRALAKYLVDHEQVVKEVNPALSFLERKSQVMIQKNDSWDAECVARILINKLNQLPDAKPNDLFWSIQQLVSRRNALVKAQSALKNQLHIQLNHHYPSYKKFFSELDGKTALAFWQQYPSPSCLEGANIKQLTAFLLDVSNNTCSVKKASEILKLVKEDGQTMKEYQETRDFLVRSIVRDIEFKKKEMKYIERELNQLVKLLDYQLETMPGIELVTVSALIAEIGDVRRFSNANKLARFAGIAPVYFGSGGKGKTHKSKQGNRALHALFYNLAVQQVQVAKGSKMPRNPVFHAYYQKKLKEGKTKGQALVCIMRRLVNIVYGMMKYKTAYELPVVEEKEVV

SEQ ID NO: 492288 - protein, 389 aa, unidentified
MKIFVGIDIAKLNHFAAAISSDGEIIIEPFKFTNDADGFQLLVSKLESFDKNSIIIGLESTAHYGDNLVRYLVAEFYQVCVLNPIKTCQMRKNNVRKTKTDKVDTFVIAKTLMMQDDLRFITFFDLDMMDLKALGRFRQKTIKQRTRLKIQLTTYVDQVFPEIQYFFKSGLHQNAVYALLKEAPSPKEIASMHMTHLANLLKVNSHGHFTKEQAKELRVLAQKSVGANDSAISIQITQTIQQIELLDSQLEKIEAEMTDIMKFNDSVIMTIPGIGYINGGMILGEIGDIHRFSNPNKLLAFAGLDPSVYQSGNFQAKTTRMSKRGSRVLRYALVNAAWNVVRNNATFKAYYDAKRAEGRSHYNALGHCAGKLVRVIWKMLTDEVEFNLE

SEQ ID NO: 492289 - protein, 320 aa, unidentified
MNTETGEVSRGRVMPGDRAGLRRFLERFDGFELEAAFEATTGWRFVAEELERVGASAHLAEPAETSGMRGPKRRAKTDAADARHLRELLMTGRLPESWIPPAHLLDLRARVRLRHTLSHQRCEWQQRIQAVLYHHGLPHRSQLMTREGRQWLAEAELPPSAREQVLVYVALVDALDAQMAPLEKELRRFARHQPGCKALMNIYGIGELTSITILAELGDARRFSSSRDAVRYAGLDVTVSQSDQRRSPAHISRQGPPALRWALYEAAQVARHPGSPDRDYYLQAKERLGGNRACLTVARKLLKRSYHVLRELGDEATASI

SEQ ID NO: 492290 - protein, 307 aa, unidentified
MSPCVGIDVAKHTLEWAAGSTGKVQHTRNEPRPIAALVRRMVTLDPERIVIESTGGYERMLVAKLAEAGLPVVVVNPRRVRRFGEGMGFLAKTDAIDARLLALFGETARPPIRPILQGSDRLLADLVARRRQLVGMIVAEKNRKETAPAAVQRTIAPVLRTLQKLVRDLEQRIDTMLGQDPDRGELLTLLQTVPGVGPAVARTLLIDLPELGHLGRREIASLVGVAPFARDSGTFRGARRIRGGRTSVRTALYLAAMTASRFNPTLAELYQRLRLAGKPPKLAFIAVARKLLVALNAIARDRTAWQT

SEQ ID NO: 492291 - protein, 410 aa, unidentified
MTNITMTQTANVLVAIDISKARHEVLIAIPGKKRRRRLTILNTLDDFTRLIGILRDYDHPVRIAFEATGNYHRALVYHLGSAGFNMKLVSSVALARTREALHNSWDKNDPKDAQVILHMMEIGNEQFYHDPLLQGANDIQELSKTHDIVSRSKTELWHRVLTHYLPLYFPEAERFHRSSRSDWFFAFLERYPSPHFISAMDQDTFIADAWEVVGRKVSKERLLSDIYQTAKTSVGLPIAENSDAARMFRLVLSEGRSLIAQRNQIEDRAVELLKDSNDYQLLTSIPGIGPINALTILAEAGDLRRFRHHRQFLKFCGMDLATIQSGTFRGQTKLSKYGNARLRRTLWMAGQVAILQSANSFRDKFERYIAKDRQNTHLRRKAYTAIAAKMARTVHGIIKRGEPYRPFFEG

SEQ ID NO: 492292 - protein, 440 aa, unidentified
MMNDSIQTNSTATEQKPAPVVCWVGLDWADKKHCLVVRRAPGGAPQTHLVEHKPEALDAWFLQLRQEHPQGRIAVAIEQSRGPVLYALMKYDFLALYPVNPRCLADYRRVFKISGAKSDPLDADLLCELVCLHADRLRAMIIEDVPTRQLRLLVEARRNFVEDRTGLSNRLGATLKCYYPLALELVGEDLTTPMALDFLRRWPNLARLQAAKPGVLCTFFYGHNSRSEERIEERLKAVKAAKPLTEDPALVGPLQLQMDKLVQQLRTLNQTIAAYDEQIQKVFAQHSEAWLFQDLPGGGKAMAPRLAAAFGTVRTNFQSAQDLLCFSGVAPVKKERGGQKVVQFRYARPIFYHQSIVEFAKCSIGQCDWARLLYEGQLRKGKSRWAAIRKLAFKWLRILWRCWQERQAYDEIKYLRSLQRDGVELYRSLYQGLPALEKTL

SEQ ID NO: 492293 - protein, 401 aa, unidentified
MQQEAPETFAAFVGLDWADAKHDVCLQAAGSEQREHDSLDHTPEAIEAWVCSLQKRCEGKPIAIGLELNKGPIVFALRTYHFLVLFPINPLTLARYREAFTPSRAKDDPTDAELQLALLRTHRDKLQPLNPQSPTMRALAQLVEHRRRVVGDKVRLTNRLTSTLKNYFPQVLQWFQDKDTVIFCDFLRRRPTLKAAQLARRSPLETFFREHQVRSADVIAQRINAIKAAIPLTTDEGIITSNVLLVHALVSQLRATLQAIQDFDHAIAQHAQRHPDFALFQTLPGAGPVFAPRLLVAFGEQRERYASAAELQQFAGIAPVTERSGKKCWVHWRFQCPTFLRQTFVEWASESIRHSFWARVYYQQQRDAGKAHQAAVRALAFKWIRILFRCWQDRTPYDESV

SEQ ID NO: 492294 - protein, 370 aa, unidentified
MKSIIYVGRDVHKASFTLSCFSVTTQETFATVKISPDTKVIKKYLDGVSLSRSEECEFVCGYEAGCLGYTLYHQLTDMNIRCVIMAPTTILRNGKRVKTDRIDAENLARCLAYGGYKSVYIPTAQDEAVRDYLRMRDDHKLMLKKIKQQINAFCLKHNKIYPGNKSKWTQAHVKWLNALEFDGYLQDAFNEYMITYRELAGKVERLESQIEQLAELEEYRDKVKKLICIKGIKTHTALSLIVETGDFNRFQSAERYASYIGLVPGEHSSSEDRNRLGITKAGNRHMRMLLTEAAQCYSRGVPATKSKDLKSRQKGASPEVIAYADKASIRLRRKYIRMELVNKKKANVAKTAVARELACFIWGMMTDNIA

SEQ ID NO: 492295 - protein, 342 aa, unidentified
MQITTIGLDIAKNVFQVHGIDAKEKVVARKQLRRSQVIAFFKALPPCLIGMEACATAHYWARELTKLGHEVRLMPAKDVKAYVKRNKNDAADAEAICEAVRRPTMRFVRIKSAEQQGQLMQHRTRDVLIRQRTQIINALRAHLAELGIVAAQGNAGVNELRAIVTDEQDTRLPIDARASVIVLAAQLEALESVIGAIEKRIKMQHRSSEASQRVETIPGIGVIGATAIVATVADPTIFRSGRDFAAWIGLVPRQDSTGGKQKLGPISKQGDRYLRRILIVGAISVLRRAQENPGKYPWLTQLLARRPFKVVAVALANKMARMAWALLAHGGTYRAPELAETA

SEQ ID NO: 492296 - protein, 348 aa, unidentified
MKTHFIGLDTHGQFCDVTAVNGKGEVVLRRRSKTNIPALVALLELVPKPRHLVIEEGPLADWLWRNPWSQVEQMVVCEPRRNRLIAREGDKDDPIDAEKLAQLFRGGFVKAVHHTATLERACLKQQVSLYQQQVRLRVHEGHRARSLLRQHGIIVRERDFAQSADRQDLLARLPTNRTLREDLELLWQSYELAALHELRLGKRLVELAQQEEVVRRFQALPGIGWVRGLTLFVWLDTPWRFATKQALWRYLGIGLQRRRSGNGPERLGVPKQVNRPLKSTILGAAKSAAAQGDNPFADQYRRWRDEGLSARVARRNVARSLAVTLWGLWKNGSAYRPDWVGVAAAARR

SEQ ID NO: 492297 - protein, 484 aa, unidentified
MAKRKMSTFERLQRGKWSREQRKELAQKLEAADLTIVHPDAAGIDVGNESHFVAVPAGRDAQPVQEFGSWTADLQRMAAWLKACGIRTVAMQSTGVYWIAVQEVLEQAGLKVFLVNARGTKNLPGRKSDVQECQWLMKLHTYGLLANSFRPPEEIRAVRTIWRQRDRLVQDAGRAIQQIQKALTTMNIRLANAISDVSGVTGLAIIRAILKGERDPRELAKLRHPCIQASEEEVVRSLEGHWRDDVLFELKQVVEGYDFYQRQMEACDEELQKYLAVLPDRRKESAAVGADPGPTRTKQRRRSKAERKGKTRRKNQPGFDLQAELHRTFGVDLTRIDGIDIMTGQVILSEVGPDLSDFPDEDHFASWLELAPRRNITGGKVISQKSRESRNRVANALRLAAESLSRSDSYLGARYRRLRGRKEGKKAVKAMARHLACLVYRLLTKGQDYVDRGAAYFEKKRTEREMIGLQRKAAEYGMRLVPVA

SEQ ID NO: 492298 - protein, 420 aa, unidentified
MDVAIGAVGRPGGRDDQRTHVIDISDIGAFLGLDVGKGEHHATAVTPAGKKAFDKRLPNSEPRLREVFGKLQTKHGTVLVVVDQPASIGALPLAVARDMGCEVAYLPGLTMRRIADLYPGEAKTDARDAFVIADAARVMPHTLRSVDLEDETIAELEMIVGFDDDLAGEATRISNRLRGLLTQIHPSLERVLGPRVQHPAVLKLLDQFGSPAQIRKAGRRRLVTLIRPKAPRMAERLVEDIFTALDEQTVVVPGTDAAALIVPSLAGSLQAVLDQRKLLAARIEELLEDHPLSKVLTSMPGIGVRTGARILIDVGDGSSFPSAAHLAAYAGLAPTTRSSGSSIRGEQPSRRGNKQLKRAFFLSAFAALADPTSRSYYDKKISQGKHHTQALLCLARRRADVLFAMLRDGTFYEPQPAPSP

SEQ ID NO: 492299 - protein, 333 aa, unidentified
MSPLSSNHKEEYPMKPAVTTAPAAVTYVGVDIAKRTLEVSPNPAWPSGEFANDPAGHRRLVKRLKKLSPPAHVICEATGGYERDLLASLHKAGILVSLINPRNARDFARAQGLLAKTDQIDAALLADYGVHLGPSPTPKAEPSQERLQALVGQRADLVGLRQQEANRAEHQRDPFVLRQTKSILEFLKKQLAALEEEIASVIAQDDKLKHKCQRLQEIQGVGPATAWVLLADMPELGSLESGQPAALAGVAPYNQDSGPWRGQRHICQGRPLVRRALYMAALVAARRNPVLRPVYERLRAAGKAPKVALVALMRKLVELANDLLKKPDLKLVE

SEQ ID NO: 492300 - protein, 408 aa, unidentified
MERMVERSCGLDVHKKSVTACVRAPGAGGGQGQEVRTFGTTTAELLLLRDWLEAHAVTAVAMESTGVYWKPVFDVLEDRFRCVLANAGQIAQVPGRKTDVQDCIWIAQLLEHGLIRSSFVPPRPIRELRDLTRYRKAIIEDRTREVNRLHKVLEDAGIKLAAVASNVLGTSGRDMLQALVAGTTDPETLAQLARGALRKKLPALRQALTGRFRPHHAALLTHVLAHVEYLDEAIAQVSGGIDEALRPFAEAMTALDSIPGVSRRTAEVLLAETGGDMAVFPSARQLASWAGLCPGQHESAGKRRSGKPRQGNRWLRATLLEAAWAATRTDTALAARYRRVMRRRGHKKAIIAVAHAMLVIAYHVLHDRTTYRELGPTYDEQRQATRARRRAIHTLEAQGYRVVLEPAA

SEQ ID NO: 492301 - protein, 369 aa, unidentified
MGDSTMYVGLDVHKESIEIALASYDGGEARHYGRIAGDLEAVDKVISRLKKTHAKLNFVYEAGPCGYALHRYLTRKGFSCSVVAPSMIPKCSGDRIKTDRRDAIMLARLHRAGELTAVFVPRAEDEAVRDLTRSREDAVANHRRSRQQLGALLLRQNIRYTGKSAWTKAHLRWLSEVTMHQPTQQIVFQEYLNATQETDGRVSRIDEQLRIAVEGWRMAPVVSALQALRGVSLNVAATTVAEIGDMTRFDRPRQLMAFLGLVPSQYSSGPRVRMGHITKTGNGHARRVLVEAAWAHRFPAKIARAHQVRQENLPQAVRDIAWKAQLRLCRRYQRLLGKGKTKNVVVTAIARELVGFMWAIAREVKPIAA

SEQ ID NO: 492302 - protein, 349 aa, unidentified
MRTFQPPPETRFYAGVDLHARTLYLCVLDHDGRVRLSRNLPAAPEPFLKAVAPFREGLLVGCECVHCWYWLADTCRDQGIAFALGHAWAMKAIHGSKTKCDRQDAEAVARLLRGGNFPPAYAYPRERRGLRDLLRARLRLVRQRAELYAHVHTARRQANLPPVSSDVKYKSKRQGITADIADPFVRRRVEADLALLEPLDATIRRLEAEVEAAAREHYPTGLAVLQSAPGVGAVLSLTILLEIDAIDRFDTRQQFCSYARLCGAVQESDGKRAGTGNRKAGNAWLKWAFSEAAVLSAQKDERIGRYLDKLTSRLGKPKALSALAHKLGRAFYHMLRTKEVFDIDRFLRH

SEQ ID NO: 492303 - protein, 320 aa, unidentified
MDHFAGLDVSVKETSVCIVDDTGRIVREVKVASEPEDLLRVLANPIYQFKRIGLEAGPLSQWLFSALAEAGLPVICVETRHMRAVLKAQINKTDRNDARGMAQMMRAGLYRPVHVKTLRSQKLRMLLTHRKLLQSKAIAIDNDLRGTLRNFGLKVGVVRTVKFETRIRELVANFPDIAAMVEPLLVVRRTLREQFCVLHRRLLAIVRDDEVCRRLMTTPGVGPVVSLTYRATVDVPARFRKSKSVGAVFGLTCAKYQSGEVEWSGRISRCGDEMMRVMLYEAAQAMLRSNKWSWLKAWAMQIARRRGMKRRSWPWRADWP

SEQ ID NO: 492304 - protein, 344 aa, unidentified
MHYVGVDLHKEQSWFYVSNSEGKRVFSKSVPNSEETLNTVFKEIPKPFQLAVESTYNWYFFVDIAELYADKAFLANSYELKAFAKRNKKTDKIDAKLICDVLRKGYLPSVRIAPKNIRQARELLRYRVSLVRERTYNINKLKALLDKLGNISSGDFTTYKRLDAIRTTELPEIYGSVINGYISRIKFLTEKIRKMISYLEEVFGNDEEVQNLITVPGLSYFSAALVKSEIIDISDFTCFNRLCSYAGLAPRVSQSAGKDVHGPLSKNRRKMLQWILLEVVPHFIKADSERKEKYECLAKRKNRNTAKVIMARDLLRIIYCVLKEKRPYYANNFRPVAGVALNGV

SEQ ID NO: 492305 - protein, 341 aa, unidentified
MQDVTLVGVDLGKHSFHLHGQDARDKIVFRRKVSRKQLIEFFATFHACTVVMEACAGAHHMARKLATFGHQVKLISPHFVRPFVKSNKNDFVDAEAICEAASRPSMRFVTPKTESQQTLSALHRVCESLTRDRTKTINQIHGFLLEFGVSLPTGLTGVTRLPAVLAEHSLPPRLVAILERLYIHFKYFSKEIAEIDKDIKRQLADDDLGQRLMSIPGVGPITASVLASEMGDGKQYGCSRDFAASIGLVPRQYSTGGHATLLGISKRGDKNIRRLLVQCARSYMRQLGRQTGRLADWVRAVLMRCRVLRPRCSCRSGSKRYAHDLRGSFAEQIQLDRRRSQ

SEQ ID NO: 492306 - protein, 335 aa, unidentified
METLLKQCVGIDISKLTFTACVCRKFITGKQEFSNVETFTNNKKGFNQLIKWSRKITRPGLLPVVFLMEATGVYYESLAYRLHMLELPVCVLLPNKVNHYAKSLNVKTKTDAVDARIISQMGIEQSHSLWTPSSPIYKELKQMTRYYSALKKEHSQISNHLEALLCGERPSSFVSNSYKKLLSDIEKETERCVQAIRKLIAEDPVLSAKIEKLETIKGVGFITIVIVIAETQGFELVSSRKQLASYAGFDVVERQSGTSIKGRTRISKKGNSRIRAALYFPAMISSMHNPVFKEDYQRINEGKCCKKIGVTALQRKLLLLIYTLWKNGETFKVST

SEQ ID NO: 492307 - protein, 407 aa, unidentified
MRPIYERCCGLDVHKKTVVACRITPEDTQTRTFGTMTDELVRLREWLLAAGVTHVAMESSGVYWKPVYNLLEDQGMELLVVNARHVKAVPGRKTDVKDAEWLAELLQHGLLKASFIPDRESRERRELVRYRRSLVEQRAHLIQRMQKLLEGANIKLGDVASDVMGVSGRAMLQALAKGVDDPAAVAGLAKNALRRKLPDLERALTGSVRQHQRFLLRSQFRLLESLETEIAALDEEVAQRMRPFQVALERLDEIPGLGLRAAQQVLVETGLDMSRFPTVAHFASWARVCPGNNESAGKRRNMSIGGGNRWLRTSLLEAAWTVSHSRKPSFFTARYRRLAARRGKKRAAVAIAHSLLIAIYHILKDGVVFQDLGPAHFEQRNRDAIVQRSLRRLEGLGYKVTVEPMTA

SEQ ID NO: 492308 - protein, 484 aa, unidentified
MKKPSNKARRPAPPIVARGKGPIRPATSLPVVHPHAAGIDVGASELYVCVPEDAVSPGESPVRRFGVFTGELDKLVEWLQSCGVKTVAMESTGVYWIPPYQKLEAGGLEVVLANARHLRQVPGRKTDVKDCQWLQRLHSYGMLQGSFRPAEEYCRLRSLMRHRENLVDGCVQQVQYMQKALDLMNVRLHQVVSDLNGETGLRILDAILAGERDPKKLTSLRDERIKRSTPPEMEAALQGDWREEQLFILQQGRETYRFVETQLARCDAQIEKVLQQIVVVAERRPSLETPPNPTAAPTPRKKKERRPRKTGHGLKRDLRAELQRICGIDLTRVIGLNVLSVLIIISEIGVNMSRWRSAKAFCSWLGLNPGNRISGGKVLSSRTPHVVNRVSLLLRTLATAVGRSETWLGIFHRRMKARLGPAGANTATARKMACMIYHLLKYQEQYIDVDTLIYAEKIQRIRLNKLRKTAHELGFELLPIKEAA

SEQ ID NO: 492309 - protein, 387 aa, unidentified
MPQPNDLSRSLVALDQDSTIIAVVEMSQSSWLVAGMLPGIERQPRKKLEPSAERLLGLLHRWRDEAVKAGRKITRIALAFEAGRDGFWLARWLRARGVEAHVIHPSSVAVSREHRRAKTDRLDTELLKRGFLGWLRGERGHCTMARIPTIAEEDAKRPNRERECLVRERTRIVNRMKGTLARLGIRNFKPTLRKAAERLATLHTPEGSVLPPNVSAELQRNMARLGFVVSQIKEIEAARQKRLEQEPETEPHAMVRHLARVVGVGVETADMLVNEVLSRPMRDRKAVARYAGLTGSPDESGAKRREQGLAKAGNARVRRAMIQLAWRFLRFQKNSALARWYQARTADHRAATRKTMIVALARKLLIALWRFVTTGETLEGVVLRPAG

SEQ ID NO: 492310 - protein, 338 aa, unidentified
MTCIGFDHHKKWTQAAAVDDQGKIIREMRVLNDNSSLKGFLKGLPQPLKGVVEAGPTWGWIYDTLTELGVKMIVANPSAVRAIAEAKIKTDKIDARMLASLLRVGLIPEVYVPTEEVRSQKMLWRERIWLVRMHVRLKNRIHRLLNHYHLEVPEFSDLFGAAGRRFLEELKLPEPGNRILNAQLKLLQSYRLQIEEVQRWAVKATQGHPNRAYLESLPGFGKVFAPIVALEIDDPKRFASPGKLASYCGLVPSLYSSGGKSWQGGIGKEGNHWLKWAFIEAAWAAIRSSAYFRVVYQRLRQRKTAQVSIIACARRLCEIAYHLLKERRCYEERSFRCA

SEQ ID NO: 492311 - protein, 461 aa, unidentified
MAKKAKKVKTAKGAELRIVNPDAAGIDIADCIMQVCVPADRSKDNNRTFGAYTSDLHAISAWLRECGIKTVAMESTGVYWIPLFCRLQEDGLDVVLTNARDVKNITERKTDESDAEWLMLLHQYGLLKASFQPHNDAKRMRTLTRHRDTLSREASSIVLRMQKAMQQMNIKLTLVLSDITGKSGIRIIEAILAGERDPKRLAELADIQCKTPKEEITKALEGNWEEDLMFVLRQNYDTFKHYCIQLGECDAELEKLMENYRAEVAKVEGTSYSPAKKRRDYKKTRHTVGFDVERKAYEMWGVNVFEIPGISHLTALELMSELGHDFTRKFPSSKQFCCWCNISPNTKISGGKRISSHVPHRRNNVGLIFRSIASSLANAKNQLGNFYRRIRSRTGGKAAVIATAHKVAEIFFAMVANQTTYNPEKVGIDEKVLLEKRITRYKRELERITGTHIEIGNACVP

SEQ ID NO: 492312 - protein, 276 aa, unidentified
MENIALIGIDLGKNSFHIHCQDRRGKAVYRKKFTRPKLIEFLATCPATTIAMEACGGSHFMARKLEELGHFPKLISPQFVRPFVKSNKNDFVDAEAICEAASRPSMRFVQPRTESQQAMRALHRVRESLVQDKVKTTNQMHAFLLEFGISVPRGAAVISRLSTLLEDNSLPLYLSQLLLKLQQHYHYLVEQIKDLESQLKRKLDEDEIGQRLLSIPCVGTLTASTISTEIGDGKQYASSRDFAAATGLVPRQYSTGGRTTLLGISKRGGTVANSRW

SEQ ID NO: 492313 - protein, 351 aa, unidentified
MIIIGVDYHPSFQQIAFLIEETGEYDEQRLNHEGGEAERFYRDLKGKGIRVRVGMEATGYSRWFERLLAELDFELWIGDPAEIEAKRVKKRKTDREDARLLLRLMREDRFPQIWVPSPENRDLRQLLWHRHRLVQMRTRIRNQLQALAMNEGKRWKSKLFSQKGRAEFEKLALGPWASRRRSELLELLDRLNPSIEELTTAVEQEVNKRPEALRLMTHPGVGPITALAFVLIIGTPERFARGKQIGTYVGMIPIEESSGGKQRLGHISKQGSSLLRYLLVEAAQAAARYNPHWRRRYVRLAIRRHRSIAKVAMGRRMAIRLYWMWRNGCEYSPSFEFGSYAGQLEKRYGGN

SEQ ID NO: 492314 - protein, 405 aa, unidentified
MTQPATLHYAGVDWATRTHAVCVVDQTGAIRARFEVPNTGKSFTGLCRRLAKLKVAGVAIERPDGPLVEAMLEGGLKVVVVAPRQVKALRSRYAASGAKSDPADAYLLADVLRTDGHRLTPLTPDSDPTKILRALTRTRKDLQEARVALVNQLTSQLERCFPGAIGLFAELHSPIAVAFLRRYPTSHAAAALTQAKLAAFLRRLHYPGRTPVATLLSRIQTAPLSGISPAEAAGRAVCVAALLDAIQITARQERELEAEIIERLEVHADAKVFTSLPKAGHGVRAAALLAELGDVRARFPDNDCLAALAGAAPVTITSGKRRVVKFRWACDKKLRNALIDFADDSRHASPWAAKIYADALARTGRHPHAVRILARAWIRVIWRLWQDGVAYDPAKHRGAVRLLAA

SEQ ID NO: 492315 - protein, 343 aa, unidentified
MKLIRVGVDLAKNVFQVHGVDRSEKAVWRRKLTRESWLRVLLETVEPGCEIGMESCGGAHHWARRLQAHGFKVRMIGPQFVKPYVKSNKNDANDAEAICEAMSRPYMRFVTVKTVAQQDIQAVHRVRAELIKQRTAKANQIRGLVAEYGLVAPKELEHLRRALPCWLEDAENGLSERFRRLLNGLWGDLRALDARMTELDREITAIAQSDPAAKRLQQLRGVGPIIATALVAAVGNGEQFANGRQMSAAFGLTPRQHSSGGKERLLGISKRGDAYLRVLLIHGARSVIHHSKDKDDRLSQWVTRLAARSHPNVAAVAMANKTARMAWAMLRNGTDYQPTMVRS

SEQ ID NO: 492316 - protein, 384 aa, unidentified
MVTGITAYNRRPHMNSIVYVGMDVHKESYTICCYSFNTDEVLYKQKIASDYKLILKYLEQLRKRFSDDVEFVCGYEAGCLGYSLYHQLIDHGVKCIILAPTTMAITNKNRVKTDKRDAGNIARCLAFHTYSEVHVPTDEDNSIKEYIRMRDDQKINLKKTKQQILALVLRLGKKFEGGKTYWTITHMKWLKSLKLDGVFQETLDEYLITYEYFTDKINRLDQRIEELASGEKYQEKVKKLGCLIGVKAHTSLSMIVEVGDFKRFAKPEKFAAFLGLVPSEDSSGDSQNKYSITKAGNSHLRRLLVEAAQAYTRGAMGHKSVALKQRQQGNTPQVIAYADKANERLRRRFYKMTLSKGVNRNIAATAIARELACFMWGLMTDNVA

SEQ ID NO: 492317 - protein, 416 aa, unidentified
MNYGVGIDISKGKSTIAIMSTEGEIIEEPFEISHDIEGFELLESKLKKLPKENLKIVLEQTGTYHLPVLGYLLDKGYFVTAKNALEIKKYLDRGLRKAKTDKKDAYKLAEYVCDNWYKMVKARENDEIYDNLKFLSRQYLSTIAVQVKQKINFSNLCDLLFPGYYQLLDDNIFILGLEVFKKYYHPDIVKDTKESQFIKEVDKIAKKLGHKGAGISLANKIYTLAQKTVSPRPNNSYAQLSAINCADTLISTIKASKNIIAEMDKLARELPEYDVISNISGCGEKLTSRVIAEIGDVRRFKNAGSIIAYAGLDSPPYQSGKFEAKNRHISKRGNKYLRKTGYEVMKSIKSSCKDDNELKSYILKKESEGKLKKVAKIAGLNKFLRMYYGIVKKIQRVKYLVNIIYIILKRPRNRSL

SEQ ID NO: 492318 - protein, 411 aa, unidentified
MRLFVGDDWAEDHHDVELMNEQGRVLARKRLPEGVAGMARLHELTGEQLGEDADDAEVIIGTETDRGPWVAALVAAGYTVYGVNPLQASRYRERHGVSGAKSDAGDSHMLADMVRTDSHQLRAVAGDSPGAGAVKVVARTHKTLIWERTRQVQRLRHQLREYFPAALAAFEDLDAPDVLELLARAPDPARAAKLTRAQISAALKRARRRDIPGKATVIMAALRGAQLGQPPAITAAYAAAVRSLIAVITTLNEQVKILQGQVGEHFGQHPDAEIYLSQPGPGPVVGARVLGEFGDDPHRYASGKARKNYAGTSPITRASGKKKVVMARFIRNDRLIDALMAQALSALGSSPGARAFYDAQRAAGAEHNAALRKLANRLVGILHGCLKTRTLYDEATAWPHREKTPQSDIAA

SEQ ID NO: 492319 - protein, 350 aa, unidentified
MNYIAFDSHKQYTWASVESSDGKILREARIEHDRGALRHFLSVCEAGSPVAVETIGNWYWIVDEIEQAGMIPHLVHARKAKLMMGMVNKTDKLDARGINRLQRNGTLPTVWIPPQDVRDQRDLPRTRILLCQQRTRFKNRIHSALAKYALKPPHASDIFGVRSRPMIESLIQQLPMHASYTTQQLWRQIENLDEEIECLERRMDEVFAEDPRHQLLMTIPGIGKRLAVVILAEIGDVGRFPSPENFTSYAGTTPRVHSSGGKTRYGQLRPDVNRYLRWAFVEAANVICIHRRRWPHLQIANRYEQLLRKRGHQKAIGAVARRLAHAAYWVLRRKEEYREPSQQRVSSTVG

SEQ ID NO: 492320 - protein, 337 aa, unidentified
MTIIRIGLDIAKHVFQVHGVDENEQTVVRRQLRRSEIAKFFNRLPPTRIGLEACGASHYWARLLRGLGHEVVLLPPQYIKPYLKRGKNDANDAEAICEAMSRPGMRFVPIKSAERQAELMPLGVRDLLIKQRTAVINAIRGYAAEFGVIAAKGPVKVAELLQQAHAEEASVPAVALDMLRLLAAQLDALDVKLKQIETRLVAVHRENPLSQCLASQPGIGPIGAVSFALKVTDPKSFRSGRHFAAWLGLTPKDNSSGGRRRQGRISRQGNETLRKLLVLGATAVIRFARPGHASPWLLNLLARKPRKLAAIALANKMARTLWAMMVSGEVYRRPLPA

SEQ ID NO: 492321 - protein, 353 aa, unidentified
MTLYIGVDFHPHQQTVAWCETESGETQTIDLAHNVDDIRSFYNSLPGPAIVGIEASAKANWFENMLFETNHTLLVGNPVLIRKRATSRHKNDRRDAELILKLLLRDEFPAIWRRPPESTQILEILRMRRSLVRQRTQVLNRLQCMAHNAGLPKGKMKTARFQAVIKSLNMDETDSMQRTHLFRLLENLNEQITELETWLRQKAEPDTKVQLVMTQKGVGYLTGLAMVHTIGDLSRFTRVPKQVTSFVGLDSLEGSSAGKIRFGKISKAGSSLLRFQLGQACQIAARFDPKLKSFYKRLAKKKPKGVAKTATARKLLVKLSIMLRDNITADEFDRRGRTVGNARLTTRSEMTVI

SEQ ID NO: 492322 - protein, 368 aa, unidentified
MPVPGNRGIEYSKKPFKFSNTEAGFVTFKEWILDLKERHEKDKVVSGMESTGHYWFNLGKFLQDNEIKPVLVNPHHVKKSKELDDNNPTKNDRKDPKVIAGLVREGCYMIPYLPDGIDADLRTASNIRFQLQAELTRIQNRISRWFNIYFPEYKTVYGKPDAKSGMLILKAAPLPEDILTLGIDGVNQIWRDAKLRAVGKARAKTLIEAAEHSVGSKEGAVSARMEIRMLLEEYKSRNTRLQEVMLLIEELVRKIPMAEKLLEIKGVGIRTVSGFLAEVGDISRFNNPKELQKLAGLALVENSSGKHKGETTISRRGRKRLRYLLFEVAMSLVAKNPEFRELHNYYTTRRQNPLKKMQSLMAIAAKLI

SEQ ID NO: 492323 - protein, 413 aa, unidentified
MDVVHPRCAGIDCSKRDAKVCIRVQGRGRNQASSTVTTWGATTSQILALREHLLAAKVTCVVIESTSDYWKPFYYLLDDELNMMLVNASRVRNVPGRKSDVSDAAWLAALGAHGLVNASFVPPPPIRALRDLTRTRTHITRERSREIQRLEKLLEDAGIKLSSVATDITGVSGRAMLEALIASQRDPAALAELARGRMRQKIPELTEALTGRFSAHHAFMTRLFLDRIDAHTADIARLDARIEEVIAPFRPIRELLTSIPGFSSKIAEVFIAETGGDMSVFPSAGHLASWAGVSPGSNESAGRVKSTKTRPGNPYLKGALGVSAMSADRSKNTFFSAKYQRIKSRCGPMRALVAVEHALIITAWNMLTDGAFYRELGTDYYTLRKPAKTKARAVRQLEALGYTVTLTPLAAAP

SEQ ID NO: 492324 - protein, 275 aa, unidentified
MNIKRIGLDLAKLVFQLHGVDHHERVVLRKTLRRSQMLVFFAQLEPCLIGIEACGSSHYWARELTRLGHSVRIIPPQFVKPYLKGNKNDANDAEAICEAVSRPGMRYVAVKSEAQQSMQAEHRVRARLLRDRTALSNEIRGMLGEFGLALPVGLAALRRALPEILSQQEQWDNRFIRLLCELAEELQILDDRLARYDRRLKQLAQDDDRIRRLQEISGIGPVTASALVAAVGDARQFKNGREMAAWLGLVPRQHSSGGKNRLGHISKRTATCERC

SEQ ID NO: 492325 - protein, 344 aa, unidentified
MSTIRVVGIDIAKSVFQVCVWMVDGSVAWNKKISRSKLLDTIRQFEPGTLVAMEACATSHFWGRTFASMGYCVRLIPAQHVKAFVRSQKNDANDALAICETAFRPGIHFVSVKTTEQQDIKALRNTRQLMVEQRTALANQLRSLLAEYGFTIPVGILRLQQQLPELIEDASNSLTFTLRRLLSSLREDMQALNERITSLDSEIAALSSQQIAYRHLLTIPGVGPLIAAAFISEVDATQFSSGRELSAWCGLVPRQHSSGGKQRLSSVTKNGNRSLRTLIIHGARSVMRCVKKRDDSLSIWLQRLEARRGFLKTTVALANKLTRIIWRVLTDGIDFNMQKAVAIN

SEQ ID NO: 492326 - protein, 440 aa, unidentified
MRIMYERCCGLDIHKASIAACALISEKGKPQEETRRFGTMTADLRELAGWLQQKGIRHVAMESTGVYWKPVWNILEPAGFELLLANAQEVKVVPGRKTDQKDSQWIADLHKHGLLRNSFVPPRTIRDLRDLTRTRAILTQEHTSICNRIQKVLEDANIKLGSVASDVFGVSGRAILRALMKEENDAEALADLSKGLLRKKIPQLRRALEGQVTAHHRSLLTGQWSRMEFLEREIVDLETQIAEGMKPTPEETALTLPNTAEDAPAPLSPREEAIQLWMEIPGVGWTAACSMVAELGVNMDQFPSAAHVASWAALCPGNNESAGKRLSGKTRKGNVWLRRTMCEVAWAASHTKDTYFAAQFHRIASRRGNKRALMAVAHSILVTAYHMLKHKRHYQELGADFFDAINRDKVRDRLVQRLAKLGFDVTLKSKDSIASDSQKN

SEQ ID NO: 492327 - protein, 369 aa, unidentified
MKQPITYVGLDVHKDTIAVAVAEAGKRGEAREHGKIANTAAALRVLAVKLARSGGDLRFCYEAGPCGYGIQRQLSAAGHECVVVAPSLIPRKPGDRIKTDRRDAINLAKLHRAGELTSVWVPDQAHEAIRDLVRARLAAVRTLRQARQQLSGFLLRHGHHYNRPAWTLMHRRWLAGLRFEQPVHHIVLEDCIAAVEAATARRDRLEGHIEVALPEWSLAPVVRALQALRGMALVAAATVVAELGDITRFANPRQLMAYLGLVPSEHSSGDTRRQGGITKAGNGGARRMLIEAAWSYRFPPRISRELLLRQEGLAKPIRDAAWKAQERLCRRYRKLARAGRPPTVVTAAIARELSGFVWAIAQLARPMNG

SEQ ID NO: 492328 - protein, 344 aa, unidentified
MNKLSRVGIDLAKNVFQIHGVDRHDKVVWRRRLTRDKWLNALLEKIDPGCEIGMEACAGAHHWARELQAEGFTVKLIAPQFVKPYVKSNKNDANDAEAICEAMSRPNMRFVAVKTVEQQDIQAAHRIRTELIGHRTAKANQIRGLVAEYGMVAPQQLARLRAAVPNWLEDAENGLTSSFRCLLAGLWGDLKTLDHRVAELDHEINVIAQSDPVAKRLQQLRGIGPMVATALVATVGNAEQFANGRQMAASLGLTPRQHSSGGKDRILGISKRGDAHLRSILIHGARSVIRTAKTKDDRLSQWVTSLAERRHPNVAAVALANKTARIAWAMLRNGTDYEPDYIVA

SEQ ID NO: 492329 - protein, 411 aa, unidentified
MEKVYDKCCGIDVHKKLIVACFKCGRKQEIREFGATTRELLEMADWLKDGGCMMVAMESTASYWKPLYNILESCGLDAMVVNARHMKAVPGRKTDVKDAEWIADLLQHGLLQASYIPDKDQRELRELVRYRKSLVGERNRELNRLQKMLEGANIKISGTITDINGKSARNILEHILSGKEIDSAEYDVLYEKKIIAHNLKATKEQIIDDLNGVMSALQRKMMRVLLNHLDELNRHIRELDDDIDCFMKPEEKQAVDAIQDIPGIGETSAQAVISVIGTNMDRFPTDRHIASWAGLCPGNNESANKRRSGKTRKGNALLRDTLVVCAHSAVKNKSSYFCAQFARVSAHRGKKRAYVAVAHSMLIAIYHIIKDGVVFKDLGADYYNQFNRERKINAYLKKLKALGWEAPVVAA

SEQ ID NO: 492330 - protein, 339 aa, unidentified
MNSIAVGVDIAKQVFQVHYIDQETGEIVNRQLKRAKFLEHFANRARCLIGMEACGGAHHWARELTKLGHEVRLMPAEFVKAFNIRNKNDAADARAIWLAVQQPGKPVAVKTEMQQAMLALHRMREQLVKFRTMQVNGLRGLLTEYGEVMGKGRAALDKEIPAALWRIAARLPAALIDTLREQWNGLAKLDEQIAEIERRMREWKKEDRAVKVISEIPGVGLLTATAAVAMMGDPKAFSSGREFAAWAGLVPKQTGSGGKVNLHGISKRGDTYLRTLLIHGARSVLTRAKEPGPWVEQIKKRRPTNVVIVALANKMARTIWAVLAHDRPYRKDYVSVKPV

SEQ ID NO: 492331 - protein, 316 aa, unidentified
MDIKTVGIDVSKMTLEVDALPHSFRRQYDNDEAGIAALQADLLAQHGQMPIERIVLEATGGYETAASAALASAGLPVAVVNPAQVRHFARACGVKAKTDRIDAWMLARFAQQIEPPIRPLPHEEQRELSALVERRDQLVKIRAQEKTRLATATAEMRVSLKRHIEWLDEEIARHETDLSHKLRTSEVWKQKVALLETMPGIGKVSLFTLLGRLPELGTLNRRQIASLVGLAPFNDDSGKRVGQRYIRGGRMEVRNVLYMATLTAIRHNPAVRAFHERLTAAGKPFKLALTACMRKLLITVNSMLKTGQPWKDKRVT

SEQ ID NO: 492332 - protein, 420 aa, unidentified
MKEPNIGDFACLIGIDWADRKHDFCETDDQGKTYAYGVISSKPEAIHDWVMTLKERYPNQRIGISCELKKGPLVHALLKYDHLTIFSINPSTVAKYRKAFVHSGAKDDPSDAKFQVDILRLHMDKLRVIEPDSADIRALGQLVEYRRKLVQDRVDLSNRIAGILKSYYPQPLEWFKEKDTIIFCEFISRWPDLASAKRARKSTLINFFNQHNSRYSAVNENRIASIKSAFALTHDEGIIAPNRLMISLLVPQLKLLIEAIDVMDKDIKTRYKAQKDKAIFDSLPGAGPQLAPRLLVAFGSNRARYETAADMQKYAGIAPVIERSGKKSWTHWRYSCPKFLRQTFVEWAGQSVRFSFWAKAYYQQQIEKGKPHNTVIRALAFKWVRIAFSCWKTRTVYDESKYLEALKKRGSPLLQYAANS

SEQ ID NO: 492333 - protein, 387 aa, unidentified
METNSSVARIGMDVHRAFSRVTARDAGQRVVWRQRLDHRDRLALRARLARWPAATPVVLEGSFGWSWLSDELAAAGLAPHLASSRKVAQWRDLHGFAKCDRTDADLLSLLGFEPARLWEVWLPPPAVRQQREWLRYRMTLVQMQTALKNRIHAILHRHGLFPDVVKLFGCAGRRWLQQLVGPADSPLPASARDALKGYLQLLDHFRLQIARVTRTFRRQVQAQPTARRLTTLPGVKWVLAYTLLAEIGRVERFRSARHLVSYSLLAPRADDSGEEDDGPPTGRHVGRYGRRTLKWAYIEAAHAAVYKSSDLRAWFDAYTHGGQQNRNRGYIGVARRLCQRSYVIWKKEVDYQNEPPPRPGSRRRQPRQAPRPVLGQPAHPLAPVASG

SEQ ID NO: 492334 - protein, 377 aa, unidentified
MRKVRWIGMDVHAETIAVAVAEPGGEVRSLGVIPNRPESIRKLVKKLEPADSLRACYEAGPTGYVLYWQLTALGVRCEVVAPTLVPTKAGDRVKTDRRDAEKLARCYRAGDLTAVWVPDAAHEALRDLVRAREAAKKDQLRARHRLAKFLLRHGQRPPTGVTAWTQRYLAWIKTAVHFAQPAQEATLLDYLHEVEHMGERLERLAHAIDEAVTRAPAAMRAVIDALQALRGIALVSAVTIVAEVGQLSRFARAPQLMGYSGMGAREDSSGGRTRRGGITKTGNAHLRRILMEAAWAYRHRPSVGSALRKRQAVLSDEVNAIAWKAQHRLHGRYQRLLGRGKCQPQVVTAIGRELLGFIWAIGVAVETRSKTARAVAA

SEQ ID NO: 492335 - protein, 349 aa, unidentified
MEHVGMDLGKKESQIATLTEAGELIEKRMRTERDRLVAYFKDRPRAKILIEASTISEWVARLLEELGHEVVVADPNYAPMYAQRSRRVKTDKRDAQALAEACKLGAYRPAHRTSDEQCHVRAFLTVRDSLVRTRARWVTLAQAIVSREGFRVPTGSSGCFSERAERLELPEPLTAEIAPLLAMLAPLNEQIGILDEKLGELSRKDERVKRLMTMPEVGPVTAVAYVATLDGAGRFRGAHQVEAYLGLVPREWSSSEVQRRGHITKAGNSRMRWLLVEAAWRLATHKKRPETQALREWAERIARRRGQRVAMVALARKLSGILYAMLRDGSAYDPAMLKAALRSKAEQVA

SEQ ID NO: 492336 - protein, 410 aa, unidentified
MDTIVPHCAGLDVHKDSVYACVRHLPPGGTLRQDVRSFGTTTRDLLALSDWLVAEGVTHVAMESTGVYWKPIWNVLEDRFEVMVVNAHHLKQVPGRKTDVKDSQWIAQLLQHGLLRPSFVPERPLREMRDLTRQRAQLIQEKSRVANRIQKTLEDANIKLGSVASDVLGASGRKMIQAIIDGKQTPEQMAELALQKLREKIPQLREALNGKVTPHHRFMLRQLMQQVKHLEEQIDAYDRQIEQVMRPLELAAVTMLDEIPGIDIRAAQNIVAEIGADMSRFPSAGHLASWAGMCPGNHASAGKRQSGKTTEGNRWLKRTLMQCAWAASRAKGSYCQAQYRRLVGRRGKKRAAIAVGHSQLVAAYHMLRDGVVYEDLGGNHYDNLAESRRTKHFVKGLERMGYRVTLEKAA

SEQ ID NO: 492337 - protein, 354 aa, unidentified
MSNKSIATIATMGIDIGKNSFHVVGLDRRGAIVLRQKWSRGQIEARPANMPPCLIGMEACVGAHHLSRELQAHGHDARLMPAKYVRAYSKGQKNDFRDAEAIAEAVQRPTMKFVATKTADQLDLQALHRVRERLVRQRTGIINQIRAFLLERGIAVRQGLRFLRTELPGILAKRSDVLSPRMMRIIEDLAGDWRRLDERIEGLSADITSLVEKDPACERLMTVPGIGPIISSAMVAAIGTGDVFSKGRDFAAWLGLVPRQISTGDRTILGKISKRGNRYLRVLFVQAAWVVLIWPQSWERHGLKSWIEAAKKRLHHNVLAIALANKLARIAWAVLNKGRNFECARTNAMAPQPA

SEQ ID NO: 492338 - protein, 417 aa, unidentified
MSEYAALVAVDWADQQHAVCLLDPSTGEREQSIVKHTPAALQEWALSLHQRFAGQPIAVCLEQSRGPLIYALLQYDFFVLYPINPATLAKYRQAFSTARGKDDPTDADYLLDLLEHHRNRLRPWHPDDEKTRTLRLLVEQRRRLTGDRTRVSNRLTALLKGYFPQVLDWFEDIRTQLVCDFLERWPQLSLLQQARPATIDKFLRSHHSTSKPTNLRRLTEIKTALPLTTDAAVMTSSVINVKALVAQMKTVIAAISEYDRHLEALCQTHDDYHLFAALPGAGPVHAARLTAALGSDRSRWQSADELVTFAGIAPIIERSGKQFRIRWRYFCPKFFRQTFHEFAAQSIQDSFWARAYYSMQRAKGKDHHAAVRALAFKWIRVIWKCWHTRTPYNEVIYLESLRKKGSSLLKFAVDYQQ

SEQ ID NO: 492339 - protein, 343 aa, unidentified
MKIYALGIDLGKTVFHLVGLDASGQVVVRKRCSRTQLLAFTANLQVQLIGMEACSGAHFLGRTLREQGHEVRLMPAQYVKPYVQTNKSDYLDAEAIAEAVQRPRMRFVPIKTEEQLDLQALHRVRERWVMRRTAVVNQIRSLLLERGLTLPKGRSHLDEQLPRILEDGELNLSDSFRVLLAQLKLELEQLAARIEEMDRVIQKTARENEACQRLTEIPGVGPVTATALIAAVGNARAFGKGRNLSAWMGIVPGEYTTGGKQKLLGISKRGNKYLRRLFVQGARSVLQQRHKQAPGLSEWLAQLLARTHQNVVVVALANKLVRMAWAVLCKNERYRAPVFAGTT

SEQ ID NO: 492340 - protein, 421 aa, unidentified
MTTYAAFIGLDWGDKAHAIALQVQDSTSIEKSTLTHSAESLQEWIALLRQRFEGRPVAIALEAAHGPVIHALMEAEFITLYPINPKTSACYRRAFAPSGAKDDVPDADLLLNLLRQHRDKLTAWAPEDLHTRKLAGLVAARRQAVDLRTQLSNSLQTLLKSYYPQASELCGEDLFSPMAAKFLSKWPDLIRLKAARPDTLRRFYHAHTVRRADVIEKRLERIASARALTTDDAVVTVGVMGCRMLVTQLSTLARSIKEYEHQIQRCFAEHPEADLFRHLPGAGKTFAPRLLVAFGTQRDRYPTPNNLLMFSGIAPVTERSGGRVWVHWRWSAPRFLRQSFHEWAGESIRHSSWARAFYSLQKSRGKRHHAIVRSLAFKWIRILWKCWIDRVPYNESQYLQCLTRRNSPLLKLIYEKVASSS

SEQ ID NO: 492341 - protein, 410 aa, unidentified
MQPIVECCAGLDVHQATVVACLNNGPATQRSRKEVRTFGTTRQELGKMRDWLVASGCTLVAMESTGIYWRPVHAELEDHFELIVGNAQHIKNVPGRKTDVKDCEWISDLARHGLIAKSFVPPRPIRDLRDLTRYRRKLSQSQAAERNRLIKLLESANIKLSGLVSDVFGVSGRAMVQALIEGEASPIEMAQHARGRMRRKRPELELALDGNVDEHHRFVLRMPFERIKATEALVERLDERLREKLAPYAEVLGRLMQIPGVDWVIAATIVAEIGVDMSAFVDADHLASWTGICPGNHQSAGKQRSGKIRKGNVYLKTTLVTAAIAAAKTRGTYLADKHRRLLARRGKLRAAVAIAHKILLAVYHIMASGSDYQELGPTYLDRIDQRRTAGQLTRRLRALGYDVDIKLRAA

SEQ ID NO: 492342 - protein, 369 aa, unidentified
MLYLAIDQHAKQLTVCVRNADGDTLLRRQVSTRREKVQAFFQQLTQMDAQFMAILEVCGFNDWLIEVLRQWSCREIVLIHPQKPSKKKTDRRDAHKLADLLWVNRERLAAGETVHGLRRVYLVSQKERDDRQLTSLRKTLGQRRTRTLNKIHRIINRHNLIWEYPTKSFQTQAGRRWLAALELPEIDRLEMEMLLEEWKTCDGQIARVEAKIAERARAVEPGQLCSPTQLLMTAPGVSHYSGLTLACRIGPIARFPRPRSLANYFGLTPGCRNSGNAQDRLGSITKEGSKIARFILGQLVLHFLKHDPKMRQWYRRIKLRRGSKIARVAVMRRITTVFWHMLTHEEAYSIGGPPPRLRRDARTATSAAA

SEQ ID NO: 492343 - protein, 408 aa, unidentified
MQECNAAEQRIETSASVLTLAAMGVIGEAKQHAAYVGLDVHKDTIAVAVAEPGRAEPLYRGEIANTPKKVEKLIGKLSDAYDGGVLLFCYEAGPCGYGLYRQLIASGHDCEVVAPSKIPRTPGERIKTDRRDALKLARLLRSGDLTAVWVPDQEQERMRDLSRARDDLKAQERKARQQLNAFLLRHGHVWPKGKSRWTPAHENWLASLKMDDPWQQVVLQTYIDAERAAGERVAQLTDQLMRALPEWSLAPVVGSLVALRGIDKLAAIVLLAELGDISRFDSPKQLMAFLGLVPSEHSSGGRRRQGGITLTGNAHARRMLIESAWSYRFPARQTKHLKAKAVNASPEARGIAWKAQVRLCGRYRTLTRAGKNTKLVCVAIARELAGFLWDIVRQEMPRLSQGQAAASA

SEQ ID NO: 492344 - protein, 341 aa, unidentified
MQAIRFGVDLAKSVFQIHGVCALGEVVVQRQLRREQMLRFFAKQPPALIGMEACGSAHYWARELAKLGHDVRLMPASYVKAYVRRNKNDARDAEACCEAVSRPTMRFVPVKTVEQQSARAIHRARDLLVRQRTQAANAVRAMLYEMGLIASKGREGIAALIERIEAADTALPASLLVSLRALAAQWRALDAEVARLDQAIACQVRQDPVARRLMTVPGVGPLTAHAVICAVGDGRQFSSARDFAAWVGLTRLNHDTGGKTRLTGHISKAGDRSLRKLLVLGASSHLRRVRANHNAGSIWIQGVLARRPVKVAVIAQAAKTARIIWALLRSDQTYRAPAAAA

SEQ ID NO: 492345 - protein, 368 aa, unidentified
MDRKSSKLYVGMDVHKESIDIAVADEGGEVRHHGQIGGEMNALWRAVRKLESLGRQLVFVYEAGPCGFGIYRGLTARGHACWVVAPSNTPRRVRDRIKTDRRDSLKLAGLARAGELTPIYVPDVRDEAMRDLVRTREDAVMMQRQARQRLAALLLRNDVRYAGKTAWTAAHRRWIADVKLPQSAQRLAFEEYVQAVEEASARVQRLSQCIEQELAHWCWRPVVGALQACRGIQLIHAVRIVAELGDLSPFSHPRQLMAYLGLIPSEDSSGEHRQQGAITKAGNSSARRALVEAAWAYQYTAKVSALIARRQADVPKAALDIAWKAQVRLCARFRRLAARGVNRNKIVVAIARELAGFVWAIAQQVKPI

SEQ ID NO: 492346 - protein, 305 aa, unidentified
MKITTVGIDLAKNVFQVHAVDERATVVLRKQVRRDQMTAFFANLPPCVIGMEACGSAHHWARTLKSFGHDARLMSPQFVKPYVKSNKNDVADAEAICEAVARPNMRFVPVKSIEQQAVLSLHRVRQGFVKARTAQANQIRSLLGEFGLIMPAGISHIAKRVPSLLEDAINPLPGSLRQLITRLTEHLKDLDKLVGEFEAQIKAWHRSSELSMKLEKIPGIGPLGASALVASIADANSFANGRQLSAWLGLVPRQHSSGGKPALLGISKRGDVYLRTLLIHGARSAILVAHGREFRPNYAAQLLAA

SEQ ID NO: 492347 - protein, 448 aa, unidentified
MSKSKTKKEEVKRISQLTVINPKAAGIDVSDTEMMVAYPINSTQLEVRVFGCFTRDLHSIAQTLKEHGISSVAMESTGVYWVALFLLLEEFGFEVFLVNAKHVKNVTGRKDDESDAEWIQKLHSCGLLHASFQPDKMTRTLRSLVRHRKNLVQTSSTYLNRMQKALELMNIKLHTIISDIDGKTGLLIIEAILAGERNPGVLADMRDKRIKASREEIIKSLEGYWTTEHLFELRQCYQLYQIHQKMIDESEKEIEKQLCEQIASKNEGIMPHIPNIKRKASGKHKVSFNLTAHLNEILDIDVTKVVGINEVSALTIMSEVGTGMTRWKNHHHFTSWLGLAPNTKISGGKIISSRIKKKKHYAGQAFRIAANSLYKSQSPLGDYFRRLKAKVGAGKAVVATARKLAIIYYNMVANKEAFNPQALITFQEKYKANKINQLKKKIALLEAA

SEQ ID NO: 492348 - protein, 526 aa, unidentified
MASSNKHSKLRACDEGRYTSDGLKNVTLDDGTRVITSPSNDIKRPVCGAVDVHKSVLMAAACVTDGESLSAVFYVRQFTASNSDIRLMAEWFASYGVQDVCMESTGKYWIPVYDILEHNGIKPILTHPKYVKQAKGKKTDFRDAIHIANLFRMDLVVASFIPPADIRDLRELCRYRLKLTYIRTSEKNRFQNSMTISKVRLDSVFTDPFGKSASDIMSYLIHTDPDEVSDEKILSFVRHGVKASPEEILDSIHGYEFIGAQRDKLEVIQTHMDDLNKCIGMIDEKLSYYRLKYSKVIRHLVTMIGISEGSALYILGEIGADMSVWRDSDSLAYWAGLSPANNSSAGKKKTTKIGKGGHYLKPLMVQCALAAIKSTKKHPYFYYKYLTLKKRRGHKKAIIAIARKMLVAIYHMIRDDKDFAPIDYEQVVTRKQSQKELNLTNIIEFLGEHGVDPETIRTVETQCSQAGQAGEGTKTSKPKKSPQKKQPKSKTAATPTEQKPAKRRGRPPKSPQTKSQSSTQPAAVTA

SEQ ID NO: 492349 - protein, 325 aa, unidentified
MTYIGIDISKATFVAAFPHGKGYRTETFQNDVKGIRRFISKLDPDIHHCVMEATGNYCFLLLYLLDKAAIRASLINPKKIKNYARVMMSVTKTDSKDACLIADFGERFKPEPYKFPSEQIMILKQKKTVLRQLQKQLTATKNLLSSLEPLPVKDKKCVNSLKQTITFLEKQIKYMRQEMEAVVIEVFDKQLKLLTSIKGIGVTLATALIIATGGFTYFDNAKQLSRYIGICPTIEQSGTSVNIRGHINRNGDETLRSMLYVAAWSASQHNKACKECYQRLRGKGKSGKVAMIAVANKLVRQAFAVVSSNKSYSDGFVSTKPVTAS

SEQ ID NO: 492350 - protein, 386 aa, unidentified
MKRNDLSRSLAAFDQASTLVAVVELSLANWLVAGLVPHLTRQPIKKLRSDPDALLGLLLRWRDQATKAGGRIKRIVVAFEAGRDGFWLARWLRAREIEAYVIHPASIPVSREHRRAKTDRLDVGLLMRAVLGWLRGEPKHCHMAAIPTAAEEDARRPTRERETLVREQTRAVNRIKSMLIRFGIRAFKVKLRQASKHLEGLRGPEGGPLPPNTMAELRRDLARLQLIRGQIREIERTRLERLKRAPRQGTHPMIRMLASIMGIGIETADMLVHEVLSRKLRDQRAVARYGGLTGSPDESGSKRRERGLARAGNARVRRGMIQLAWRWLLFQNRSALAQWYRARTAGGTPALRKTMIVALARKLLIALWRYVTIGEVPAGAALRPAT

SEQ ID NO: 492351 - protein, 412 aa, unidentified
MQTLIQRGCGLDVHQATVVACLLIVRKDGKVQKQMRTFGTTTRELVGLCEWLLSEGCTHVAMESTGVYWKPIYAILEGALEIVVANAQHIKKVPGRKTDVKDAEWIADLLCHGLLRSSFVPPKPIRELRDLMRYRRKLVESQAAERNRLLKVLETANIKLANVATDVFGMSGRLMLRALIAGKATPQEMAELAKGLLRKKIPELELALDGKLEEHHRFLLELQLQRLEAAEKDLAALEQRIRQRIEPYAAQLALLDEIPGVDWILAAVIIAELGVDMSVFGSVSQLASWAGVCPGNNESAGKRKSSRIPSGNVYLKSALVEAANAAARAKGTYLRDKFFRLKARRGYKRAVVAIAHKILLAIYHMLSQQVSYNDLGDLYLDKLNKKHLTRNLVHRLERLGYAVTLTLQQKAA

SEQ ID NO: 492352 - protein, 470 aa, unidentified
MAAVMIGVDPHKASHTAVAISAAEEPLGELRVRACAVQAERLLEWAAAWPQRTWAVEGAGGLGHLLAQQLLSAGERVLDVPAKLGARVRLLAAGDTNKNDPNDARSVAIAALRSAGVREVRADDHAAVLKIWSKRHRDLGRSRTQVVCRLHAVLCELIPGGVSKHITAAAAARILESITPAGAVEAARAELAAAFLEDLRGIDARIRETRKKLAGAVQAAGTSLTGLFGVGPVIAAAVIGDVREVSRFGGRDRFAAYNGTAPIEVSSGQRKIYRLSRRGNRRLNHAIHMVAVTQIGHRHSEGRAYYDKKLAEGKTPKEALRSLKRQVSNAIFACLQADARRAAARAEGPGGQPGNDSVASAAGSHPEHRLFGQATPGPGHHTTTAASNPAPGPVSARGRAGHSPVAADLPPAKPQVQVKRPQPSQDGRPGGAARRRPHPAARKARGQGSLVKPQRPKGTSQAAKKTDGTP

SEQ ID NO: 492353 - protein, 341 aa, unidentified
MKSTTIAVDVAKEVLEVAVSVQPGQVSQQHRLSRAAFLKFCTHQPPATFLLEACGSSHFWGRRLDTLGHRVVLLPPHATRPYVLRNKTDRTDTRGLLEAFRNEDIHPVPVKSVAQQALTALHRLRSTWLATRTARLNTVRGLLREFGCTIPLGAHHVLARTSHLLADADSGVPDALRPALAAVCTEIRDLENRIRVVEDQLQALADHTPAVARLRSIPGIGLITATALVAFVGDVQRFRSGRHFASYLGLTPRERSSGLVRRLGSISKRGDVYLRMLLVHGARAVLWAARKRRTPDRLRAWALHLQHLRGHNKAAVALANKLARIVWAVWKHDVDFREMPA

SEQ ID NO: 492354 - protein, 343 aa, unidentified
MQVSTIGVDLAKNVFQVHGVDSEGKVVITRQLRRKQVIEFFSKIPACLVGMEACGTAHHWAREISKLGHTVRLMPPSYVKGYVKRSKNDAADAAAICEAVTRPSMRFVSIKSTDQQALLMLHRTRDLLIRQRTQLINALRAHLAEFGLVAETGREGLAQLAEIVTDESNRDALPPAMKQALQAIIDQLAALELQIGALDRAIHAHHRVNDMSCRLETVPGIGVIGATAIASTVTDPSNFKSGRDFAAWVGLVPRQHSTGGKERLGGISKQGDRYLRRLLVSGATAVVRNARQHPQKHPWIMRLLARKPAKLVAVAVANKMARIAWAIMAKGGYYRAPELAAAA

SEQ ID NO: 492355 - protein, 364 aa, unidentified
MKRKVYVGMDVHKETIQIAILPSNTKDLVKEQQIKHEEGQIKKFIQKLKSEGTEIHCCYEAGVTGYPLYRYLKTLGVNCIIAAPGKIPRQSSDKIKTDKRDAIKLARLLRSGDLESIHVPSEEDEAVRDYLRSRDSLRLDLGRNRQRLMKFLLRKGITYSTTKYWTASHYKWLNNLHFENEILQATFNDYYSRVRVQEENLKAMDQKIREIAESEPYREKVGILRCFRRSGLSNCNVLLSEVNDFKRFKTAGSFMSFLGLVPGEYSSGPKRKQTSITKTGSPRLRRILVEAAWQHRFPGTGSKVVAARRVGQSALVVSLAEKASLRLHKKFKSMQLRGKTPQVMITAVSRELSGFLWAAMNLVA

SEQ ID NO: 492356 - protein, 413 aa, unidentified
MDVLHPRCCGLDVHKSSISACILLREAGRVQKHQRRFGAMTQDLRELAEWLRQFGVTQVAMESSGVYWKPVWNILERQFTIVLANAQHIKNVPGRKTDQKDAEWIAQLLQYGLLRPSYIPCEIIRDLRDLTRMRASLSQEASRISSRIQKVLEDANIKLASVATNVLGKSGRAMLEDIITGEDDPEHLASLALGHLRVKIPQLRLALEGKIRSHHRFLLRRLLDQMQFVEHEIALLEDRLEDIGQQRPELSQAVARWDTIPGIDRVAAWALLAEVGDNMAQFPTAEHLASWAALCPGNHESAGKRLRGATRQGSPWLRRMACQCAWAAARTKNTYLSSQFRRLAARRGKKRAIIAVAHTLIVIGYHLQKNQSNYDDLGGNYFDRIHSDGLKRYLVKRLQQLGHKVTLEPIEAA

SEQ ID NO: 492357 - protein, 397 aa, unidentified
MIAVGIDISKAKSTVAVIDSDGTVLASPFTMAHTQPEMESFVTYLKGLGEPTTILMEYTGHYHYPVLKKLQDEGFPVCIVNPYQMKKYGDVEIHKAKTDKKDALRIAAYALEKSYKLVPYSSMEQKYEDLKFLSRQYSQRITYVAKLKVQLIALLDQTMPGITRILPLNSRNPEKCALLLFIKRFKSFDEIQRIGKARFLASYDVLAKKTSERSASSKGLSIYELAVDSITTRGEDPYIWLSQNQCVDLLSTTQNAADEIISQMRNIAETIPEYKVLRAMHGVGDRLGPIILAEIGDVHRFHSGKALNSYAGNDAPPYQSGQFESRNRHISKRGSSTLRKACYEVMQALKLTKPQDDPVSLFMLKKEQEGKPFNVAKMAGVNKFLRIYYARAMELYK

SEQ ID NO: 492358 - protein, 405 aa, unidentified
MEYNAVGIDVSKGKSMVCIERPMGEIVFSPFEIKHTKSDVDRLIKRIQGLNGDTKIVMESTGRYPLPLLTRLTDAGLFVSMVNAKLIKEYNPDNSLRKVKSDKADAKKITAYTLDKWLLLKQYGNMDKLREQLKTINRQFDFYMNQRISLQNNLIAMLDLTFPGVSNYFSSPIKQDGHCKWVDFAYTYWHADCVSGKSFKSFSEHYQNWCGKHGYYFSKEKATSLYNNAKELITILPKDSATKQLIRQAIDVFNTMSEAVERLRKQMDQIASQLPEYPIVMEMTGVGHTLGPQLMAEIGDIERFTKRSAITAFAGVDPGVNQSGSYNQQSVHTSKHGSPELRKTLFQIMQILIQLAPEEDLVYKFMQKKRTEGKPYYVYMTAGANKFLRIYYGKVKAYLSGLKNQ

SEQ ID NO: 492359 - protein, 400 aa, unidentified
MCVLDRDGHVCERRQVKHTVPDLQAFVEALLARAHGDATAVAVGIEVPRGALVELFVERGFAVYAINPKQMDRFRDRFAPAGAKDDRRDALVIGDSLRTDPQAFRQVRLDHPVIIQLREWSRIDEDLGVELTRLTNQVRDLVYRSAPGLLALSPAADEPWVWALLRQAPTPATQRRLSERRLDRLLRDHRIRRFTATQVRDVLQAPAVFTAPGGVDAVAAHLQVVLPRVELIAAQRREAARQLERWLEVLETEMPAEDQREHSDVAIVRSMPGIGTRVAARMLAEASQPLVDRAYHVLRAHLGVAPVTKQSGKRRTVSMRYACSLRLRNAAYHWARAGTQNDPASRTYYTTLRARGHSHGRALRSVADRLLRILMTLLSRGQVFDPHHGQPSSLPVAAGA

SEQ ID NO: 492360 - protein, 322 aa, unidentified
MFILGIDIAKRKYDVALLRPDGKMRAKAFANTAAGHAELLAWLQRQEAGLVHACLEATGTYGVSVSEALSDAGHTVSVVNPAAIEAYGRSRLSRTKTDRTDARLIAQFCVAHQPPAWIPAPREVRELQALVRRLDALEGMRQQERNRLAADAGSATVSASIQHVIDTIEDEMVSLKARIHDHFDQHPRLRQQRDLLTSIPGIADTTAAILLAEFGPMARFSQASACAAFAGLVPREKRSGTSVHRKPMLSKLGNAALRKALYYPALTALRHNPIIKAMRERMLARGKHRMVIVGAAMRKLVHLAYGVLTTETPFHADFAKNR

SEQ ID NO: 492361 - protein, 367 aa, unidentified
MKKHTATNQSQALNDLSACTTVAVDLAKRVFQVAGEDALGQVRYEARIKSREAFYEFLCKLPPSVVVLVETGPGAQAWARQLQGQGNLARILPARLVEGHRSGAKNDRNDALSILRAGRDSKISAVPIKSAASLAMQALHRARQGYVRRRTAMSNQMRGLLLEHGVALAQGDAAISHVIPRVLEDATQPLPEILRELIDELLGEWRQLGERINVLSGRLEATANADKTAKRLMTVRGVGPIIATALLAKQTEPERFANARLYAAYFGMVPDQHSSGEKIRLGKMSKRGDGYLRSLMIQGAHAVLQQLRPDSQQPDDRRLLGWLSRLGRKEAAVRLANRNLRIAWVLLQNEQTYQRQPVNDRQAEMSH

SEQ ID NO: 492362 - protein, 353 aa, unidentified
MAHPTLPRITVGVDTHLDVHVAHAADQLGRRVGHRPGPHHPTGYQHLLAWARGLGEPVAWGVEGTGSYGAALARFLTASGQVVLEVNRPDRQARRRQGKSDPVDAQAAARAVQAGEVTVTPKAGDGQVEMIRSLRVARQTAMRARTQAVNALKALLVTAPAGLREQLRGLSATRLVRTAAELAPGPITSPLAAAMLALRTLAGRHQALSAEITTLTSELDRLTSTAAPKLVALFGVGSDSAGALLVAAGDNPDRLRSDACFAMLCGTSPIQASSGKTTRHRLNRGGDRQANAALYRIVLVRLCYDQQTKDYMARRLKEGKSKKEIIRCLKRYVAREVFAVLNQMGQGRPTAAV

SEQ ID NO: 492363 - protein, 490 aa, unidentified
MARLLEHSPRPESTYRPTWAVVFGKAEKMQDSDQRKDNADSSKQIAGLPVVRHKVAGIDLGSERHWVCAATVEGSGREVADFGATTCELIRMAQWLKARKVESVAMESTGVYWIAPHEVLEAEGLEVMLVDTRQLARVPGRDKKSDPFDCEWIQRLHSCGLLMGSFRPKEAVCMLRTLVRDKGNLVAEAGDWLRRMQKSLDQMNVRVHRAVSDIDGVTGMAILRAIVDGERDARQLAKLRNPRCHKSEEEIAEQLSGHWREDHLFSLRQGLKMYDAIQERITDYEKEILQKLAKMEREECRGQEVPKSKKPQKGRAIQSRGAEPMRQALYRMSGVDLTGIDAIGVETVQVVLSEYGPDLSRFPTEKQFVSHVTLAPHKPTSAGKPVKKKKRNSASTRVAAALRMAASSLRHSETALGAYYRHIARRIGGDVAVFATARKLATIIYRLLRWGQPYVDEGAQTYEQRYRENRIKSLTARAKELGYQLTPTTA

SEQ ID NO: 492364 - protein, 414 aa, unidentified
MKLTITCGIDWAEDHHDVALVDETGKLVAKQRIKDDADGFRRLLALLAEAGDCAEAPIPVAVETARGLLFACLRTTGRKVYSINPMAVARYRERHRSARAKSDHADAMTLANILRTDADVHRPLPADSELVRAIAVLARAQQDTVWNRAQLNNQLRSHLKQYYPAALVAFAVRGVGLDSREARAVLAVAPDPNAAARLTRAQLRAALRRSGRQRNIEVWVERLRTIFTGDYLHQPPLVEQAMGRQTLALVAQLDAACRAADDLAEAAAEAFAGHPDAEILDSFPGIGPLTGARVLAEIGDDRTRFADARALKAYAGSAPVTIASGKSHLVRHRRVKNQRLAAAGYVWIFGALPSPQIKAEYDRRRNLGDRHTAAMRNVFNRLLGCLHHCLQTGQKFDPGKAFPAASTAPVTLAA

SEQ ID NO: 492365 - protein, 440 aa, unidentified
MNSTTNSMSKSTLLVQQNQNITDAGRIVNVGFDVGSDSLYWAMELSGKSIRGQCENNSSDIRTTLEEIRNEVQQHGDYQIRVLCESTGIYHRRLLQLADELGMRTALVHGEAVAKFRTIQFADHGKTDQRDPKAVLTVAKVGKLIQDRKLDKHYAQLRELHRLVLRCEARIKVAKCELHADLRSLFADLRLDKSVLYGPTGRALIEQFAGNPHAILAVGEEAFYGRMKACSKHTKKATLKKLWRAANDTASTQKDDLAATLAEIRATAVQQLYTEITTFLQQQRQIESQMQELYLTLQSSDPRLPAPRKGVVTLRMLSRLVAEMGPPDDFRTVSQLMRYAGLNLCERQSGKWRGRTTISRRGRSELRYVLNLMAIPLVGRGKLFGDYYWKKKEADKMPGQKANVCVMRKILKMFYGWYKSGEPFDPGRVFVMASEHAKAA

SEQ ID NO: 492366 - protein, 343 aa, unidentified
MSEVSIIGLDIAKNVFHAHGADAGGRALFSRKIGRGKLLEFFAGHQRCTIALEACGGAHHWGRELTRLGYEVKLIPPAYVKPFVKRNKNDAADAEAICEAAQRPSMRFVAIKSEEQQASGLVFRTRDLLVRQRTQLINAIRGHLTEYGWVAPKGPSHVAMLGDLLEDEMASSLPEAARAMFRTMLDLLEELNEKIGDLDKEIARRAREDAVARRLMTIPGVGPITATALAALAPPADTFTKGRDFAAWLGLAPRQMSTGGKQKLGSISKMGERTLRRLLIIGCSAVVLQASKRGAPKGSWLEQMMARKPRMLVTVALANKTARIIWAVLVKEEDYRAPVAAAA

SEQ ID NO: 492367 - protein, 356 aa, unidentified
MKAKVSKQHVGIDIAKDDFKVCFMQRLDNDKVKVKSSTSFKNTSAGYKSFKNWVMKKAVDGLAITFSMEATGIYHENLAYYLYEQGYTVSVLLASTVKAYNKSLNVKTKTDKSDAKCIAQMGIERNLPPWRPMSPKMRQLKQFTRERGAILKERTNLKNRLHALSHGHLPEKEVLKLVKQRIKLLDKQLALMDKKIVQTVKEDEFLKERIEKICVLKGLGIVTVATIVSETNGFQHFTSKSQLISYAGYDVIENQSGSSVNGKTRISKKGNSRIRKALHFPAMTAKKYEPVYGMLYDRIFERTKIKMKAYVAIQRKLLIMIYTLFKNNEAFDSNYHKKLSNDDKSCRQGTMPAYSG

SEQ ID NO: 492368 - protein, 347 aa, unidentified
MNQITRIGMDTSKYIFQVHGVDASEQPVLRKRLGRKQMLGFFAELPPTVIGMEACGSSHYWARELKQLGHEVKLIAPQHVKPYVTRNKNDGRDAEGLCEAMSRPTMRFVAVKTPEQQAALMLAGLREQMITRRTQISNAIRGYAAEFGITVAQGLNQIEPLLARLAQDESVPGLARDLFALQGRDYAQLQMELKAIEARLMAWHRANADSRRLAKIPAIGPIGATTLVMKTTDPGAFASGRHFAAWIGLTPKDHSTAGKTRHGKITRAGDERLRSVLVAGATAVIQQAKQGRGHPSPWLIALLKRKPPKLAAVALANKTARIAWKLMVTGESYDGARMSKAPLIAAT

SEQ ID NO: 492369 - protein, 370 aa, unidentified
MMVLGVDTHKRTHTTVAADQVGREHAQRTLPATDVGHQRLLEWARESYPGPSSERLWAIEDCRHVSGRLERALLAAGEQVVRVPSQLMAGTRRGARTRGKSDPIDALAVARAALREHDLPVAHHDQPSRELKLLVDHRDQLVSRRTEIINRLRWRLHELDPELVVPERTLDRPGTQQRLADALGDPRRVETAAAEGLDLQRQLALDELSEVIGLTDRANGLGKPIRSRSQQQAPELVELTGCGPLTAAKLVAETAGVHRFRNEDCFAAHAGTAPIPVSSGDRDRVRLSRGGNRQLNLALHRMALTGPDQALAQARIAGPGRDYYQRKQTEGHTKSEALRALKRKIARAVYKALRRAATRQSTSDCTPALT

SEQ ID NO: 492370 - protein, 352 aa, unidentified
MDRYIGIDAHGQSCTPGVVGPSGKRLRSVVVETNGQALVEAVRSVVGRRHICLEEGTQSAWLYELLSPFAEDVVVTVPPESRGSKDDVRDAWKRAEELRVGGIQTRVYKAPTYLAGLRNSVRAYVFAVRDVVRAKNRLKSVFLSRGVSIDAGVYDPDRRGKWLKRLPTAHRQLADRLARQLDELEPLRDEAEEWLLKESKSHPIIRKLDTAPGMGAIRSATVVSVVADPHRFRTSRQFWSYCGLAVVTHSSANWIKDRHGKLVRTENTYTRGLTRKRNASLKAVFKGAATTVIAQLPEHPLNLNYQRMLTAGTKPNLAKLTLARQIAAIVLSMWKHGEAYDPKRQAVVTDKT

SEQ ID NO: 492371 - protein, 342 aa, unidentified
MQITTIGLDIAKHVFQVHGIDASEKVVVRKQLRRSQVLAFFKALPRCLIGMEACATAHYWARELTKLGHRVQLMPAKDVKAYVKRNKNDAADAEAICEAVRRPTMRFVQIKSVEQQGQLMLHRARDLLMRQRTQLINALRAHLAELGIVAAQGREGVKELLKIIASEQDARLPVDAHASLVVLAAGLRALQTMIGSIEKRIVAQHRSNEASKRLRSIPGIGIVGATAIVATVPDPKAFRSGRDFAAWIGLVPRQDSTGGKQKLGPISKQGDQYLRRILVVGAHAVLKQARQQPEKYLWLTRLLARKPFRVVAVALANKMARIAWALLAKGGTYRVPVLAAAA

SEQ ID NO: 492372 - protein, 369 aa, unidentified
MKQVTTYVGVDAHKKDLFIAMLVGQSPTPVTWTVPNEPNAVKRLVRKLERDAPGPVRMCYEAGPCGYALQRQVATARVSCQVIAPGLIPRKPGDRIKTNRRDARKLAELFRAGLLTEVRPPTPEDEAVRDLCRARDDAREDLQRSRHRLGKLLLRRGLHYTEGRNWTKGHRRWIAGLEWTQPAERVVVDDYLLAIDHLEARLMELDARLVEVAATEPYRAHVGWLRCFRGIDTLTAILILAELHDFRRFPSPRALMAYLGLVPGEDSTGEKHRRGRITRTGNALVRRLLVETAWHYQHRPSIGVALTRRRKGQPGRVIAIADKAQQRLCRRFRRLMEQHKPAPKVAVAIARELAGFLWAALQPASVPAS

SEQ ID NO: 492373 - protein, 410 aa, unidentified
MERVIERGCGLDVHKKTVAACVRVPGPQGAREQHVRTFGTTTAELLALRDWLEAYGVTHVAMESTGVYWKPIFYVLEDAFTCVLANAAHIAQVPGRKTDVKDCVWIAQLLEHGLVRGSFVPPEPIRELRDLTRYRKALIHEQTREANRLHKVLEDAGIKLASVASDVLGASGRAMLEALMRGTSDPDVLADLARGKLRKKLPALRQALAGRFRPHHAFLVSQLLAHLDYLDEVIETLSTRVDEVIAPFAEEVSRLDTIPGVNKRTAEVLIAEIGVDMGVFPTAAHLASWAGLCPGNNESAGKHKSGRTRKGDRWLRATLTEAALAAGTRSTKSAFAARYRRVMQHRGHQKAVVAVAHAILVTAYHLLARKTTYDEPGRDYYERRHAERVRHRAVQLLERQGYRVVLEPAA

SEQ ID NO: 492374 - protein, 383 aa, unidentified
MTTGKMLWRNRKERKEWARRLQSEDPGLEVVHPHAAGIDVGNSAHYVAVRPERDPEPVRRFECFTADLHRLADWLQSCAVRTVALQSTGVYWIPLYEILEERGFEVYLVNARHTKNLPGRKSDVQESQWLLKLHTYGLLNNSFQPVSEIRVLRTYWRQRGEHVRGAATCIQRMQKALTQMNVQLANVISDISGLTGQAIVRAILAGERDRRKLATLSDPRVHASQEEIAKSLEGNWRPELLFVLQQEVDMYDTYQKRIAECDQRLQKQLASLTGALPAIQPQTQKPKTKKPAAKNAPRFDLSNELQRVTGVDLTRIDGIDVMVAQTLLSEVGLDMSRWKTESNFASWLGLCPDNRITGDKVRGRGTRRVVNRALPHSDRLPTP

SEQ ID NO: 492375 - protein, 410 aa, unidentified
MIKENYIYVGIDLHKETHTAVMIDCYNQKLGEITFPNRPADFPKLVAKVKKCNTDGKTIVFGLENAYGYGRPLAVWLIDKGYFVKDVNTAISHRQAKHRGAMYRKSDSDDAEAIALATLNMLDKLPDACPNDAYWSLGQLVHRRDNIMKQRTRLVNQLHEQLCIAYPSYKSFFNDISRPTALYFWEHYPSKKYLKGKSVEDLRAELVPVSHNKCSTKTCEKILDAVASDKVKNNAYQDARDMVTLSIVSDLQHYDSQLAEVDKMLEQMYKMLGCTLTTIPGVNVITAVKILAEIGDIKRFSNANKLAQFAGIAPLHLSSSGKGKDVATKQGNRRLQATIYFLAIQMVQVSSNGTPRNSVVRAYYEKRKAEGKTSQQALICISRRLISIIYGMLKHGTEYRMPVVESAGEK

SEQ ID NO: 492376 - protein, 395 aa, unidentified
MYSFLVGADVSKDFFSASGLSAEGKEWFSGTYEMNSHGFSEFMKVLSSQGEKLDQMLVAMESTGCYHINLFSFLSSQGIRTVVVNPLLIANFAKLSLRKTKTDKKDALTIARFLLDHHEEISQFSISQDHQDLRDLSRERESLSHLISATKVEIKRVLRTTFPELESIGNLFSGVMLGFLQQYPSARLVRGAKRKAIAKALMGPRVGGKLTFTAEDIVKAAQSSVAVVSPAKEIILQGKIATLLHLQERLEELTKLLTDLCKATRVEDLEILRSIKGVGPNTAVPFLAEVGEVKNFTSSKKLIAFAGLDPSIHQSGKFLGTSKLSKRGNRHLRRAVYLMTTSVVSQNGFFKAYFLRRKEEGLPPQKALFAVAHKLIRVIFAMLSNRTYFKPKEAI

SEQ ID NO: 492377 - protein, 395 aa, unidentified
MKVNELQVAVDVGAHAHRVAVGDGSGGLLEEFDLEHTAAGFAGFFTRIERLRGKRSAPVAVAMEGFNGWARPLDRQVLEHGWRLYNVNNLKLARYKEIFPAPAKTDAIDARRILELFRLRGDLAVARGVLQEIVAATQEAEQLKRLTRRRRQLVTEKARVLNRMQADLQAVCPGLLAITAEADNLWFMSLLSAREDIRRLAGLHQSSLRALEGVGRAYGAKIQAWQREALFSHEAEWAGPMIVADARRVLALKGEIAALDQLIEPLTEGCESARRLRTIPGFGPTCSGELAGEIGAIERFRSEASLALYLGMAVLDHSSGTHTGTRRPRQVNTRAKAAMMIAVARHMAQVPTSRAYYDKKRAQGKAHNQAVRALGRQLVRVIWSMLKHQRDYELR

SEQ ID NO: 492378 - protein, 340 aa, unidentified
MSLYGGIDLHANNSVIVLLNEQDEVIYQKRLPNALTTILEQLAPYHTELQGLVVESTYNWYWLVDGLMEASYRVHLANPAAIQQYSGLKYTDDHSDARWLADLLRLGVLPEGYIYPKADRAVRDLLRKRAHLVRQHTANVLSVQNILARNTGARFSGKRIHELTKQDLTTLLADETQVLAVASSLVVLDCLRQQIKTLEKTVHKRLRHTPSYEQLLTVQGIGTILAQTITLETGAMSRFPSVGNYVSYCRCVDSTKISNGKRKGTGNVKNGNPYLAWAYMEAAQFALRFQPEAQRFYQRKLSKSRNNTVLARKAVAHKLARACYYIMRDLVPFEAMKAFG

SEQ ID NO: 492379 - protein, 350 aa, unidentified
MYENSANMSSQTIGLDLSDETFTCVVLSPDGNTLAEAKFPTSKEGLESAFGRAPTSRIVLEASTQTPWVARKLQAMGHEVIVANPRRLHLISKSSRKTDRNDADTLARIGRVDPQLLHPIWLRDEKTLAVRAALRARRQLVWSRTRLINLVRAECKVHGTTLPTCTSSAFARRARPAMPEILQPFLTPVLDTIEALTRQVCLYDEQLERVSREEFPETQLLRQVPGVGPLVALTYAVTLGDPKRFRESRQVGAYLGLVPRVYQSGLNDPNLRISKEGDRDLRTLLVTAATYILRRSSPDSAIKRFGRRIATRGHPRDKARARIAVARKLAVLLHRLWMTGEVYQPLPPKA

SEQ ID NO: 492380 - protein, 352 aa, unidentified
MDATTVAVDLAKDIFQVALANRAGRVVERTRLTRAQCSRFIDGLDAGTDVIMEACGTAHDWGRRCQAGGLRPRLLPVQYVRPYVRRNKTDRTDTEARLEAARCGDIRPVPVNTIEQQTLQALHRVRTQWQAARTARINVVRGLLREQGLPVPVGARTILARVAAILEDAEVALPDLLRHTVALVVDEIRGLDHRIATIDRQLAKVAAEHPVAQRLQQIPGVGVLTATAMVGAVSHIHAFRRGREFASWLGLTPRESSTGGRRSLGRISKRGDVYLRCLLTHGARAVLLSAQRTSRTAPQRLTRRQAWMVATAARRGHNKTAIAVANKLARIIWVVWHKEVDFQSQPRVTHVA

SEQ ID NO: 492381 - protein, 313 aa, unidentified
MEQSVQELVVGIDVSKARLDVAAAGEYWSVTNAFEGIGKLVGRLKALLPSLVVVESTGGLERGVIAELSAAGIPIALVNPGRVREFAKSIGLLGKTDKIDAGLLVRFGEGTKPKPTQLPSAEEQQLSAWMTRRRQVVDMLTMEKNHLCSAHPATRASIQKIMDILQQELDDLNRQIDDFIDHYPDFQQKEDILRSAPGVGPVTAAILLSDLPELGSMNRKKVAALVGVAPFNNDSGRHRGKRRVKGGRPSVRNVLFMATLSAIQYNPIIHAFYLQLLARGKDKKVAIIACSRKFLTILNAMIRDRRNWCDLPT

SEQ ID NO: 492382 - protein, 453 aa, unidentified
MKKETPKMGIVKMGSGLPVFNHYAAGIDIGDTLHCVAINDGKGGHEVKTTSAFTCDLHEIVHYCKSNGVTTVAMESTGVYWLVLYLLLEDAGIEPYLVNARHAKNVTGRKKDDTDAIWLQKLHTCGLLQKSFQPDNEIRLLRSYTRQRKSLIFLAADSTRRMQKALELMNVKIHTVISDILGKTGMAMVKAIIAGERNPEILCKLCDPRIKASREDIIKSLEGIWKDEYVFMLEQAVESYEFLQKQVKSCEEKIQQQLLKQVALIKDGDITGLEETPKKKSKAKAKKNQFDFSLLPYLIALAGVDLCKIPGISQVTALEFIAEVGLDMTKWKSSKHFAAWLNLTPNTKISGGKIISSKMMKKHNKAGQILRQAASTLISNKTAIGDYHRSMQARLGGKGAALATAHKLARIIYTMLLKQTEYNPGRIIENHEKSKEEKIKKLEKQINRLKQVA

SEQ ID NO: 492383 - protein, 318 aa, unidentified
MDNETIDFEQVVAKGCGLDVHKETVVATVSGTEIKRETRTFSTFTRSLKELKEWILSLGITHVAMESTGIYWKPVFNILEGSGLTILIVNARHIKYVPGHKTDKKDSAWIAKLLLAGLLKGSFVPPVEIRQLRDMTRYRRKLEGAITAEKNRMIKMLEDSNMKLSSVLSKVHGVSGSRIVDALLEGQTDPVYLASLCHGKVKAEQEDIILALEGNLTDHHKFMIRIIRQDIRQTEALIKELDVEIEKQLLPYAQEIALLSQIPGVGEQTAGELISEIGVNMDVFATDKHISSWAGVSPGNNESAGKKKVDEPPMETNK

SEQ ID NO: 492384 - protein, 351 aa, unidentified
MLYAGLDLSRKRINFDARLAGGELVERGACPPDADGLRGLAGRLLAHDPEVLAVVESMNGARFVHDQLERHGLDVLIADAERAKGLAPLACKTDKIDARVLAELARRDLVPEIWLPDPGTRADRERARFRLHLVHKRTALKNRVHSTLIAWGKPCPVSDLFGRSGRELLHRLEIPEPWSSTLEASLRLIDLLDEQISAQERELRRLGADHPYVRLLQSVPGIAWVLGFTIASEIGDIHRFPSPRKLTGYTGLCPKVDQSGERDWRGRLKKNGPRYLRWALIEAAQHAGRGPHYRDLYERTRRRHGRQRGPKVAAIVVARKLANAIWHMLTYETAFAPASATQSSGGMTAPN

SEQ ID NO: 492385 - protein, 348 aa, unidentified
MLIIGCDYHPGFQQIAWVDTETGELSERRLTHREEAEQFYGTLKARRVRVGMEASGHARWFERLLNDMQFELWIGDAAEIRTKRVRKQKTDRQDAQLLLKLLMEDRFPRIWVPDAENRDLRQLLWHRHRLVQMRTRIMNQLHVVALNEGVRRKKALWRPAGRSELESLVLAPWALRRRRDLLDLFDQLTPKIHDLTRALEEEVEKRPIARRLMTHPGVGVLTALAFELVIGTPERFHCGKQIASYVGLVPTEESSGDRRRLGHISKQGNALLRFLLVEAAQVTVRSQPQWRSKFFHLAMRRGRKIAKVAMARKLAVHLYWMWRQGCEYGQFEKLGSHAGEPGNRHGAQ

SEQ ID NO: 492386 - protein, 341 aa, unidentified
MEEVSTIGLDLAKHVFQAHGASASGGVVFRKKLRREQVLTFLAGQPRCLVAMEACASAHHWGRAIGELGHEVRLIPPAYVKPFVKRQKNDMADAEAICEAAQRPTMRFVAVKSEAKQASAVIFRTRDLLVGQRTQITNALRGHLAEYGLIAPQGLSHVERLIAQVEDPASGIPDAARSCLVRLVGMLRHLQTEIAELDREIAARAMADDLARRLMTVPGIGPVIATAIEALVPAPETFRSGRDFAAWVGLTPVQRSTGGKERLGRTSRMGERTLRRLLIIGASGVVRWAKRKGVPPGSWLGRMLARKPPMLVIVALANKIARIAWALIAKGGVYRAPAVAA

SEQ ID NO: 492387 - protein, 364 aa, unidentified
MENVRFVGLDVHADSIAIAVAEPGRGEPGQLAVIANDTALLLKRLRRLGQVKCCYEAGPTGFGLQRALTAEGIDCVVVAPSLVPTRSGDHVKTDRRDAARLARFLRSGDLTEIYVPDVATEAMRDLERAREDAKKAQTVARHQLGKFLLRHGRRYDGKTAWTVKHFKWIHAQHFEQEAQNRVLEDYVRTVQDQTERVDRLTKRILELVETWSLRPLVKALQALRGIRVISAVVLAAELGDLTRFESAPKLMGYLGLVPSEHSSGEGRKLGRITRAGNGHARRILVEAAWAYRFRPRQSRAIILRSAGVPQEVRRIAWRAQERLCAKYQKLTARGKNKNKTMAAVARELAGFVWAIAREPTLLAH

SEQ ID NO: 492388 - protein, 354 aa, unidentified
MPKTASAEITVIGIDIGKNSFHVVGHDSRGAIILRQKWSRGQIEARLANMPRCLIGMEACVGAHHLARKLATFGHDARLMPAKYVRPYAKGQKNDFNDAEAIAEAVQRPTMKFIATKTADQLDLQALHRVRERLVSQRTGIINQIRAFMLERGIAVRQGIRFLRTELPIILSTRSDVLSPRMLRVIEDLATDWRHLDERIETLAREIETIARQDAGCDRLMSVPGIGPIISSAVVAAIGSGDVFPKGRDFAAWLGLVPKQISTGDRTILGKISKRGNRYLRVLFVQAAWVVLVKPQSWERHGLKSWIEAAKKRLHHNVLAIALANKLARIAWAVLAKGRGFEATRTIDGSTQPA

SEQ ID NO: 492389 - protein, 362 aa, unidentified
MRTITIGVDLAKQVFSVCSADAAGRVQERRDLRRDAFIQWLPSVPAGTIVAMEACSGAHHWARRCQELGLHPRLMAAQFVAPFRKSRTAKNDRNDAEAIATAARQGNMRFVPVKTVDQQVRLSWHRVREGYKAEALATSNRLRGLLAEFGVTMAQSDGALRRTLADLDVLSLPPLLLELLRDVDAHWQQLRERIAQCDRRIQAHAKADEACMRLQAIIGVGPITADAVVATIGSAQSFANGRQFAAWLGLVPMQHSSGGRPRLGRISCRGDGYLRTLLIQGARSSLQRAKAVSWEKATPEQRWIHDIERRLPFGKVLVAIANKHARQLWAMLARGERYDADAWLKHPMVQRPASRRARPATN

SEQ ID NO: 492390 - protein, 403 aa, unidentified
MVEGHDVVIGGVDTHKDTHVAAVIDRVGRLLDTRSFGITAGEYARLSVWMRSFGSLERVGVEGTGSYGAGLARHLAAVGIEVVEVNRPNRQMRRRSGKNDTIDAEAAARAALNGQATATPKGRDGLVESIRVLRIAFRSARSSRASVGVQIRDLVLTAPDELRSVFEPLDTPARVERAARFRPGPVTDPLEATRTAMRSLARRYLALSSEIEQLRDQLDGLTLAANPALRAAKGVGADVASILLIAAGDNPERIRSDAAFAAMCGASPIEASSGRTVRHRLNQGGNRQANHALWRIALVRLATDPATKDYAQRRRAEGKTTKEIIRCLKRYIAREVFGLLTKQRHVPDTSDLRPARLAAGLTLQAVADHFNVWPARISEVERGVARNDDLERRYRTWLHRRAA

SEQ ID NO: 492391 - protein, 350 aa, unidentified
MSIIGCDLHTRYQVIAMLETEGGEIVTRRLEHENGEAKAFYAGLPKPSLIGIEATGYTQWFERMVADLKHELWVGDPAEIRARAVRRQKTDTRDAEHLLELLLTKKFPRVWVPTPEERDLRELLKHRNKLVRMQTSVRNQLHFLAMSQGLCRKRKLWSAKGRAELEALNLGPWARQRRQELLELLDSLGPRIEELNQAVKGEAERRPEAGELMKQKGIGPVIALAYILTLGPVERFPNSRAVVSYLGLNPSEHSSGGHHILGHISKQGNEMMRWLLVEAAQSAAQFDPELRRHYQRLKYRRGGPVAKVALARRLAVRLYWTLRQARGATPPVRMPGSPSSAVVDRGPSRV

SEQ ID NO: 492392 - protein, 445 aa, unidentified
MDVVFPHCAGLDVHKKRITACRVSPDPTGQNADGVMDVQDFGTLTIELLALSDWLSQVGVTHVAIESTGEYWKPVYNLLEGTFTVFVVNAAHVKNVPGRKTDKADARWLAKLMRYGLLQASFIPPQGQRDLRDLTRYRTKLVQERSREVNRVQGVLERANIKLASVATDIMGVSGRAMLEALIAGRADPTTMAELARGRMRTKIPVLVQALTGVVRAHHRRLLAIQLAHVDFLDEHIATLGEEIRHVLSTLCPSESPDSPTVDAGATPTAPELSPSAPPMTFLRAITLLDTIPGVNQQGAELLVAEWGIDMERFATAPRLAAWSGVAPGNNESAGIQRSGKTRKGNRALRTGLVQMAHAAAHTKDTYLSALYHRLAARRGKKRAIIAVAHSIVRSAFHMLSRNEPYHELGSNYFDEHRREHLVDRLTRRIERLGYHVALEPVVTS

SEQ ID NO: 492393 - protein, 342 aa, unidentified
MGIYYVGLDIHKKIIAYCIKLMDGKIIDQGQVMATRDDLRAWLSTIPGPWIGAMEATIFTGWVYDFLKPFASDLKVAHPEMLKAITAAKKKNDKADAERIVDLLRVNLLPECYMAPAELRELRRILRYRSHVVRTTVVTKNKISGLLMEVGAPYSKQRLHGRKYFTSLLERVEDIPPSVAELLKMSRSNLEIFQAAQKRLVESLRNNELLRERVNRLMTIPGIGEITALTWVLEIGESSRFTSIRQAVSYCGLCSAQRESAGKEQRGPISKKRNKHLQTVLIEAAKIAPLWNPQLAAVREKELKKGNRNRATLAVARKLVAFMLAVDRKKIAFVPQEEKKAA

SEQ ID NO: 492394 - protein, 418 aa, unidentified
MKKDSKFSQQSEATLKRTKAHGPVQRDAKEVLAEVLGKLTGKLDGRAVSTSAKENRRGNTVGPNRDRLTVGVDLGDRWSQYCILGLEGETLAEGQLRRTQEDVGEFFQALTPARVVIEVGTHSPWVQDVITELGHEVLVANPRLMEGSKRRKRKSDRIDANKLARLGRVDPQSWYPIRHRSREVRQDLVVLRARDALVSVRTELINTTRGLVKSMGTRLPRCSSPSFAEKVKDAIPVEAREALLPLVQLVETVNDCIEKYDQRIEELGRKKYGHTSLLRQVKGVGPITSLAYVLTLEDPQRFSSSREVGPYLGLVPKQEDSGDSQPQLGISKTGDRMLRRLLVGSSQYMLGAFGPDTDLRRYGLRLCERGGKNAKKRAVVAVARKLAVLLHHLWVSGDVYEPLRHTGAGSRTAEAVAA

SEQ ID NO: 492395 - protein, 342 aa, unidentified
MIASTIGLDLAKHNFHVHAVDAGGSVVKTAALRRSEMIKFFQDAKPCLVGMEACATAHHWARELMKLGHEVRLIPPSYVKPYVRRGAKNDAADAAAICEAVRRPHMRFVPIKSESNQAFLMLHRARGLLVRQRTMTVCAIRAHLAEFGITFGQGRQRIETIMPSIEDVASSLPEQARFALKSLIRMVGELNTQIEGIETKLAEIGRSHPVSNLLSSIPGVGPITSTAIAATVPDARMFRSGREFAAWLGLTPRQNSSGGTTRLGGITKQGDAYLRHLLVIGARNIVRYPKARAKVDGAWIDALLQRRRPIIVAVAVANKLARIIWAMMTSGEMFREAHAKTT

SEQ ID NO: 492396 - protein, 294 aa, unidentified
MQHVAIDLGGKESQVCVRAAEGQILLERKLATTSLKKFLQQQPHSRIVLETCAEAFRVADFALSFEHEVRVVPATLVRTLGVGARRIKTDRRDAQVLSEVSCRIDLPSVHVPTDIARMRRSMCGMRQELVSSRTALINCVRGWCRTQLLKSPPSTSRTFPKRIRETALKNANGLPEYVERLLKMIDVLNEQIALADQELTQLAEDDPTCKRLMSVPGVGPVTSMRFAAAIDNISRFPTAHAVQSFLDLTPGENSSSEKQQRTGITKAGPAPVRHALIQAAWNLRRCHPLDPISQ

SEQ ID NO: 492397 - protein, 424 aa, unidentified
MYACVPEDRDALSVRVFQTFTVDLSALADWLAACGVTTVAMESTGVYWIPVYDILEARGFAVHVINARQLKNVPGRKTDVLDCQWMQQLHTYGLLRGSFRPDEDMCALRAYIRQRDTLIRYRSAHVQPRQKALLLMNVQLTNVSSDITGVTGLQILRAIVRGEHDPHTLAAYRNAHGAKSEEDIAKAFTGNDRPAPLCALTQALELYDFYNQQLTACDQEIAQKYAAFTPQVDLTAQPLPPPKRRRNTPQGNEPTFDVRSDLYQLAGVDLTQVDGLQVLTVQTILSEIGLDMHRWPTAQHVPSWLGLAPYQDISGGKTLRTGTKKTTNRAATAFRLAAQRLHASNSALGGCSRRMRATHGAPKAIVATAHKRARMVYHLLTYRQAYRDPGADSYEEKYRDRTIRNLKRKARQLGLDLVPVTAQP

SEQ ID NO: 492398 - protein, 349 aa, unidentified
MSEYDGKQFVGIDLHRHRSVIVRQDADGNRLSVRRIVNDPVALAQEISQAGPQPEVVLEATYGWYWAADVLAAAGATVHLAHPLGIKGMSARRVKTDLRDATDLADLLRMGRLPEAWIAPPELRQLRELVRHRVKLVQQRSGLKASVHAVLAKQGLRIPVSDLFGVRGQQQLAAAPLDAAYRARVNALCRLITEFDFEIDLAGRLITTQVARNPLYGPGYRVIQQLPGIGPILAAVLVVEIGDVHRFAGARQLCSWAGLTPKHRESDTHVHRGRVTKQGSRLVRWAVVEAAQKVPASCAWLAGARAGITLRRGRNIATVAVARKLLTLVFYGLRDGHIRALDQAGRDAG

SEQ ID NO: 492399 - protein, 392 aa, unidentified
MYIVGIDIGKNHHEASIVSPEGKQIGRSLRFATTHKGADSLMSFIFKNIGNSPCVFGMEATGHYWYPIYSFLKAKGYTIYVINPIQSDSLRKMYIRQTKNDSIDSFLIAEVIRFGQFGTTSMADENILAMRQLCRYRDSVISSRTEIKLRIGTIMEQIFPEYEKQFSSLWVSTSMGILEKYLSPENIENAPIDELFEIIKDKSHNRLTRAKAISIKEAAADTFGIKIAQDAFSFQLKQLIDRMNFLDKQIEALDCQILEYYEKFDCYLHTIPGIGMIAAATILAEIGDINRFKSSSALVAFAGIDPTVRQSGEFSSTHNHMSKRGSPYLRHAIFLAATTCSFHNSPLNAYYKKKRDQGKHHLTATGAVARKLTTIIYAVLRDSKPYEPKSFC

SEQ ID NO: 492400 - protein, 421 aa, unidentified
MKSWQEITHYAGFDWARDHHAVVIVDGQGQIVADIEFQHTQEGWKSFGEKTAAWPGLAVAIETNQGAAVDQLLQAGYTVYPINPVASESYRKRKAPSGTKTDHIDGWGLADALRVDGHGWKSLQPMDPLTQQLRLLCRDEVALIEQRTVLVNQLRQALLEYYPVALQAFEDWTCRATWDFIIEFPTPEQLVKAGKRRWEKFLHTHRLWRAETVQKRLDLFGRADQFKGSEPIMEAKSRLALSLCKLLRTLQQQLDEYRKAIEALFRSHPDHDLFGSLPGAKKVLAPRLLAAIGNDPQRYGNHSVLQCMAGTAPVSFQSGQINKVKVRWACDKFLRHTVHLWADCFRKATVWGQTYYKKKRQQGMSHACALRCLGQRLLKIVFKMLTDKKPYDAELHARNQQKHGSWVLQLMDEKPAPSSGE

SEQ ID NO: 492401 - protein, 412 aa, unidentified
MTEIDQFAAHVGLDWADKKHDVCVQFKNGERIFHVVEHTPEALDIWLSELHQKVKGRIAIALELKKGPVVYALQKYPFVTVFPVHALSLARYRQTFWPSGAKDDPQDAELALELMLRYPQKIKAIEPDNADIRLLQQLVEQRRLLVEDKRRFVNRLINTLKQYYPQPLEWFSHRGSLLLCELIIRWPSLQQLKRARRDTIRNFLNAKGGRAIALTEQRVTSIDNAIPLTTDPSVIEANALMATALATQIKVVSEIIKTYDERIETLFDTLPDAGLFKSLPGMGPCMGPRMLAALGDNRDRFNSAEEIQNYAGIAPVTERSGQKSWVHWRWQCAKFVRQTFAEWTAKTVNSSYWAKLYYQRQREKGKSHQSAIRALAFKWIRIIYRCWKTKTRYDEAKYLLALEERNSPLLKP

SEQ ID NO: 492402 - protein, 317 aa, unidentified
MSKDTTLCAGIDTGKHKLDVAIDGGAERVQVDNNSEGHRSLLAWLRQREVERIGIEASGGYEQAVVSSLRADGFVVIIFQPVQVRAYARFVLQHAKNDTIDAALIARCTAAATDIREPPDARLALLAQHLTMIEQLTEDVGQLKTRREACREERIREFWKREVDRLKVLQNSELKQLVAAIRAHRDLSHRLDLIASVDGVGLRTAVAILVRMPEIGRVTREQAAAIAGLAPYDDDSGLRRGSRHIKGGRQRLRQSLYAAALPAVFYWNPQLKAFYRRLLAAGKPHTLALVACARKLLIFVNTVVARGTSWRSSAVTT

SEQ ID NO: 492403 - protein, 452 aa, unidentified
MAKSSVPRSRQAQRALRPRPAVCPDAAGVDLGAREHFVAVPPERDPQPVRSFTTDTAALQALADWLIKCGVRTVAMEATGVYWVPLFQVLEARGLEVCLVNARHVKNVPGRKTDVQDCQWLQYLHSVGLLNASFRPPAAVCAVRSLVRHRESLVRTGCEHLLRVQKALDQMNVQLHHAVSDITGETGLAILDAIVKGERDPAVLARHRNYRCKKSEAEIAAALHGDWRPEHLFTLRQSLAAWRYHQTLIGECEAEMDTQTKLLAPQTTAEPPPPAKRSSQPDEPLRRMLFAKFGVDLTAVDGIAAQTALVFLSEVGPDVSKFATAEHFASWLGLCPDNRISGGRKLAVGTRPVANRLATALRMAAQSLYRTESVLGDWFRRLRAKLGTPAAITATAHKLARVLYAMVKHRRAFDPSRLGNPALRRQRKENALRRAAKELGFVLQPLQAVAVS

SEQ ID NO: 492404 - protein, 458 aa, unidentified
MAKKAQKVKKGQRSELLIVNPDAAGIDVASTEYQVCVPEDRDVNHNRRFDAFTCDLRSIVEWLKLCRIKTVAMEATGIYWVQLFVILEENGFDVIVCNAKHIKNLGEKKTDYVDAGWIQLLHTYGLLTESFQPENKIREIKDLARSRERLIERCNQSLLRVQKSLDMMNIKLHKVLSDIKGQSGMAILQSIAKGEKDPQELVKHIHHRVKATKEEILKSLEGNWSQSQVFILKQNLDCYLYTQGQIQELDLKMEELMEIYIQLIHKDEQGNSPKELIRSNKKMDANNAPAFDAERYSFEILGVNITRIPGISGLTALKVVSELGAGFIDKFPTPDKFCCWANLTPNNKKSGGKVLSSKVPKRKNHVGQILRVAANTLKSHKGYLGNLFKSKRASLGYNQAIVAVAHKLARILYKMVKDQVEYNEQIETQKNILDMQKRVAYYEKKAQKSKNILLAMAS

SEQ ID NO: 492405 - protein, 347 aa, unidentified
MRFYHQQHRYYCGIDLHARSMFIHILDAQGQTRFEQDRPACPDAFRSAVAPFRDGLVVGCECMFAWYWLADLCEDESIPFTLGHALYMKAIHGAKTKNDKLDAAKIAGLLRGGMFPMAYVYPRAMRQTRDLLRRRTFFVRQKAQLIAHITNTNSQYNLPPLERKLSRCPDYSDLAKRFEHASTQLSIAADAALIDQYQTTIRELETHLAKHAKVDDPKTYHLLQSLPGIGKVLGLVLLYEIQDIKRFPEDGNFLSYARLVRCEHESAGKKKGRGGSKIGNAHLKWAFSEAAALMLRSCPAVKAWVQRQQRKRGKRKALAILEAKIGRAVYQVWRKQQPFDAKKFLRP

SEQ ID NO: 492406 - protein, 398 aa, unidentified
MEAIVQRSAGLDVHKKVIVVTILLEQPDGSVKEETREYGTTYKACEGLANWLLSHDIQLSVMESTGIYWKNIYAALEKAGLRVSVVNARHVKQVPGRKTDVKDSQWLARLARYGLVKSSFIPPKDLRELRIIARYRTKLVGTLASEKNRLHKTLDDAGVRLGNVVSDITGVTATEIIAGLIERKPMSELLDCTRGALNKKKDELQAELEGELSARHLFLLKKLQAHIVYLQNELKELDDYIFESMQPYQQQWEILQTIPGIDVVGAALLIIEIGVDMQQFGNREQFCSWAGMCPGNNESAGKKKSGKTPKGSRQLRYILCEAANAAAKTECQFKHKYKSLMIRRGHKKAIVAVGHKMLRVIFSRLKEGEVYHDPKVNYEELVVKKNASRWIRMLKKYS

SEQ ID NO: 492407 - protein, 395 aa, unidentified
MSAEGEAIRSNDYRKDTTVKAPSTRPAAVLGLDVGKSSHWACLIDRDGEVLDSAPVRNREAELDALFASAPAGTLVVVDQFRNIGSLAVRRARAAGLGVAHLPGLAASRAAGLFAGEAKTDERDAAVIARTALGVPDSLSGVPGRGEALEAARALSSQRDHVVACATRDKNRLRAVLLESCPALEAAVDLSDRRWLELLAGFGGAWGIARSGAGGPRAEAAGEAAAASTAPPPALVEAENRQVRFLAARISEALDEAGALEAETAALLEGDETYACLLTVPGIGPRTAAQLAVSVDIGRFPDHDHLASYCGIAPRVRSSGTSVRSVRASRRGDARLKSLLIFSCNSLVRSSGRYGEYYRACRARGMGHGRALKAVARKRLRAIYAVMRDRVPYRE

SEQ ID NO: 492408 - protein, 343 aa, unidentified
MKLFVGLDVSLEKTAICVISEHGKILKEAQVASEPEPLLRWINNQDGAIAAVGLEAGPLSQWLHRGLSEAGQPVVLMETRQVKGALKAMPIKTDRRDAEGIARLLHLGWFGPVHCKSVSAQEVRAVLSARKAVQQGFITLEMSLRGLLRNFGLKIGTISRGRFEQRIRELAAGNPMLEAATEHMLSARSALRRDLAGLERHVRQLAQEDPVCRRLMSMPGIGAVVALTYRSAVDDPARFTSSKKVGPWVGLTPSRNQSGERDISGGITNAGDVILRRALCQAATVMMHRGQATWLRTWAAKIARRRGSKRAMVALARRIAVILHRMWKDDTDFRFDIPGLHTG

SEQ ID NO: 492409 - protein, 341 aa, unidentified
MEKISIIGLDLAKSIIQVHGASADGAVLFRRKISSKKLLAFLSDVDPCIVAMEACAGSHYWGREIARLGHRVKLIAPIYVKPFVKRQKNDAADAEAICEAAMRPTMRFVAVKSEEKQAAATVFKVRDLLVRQKTQIINALRGLMAEFGVTVPQGPSHVGILISYVEDDSSSLTDAARAPCLALISTLRALIDKVRELDLEIGRRARHDDVAKRLMSIPGVGPVIATALEALAPPAETFTRGRDFSAWMGLTPRQHSSGGKARLGKTSKMGQRDLRRLLIIGASAVVRWASRRGAVEDSWLSRMIGKKPPMLITVALANRMGRIAWALMTNGGCYEEKRLAA

SEQ ID NO: 492410 - protein, 388 aa, unidentified
MYHAGIDISKFKHNCFIATDAGVKVKEFVFDNSKSGFTELEGSLKALGKPKEIKIGFESTGHYGTNLKSYLSNLGYTYVEFNAYLTHMFSKALSLRKTKTDKVDAKVISSMLGSVDYETLHTKFYHINDLKELVRQRNVYLNHRSKELIKLTNLLDKTFPEFKPFFNNRLGIGARFVLKRFKTKARIAKLSMSDFDLIKSKMMGRFTYPKFNCLKQLANDSIGVSSKAYDLLIQTAIKQYEHLNETLKIIDTEIITLYKQTDSKLLTIPGLGIITAATIYAEVGDFKNFSNPTKLIAFAGFDVRIIQSGTQEHYGKLVKHGSSLLRNAIWTYALPAVKFIPTINDYYHKKRSQGKHHKVVLSHICRKLIRMIYFIEYHNVSFDSNLSR

SEQ ID NO: 492411 - protein, 445 aa, unidentified
MTTRTIGIDLAIRGDQVAQIFDDGRPVGKALRFRIDPAGLDAFVAKASRDLPPGSSMQALMEPTGMSWFPVAHRLADAGVEVVRVKGQRVRALRRYLSEHAKTDLRDAYLLAAMPMFGGPCFDRVHIPTPKSHALQRLTKQRSRFQDVVASGKRRLLDLVRWASPSLEHVLPDLRTRLSLAVLRFWFDPAAVLKARRSTLVRFVGHHATGNHPHSGPVVEALVDGLKTAARDAVALHRGHVDFTELQAEVAIEVGMIVHHLDAIAELERRIAALYAEVHPSDVLRTIPGIGIHLAPVLIGVLHTPDRFRSERHIRGFCGLFPNRASSGGAERPGQKITQSGNDRIKRALVLAADTARRFDPELAEVYCRLMTVRGHHHKQALCAVANRLVNRIFRVLRTGQPYVLRDADGRTIDLAEGRRVVAERYAVPDAVRASRRVNRLKGAA

SEQ ID NO: 492412 - protein, 313 aa, unidentified
MQNSFIGIDISKNTLDVHVLPENVSYSYPYETQKVKVLIRKLKKHKPVLIVMEATGGYEISIAVQLSAAGLNSAVVNPRQIRDYARAIGKLAKTDSIDAYVIARFAQDVKPEARQQLTIHELQLKELVVRRQQLIDMRTAEKNRLSRAHAPLVIKGIQKIISTLDAHIDAIAEELSTQIQSNPAWDQKVELITSVPGVGTTTAHMLLFCLPELGRLNRRQIASLVGVAPMNRDSGMLKGKRTITGGRAIVRKVLHMPILSAVTRWNKRLKKLYEHFIARGKKHKVALTACMRKLITVLNCILKNNQVYNPNCC

SEQ ID NO: 492413 - protein, 370 aa, unidentified
MEQYSEAFVGIDTAKNKHALAIADPGRDGEIRYLGEIDSSPATVQRMIRKLAGRYEKLYFCYEAGPTGYGLYRQVRALGHDCIVVAPSLVPKRPGERVKTNRRDAVTLARLLRAGDLTPVWVPDAVHEAVRDLVRARTAASEDLRRKRQQLLSFLLRHGRIYSGRKHWTKMHLHWLAQQKFDHPAQQIVFQDAVDAIEDAATRLRRLDQQVAEIVPSWSMAPVVEAYQAMRGVSFGVAVTFVAEIGDLRRFDNPRQLMAFLGLVPSERSTGERVRRAGLTLAGNKRARRVLIEGAWSYRYPARVSQTLQARLEGLPKTVRAIAWKAQIRLCARYRRLTAAGKKRPLVIAAIAREMAAFLWAIAQHVAPAA

SEQ ID NO: 492414 - protein, 326 aa, unidentified
MEKHYIGVDLHQAFFQACAVSADGARLWEDRFPRTDEGLAAFRGRCHHEVAVAVEASTPTWHFVDAIHEAVGTLVIVDALRTRLKAGYAAKTDRLDARRLADALRRDSVSSIYYPPSAIRELRELTRYRHALVQTRTKLIQRLRAVLLRQGIVDAHRLSRQDGSLDRLVLPPQAAASVAGLRRLLALVRAEGLTAQRAVEAAAHADPIVVALQEVRGLGPVLGLMIRAEVGDIGRFPTGGHLASYAGLVPRVEASAGRVRYGRITKRGSPWLRWALIEAAMHGPQRTDAEGRWVRRLALRKGALKARVAYARQLCHEIHAVWRAIA

SEQ ID NO: 492415 - protein, 343 aa, unidentified
MGVFAALDVSQEETAVCVVRPDGALVAEAKVPTCPDAIADWLAESAEGLERVGMETGPLAVWLWSALTFRQAPIIRLDARHASGVLKMMPNKTDRHDARGLAQIVRAGWLEAVQIKSHDAYVNRALLAAREALVGMRVRLENEIRGLLKTFGVMFGKKVGGFMRRAEEIVARDLAVAPERVPIFEALMQARRDILARIAALDSRIRVIARQHATVRLLMTAPGVGPITAMAVVSAFDDAARFRRSSSAGAYLGLTPRRYESGEISRNGRVSKRGDRFARKCLYEAANAIFCRNLGVARLRSWAKAVAERTGPRKAKVALARKLAVTLHAMWRTNTPFREAAMA

SEQ ID NO: 492416 - protein, 419 aa, unidentified
MAPLSNQQFTAYVGIDWADTKHDICLQATGNARREFDCIPHQVARIDEWAKSLYQRFGGPIAVALELARGPIVAALQKYDFFVLFPINPSTLAKYREAFKPSRAKDDPTDAELALELLLRHPERFAPLRPQSVAMRSLFSLVEQRRELVGDKTRFTNRLCDTLKQYYPQALEWFEQRDTVLFCDFLTHWPTLLTVRRARRTTLEAFFHAHKCRIRLIAVRLESIRAATPLTEDPGIITACRLHVLALVAQLRTVLSAIDVFDREIAALARAQPDFALFDRLPGAGPQMAPRLLAAFGEQRDRFHGADELQKYAGIAPVTERSGKKSWVHWRWQCPKFLRQTFVEWAAQTINKSFWAGAYYRQQRSKGSTHQAAVRALAFKWIRILYRCWQTRTPYDETTYLNALRKRGSPLLRHLELPG

SEQ ID NO: 492417 - protein, 321 aa, unidentified
METWVGIDISKDSFDAAWLLDGKKNHLKLENNIKGFKRLLTEVPTESHFAMEATGEYHLNCARYLSSCGKPVAVLNPFAVKMHMQSDLRRCKNDKADSYSIAKFAAEKNTDCWVCPTDDEIKQKHLDAVVDGLQKQIRQSKNMLHSLTQVSLRDDLAVSIIKKTISGLESLLERARNRLLEMIEANKKEDIALACSIPGIGLETSLKFFTHVGNINRFDSSRSLISWIGLTPRNAQSGTSIHKNGGISRMGCTRLRSQFYMCAVVAIKYNPDCRVFYNRLKELGKPSKVALIAVANKLIRQLYAVLTKKEAYVPNFCTKTS

SEQ ID NO: 492418 - protein, 361 aa, unidentified
MNVVHYIGLDVHKKTISYCIKTADGRIVQEGKLQALRSTLRSWAEGLREPWCGAMEATLFSAWIYDTLKPYAQRLVMGHPARMKAITAGKKKSDTIDARTIADLLRCDLLPTCYVLPPEMRDLRRLLRYRNMVVQQSVRMQNKMAGLLMESGTAFVKDKLHGKKYFSALMKSLEEVPESVKDLLRMSRGSMEMFELTQKQIVTRLLSEQALQQRVERLLSIRGVGPITALTWALEVSDPHRFSSIGDAVSYCGLTAAFRSSAGKQQRGPISKQRNAWLQTVLIEAAKLAPRWNPQLAALHARQLELGHPNRATLQIARKLVAYLLAVDKSGQPFQVLTPPPTLENATKTKRRKRASIAKAA

SEQ ID NO: 492419 - protein, 400 aa, unidentified
MLLFFEVITMIFVGIDVAKDTHYAAVSDDSGAVLVKPFAFQNNAEGFCLLLKKLSEFDRSKLLIGLESTGIYSENLICFLYESGFRLAVINPIQTATLRKTAIRKTKTDKVDTMLIIKSLMVNSYRLYSLRDADSLKLRTLCRFRQNLKKSKARLKIQLAGYVNLVFPEFGKFFKSGIHIAASYALLKKHSSPKEIAALRTSTLCTLLSKASHGRFGKDTAEALKSLALSSVGVKNPYISIQIAQTIAQIELLEQQIKDLNSAIEEAMESINSFLMTVPGIGAVNAACILGEIGDIKRFSKPCKLLAYAGLDPTVRQSGQFTAKSTRMSKRGSALLRFALINSAWQLTLNDTTFKAYYDLKRSQGLNHYGALGHVAHKLTRVIFKLLTSDTPFNPAKLVA

SEQ ID NO: 492420 - protein, 343 aa, unidentified
MQHVAIDLGGRESQVCIRNLEGTITYEGKVATRNLGRVLKRQPKSRVILETCTEAFSVADAALSLGHEVRVVPATLVRSLGVGARGIKTDVRDARALSEVSCRIDLPSVHVPTDLARQRRSMCGMREELVASRTSLVNCVRGWARTQLLRIRTGHPETLPRRFRAVALARADGLPEYVERSLVVIESLNEQIALADKELEQLARRDPLCERLMSVPGVGPVTSLRFAAAVDDVSRFPNAHSVEAYLGLTPGENSSSQRQHRTGITKAGPAAVRRTLVQAAWSLRRFRPADPITQWAAEVERRRGKQIATVAVARKLAGVLYALWRDGTRYEANHARAKKPAAA

SEQ ID NO: 492421 - protein, 360 aa, unidentified
MKKISKQNQQVKVAKPERSVGLDLGDRVIHYCVLNQEGEVMEEGRMQSSEPALRKHFADEAVMRIALEAGTHSAWVSRLLQRLGHQVLVANPRKIRAITGSESKNDRNDAEQLARFAAFDPKLLSPIEHRSEQRQQDLNLIHARGTLVRARTMIINVVRGLVKSAGGRLPNCSTESFAERTKAAIPASLSEVSIPLLKQIGLLTGQIDLMDKQIDKLSKKYPEISLLKSTPGVGPLVAACYVLTLDSPDVLGDNRQAGAFLGLRPRQSQSGDSDPQGRISRTGNTYLRSLLVQSAQYIVGRFGPDSALRRWGLKLAASGGKRGKKRAIVAVARKLAVILHSMWRSRIPFLAFPQQVTVVA

SEQ ID NO: 492422 - protein, 340 aa, unidentified
MNATPVGIDIAKNVFQVHYIDQATGEIVNKPIKRAQFLEHFANRTPCLIGMEACGSAHHWARQLMKMGHDVRLMAAQFVKTFNIRNKSDAADAKAIWLAVQQPCKAVAVKTEMQQAVLMMHRQREQLVKFRTMQINGLRGMLSEFGEAMGKGRVALTKEMPVALASVEERLPQVLIDSLREQWKRIEKMDEEIVAIERRLREWKKEDNAVKMIGEIPGVGLLTATAAVAMIGDPKAFRSGREFAAWVGLVPRQTGSGGKVNLHGISKRGDMYLRKMLIHGARAVLARAKEPGAWVDQMKTRRPSNVVVVALANKMARTIWAMLAHDRPYEKGYVSVKPVR

SEQ ID NO: 492423 - protein, 444 aa, unidentified
MKSKTPKSQKQKKKTVINPAWELINPAAAGIDIGSREHWVCVPARSAQNNVRPFGTFTADLEALAAWLQECGVKTVAMEATGVYWIPVFQILERRGFQVVLVNARQTKNVAGRKTDMKDCQWIQRLHTYGLLQGSFRPGDKYCVVRTYLRYRDELVSARATQCQHLQKALQQMNVQLHHVLSDVTGVSGWRIIEAILEGQRDPVKLAAMVDVRVRASQDTIQKALVGDYRPEHLFVLKSAFELYAAYEAKMNACDEQIVREVAKLPDQVDGKIKPLPARKEGRPASADKMLDQDMRASLYPKLGVDLTAIEGIGVLTELVILTEVGPDLSRFPSEKHFASWLGLCPDQRISGGKVLTSRTRRVINRVSDALRMAALTLQRSQSALGAFYRRMKARLGAAEAVTATAHKLARLVYRLLKHGEAYVRQGMADYEKKFQQRKLYALQ

SEQ ID NO: 492424 - protein, 369 aa, unidentified
MTESSDYESVQVFIGVDVGKDTHHAVAVNRSGNRLFDKALPNDENKLRSLISDLKQHGQILLVVDQPATIGALPIAVARSEGILVGYLPGLAMRRIADLHAGEAKTDARDAAIIAEAARTLPHALRTLKLADEQIAELSMLCGFDDDLAAQTTQASNRIRGLLTQIHPALERVLGPRLDHPAVFDLLQQYPSPEKLASLGEKKLATQLCKLAPRLGKRLAADITQALTEQTAVVPGTNAAVVVLPRLALQLITLRKQRDEVALEVEQRVLAHPLYPVLTSMPGVGVRTAARLLTEVACRAFASTAHLAAYAGLAPVTRRSGSSIRGEHPSRRGNKTLKRALFLSAFAALRDPISRAYYTRKMSQGKRHN

SEQ ID NO: 492425 - protein, 415 aa, unidentified
MSNSLIVGVDVHSQTNRTCVMDSQGRERGRRFSVANNRPGTQALIGHIVQAMNEGEFDSVCLAAEATNWYWLPFFQTLSQDPRLQDWPVALYAFNPRLTARYKEIFCDQDKTDSSDAWVIAERLRNGRQLPAPFQIDAKYLSLRFLTRYRHHLVKDLVREKNYCMSVLYLKASEYRQDHPFSNVFGVTSQALIQEFASLEQVAAMPFEELVIWLDTKGKGRFPDPAAVARELHQVAQDSYPLEPDLQQSVNYVLTWSFQHVDFLDRQLQRVNTAIADAMRHIPHTLDTIPGFGPVFSAGIIAEIGDLARFNHDEAKVAQYAGLHWRQNQSGKFQAEDTYLTKRGNAYLRYYLCEAANAVRMRDADYAAFYQRKHDEVPKHQHKRAVVLTARKLVRLVVRLLTTNQPYRLRSAPSA

SEQ ID NO: 492426 - protein, 345 aa, unidentified
MSSISDRQWVGVDLHLYRSVIVRIDDRGQELDCVRIENSPAALVAEVGKAGGGVSVALEATYGWYWAVDALRAAGFDVHLAHPYGMRKQRRGPKRAKTDHLDALELARLLRLESLPESWIAPPELREVRELVRHRRQLTKVATSTKAGIRAGAAKHGLTIEATQLDSVAGSNALNAIQLPGWFADRLASQRRIMLLVEDEIARVDAEVDRRLKSNPDYRNLMKVKGIGPVLAAVFVVEIGDVRRFPNPAALACWAGMTPRIDESDRRRREGSISKEGCTLVRWAAVEAVQRNCEPTIKKVRDDIIARRGKRARNVAKVAAARRMLEVVYWVMRDGEARCLTKTVA

SEQ ID NO: 492427 - protein, 313 aa, unidentified
MNLPQTTIGCDICARRLDVYLHPAARARSFTNDAAGISALTGWAIEHGAFIVLEATAPWDQPLVRALEAAGLAFHRANPGRARAFARSAGMLAKTDRVDARMLALFGAALDLPATAPVDPERLKLQSLNSRRDQLVEMRKAERTRLKGVTDPVVIDSLKAVIAVFDSQVRALDQRIGDTIARACALARDAALLRSATGVGPVCAAVILASLPELGRVDRRAVAALAGLAPIARESGLMRGKRHVQGGRKRVRDALYMAALTAIRTGRWKQAYDHLRSLGKPPKAAIVAVARKLLVALNAALREQRPVLNTQTP

SEQ ID NO: 492428 - protein, 412 aa, unidentified
MEGETVIAGVDTHKDVHVLCLLDGLGRKIWSGSFGADPEGYDRLAEAIGDPGSCMVVGVEGTASYGAGLTRRLVELGYNVVEVLRPKRDKARPGEGKSDPLDAERAARKAASGRGCSVPKSQDGWVEAVRQLYVARRLAVATSTSCVACAKSMLTTAPSALRERFRGRERPKDLMPLLARGRKAGDALEESVLASLRSVAAVWKEARSQVESLDERIRALLEANAPALLGVEGCGTTTAAALVVAAGDNPGRLKGEAAFSMMCGASPIPASSGKTDRHRLNRGGNRQANWALYEIAIKRMAYDERTRRYVARRTSEGKSRREAVRCLKRYIAREVYHVLMNPNPDGAAPEGPELAKMRKAMRVTQKKAAAELGLSAATLGHLERGKRRSTKLERRYYELLCELERALPQTAS

SEQ ID NO: 492429 - protein, 408 aa, unidentified
MGRAAEVVATSPSIRTDGGCPVAQVNDLSRSLTAFDPISTLVVVVEMSKASWLVSGAVPGVERQPLKKLEPDAPALLRLIERWRNEAVRAGRPISRIALAYEAGRDGFWLARWLIARGIEAHVIHSASVAVSRERKRAKTDRLDAAMLMRVFLGWLRGERGHCGMVAIPTMEEEDARRPSRERESLVNERSRITNRMKSALARLGVRGFKPHLRKAPERLAGLRTAEGTGLPTNIIEEFRRDMARLALVREQISSIEKTRAERLERAPDTGPHAMVRLLARVIGIGIETADMLVREILSRKLRDRRAVARYAGLTGSPDESGLKRREKGLAKAGNARVRRGLIQLAWRFLVFQKDSALARWYRTRTEGPSGARKTTMIVALARKLLIALWRLVTTGEVPDGVELRPAA

SEQ ID NO: 492430 - protein, 345 aa, unidentified
MPIVGGLDIHRKQLTFDYLDTVTGEVQRGQIAPADRACLRGWLARFTGRGDVAFALEGCTGWRYVAEELAAAGVAAHVAEPADTAFARGRKRHAKTDKTDSRHLRELLAEGRLPECWIPPSHILECRALLELYHDLRAEHTAWVQRIHAVFFHQGAPALGEAALRTGRDLAALRASAAAHLSVAGQLQVATALDVLAALEAHLDMLRHQLVDTARHLTGAKVLAERLYGVGPVTALAMTCWLGGAGRFSSSRKAVRFAGLDITVWSSDRKGPPGRLSRQGPPVLRWAVYEAGKTHARASAPDHDYYAQVKERKDGKRAAISEARKILRQACHILAELGDDALTAA

SEQ ID NO: 492431 - protein, 391 aa, unidentified
MFYIGIDIAKHNHEVSIIDDNGKALGKSFSISNSQKGVDKFNTYLDSFNITSENCVIGMESTGYYWINLFSFLVNLKFNVFVINPIQSDAFRKMYIRKTKNDSKDSYIIAQIMRFGEYSSSNISDENIFALRQLSRYRTSLVDECSSWKRKIISILDQVFPEYSNLFSDTFGVTSKELLSKYPLPENMLELSTEELTNLLTKASKGRFGDEKTQKIKELAKSSFGVSFAKQTFSFQIKQIINQISFIESQLKELDNEISNMLKELNSEITTITGIGDVLGACILSEIGDISRFEKASQLVAFAGLDVAVKQSGEFTETKIKITKRSSSYLQRAIWLAAIVASFKDPALSIYYKSLIARGKKHLTAIGAVSRKMCNIIFSVLKNKKVYTPNI

SEQ ID NO: 492432 - protein, 330 aa, unidentified
MSNVLKNFVGIDISKTYFDAAVIKANHPSESMHGQFSQCPKGLKQMIAWLQQQDVLLNGETLFCMEYTGIYNTGLVNFLVEKKAQLWVEMPLRIKKSAGLQRVSDDKISAIKIASYAFRYQDTMQLWQPVDNSIEKIKRLIAQRDRVMNAITQLTVPVKELSECSCKNEAKELEKVQRNSLKALQKTKEAIERLIVKTVQLDKVITKKVQQVQSIKGIGEVTAVALLAYTKGFTTFSNAKELACYCGVVPFAKRSGTSIRFKPTVSPYANKKLKKLLHLCALSAIKNDVEIQAYFKRKVAEGKNKMSVINAVRNKLVHRVFAVIRLMMLH

SEQ ID NO: 492433 - protein, 343 aa, unidentified
MKYIGLNLHKKSIFATVLGEGGKILSRAKIVSNSRYIYYYLKSQGESNQLSVAMEASYNWQHFYRAVEEAVDNIVLAHPLKTRIIGEAKIKTDKIDSKVLAYMLRTDMLPRAYVPSRDTMENKMLLRGRISLVRIRTQIKNKIHAVVDRNKDSYCGLENLSDIFGKTGKHILRDTKIGPTDYRILTGYLDLIDEIGKKIKDLESQIDKRSLEDREIKLLRTIPGIGSFTAFLVKSEIDDITRFASKEKLCSYAGLVPSTHGNGEKLYHGRIVKQGNKFLRWALTEAAQTSIRCSQYFRYHYSKVRSKKNANSATIAIARRMAEVIYVMLKEGRAYIEKPVDIK

SEQ ID NO: 492434 - protein, 410 aa, unidentified
MQTLVERGCGLDVHQATVVACLLIVLKSGKVHKQVRTFGTITRDLVDLREWLLSEGCTHVAMESTGVYWKPIYTILEGAFEIVVANAQHVKKVPGRKTDVKDAEWIADLLCHGLLRASFVPPKPIRELRDLTRYRRKLVESRSAERNRLLKVLETANIKLASVVSDVFGASGRLMLLALAEGKDTAQEMAQLAKKQLRKKIPELQLALEGKVEEHHRFLLSVQLHRLWAVEKDLAIVEQRIEEKLKPYEAEITLLDEIPGVDVALAGAIIAELGADMRVFENASQLASWAGVCPGNNESAGKRRSSRIPKGNVYLKTALVEAANAAAKAKGTYLRDKFYRLKARRGYKRAAVAIAHKILVAIYHMLYHRVCYNELGDLYLDKLNKHHLTRNLVHRLERLGYTVTLQQKAA

SEQ ID NO: 492435 - protein, 421 aa, unidentified
MSYRIAAMDIHKKVLMVVVVTAAEEVADATGEALEFECRRFGTGSSERSQLVAWLQQRGVVEVVMESTAQYWKPVWLDLEPHFAKLHLAQAHSNRAPKGRKNDFGDAKRLGRRLLAGELLLSFVPDAEQRNWRTLTRSKQQLVRDRVQLHNQLEALLEEMRIKLSSVISDLLGVSGRRILTALAEGEADPVKLAQLGDERLKCTQAELTDALRGAPMPVHLAVLRLFLKRLTLLDEQIRELDKLVAEELKKHEEAVLRVTEIPGFGVDSAQQIIAEVGVDAETFPSAAEFSSWVGVCPGSNVSAEQNHSSRSPKGNRFVRRILTQAAQAAVRKKGCHFQSVFRRFLPKLGYNGAIWAIAHRLAGVLWKILHNGVRYIEQGNETNPRAKKRRAQKLAQALRRLGYAVTLTPISPDAPVADQG

SEQ ID NO: 492436 - protein, 364 aa, unidentified
MQQNRRSVGLDVHARSIVACGLDGQTGRLFERRLCPDHTEIISWVRSLPGPVAVTYEAGPTGFGLARFLTAEGIDCLVAAPSMLQRPAGDRVKTDVRDARHLARLLHLGEITAVAVPSVEQEAARDLVRAREDVRGDLMSARHRLSKLLLRHGIVYYGGRAWTGRHDQWLRAQRRSAVFAAPALGMAFDIAYDTVLAAVARRDRLDAAITAMAAASEHTPVVRRLCCLRGVATLTAFGLAVEIGDWHRLTGRGMGAYLGLVPSESSSGASRSQGSITKTGNGHARRLLIEAAWHHRTPLRPTVALRRRQDAAGPAARDRGQRANRRLHARWIAFDARRKQPAVANTAIARELAGWCWSLAVLKD

SEQ ID NO: 492437 - protein, 337 aa, unidentified
MPEVQILAIDLAKRSFQVCATDRAGSVLYNRVLSRAKLEALFREQPSCIVAMEACATSHFWGRLAEAHGHEVRLIPPIYVKPFVKRQKNDAADAAAIAEAALRPNMHYVAVKSAEHQARAVAYRTHQCFVGQRTQMINALRGHLAEFGLVFAQGTPHLKDIRAAMQDENIELPASVRDLACLYLDHIDALTERVDELALRLRAAMQVNAEMRRLCTVPGVGPVTAGAIMAFAPDLRTFASGRNFAAWLGLVPRQRSTGGKARLGSMSKMGQADIRKLLIVGAMSRIRWIVRKGVLPDNWLGRLMARRPRMVAAVALANKMARIIWAMMTREENYRLA

SEQ ID NO: 492438 - protein, 375 aa, unidentified
MKKNSTGCKSPKASKKATKSTNVSVGMDLGDKASRYCMLDENGEVLREASVGTTKEGITQIFATMKACRVAIEVGTHSPWVSRLLKSFGHEVIVANARQVQLISHSSRKNDRMDAQMLARLVRVDPRLLRPIQHRSEQAQEHLRVIRVRAALVEARTMLVNAARGLTKATGERLPSCDANQMGVERMESLPAGLQNSLRPLLEEVESLTEKIQALDQQVEQIARTDYPETRLLRQVSGVGSLIALTFVLTVEDRERFQKSRDVGCYVGLRPRQSDSGESEPQLRITKEGDPYLRKLLVQGAHCIMGRRGPDTDLKRWGLKLSARGGKNAKKRAVVAVARKLAILLHRLWVTGEVYEPLRNNQAEPPVKGTGEAAA

SEQ ID NO: 492439 - protein, 439 aa, unidentified
MSALEMAVEKMEFAALIGMDWADQKHTWSMRTADGKVHRGELKHSPEAIQVWVGELQQRFGERLVAIALEQSRGSLVAMLSKYAHLVLFPIHSKTLKYYREAFQPSGAKSDPRDADLALEVLHMHRDKLRCLQPDTEETRKLQFLTEQRRDLVNRQTSEKQILIAWLKQVFPQVLEWFGDVGCQSVRDLLLKWPTLQSLQEVRPQSLRHFFSGHRCGNGEEIEERIAQIRAAVPATHDRALLEAGVLVIQSRLRLLSELHASILEFDRGIEETYRKHPDRAIMESFPGAGPALEPRLIAAVGTQRDRFTSSDNLAMYVGIAPVKEASGKQKWVHWRWACPKFIRQTFHEWAGCSMRTCGWAREHYEAQRAKGKGHHAAIRSVAFKWIRIFFRCWRDRTLYCEETYLRTRQARQPQPQPAAQQLVWKSCAGFVKLAKISS

SEQ ID NO: 492440 - protein, 344 aa, unidentified
MQIRSVGIDLGKTTFHLVALGDKGKVLLKKKFTQKQLIAFTANMQTCLIGMESCSGSHFLGRALREQGHDVKLIPAQFVKPFVKSNKNDFIDAEAIAEAVERANMRFVPIKTDDQLDLQALHRVRERLMTRRTALINQIRAFLLERGMVFAKSPARLREHMPGILENAEENLTPRMRNLVAMLWSEWKDLELQIAEMNDEMERIASSDDACRRLRQIPGIGPLVATAIVASIGNGAAFSKGREFAAWLGLLPDQHSTGDKARLGAISKRGNCYLRKILIHGARAVVLRSKRDRIAMGAWMTSLETRAPRNVLIVATAHKLARIAWAVLSTGQDYRAAAPEALAA

SEQ ID NO: 492441 - protein, 381 aa, unidentified
MLYVGIDVAKNKHDVTVIDNTGKMVLKPITITNRKQGFGLLHNTLKQLRQDCLIAMEDTGHYALNLLTFLHQKNYTIYTYNPLLIKEFTKSLSLRKTKTDKKDARTIALKLLSDPNRALFMHDNKQEELKIMTRHMNRLKKHQSDWKVQYTKCLDIIFPELHQVVSKHSDYVYELLKCFPSPEKMVTAGFDKLIEIKRLTAKHALDILELAPNSIGTTSFAREFELVEIIENIQHYEKLIKQAEKKIDELMAELNSVITTIPGIGNRLGSVILAEIRNINTFTNPAQLQAFAGLEPSIYQSGQLDTRGKMVKRGSSHLRWALIQAAIKVARYSSTFKAYFRIKLEQGKHFNVAISHVAKKLIRVLFHLLKNSEPFDEVKLR

SEQ ID NO: 492442 - protein, 351 aa, unidentified
MQYVGMDTHKEFSQVCVMDEQGNVLLEEKVPNEQQAIDKMIAKLEPGSKVVMEASSCYQYLYDYMEQNGFDMSLAHPLKVKAIASARIKTDKIDAETLAHLLRANLIPESYVAPENVRDERQVVRLRASLVDMRTQMKNKIHAMLARNGVKFEGSDMFGKSGAAWLQMLELPDASRFELDQYLNLLPVVDERIDTVQKQIELMAADNYHAKLLMSMPGVSYYSALTVMAEIGDITRFPDAKHLCSYAGIVPSIHQSGNTRRMGHITKQGSSMLRWILIQAANRMIRTDSNLKNFYLKLRQKKGHQIAITATAKKILIYMHAMLKNNVSYSALQVNKKIPLCAMRTGRTMVS

SEQ ID NO: 492443 - protein, 347 aa, unidentified
MNFYNSIHAYYCGIDLHARTLYVCIIDQAGNTCLHKEIPADQDKLLNIIEPYKDTIVIGVECMHCWYWVADLCEQQGIHFILGHALYMKAIHGGKAKNDRIDSFKIANLIRGGNFPLAYVYPQAMRATRDLLRRRMKIARHGADLKAHVVNTTSQYNLPPNKLNLKNITAREQLKSTFSNTSVQKNIDLDMVILDCYAKQLAKVEWFIEQQARQHKPIHLHILKSIQGVGRILSLTIIYEIGDINRFESVQKFASYARLVKCKAESDGKTYGTQGNKIGNAHLKWAFSEAAVLYLKGNKKAQAYLLTLQKRMSKAKALSALAHKLGRCVYYMLKNETVFDENKFLKG

SEQ ID NO: 492444 - protein, 414 aa, unidentified
MKRVGGQSHLKERRNCRIAVGIDVSKGKSTVAVLSGLGELLLSPRDYPHKEDSLNELCTWLHSLNDEVRIALEFTGYYHYSIRDKLIREGFFVSVVNPYLMKKFNDGSVRKGKSDKKDAIKIATYCVEKRNHLKPWNYLGKPYETLKFLSRQYHQMISLKTKQKVQLDNLFDLVMPDVKKVFLLTNRPTSCLALYDFVEKFQSWKVIKDMTYSTFEKRFLSYMKKKGYRPNASKAQRLYNIAQNSLLPREANYCTSLILKQRIQLAKSTESATVAILKQMQELVKTLPEYELVHSFNGVGDILTPLLIAEIGDIRRFTSGKALNAYAGNDAPPFQSGTYLGTRRHISKRGSPFLRKVGYEVILALKISKPIQDPVYQFILKKQAEGKPKMVANMAGLNKFLRIYFARVMELFAI

SEQ ID NO: 492445 - protein, 394 aa, unidentified
MIYAGVDIAKTDHVIGAVDERGAEMCRPMPFKNTEAGLERAAAWLEGLAGSPSDVVVGMEATGHYWMACYSFLVARGYSVAVINPMQVKAVRKLKKLDKVKNDRIDAWLIAETLRIGQYDETRLATDEVASLRSLSRYLQSLRGMAAELKTQCVCLMDAHFPEYAGIFSDMFGAGSRAVLSKSPLPFELARRRADSLARDIAEASRRGGKSAGYAARIKAAARSSIGVRLGQEAASFQVKSLIRQIEFADSECAKVEARVRALLDEVEPLVLTIPGVSYVTGAQIVSEIGDVSRFRNASALVSYAGLNSSVSQSGQFDSGGGPITKHGSPYLRRALWLAANRARQHDPGLRAFYDKKRAEGKPHRVAVTAVARKLCHIVFAVMRDQVPYDPGRE

SEQ ID NO: 492446 - protein, 327 aa, unidentified
MTRIVCGVDISSVSLAARIGRSGAQASFPNHADGILALAAFCHAHRVELVAMEATGGYERQPFALLSEQGLAAAILNPRSVRRFAEGMGLAEKTDAIDAGLIAWFAEVKRSPAQQPAPAGRQQLRALVTRLRQLTEVRTAQLNQRRLVDEPAVLASIDQLLDLLKRQMQQLQTAIAEHIEADPLWRELNCEFRSIKGVADRTVARLMAEMPEIGTLSHKAISKLAGVAPLASDSGKHHGKRRIRGGRSTVREILFLVASVAGRYEPDFMLFQQRLKTTGKPPKVVRIALAHKLLVRLNAKARDVRRRIAATAASQTIAGLNSIPAAA

SEQ ID NO: 492447 - protein, 342 aa, unidentified
MEYYAGIDVSLECSSVCVVDASGKIIREGKVASEPDALINWLKSRGYELIRVGLETGPLSQWLFAAMREAGLAVELLETRHVRKAFEAMPVKSDRNDARGIAQLMRLGWFRPVHCKSMGAQEVRAVLTARKLIQTKLQDVENSLRGILRGFGLKVGKTTDRSFTGRIQELVKGQPSLEAIGEALLSVRAGLLREFNAFEKRVRAMARLNARTRLLMSTPAVGPIVALTYASAIDDPARFKSSKQTGPHFGLTPKRYQSGETDYSGRISKVGDASVREALYQAAHVMLTKPVKGCPQLKSWAMRIARRAGMSKAKVALARKLAVILHRMLANGTPFNAAAAAA

SEQ ID NO: 492448 - protein, 351 aa, unidentified
MLLIGVDYHPSFQTIAFLVEETGEYGEQELNHSDGQAEKFYRDLKQRGIGVRVGMEATGYSRWFERLLAELGFELWIGDPAEIKAKRVKKQKFDREDARLLLRLMRENNFPKIWVPSPENRDLRQLLWHRHRLVQMRTRIMNQLQALAMNEGKRWKKKLWSAQGRTELEKLPLAPWASRRRRELLELLDRLDPSIEELSKAVEREARKRSDALRLMTHPGVGALTALAFVLIIGTTERFQRGKQIGTYVGMIPSEDSSAGKQRLGHISKQGNSLLRFLLVEAAQAAARVNPHWRRRYMHLAMRRHKSIAKVAMGRRLAVRLYWMWRNGCEYSSSLEFGSYVGQLETGHGVL

SEQ ID NO: 492449 - protein, 406 aa, unidentified
MMNAVGIDVSKRKSTVTILRPGDEVVLSPVDIPHTRSSINKLIGLISGLDGDTKVCLECTGRYYEPMASSLSDAGIFVSAVNPLLISMFGDESLHAVKTDKADSSKIARFALARWSKLPQYGLMDETRNQLKTMNRQFGFYTDRKTAMKNNLIALLDQTYPGANSFFDSPARDDGHQKWVDFVYTYWHVDRVRGMSLNAFTRDYQKWCKRAGYNFSYTKAKEVYEASADLIAILPKDDMTKMLIRQAIEALNAVSSAVETLRIKMNETAATLPEYPVVMGMRGVGPSLGPQLIAEIGDVTRFEKRGSLIAFAGVDPGKDDSGDRNRKSVPTSKKGSPHLRKTLFQIMDILIKTAPVGDPVYDFLDKKRSQGKPYYVYMTAGMNKFLRIYYGRVNEYLAQLEEAEES

SEQ ID NO: 492450 - protein, 348 aa, unidentified
MARPTVGVARRVTGGVDTHLALNVAAGVDDIGGLLGVAEFPTTSAGHKMLLEWLESFGEVARVGVEGTGSYGTGLARFLRGAGVQVLEVDRPNRQSRRRTGKSDPADAIEAARAALSGRAQGAGKSRDGNVEAIRALVVAKRSARSSKVKALNQIRHLGFTAADDLRARLEGVSREHLGTTAALLRPRAGSDPVTFATKTALRTLGQRVLALDEEKALLDELLGKLVRDTAPSLLELHGVGVDTAATLLVTAGDNPERIRSEAAWAHLCGVAPIEASSGKLVRLRLNRGGDRQANNALWGIVITRLRNDPRTQAYMERRLKEGRSKKEVIRVLKRYVAREVYAHLPRP

SEQ ID NO: 492451 - protein, 311 aa, unidentified
MEVVYPCCCGLDVHKKSITACVLWAEARGKSRKEKKRFATFTHDLLQLADWLAQCGVTHVAMESTGVYWKPVWNILAEQFEVLLVNAQHIKAVPGRKTDQKDSEWIADLLQHGLLRGSFVPPQSIRELRDLTRYRVSLVQEINRIANRIQKVLEDANIKLASVATDALGASGRAILEAMLAGEQDAARLAEMSKGLLRNKIPELQLALEGRMTEHHRFLLRQLYDHLRFTESKLREIEQEIEKRMRPFEDKVTRLCTIPGVERVTAWGLLAEIGLDMNQFPSSGHLASWACLCPGSFESAGKRVLRAPGNG

SEQ ID NO: 492452 - protein, 340 aa, unidentified
MTVIIGIDPHKASHTAVAIGCDEQQLAEIRVRATCQQTAKLLAWAQPLGERTWAVESAGGLGYLLSQQLVEAGEHVLDVPATLASRVRVLGTGRSNKNDPNDALAVAIAALRSPGLRSVEPANHGEVLRLLGKRNHDIGRLRNIVVSRLHAALANLSPGGIAKELNASDAVRLLGDFNPKTAVEQTRYDLALELLDDVRRLDVQLKESHKRIKTAVQASGTTLTELYGVGPILACELIGYTGDVRRFTTRDKFASYAGVAPIELSSGGRIVHRLSRRGNRQLNHAIHMVAICQIRQTNSEGRAYFERKVAEGKTKREAIRSLKRHVANAVYRQLLVDTNK

SEQ ID NO: 492453 - protein, 340 aa, unidentified
MDEIKTIGLDLAKHVFQVHGVDASGATVLRKRLRRSQVMAFFAGLPHCLVGLEACATAHYWGRELQALGHEVRLMPAQYVKAYVKRNKNDAADAEAICEAVRRPTMRFVPIKTAEQQAALLLHRGRERLVRQRTTLVNALRAHLAEFGVVAPAGLRNVNRLIDIVRDASDQRLPDLARPVLRVLATQVELAQAAVAKVEKELIAWHRSNPLSRRLATIPGIGPIIATAIAATVVEPSGFASAREFAAWLGLVPRQHSTGGKARLGGISKRGNRYLRRLLINGASANLLRSKATNADPWVIGLRRRRPSLVVAVALANKTARIAWAVMHREEDYHSMSAAA

SEQ ID NO: 492454 - protein, 367 aa, unidentified
MPDSTAVTFVGIDAHLSTLSLAVLPSHGPAVDQPRTIANEPAVVRRVFRRLLHLGPVHAVYEAGCLGFSLRRRLEELGVHCDVAAPSLVPARPGEHRKTDRLDAQRLAHFLRSGDLVLVSPPTAESEALRSLTRARCATKQDTKRVKQRINSFLLARGLAWPGKTKWTRDHRLWLRNLEFDLDDDRFVRDFLLRELKQREDSVAELDLRIEERAKHQDCCSQVADLRAFRGVDTLTALSVLAEIGDPRRFRSGYLVGAFCGLVPSEHSSGPRVHRGEITRSGNRHLRRLLIEAATKYSLRIDEGVKLERRRMAASPAARTLARRAERRLASKYWRIARTRPANVARTAVARELAAFLWAALTPELQA

SEQ ID NO: 492455 - protein, 418 aa, unidentified
MQTELSQFTAIIGMDWADKKHDVCVQATETKQRKTYQIQHKADKIDEWARSLYQRYGGPIAVALELSKGPIVSALQKYDFLVIFPIDPTTLANYRKAFTPSGAKDDPTDAELALDLLLCHPDRFQALKPQSVEMRTLMTLVEQRRRLMNDRVRLTNRLRNALKQYYPQALEWFDRIDTPLFCDFIKRWPSLAQARRARKATLEKFFHEHNMNRKALLERRVTAIKSAMPLTTDEAVIVPYRLQALTLVAQLKVALESIRIYDEEIAGLAPQHPDYGLFNTLPGAGPSLAPRLLVAFGEQRERFTSAAEVQKYGGIAPVTQRSGQTTWIHWRWQCPTFLRQTFVEWAAQTINKSYWAGLYYYQQRAKGCSHQAAVRALAFKWIRILYCCWVTHTPYDEAKYLKALQDRGSPLLKMAEAA

SEQ ID NO: 492456 - protein, 367 aa, unidentified
MTSVSEWVIGVDLGDRESNGCRFRTATGEIEDFRFPTTREGITERFSEIERCQVVIEAGSQTRWVAQAIKQLDFDVRVLNPRRNELIKKSLNKTDKSDARCLARIAACSAPLVQEVQMRSDEAQKRLTIIRARDRMVSVRTKLASGVRGLAKQFGHRFAAKSPSALWKSEVPDELKPALDGMMLAIRNLSELIARYDQEIEATAQKQLPQVAPLSRIPGVGVLTAMAFVLLIEDPKRFKKSRDVGAYFGLRPRQFESGDSRKLLGITKTGDRLMRRLLVQCAAHIIGPFGKDSDLRRYGLAMIERGGRAANKRARVAVARKLAVMMHRMWVDGTEFRPLKDSTVASAAPEPPKRRKRSEAVKPSVNA

SEQ ID NO: 492457 - protein, 346 aa, unidentified
MTIVEDRRVITGGVDTHAGTHVAAALDPIGGLLGVREFPVTPAGYARLLGWLGGFGAVALVGIEGTGSYGAGLARHVTAAGIRVVEVDRSDRQDRRRQGKSDPLDAVSAARAAQSGRARGTPKGGDGAVEAIRALTVARRSARSGRTQAVNQARALIVTGPDDLRARFAGHTTAALVSGLASLRPRPGGTVGYATRIALRELGRRAEFLDGQIGRLDELIVPLVTARAPGLLALHGVGPDTAALLLIAAGDHPERLRSEAAWAHLCAVAPIPASSGKVTRRRLNPGGDRQANHALWRIVITRMSSHAPTRAYVERRTAGGLSKKEIIRCLKRYVAREVYRHLRPAA

SEQ ID NO: 492458 - protein, 315 aa, unidentified
MTQTNITTAGIDTSKAKLDIAVHGRTERWQVANALPGWRALAANLAKAGVTRIGIEATGGYERGVVEHLRSAGFTVLLLQPLQVKAFAKVHLRRAKNDALDAVLIAACAAALDPPEIAPDLRLTELADYLTFLEQIEEDIRRFKTRLEHIDEPALRRIVDSDIARLKARRAAQIRDIAKRLRAYDDLAKRLKLVLSVPGIGERTALAIVIRMPELGRVSREQAAALAGLAPFDADSGQHRGQRKIAGGRSRLRRSLFAAALPAAFRWNKALIALYARLMANGKVHNAALIACARKLLIYANTVVQRGTPWIEKAA

SEQ ID NO: 492459 - protein, 411 aa, unidentified
MEVIYKRCCGLDVHKEIVVACLLIREGGKVLKEIRTFLTMTVDLVVLHDWLKAHQVTHVAMESTGIYWKPVFNLLEEDFTVLLVNAAHIKTVPGRKTDVKDCEWIGDLLSHGLLRGSFIPPEPIRDLRDLTRYRKSLTDERVREVQRLQKFLEGANIKLSSVASNVMGVSGRAMLEALIAGSTDPQVLSELAKGRLRKKLPELKKALEGRFRSHHGFMVAEILTHLDFLDEAIERVSQEVSSRMIPFSKKVELMDLIPGINQRVAEGVLSEMGVDMSCFPSHGHAASWTGLCPGNNESAGKRKSGKTRKGNQWLRRYLIEASWSAVRKRGTYLSALYYRLVPRRGKNKAIVAVAHAILVMIYHILKNQVPYHELGSDYFNKLNAAYVQRHHVKRLESLGFKVILEPLPKAA

SEQ ID NO: 492460 - protein, 390 aa, unidentified
MSQPNDSNKSVIPLEQDNTMIAVIEMGQASWLVAGIVPGLERQPLKKLGSDEQALFQLLQRWRNEAVQTGRTIKRLVVAYEAGRDGFWLARWLRARDIEAYVIHPNSVAVSREHRRAKTDRLDTELLKRAFLGWLRGEAGHCSMAAIPTIEEEDARRPNRERENLVGERTRIVNRMKATLARFGIRSFKFTLRHADERLNDLRTAEAASLPANTHAELRRDIARLRVVSDQIKEIEQQRLQRIEQAAPSKKSPHAMIRLLARVIGIGVETADMLVNEILSRQLRDRKAVARYAGLTGSPDESGKRRREKGLSRAGNARVRRGMIQLAWRFLMFQKDSALAQWYRARTAHARGGTRKTMIVALARKLLIALWRMVTTGEIPEGISLHPAVA

SEQ ID NO: 492461 - protein, 412 aa, unidentified
MEVLVERCAGLDVGKDEVVGCVRTPSPSGRGRSSESRTFLTFTSGLEELADWLRANGVVEVVMEATGPYWKPVWYVLEERDFDLKLVNAKHVKMVPGRKTDVADAAWLAQLLEHGLLAGSFVPPAPIRELRDLTRYRKRLIQTHTAECQRVQKVLEDAGIKLDSVASDVLGVSGRAMLRALVAGERDPDTLAELAKGVLRKKIPTLRLALQGRFREHHATMLRVILDHVDYLESAITDLDGEIDRVIAPFGEARDRLDTITGVGKRSAECIIAEIGIDMTQFPTAAHLASWAGLCPGNHITGGKQRSGRTTKGNRWLGEILYECADAARHTRDSYLAAQYWRLRRRMGHRKAAVAVAHSILVISWHLLTKNCDYDDLGGDWFIRHTDTDKRRDHLIRQLHDLGYGVTLTKVA

SEQ ID NO: 492462 - protein, 375 aa, unidentified
MATIARLGIDTSKSLFQLHGVDEREEVVLRKQVRRGQFLGFVAKLAPTKIGVEACGASHYWARQLQALGHEVVLLPPQHVKPYVGRNKNDKIDAAAICEAMSRPRVRERFVAVKSAEQSAAQMLLGTRDGLLHRRTQLSNTIRGHAAEFGLVTPKGLAHIKPLLERIAADDTVPALAKELFAALGEEFAELAPRIARLDKKLKAFQRSDELCRRLVEVPAIGPVIASSMVVKIGNPAAFRSGRRCAAWLGLTPRDHSTAGKMRHGGITRAGDEGLRAALVSGATAYIQQVKRGRTRPSPWLAQLLKRKPEKLAAVALANKTARIAWKLMVSGERYDRARAEAREGLGATQHRGSTPSPSLHPHTADQGASTMTVA

SEQ ID NO: 492463 - protein, 342 aa, unidentified
MQITTIGLDIAKNVFQVHGIDAGEKVVVRKQLRRSQMLAFFEALPPCLVGMEACASSHCWARELTKLGHQVRLMPAKDVKAYVKRNKNDAADAEAICEAVRRPTMRFVQIKSVEQQARLMLHRARDLLMRQRTQLINALRAHMAELGIVAAQGREGVKELLRIIASEQDARLPVDAHASLVVLAAGLQALQTMIGSIERRIIAQHRSDEASKRLRSIPGIGIVGATAIAATVPDPKVFRSGRDFAAWIGIVPRQDSTGGKQKLGPISKQGDQYLRRILVVGAHAVLKRARHQPEKYPWITQLLARKPYRVVAVAVANKMARVAWALLAKGGTYRAPALAAAA

SEQ ID NO: 492464 - protein, 417 aa, unidentified
MNNRIIVPNTLILGIDIAKENHYGQFVVNGEYIKKPFLIKNTRESFECLLDSIRQLKAKYNLDYVLVGMEPTGHYWKNLAYYLKSQGIELCLVNPYHVNKIKELEDNSPTKNDKKDAKIISKLIYQGQYLNCMFEEELYVNLRLCSNNRQELKKQFISEKVRLIALLDEYFPEFKKMFSDILGKSALCILKTCPFPQDIVNIGVSELTQKLLDATHNRVGFKKAELVFNAAKTSIGVPVGLEGARYRLRLILRQLEALQKELDDVEKLMEEYLLQTGYSEYLLSIKGVGIVTAAGFLAEIGDISKYDSYKQIQKVAGLNLKETSSGMKKGKTKISKRGRSNLRNILYQAATVMVAKNAAFKEIYTHLTKRQENQLTGKQAIVALSVRLIKVMYTLCKKKTTYTHDKVHGLTSYQQAA

SEQ ID NO: 492465 - protein, 343 aa, unidentified
MGDVITIGLDIAKSVFQIHGVDADGAVVIRKRVSRAKVLEFFAAVPQCLVGIEACPSAHYWSRKLEVLGHTVKLMPPSYVKAYLKRSKNDANDAAAICEAVTRPSMRFVSTKSEQQQSGLMLHHSRRLLVRQRTMLSNAIRGHMAELGIISAKGRNGTGELLEVIANAKDNCIPAAARFSLEVLARQYIAIATEIGVLEKRIHAWHRSCEESRRLEEIPGVGPIVATALIAEVGDWKAFASGRSLAAWIGLVPKQYSTGGKERLGGISKQGNRYLRWLLVAGAMAVIRYARRHGTKRLWLTRMMERRPIKVAAVALANKIARMAWAIIVRGERFREPRLLLAA

SEQ ID NO: 492466 - protein, 359 aa, unidentified
MIVDEVQLVVGVDTHVDTHTAALCDGRGRPLAERRVPTTPAGYAEVAAWARVAAGDAAVVWAVEGTRHYGLGLSRFLTGQGQRVVEIDRSRHVGKRRAGKSDPIDAVRAAKEFLARPAQAQLRADGDREALRVLMVDRDHAVDAVRSARAVLTSLIVTTPSELREQLRGLTRDRRARECARLQHPADADRQSRVLHQSLARLGQRIVDLTIVIDELEAEISEIVDDLAPGLVADEPGLGALSLAQILLSWSHAGRIHSEAGFAMLSGTAPVPVSSGRTDRHRLNRLGDRQLNRALHIVATNRMRHHPTTVAYVERRRAAGKTDKEIRRCIKRYLARHLYRRLNRLETSPKLAVSGVDTT

SEQ ID NO: 492467 - protein, 379 aa, unidentified
MTRFAAVTTPKHTLHAALELSKNSWLLAIQFPDRDNPSLYPIRGGNAEGLMAKLDAARKRLAKVSGQTPKVTLCYEAGYDGFWLSRLLEQRGIECLVMEPASLQVNRRARRVKTDRIDVEKLLHTLIAWCRGERHVCSMVVIPSVEEEDLRRSHRERDRLVRERTAQINRIKGLLFGQGIRGINVKKYYKTLAPAELVTGDGRPLPKRLGREITREIQRLALVQEQLVEVERERGLAPTPCQATERKRHELLRLKGIGPTFAAVLSREVYYRHFANRRQVANYIGLAPSPYDSGDSRRSQGISKAGNSLVRYTMIQAAWLWIRHQPNSALTQWFRRRTEGESKRMRCVMIVALARKLAIALWRYVELGLIPQGATLSAR

SEQ ID NO: 492468 - protein, 340 aa, unidentified
MEHILGIDLHSDNGYYGIIEPDGKRVFKRRIPNDLPTVLTALGPYKGTITNIVVESTYNWYWLVDGLMENGYNNRVQLANPAGFSPYKGLKHADDKTDAFFLTELERLGILPVGHIYPKEERPVRDLLRRRMMLVQQRTSHILSFQSLITRQTGTSMPCKNIRKFEEDYVKEILDEEHLILAGETNISIIRFLTKKIHLLERAVLKRIKLKPEYEKLLTVPGIGMILGLTIMLETGEIGRFASAGNYTSYCRCVKSKRMSNSKKKGEGNRKNGNKYLEWAYVEAANFAKRFSPEAKKYYQRKMVKTNRIVAIKALASKISKACYFIMRDQEVFKTEKIFG

SEQ ID NO: 492469 - protein, 442 aa, unidentified
MKQKKVLKKVVRGLPKNLQHINVHAAGIDIGSRSHFVAVPEGIDEMPVREFSSFTGDLEQMAAWLISCGVTTVAMESTGIYWIPAFEILERHGIEVKLVNARHVKNVPGRKSDVLDCQWLQQLHTYGLLRGAFRPDAQVCTLRAYVRHRAMMVRSAASYIQRMQKALSQMNLQLHNVVTDITGLTGMRIIKAILSGERKPEVLAAMRDRRCKNSVATIARSLHGSYRPEHLFSLQQAVEFYEFHQEKISACDLQILEHLKSFDSQNDKPPKNVEEALQLMSGVDLTSIDGIDTNTALKILAEIGTDMSRWKSAKHFASWLGLSPGTKVSGGKVLSSATKPVANKAAAALRIAAFTLLNSKSALGAYLRRQKARLGAPKAITATAHKLARLVYMMLKQGTAYVDAGQEYYEKRYRGRVVQNLKRRAQELGFELVAIQEAMTPA

SEQ ID NO: 492470 - protein, 373 aa, unidentified
MSATGLCKPEQLQEPHSHLQGWGIEIMANGIVVGIDISKNTLDVAIGRDGAATVFSNDQEGHQALVAVLRRQPISLVVMEATGRYQFACACACAPQAAGFQVAVVNPRQARDFAKAMGRLAKTDRVDVLMLAELAEVIDKRPDRDRLTRPMADETQQRLHALVTRRRQLVRLQVSERQRKYASHSDVQPGIIELMNILKRQVQDIDASIAAHLAKYQVSLTKLFQSVKGVGPATTAALISELPELGQLKAKQISSLVGVAPMNRDSGQSRGKRMICGGRATVRSALYMAAIVAMRHNPLIRACYERLVAAGKPKEVAIVACMRKLLIILNAMVRTGRPWKETAATAQDDAEAHIVPQRGRGAQSFIACTRPSP

SEQ ID NO: 492471 - protein, 326 aa, unidentified
MKQILGIDISKAKVDVALSADNKQFAQAEFANDAKGHKALQKWLKGHHVQELHVCLEATGRYGDEVAHYLHAQGYAVSLVNPSRIHAYGQSKLRRNKNDRLDARLIADFCATQEPELWTPPSVAQRELQELSREISTLKNDRQRKRNKLKSGLSSLKTRRSVERHIRFIDQEIAKLEQDIEQLIDKEPALKEDIELLTSIPAIGITTAVRFVAEVDISRFQQAAQVAAYAGLIPREHSSGTSVHKKARLSNVGNRHLRTAFYMPSLAAHRSNPIIRALVDRLTERGKSKMTIIGAVMRKLLHLAFGVLKTRKPFDANHLHIIPVGG

SEQ ID NO: 492472 - protein, 388 aa, unidentified
MPAAETPVAYLGIDVGKSSHSACALDAGGGVAFRAELANRPDDIDRLLERAGSGALVVVDQKRNIGALVLARAHAHGNPCAYLPGYAEKQARGMFPGIAKTDAIDAEVIARTALGVPRALRPAPEEPEGTASLRILSSQREFASSARTRAKNRLRATLLEADPALEGAVDPSSRWQVSMLAEFGGAAGCSAAGWRRFSNAARRAGAPAAGARRLWEALLASSRSGRRLPAGEDVAVRILAREIASLDADIEELDSLVADSLAGDEVYECLLTVPGIGPKTAAALVTSIDISAFRGHDELASYCGVAPSDRRSGSSIRATSPQHGGNRRLKNLLIFSCNSLIGTDNRFGRYYGECRARGMRHSKALKAVARKRLKVIYAIMRDAVPYAA

SEQ ID NO: 492473 - protein, 337 aa, unidentified
MEVYAGLDLHSTNTYVAMIDRENKVLYKQRHRNELPSILSALDPFKKDIRGVVVESTFNWYWLVDGLMGQGYPVHLANPSAIKQYEGLKQVDDKRSSLWLANLLRLGILPTGYIYPKEERPTRDLLRKRLHLVRHRTSHILSVKNILARSLGVGMRSKDVKELTDAQVKALFPDKEMCLAVMASVDLIRHLQENIDDIEKVVKKKVKLKEEFAKLLTMPGIGEILTLTIMLEVGHIDRFPTVGDYSSYCRLVKSTRSSNGKVTGHGNRKSGNKYLCWAYIEAAQFARRFHDTVRSYYERKMAQTNRIVAIKAVSNRLARASYFVMRDRVDYDQARLF

SEQ ID NO: 492474 - protein, 345 aa, unidentified
MKQYAGIDVSLEYSSVCVVDADGRIVREAKLLSEPDALTAWFAEHGVAMERIGLEAGPLSQWLYAGMAKTGLAVELIETRHVRAAFKTMPVKTDKKDARGIAQLMRLGWFRPVHCKSLAAQEVRALLTARKLIQGKLHDIEMSIRSILRGFGLKVGPTTRRTYAARICELIEGHPTLEAIAASLLKARDALADEFACFERKLRVIARQDDKARRLMTTPGVGVLVALTFAAAVDAPERFRTSRAVGPHFGLTPKKYQSGETDYSGRISKIGDVGVRTALYEAANVILTRPVKGSDLKTWALAVARRAGPRKARVALARKLAVVLHRMLRDGTNFLPRKAAPAMAG

SEQ ID NO: 492475 - protein, 337 aa, unidentified
MTIIRIGLDAAKHVFQLHGVDASEAPVLRRQLRRSEVEKFFAKLPPTRIGLEACGASHHWARVLRGLGHDAVLLPPQYIKPYVKRGKNDAIDAAAICEAMSRPGMHFVPVKNAEQQAVLTLLRTRDLLIKQRTMLSNAMRGHAAEFGVIAAKGPVKLAELLQRAHAEDAGVPALALEMLRLLSDQIDSIAAKLKTIEERLLAWHKQDPVSQCLVTQPGIGPIGAVSFSLKVPDPRAFRSGRHFSAWLGLTPRENSTGGRHRPGRISRQGDEILRRLLVLGATARIRVAAAGKASPWLINLLARRPRKLAAVALANKMARTLWAMMVSGELYRQPAEV

SEQ ID NO: 492476 - protein, 310 aa, unidentified
MECYIGIDVAKATLDIAAVPSGETWTVPNDEAGLHELVPRLLALTPTLVVLEATGGFESPTVAALAKAGLPVSIANPRQVRDFAKALGRLAKTDALDAAILAEFAQRVRPEPRPLPDETAQTLDSLLTRRRQLVDMLTAEKNRLGFARGVVQRDLLQHIRWLEKRVGDIDDDLHNVLRTSPLYQAKITLLQTVPGVGPITALTLVAALPELGALSRREIAALVGVAPLNRDSGTLRGKRLIWGGRAPVRAALYMAAVAGIRWNPVLRQFYTRLRTAGKPFKVAVTACMRKLLVILNTMMRQQQPWNAQHA

SEQ ID NO: 492477 - protein, 343 aa, unidentified
MTKIITIGVDLAKNVFQIHGVDASGAVVLRRQLRRGAVEKFFAQLPPCLVGMEACGSAHHWARVIGRYGHEVKLMPPAYVKPYVKRNKNDGRDAEGVCEAVTRPTMRFVPVKSVEQQATLAVHGTRALLVRQRTMAANALRAALSEVGIVAPQGYEGLRELMARLEEPSEELPEMMRGALLVLAKHWQALDADERVLEQQIAKAARCDRDARRLMEVPSVGPIISSTVLAKVPDAKLFRSGRDFAAWIGLTGKDHGTGGKHRPGRISKQGDRVLRALLISGASAYLRQQKARGITDPWLRDLLARRPYKVAMVAFAAKTARIIWAMLVKGEHYRDRASVSAAA

SEQ ID NO: 492478 - protein, 341 aa, unidentified
MEKVSTIGLDVAKHVFQVHGVDAEGAVVMRRKLRRDDVVAFFASLPACLIGIEACATSHHWGRVLMGLGHKIRLMPASYVKPYVKRQKNDATDAEAICEAVTRPSMRFVPVKSEEQQSVLMLHRVRELLVRQRTMLVNALRGHLAEFGIVTRQGIAGVGMLIGLAEDENNELIPPLARDALVPLVEQLRAAHEKVRELDHQIHAWHRSNELSRRLETIPGIGPITASAIVATVTDASLFKSGRQLAAWLGLVPRQNSSGGKDRLGRISKQGDPYIRRLLVVGAHAVLRFSHKGKTAPTRWAAELLTKKPYNVVAVALANKMARIVWALMTTGKRFATSPAA

SEQ ID NO: 492479 - protein, 330 aa, unidentified
MSPRPQFAGIDVSKDSLHVHIAQHLMDNDGPFRVFSFDHEGLALLKAWLLEHHVQHTVFEASGGYENTLRAFLLENHLPCTRLQPKRARAFAIGIGAIEKTDKLDARVLARMACVRTQHKEVLRSETQRELVTLMDFRLQLREDITRLKTQRQKQTNAWIKETQDERIRDLEVRRDALDKRIQTLVDGDKEMSALCELMCQLKGVSCVTAWSLLAYVPELGELSKREIAKLVGVAPMAKESGDFTGKRRCSRGRGKVKACLWMASLSVATHEEPFKQFYQRLKEKGKPPAVARVAVCRKLLTALNAIVRDGEGYKPELLLPRPGSLEKVS

SEQ ID NO: 492480 - protein, 387 aa, unidentified
MNQEKYIGMDVHDATISAAVMNAEGKVLMECVLETKAATILEFIQGLRGTLAVTFEEGILAAWLHDLLQPHVSRLVVCDPRKNALLRDGNQNDRADARNLAELLRTNHVHGVYHGNHGTRTLKELGRSYLALTKDSTRVMNRIKSVYRSWAIPCTGTSLYSRRHRAEWLAKLVEPGVRMRAEHLYQELDGLKPLRQAARRELLREASKHTAVKRLRQIPVIGPIRSALLVALLQTPHRFRTKRQLWAYSGFAVQTYDSGEFRFVRGKRQRNRERITVRGLNRNHNPDVKNLLKGGYLRHRTPRAVAGFLCCPGGERDAAQHGPSHPNPEDCRHRFNHVEERSEFRPQTVAATSSLSIAEEAPSIRRVPSASGRSISRDARFEGSISQ

SEQ ID NO: 492481 - protein, 316 aa, unidentified
MDQIIQNQPVFVGIDVAKKHLDIHIRPTGDSFTVSRDAAGLDQLVALLRPLNPTLIVLEATGGYETVVLATLGGAGLPVLAVNPRQIRDFARACGRLAKTDSIDAAVIALFAERIRPELRPLPDEQTQALGEVAARRRQVVEMISAESLRRQQSANRKVQRRLDAHITWLQQELTDVDADLDTAIRSSDVWCHNEDLLTSVPGVGKTVARTLLAELPELGTLDRREIAALVGVAPFNHDSGSHRGTRSIRGGRSVVRAKLYMAAWVATRFNAVIKAFYEHLIAAGKPRKVALVACMRKLLTILNALIRDQKSWQPA

SEQ ID NO: 492482 - protein, 358 aa, unidentified
MSNLKYSLGIDVSKKDFHCCLSVIDTEQSVKVKSSHKFSNSTDGFKLLVEWIKRSRKENLPVSCLMEATGVYHEQLAWYLYGNNFSISILLPNKAKKYLQANGAKSKNDKIDARGLSQIGAEKKLELWIPPSRKLHDLRSCTRQHQNLSEMHSTVNNQLEAITHSQFQSKEIIKQMKKMMHLLEGQIKEMDKVIEKIVKEDEILNTHYKNISEIKGIGMLSFAVIAAETNGFVLFKDAASLVSYAGYDVVENQSGNHVGRTKISKKGNSRIRRILHMPALCAVREDQPQFKNLYERVYKRTGIKMKAYVAVQKKLLVMIYHLWRKNEHYQASFNYSEKIIATAKAEATHDKVPEGTFH

SEQ ID NO: 492483 - protein, 381 aa, unidentified
MTTKATRNAQDTTSEGTLFVAFELSEKTWKLGFTTGHGQKPRERSVTARDQKRVLDEIAQTKRRFALPETAPVVSCYEAGREGFWLHRFLEAHGITNHVVDSSAIAVSRRQRRAKSDGLDVRKLLNMLIRYEQGERQVWQVVHVPSVEAEDQRHLHRDLETLKRERASTTARLKGLLSSQGIQVTSLTKLPEQLDAMRLWDGSPMPPGLRQRVLRVYAHHQFLSAQIAEVEAERCALLHDSTDASIDKIRQVMLLKGMGSNGSWLLVMEFFGWRECKNRREVGGLAGFTPTPYQSGESAREQGISKSGNRHVRWMTTELAWSWLRFQPESALSVWFRERFGSGGKRLRRMGIVAVARKLLIALWRFLETGVLPEGAVLKEG

SEQ ID NO: 492484 - protein, 315 aa, unidentified
MNTDLDIIVGVDISKNRLDVCIQEDGDYCTFGNDLFEISKLVEKLNDIQPVMIVVEATGGYEKGLIAALCEANLPVAMVTPSRVRFFARSAGILAKTDKIDANVLVRYGRAIHPPFVHMRTELQERLSDLMTRRSQVSLILIDEKNHLINASPTIQTLIKQSIEYLEQQIAVLESMIADLIDNSPELKRNEEIICSIPGVGKITAAILLADLPELGTLNNKKIAALVGVAPFNKDSGFYRGKRRIRGGRHSVRKVLFMAALASIRHNPMIKVFYERLLGYGKPKKVAIVACMRKLLIYANAMVHSQKTWDLSFVS

SEQ ID NO: 492485 - protein, 339 aa, unidentified
MELYTGMDLHSSNTYVGIIDGEGKRVFKQKLPNERQSIVEALRPYRSEIVGIAVESTYNWYWLVDMLMAEGYEVHLANPAAIQQYQGLKYADDQHDAFWLAAMLRLGILPEGYIYPKEERPIRDLLRKRGHLVRLRTSLIISLQNILSRNNGVKLKVNEVKALRTDRVAPLLKDNEDLALAGKISKESIDFLTRQIKAIEAVVEEKVELRGPYRGLLSIPGVGKILALTIMLETGPISRFAKVGNFVSYCRKVSSIWVSNGKAKGKGNKKSGNKYLAWAFSEAAELGRRLHAEPRAYYNRKRQRTNAMVAHNALAHKLARAAYYIIRDGIPFMAEKTFV

SEQ ID NO: 492486 - protein, 325 aa, unidentified
METKTLCCGIDVSHTMLDVCYQNNLGELFHLQVGNNIKGFAKIMEHTGVNYHFVMEATGVYYIRLAFYLHQQGCCLSVVNAISIKRFIQMHLERNKSDKKDAHWICRYAIEQHPPYWQMPDSAYFESKQLYNTIREYTEQIKRFNNQLHSLRLLPVPSKDTIRSLEKIIVCMEKEIKLLEQKLQLLLEQWQPEQLKNVSSIKGIGKRAAAMLIVFTQGFKHTENHRQLISFAGLAPTQYSSGTSIQGKPRIYKRGGKNLRDVLYMCSMNAMKTNVACKTLYERLRANGKTGKQALIAVCNKLLKQVFAVVKNNTLYQPNYCSAKP

SEQ ID NO: 492487 - protein, 343 aa, unidentified
MQTITTVGLDIAKSVFQVHCVDANGDVVLRRQLKRRYVLTFFQKLPPCLVGIEACASSHHWSRELQALGHTVRLMPPAYVKPYVKRHKNDATDAEAICEAVTRPNMRFVPTKTPEQQSCLTLHRTRHLFIRQQTAIINSIRAYLAEFGIVAPVGRNGVEQLLEVVADAKDTRLPEIARACVAALGTQLLALKAQILAFDRRIMAWHRSNETSKRLDEVPGVGPMLATAVVASIADPKAFRSGRDFSAWIGLVPKQNSSGGKDKLGSISKQGDRYLRSLFMTGALAVIRYAKIHGTKHRPWLTALLARRPTKVAAIALANKIARMVWAMMTRGERYKKPVALAA

SEQ ID NO: 492488 - protein, 477 aa, unidentified
MRPTCRGRLTVVCFNPSTKLTLVRPAELIVAMPQGMSTRRKFVSYFAPLVGLGEDEECVSREVGTDMQVVHERCCGLDVHKKTVVACILITLANGEVQRHIRTFSTMTAGLLALSDWLESLAVTVIAMESTGIYWRPVFNLLEEGRSVILVNAQHMKAIPGRKTDIKDSEWLADLLRHGLLKASFIPPAPVRELRDLTRYRKTLVQERAQEVNRLHKVLETANVKLTAVATDVLGKSGRAMLEALVKGATDPEILAELARGRLRQKLPQLQEALDGRVEPHHRLLLKHILAHIAFLEETLEQLQRDIEERLHPFEEAMTLLMSIPGIQALAAATIVGEIGDDMTRFPSAKHLVSWAGVCPGNKQSGGKRLSGKTTRGNATLRAILAEVVWVLSHMKDNYLSAQYHRLARRLGKKKAVMAVSHSLLVIIYQILSTKQPYSDLGADYFEQRDSARLTQRSVRQLEALGYAVTLVPKEVA

SEQ ID NO: 492489 - protein, 392 aa, unidentified
MYIVGIDIGKNHHEASIVSPEGKQIGPSLRFATTHKGADSLMSFIFKNIGNSPCVFGMEATGHYWYPIYSFLKAKGYTIYVINPIQSDSLRKMYIRQTKNDSIDSFLIAEVIRFGQFGTTSMADENILAMRQLCRYRDSVISSRTEIKLRIGTIMEQIFPEYEKQFSSLWMSTSMGILEKYLTPENIENAPIDELFEIIKDKSHNRLTKAKAISIKEAAADTFGIKIAQDAFSFQLKQLIDRMNFLDKQIEALDCQILEYYEKFDCYLHTIPGIGMIAAATILAEIGDINRFKSSSALVAFAGIDPTVRQSGEFSSTHNHMSKRGSPYLRHAIFLAATTCSFHNSPLNAYYKKKRDQGKHHLTATGAVARKLTTVIYAVLRDSKPYEPKKFC

SEQ ID NO: 492490 - protein, 345 aa, unidentified
MQTMYYIGLDVHKKKISYCVKDGSGHIHAEGAIPAARSDLDRWMKTLPAPWTAAMEATIFTGWIYDHLKPHAAALKVAHPLMLRAIAAAKKKNDRIDAHKIADCLRCDFLPECYMASTEIRERRRTLRYRNLLVHQAVQLKNKISGLLMEAGVSYNKQKLHKVGYFKELLAINPDINEGLKPLLRLCRETLVRLQKTESALVRSLQRDSLLAERVQRLMTIPAVGPITALTWALEVGDVKRFSSIKKAISYCGLCGAEKSSADTIKRTPISKQRNKHLQSVLVEAAKMAPRLSSELALIYDREKQKGNANRATLAVARKLVAYLVAIDRSQRDFLVVEKENCAAA

SEQ ID NO: 492491 - protein, 457 aa, unidentified
MKPIGRSQKSQKKSSKRQEPEIKVINPHSAGIDIGSREHWVCVPIAATESNVRCFGCSTPDLLALANWLSECGVTSIALESTGVEWIPLFNILSQHNFQVCLVNAHNVKTVPGRKSDVQDCQWLQQLHSYGLLAPSFIPEGEITVLRSYLRQRENLIQASSTHVQRMQKALTQMNLQLHKVISDLTGVTGLNILRAIIAGERNPQTLAKLAHRRIKSSPQQIRDALTGNYRPEMVFILHQELSCYQFYQQQIGLLEEQIEQCLSKLPSQTKETPPLNSQKKCRRSIKSGFDLHSHLYRIAGVDFTSIDGLSVVTVQTILSEVGLDPTKFKSAKHFSSWLGLCPGCRITGGKVKSSQTRRVNNRAATAFRLAAQAVSRSHSALGAFYRRIRSRAGAPKAITATAHKIARLFYTLWTKKESYLDRGADYYEQKYQERLIKNLKQRAKSLGLEVVEASST

SEQ ID NO: 492492 - protein, 354 aa, unidentified
MIIIGADYHPGFQQIAFVDTDTGELQERRLEHREGAEKFYRDLAAQELKVRVGMEASGHARWFERLLGELQFELWIGDAAEIRTKRVRKQKTDRQDAQLILRLLLENRFPQVWVPNWENRDLRQLLWHRHRMVQARTRIMNQLQAVALNEGLRCKKKLWRDAGREQLESFRLAPWASRRRQDLLGLLDRLTPTIAELTQAIEQEAEKCPAAQRLQTHPGVGALTALAFVLIIGRAERFECGKQIASYLGLVPLEDSSGQRRRLGHITKQGNALLRFLLVEAAQVTVRSDQEWRNRYFHLVLRRGRKIAKVAMARRLAVRLYWMWRKRWDYGQLTEFSSHAGQPGNRDGVMSNTE

SEQ ID NO: 492493 - protein, 319 aa, unidentified
MSVSKSEKMFVGVDVSKLYLDVFFPDTGVLTRVGNTESEIGELCQSLVKKTVPIMVAMEATGGLERLLLHGLGKHNIEVTVFNPRRVRDFAKGGGSDAKTYAIDAQIISQYAPVVNPNPTAMKSDHEQKHSALVTRRNQLLDLINQENNRLKQSWDEDAKASIREVLELLKKQLKSIDSRLSNMLAGDTENQRTIEILASVKGIGPVTISTILAELPELGTLNRGEVAKLVGVAPINRDSGSNSGKRFIGGGRGQIRRVLHMATVVALRHNPAIKEFYTHLKSQVKPSMVAIVACMRKLLTILNVLIKTNQLWENKMSA

SEQ ID NO: 492494 - protein, 420 aa, unidentified
MPDDRCRLGSNDVVIGLDLASAEHQAVVLTAAGQRLTRFRIPHSRAGLEELLRRTTPAALGRADGARVFAFEATGHLWEALAYVLRARGERYVVVNPLATFRVREARQLSREKTDLTDAEQIAQLCRTGLVTRTQLEPRPYLALRRAWGEYVRLREERARLKVLVAHQLYGLFPEFLRVWADLLQPGALAVLRTGLTPAAMAALSLTEFVAQARAHGAGHRVWRYKLAQVHREAAQTIACPDGLDVLAREVQRAVARMDMLTAHMTAVAAEIDIVLAELEEVPYLRTIPGLGWASVAGLLAHVGAITKYHHGRQLIKLAGTNPSRRDTGQTVGRGQRMSHRGRAGLREVLYLATLSCLQHNPRIRAHYDRLIQRANRPLPKMQALGACMNKLLLYAFAVMRRREAFQLDHDWQRTMARVA

SEQ ID NO: 492495 - protein, 369 aa, unidentified
MSERTRFVGLDVHKASITVAVAEAFGDPEEHGHIANDPSAVRRLMERLGGLDRHLEVAYEAGPTGYALHRQLTAMGIACVVVAPSLIPVKPGDRIKTDQRDAAKLARLLRSGDLTPVWVPDEAHEALRDLVRARDDAKVDLLRAKHRLSKFLLRRAIHPPVGVRAWSRAHDAWLARLTFEHAADGVVIEHYHAVVREAAERVRRLETALAQCAAASPHAELLAALQAIRGIGFLTAVTIVAEAGDLHRFPTARQFMAYVGLVPSEHSSGDSRHRGHITRTGNRLIRHVLGQAAHNARYRPNVSSSLRARQRRVPPAVVELDRRAQARLHARYRHLAGRIGTNKAIIAVARELAGFVWATGQLVPMAQAA

SEQ ID NO: 492496 - protein, 340 aa, unidentified
MSNPAVIGLDIAKNVFQVHGADAEGRCVLRRRLRRAEVITFFARLPKALVGIEACPGGHHWARELRSLGHDVRLIPPQYVRPFVKTNKNDAADAEGICEAVVRPNMRFVPIKSVAQQAAMMLHRTRALLLRQRTQLINAVRGHLAEFGLIARRGAHNIRELSDLIRDTEADKLPDAARAMLVLLLEQIREAQLRIRKTEQALEAWAKQSDACRRLLAIPGVGIMSATALVLTMDDPKRFRSGRHFAAWLGLVPRQSSSGDRQVLGGISKRGDGYVRTLLIHGARSLTRWRRESWAWLAGLLIRRPTNVAAVAIANKTARTAWAILARGRQFQPSRRAEAA

SEQ ID NO: 492497 - protein, 384 aa, unidentified
MDTIAVVGMDLHRDFSKVAMMAKDGTVLETRNIRHDSHKEMAEFFRELEDGTEVIMEAGFNWPWVADMAEEAGLKPHLGHAIRCRELAKGMAKNDRKDAIFLGKLWLAGGDVFPESYLAPQEVRVMRAKFRTRSLLVKIRSQMRNSIHGILHKYGVNCEEATDLYGKKGKKILAGLALPAVAREEMERKLAFLEDLGRHIESVERQLQSELPEDKRAVLLQTMPGIGPIIAYGMLAEIGEIGRFPDRRALASYAGVLPLDNESAGEDHGKRTNSRCNKALRWMALEAVRGAVRNSRRMRSLFERVKAKHPSTPGKAVIAVARELLETAHIILTRSVPYMETPPPRPGTVQVTDSCHSEIRGTRGSRRASQMGRSAAPERVQAAK

SEQ ID NO: 492498 - protein, 342 aa, unidentified
MAIIRIGVDLAKNVFAVHGVDETGKVVLARTVRREQLLEVLGAVPPCLVAMEACSGAHHWARRLQALGHTPRIIAPKFVSPYRMSGRQGKNDAQDAAAICEAAGRPAMRFVPMKTAEQQALLTVHRVRQGFVTERTATINRLRGLLSEFGIVLPLKAATVRRQAAQHLDEVPVWAQRALGDLLTHLAGLDARIDEYDTHLKLAARDDARARQLMQLRGVGPVGAGAIVATVGAAHEFRNGRQFAAWLGLVPRQYSSGGKQRLGRITKAGDAYLRTLLITGAREVLATAAGRTDRVSRWALALQARRGYMRAVVAVAAKNARLAWAMLRAGENFRLHEVAVTT

SEQ ID NO: 492499 - protein, 371 aa, unidentified
MKREYIGVDLHSTQITVHRIEVAESGGNAAGTVTRKNGRYTIEALETQFIETLHAGCAVCIEAGSGSHTLARIVALTGARAFVVHPLAMTHIFMTAKKTDKVDAKKLADCLKRHLESNDPGDALPEVYVADEEAQRLRMLVAQYQRVTAEMTALKNNLHALFRQWLVHTDKGMIIDKLDDYLKHPRMPPEAPMIAQREKKQFEELVAYRDELRAFIEALGVLRFRKEVGLLIGVNGISVFGAACIMGDIIKIDRFETCKNLASYLSAAPRVDASNKTVHIGRLNKSGRKMSFEILLQSVNHLVDGNPHLLAYTERKVGKSKNKIRATVVARSMRQIFYILKNREENRFINLVSYKTKERHMKKIQEALKSA

SEQ ID NO: 492500 - protein, 411 aa, unidentified
MDKIYDNCCGIDVHKKLIVACLRKGNRQEVREFGATTRELLELADWLKTSDCKMVAMESTASYWKPLYNILESSDLNAMVVNARHMKAVPGRKTDVKDAEWIADLLQHGLLQPSYIPDKDQRELRELVRYRKSLVGERTRELNRLQKMLEGANIKLSGTVSDINGKSARSILEYLLTGECINGAKYDEMYEQKIIAHNLKATKEQIIDDLNGVMTPLQRRMMKELLSHLDELNTHIKNLDDGIDNFMKPEEKQASQAIQDVTGIGNTSAQAIISVIGTDMERFSTDRHISSWAGLCPGDNESAKKRKSGKTRKGNSLLRTTLITCAHAAVKNKKSYFYAQFMRISAHRGKKRAYVAVAHSMLIAIYHILKDGVIFKDLGADYYNQFNKERKINAYLKKLKALGWEAPVVAA

SEQ ID NO: 492501 - protein, 375 aa, unidentified
MTKPTRYLGLDVHKDLIAVAVCDEMGPARSLGAIPNSPEAVERLMRKLTRDATILAAYEAGPCGYVLYRQLAVLQVPCIVAAPTLIPVKSGDRVKTDRRDAEKLAHFLRSGDLTPVWVPDESHQGLRDLLRGRQDAKQDQRRARNRLSKFLLREGLFPSDGSAAFSAGYFCWMKSLQLPVAAQARMLADYIAEVMHQDHRVKGLEADLAELVQTMPQAMQKVMAALQCLHGIALLSAATIVAEAGEMSRFRKAGQIFSYAGMVPSEHSSGGPRGVRRAGITKTGNRHLRHILVEAAWHYQKRPGVSAAVLKRRQGQDPRILAIADQAHQRLHRKFRRLEQRGKSGCKAAVAVARELLGFAWAIARQVDAPAGSFS

SEQ ID NO: 492502 - protein, 342 aa, unidentified
MTSEVCTIGLDLAKNVFQVHGADASGNAVFRKQLRRGQVLKFFADLPRCLVAMEACGSSHFWAREIGQLGHEVRMIPPAYVKPFIKRQKNDAADAEAICEAAQRPTMRFVGVKSEATQGAAVMLRTRDLLLRQRTQTINALRGHLAEFGHVAPQGLTHAAKLIAMIEDPQTALPEPARTALQFLTATLSQLNDQIRALDAQIVRRAREDALARRLMTIPGVGPLIANALVALAPAPETFKRGRDFAAWLGLVPRQHSTGGKQRLGSTTKMGERSLRRLLIMGANSEIVWRARKGAPPGTWLAKMLAHKPPMLVRVALANKMARIVWAIMARGETYRAPVAAA

SEQ ID NO: 492503 - protein, 416 aa, unidentified
MNAAGIDVSSRKSTVAVLRPFGEVVRLPFDVAHNTEGLASLAEQLKALDGETRVVLEHTGRYYEPVAKALHEAGLYVSAVNPLLIKEYGANSLRRVKTDKADAVKIARYALDNWADLRDYTPMDTIRYDLKTLNRQFQLASKQRTASANNLIALLEQSFPGIRKCFDSPVRSDGTQKWVDFIHTFWHVECVRKQSLNAFSERYRKWCKRHGYIFKQGNAVEVYSLAKNAVVLVPKSEVTKVLVQEAANQLTSISRSVETYRAEMERLASTLPEYPVVMAMYGVGKSFGPQLMAEIGDVRRFERKQSLVAFAGIDPMPNQSGDKNVRSNKSSKRGSPYLRKTLFNIMGIYLKCSPQDEPVYQFLDHKRSEGKPFYVYMTAASNKFLRRYYAQVRDYLSTLDDLPPVDMDSTGLKPSD

SEQ ID NO: 492504 - protein, 482 aa, unidentified
MKKRNIYQNQSQELLSLFEAAGSSAKVMCVPMDYAKKDHLVMFCNGHGDILRKPFSVKNAPEGIEYLLDQVTRSCRRRGIKKENVFLGGEDANSFAENFVNTLRFKGWLVAGVNAHDAKKQRTNLQASTDRIDLMGIATMLLNCRANCCPAASGIYRNLRTLVRHRRKLVVMLTEVKNRVHGIVDCLFPGFLNENKSGIVAFTQSSLYLMEDRFSPKQIRRRRRQTLIEILRRFGTSKAQETALKLQQYAAKVLHTPDEYVDTLQISLAQHVKHIRCLQEGIVQLKKEIAVNLAQTQGAFLTSVRGIGIVLAAGVTAEIGNPYGQRPLSNVVSYSGIIPRVKQTGGLDGKTYTGHVAKRCNRILKDYVVKSAYHLGLSGPEDLMADHKRRDASGQHADFGIGRRYLRMAMSLMRTSQVYLPPRLRRADTALEERAGYYLMSWPFLRDKWKKAGALEAAFSKDRPLGLWRQIVQELYDIKLKL

SEQ ID NO: 492505 - protein, 348 aa, unidentified
MTLTIVETCAITGGVDTHADVHVAAALDPIGGLLGVQEFPATVAGYSSLLGWLGGFGTVCLVGIEGTGSYGAGLARHVTAAGVRVVEVDRSDRQDRRRQGKSDPLDAVSAARAAQSGRARGAPKGRDGSVEAIRALMVAKRSAAGERTQTINQARALVLTGPDELRARFARHTPAALVAGLASLRPRAGDVVGYATRIALRELGRRAEFLDGQLERLDELIVPLVTARAPGLLTLYGIGPNTAALLLIAAGDHPGRLRSEAAWAHLCGAAPIPASSGKTVRHRLNPGGDRQANHALWRIVFTRLGSHPATRAYAERRTQEGKSKAEIIRCLKRYVAREVYPHLRPPAG

SEQ ID NO: 492506 - protein, 331 aa, unidentified
MKITRIGLDIAKQVFQVHGVDERGKVGIRKVLARAKVLQFFAQLPPCLVGIEACGSSHYWGRELTKLGHTVRLMAAQFVIPYRKRSKNDANDAEPICEAVGRPTMRFVAIKSEEQQSVLMVHRARTLVMANRTAQVNQIRGLLGEFGLVVPKGVARLRRELPEILEDAENGLPTLAREVLGGLLDQFHHFDARVAAYDRQIRALAAASEPARRLMQVEAIGPQTATALVASMGDPHVFNSGRSYAASIGITPRQRSSGGKERLGRITRQGDGYLRTLLVHGARAALRVIDKKTDAKSAWARRLRDRRHVNVAAVAHIASLSPSADGSGRRD

SEQ ID NO: 492507 - protein, 388 aa, unidentified
MIYVGIDIAKLNHFAAAISSDGEILIEPFKFTNDYDGFYLLLSKLAPLDQNSIIIGLESTAHYGDNLVRFLISKDFKVCVLNPIQTSSMRKNNVRKTKTDKVDTFVIAKTLMMQDSLRFMTLDDLDYIELKELGRFRQKLVKQRTRLKIQLTSYVDQVFPELQYFFKSGLHQNSVYALLKEAPTPTAIASMHMTHLAHLLEVASHGHFGKEKARELRVLAQKSVGVNDSSLSIQITHTIAQIELLDSQLFHTELEMANLVTCLHSVIMTIPGIGFINGGMILGEIGDIHHFSEPKKLLAFAGLDPSVHQSGNFQAQRTRMSKRGSRVLRYALINAAHNVVKNNATFKAYYDAKRAEGRTHYNALGHCAGKLVRVIWKMLTDEVEFNLE

SEQ ID NO: 492508 - protein, 371 aa, unidentified
MDESIKFFVGLDAHKDSIAVAVCEVGREPSRFVGTLGCDVQGVLKALRKYGAPRHVSVVYEAGPTGYGLHRELSQRGYHCEIIAPSLIPRRAGERIKTDRRDCARLAELSRAGELKAIWVPDEAHEALRNLWRAREDAVNMRLKVRQQLKAFLLRQDRRYAGKTSWTKMHQRWIADLRLAQPADQIALTEYDLAVHAADERVQRLTLALQQSVQGWRFEPLVAALRALRGIDTVSAIGLVCEIGDIGRFSTARQLMGYLGLVPSEHSSGNSVRRGSITKTGNAHARRLLTEAAWNYRFPARISNELRERSKTLAPAIRTHAWKAQVRLCSRFAHLSSRGVQANKVCVAVARELAGFVWAIAQQAACSPAAR

SEQ ID NO: 492509 - protein, 412 aa, unidentified
MEVLHPRCAGLDVHKETVVACVRIVSGGEVSRTVRTFETTTARLIELAEWLEANGCTHVAMEATGVYWKPVWQVLAGGGFELVLANAAHVKNVPGRKTDVNDATWLAELLAHGLIRASFVPGPEIQELRGLLRTRKQLVREKASHVQRLQKTLEEANIKLESVLSDVMGRSGRAMIQALIAGETDPAKLAALAHPKVRAPQASLREALRGRVKRHHRFLLDLHLQQIDALDAGIAAIDREVEAGLACFRDAVKQLSTIPGVSELSAQVIVSEIGTDMSRFATAAHLRSWAGLCPRNDESAGKRRSTRLRTGAPWLKATLVQCGWAAARTKATYLNAQFVRLRTRRGPKKAVCAVAASILTAAYHMLKDGTCYEDLGAAHFDRHRPAAQARRLVKRLADLGFSVELKPAAAIS

SEQ ID NO: 492510 - protein, 356 aa, unidentified
MSNLDYIGFDVHKKSISFCAKAQDGRILDEGKIVARHRDLDAWVQGRSRPWVGALEATLFTGWIYDQLRPMAQELKVAHPAMLKAIAASKKKNDRIDARKIADLLRCNLLPECYMASSRTRELRRLLLRYRNLVVRQATRMKNRIAGLLMETGTPYNKQRLHGKAYFAELLGSLQETPASVRELLQISRSQVELFETIQRKLVQELRGNLELAERMERLMSIDGVGEIVALTWVLEIGEVNRFSSIGRAQSYCGLTSAQNNSAGVEYGGPISKQRNKHLQTVLVEAAKLAPRWNSELAALHERELARGNRNRATLAVARKMVAYLMAVDKSGQPFRVKVRPEGTVESAATNRPEKD

SEQ ID NO: 492511 - protein, 496 aa, unidentified
MSAFLRRSGQNPHRWATKGMKSKKELLAKKKHIKRKSAKAKHNRVIGIHNPHAAGADIGATEIYIAVPPDRLEMNVRCFGTFTQDLRAIVQWLREYKVTSVAMESTGVYWIPLYELLEQEGFEIYLVNARHVKNVPGRKSDVQDCQWLQYLHSVGLLRGSYRPAQDICAMRAISRYRDNLLHFGAQHLQHMQAALDQMNLRLHHVIADLSGLTGMAIIEAILAGERDPRQLAKLRDPRIKASQETIAKALEGNWRVEHLFVLGQALQSWKQVQQQLGQCDQKLGELSSQLEGKIDLANSPLPPSAKYCGREPRSKNQPNGPWREELYRHFGVDLTEVPGLSLGVVQTLFVELGADLSAFPTPRHFAAWMGLCPDNAITGGKVIRRGTRRNRQRIRLALRLAATSLHHNKTQLGECFRRLRARLGAPKAITAMAHKLARIIWHLVTHRVGYDESIFAEREEQLLRRKQRQLRNLAHSLGFTLVPNPRPAATSNAEVS

SEQ ID NO: 492512 - protein, 315 aa, unidentified
MRNCIGIDVAKSFFDLHVPASSQSQCFPNEMQGIQACLKLCQDVRPELIIMEATGGYESLLAATLQAEGWPVAVVNPRRIRDFAKAIGQMAKTDKLDARIIAQYGATLEPLPSEQIDNNCRKLKALVTRRQQLVDMHTAESNRTEHAIDKEVKNSIAAIVGTIEKHIEKIDKQIKDHIDSQPQLKQKAEYLKSIPGIGDTTANLLVTELPELGCFNRRQIAALVGVAPINRDSGMFRGKRMTGGGRRNIRSRLFMPTLVAVRCNPLLKKYYLRLIEKEGKCKMVALVASMRKLLCIMNSMLKNNQYWQQNLIKNA

SEQ ID NO: 492513 - protein, 439 aa, unidentified
MNAYVKLHARVIIICPYQASETMDSDKEIVCGADIHRDFLIATMISRSGLKLQERFNMNQDGLLAFRSWIINHRCQRLAVESTGGFWYPIFTILEGHVEFILANAYQIRNIEHKKTDKLDSERIAIYCLNNLITPSRIYPKDYRDLRSITRARETLVNARSKIKNQIHQSLSTCCIKLSSVISDSFGKSGRYIIDRLLEGKTIDQIISGIPSKRIRKKEDELREAIKNGLDPVQVFLIKANLDVIDDISKKIKILEAEIAEKVKPFEDDLKIILSVPGVGFISAATIIAEMGDYRDFPSADKMAKYFGIVPSVYQSAGKLRTGKITKTGSKHMRRILVEVAKAISRTKKNSRLMRFFQRILARCGKKNIATVALARKVLCIIYHLLMNHENYQEPEVTKTKPKIPSSVSPIRMMDIDEMIKIISQAGYLVEKDLKEGCG

SEQ ID NO: 492514 - protein, 429 aa, unidentified
MNCTKNKKIEQVKETTMIVGIDVGSEKHYFRAFNWRGIELTRKPVLFSNSMEGFNSFYNTIVELMQENKLEEAMVGIEPTGHYWFDLGQFMGGKNIKFVMVNPHHVHKTKELDDNSPSKNDRKDPRIIAGLVKDGRYFYSYMPTGVYAELRNASNRRFVLVEEQTRTKNRLQKWIAVYFPEYKGIYTHIDAKGGLMVLKQAPTPEEITKLGEEGIIKIWKDAKLRGNGHKKAMKILNAAMRSIGLKAGLTEARMEMQDLIEDYELQTKRLERVNDLIKELCRQVRYADKLLEIKGIGITTVAGFIAEVGDITRFDSTKELQKLAGLELVADSSGKHNGRTKISKRGRKRLRYLLFEAAISVVGKNEEFKEIHRYYTTREKNPLKKMQSLIAVACKLIRVFHVILTKGVSYDASKMLEDIRHPKEQLKAA

SEQ ID NO: 492515 - protein, 382 aa, unidentified
MSRKKHNSSSVSTPTQLYLSFELGEQDWTLGFTVGLGQEPRKRKLAARDLTALEQEIARAKQRFGLPETAPVQSCYEAGRDGFWLHRYLLAHHIENLVVDSSSIEVNRRAKHAKTDRIDARKLVMMLVRYNLGEHKLWSVVHVPSVEAEDARHLHRELLALKRDQTRHINRIKGLLAGQGVHLPVGAHFLEQLDTVRLWNGTRLPPGGRARLEREYTCYQSIHQHILELEGVRAELLRTAEDASVGKVRRLLRLCGIGENCAWLYVMEFFGWREFHNRREVGGLAGLAATPFDSGEQSRDQGISKAGNSPIRAMAIEIAWCWLRYQPDSELSRWFNERFGKGGKRLRKIGIVALARKLLIALWRYLEDGVIPAGAQLKPSTA

SEQ ID NO: 492516 - protein, 514 aa, unidentified
MFKKPDSNQGLNVKSNRLSLLAFEFNGDTFIVIPIGIISKLVVTFLGAYFIIFKKQTIMKRKQISLEVVNPNAAGIDIGSRSHWVAVVQNAQDVKEFGVYSQDHQELCEWLKKHKVTTIAMESTGTYWQNLFSSLVVFGFDVILVNGRQTKNIKGQKTDILDCQWIQKLHTLGLLSSSFLPDSTTAVIRTYSRHRQNILKQSASAILKMQKYLRLMNMRLDVVVKDIVGLTGTKIITAFIAGEKSGKVLAQNRHYNCRKSEEEISKALQYNGREDYYFALKQEWETYLHLQKQIDQVDVQIKRHLEKVIDTDDDKKQHIASNKPYKRKNKNTIRNTDMNQLSYQYFEGVDLMAIEGVNDALLMAFISEIGLEGIKKFESSKQFTSWLRLAPNNKISGGRVLSHHLPKGSNRLKVALRQAANTIGNLKDGHLSDFFRRINYKKGRATAISATARKLAVIIWNMLTKGIPYHPPTEYLFLDQKRKLKMLSRIKKNIVKFDIRPEDIGLSKILNIST

SEQ ID NO: 492517 - protein, 341 aa, unidentified
MNVAVLGIDLGKPLCSLVGLDREGAVVLRRRMRLSSLAAFVEKQPRCIIGMEACCGAHHLARQFASLGHDVRLMPPEYVKPYVKSHKNDDRDAEAIAEAATRPTMRFVPIKSEEQLDVQTLHRARERLVGTRTALINQLRGVLFDRGIVIAKGRPKLNLWLRENVLDCTILTTRMQQLVHDMVDELHALDHRIKQLDQEFEALAKSDERASLLRSVPGIGALNATALAAAVGDVSAFAKGRDFAAWLGLVPRQITTGGKPRLTGITKRGSTYMRVLLIHGARAALPYLARMDTQLGAWLRALLLRAKRNVVVVALANKLARIAWAVMSKQRPYEAVTASNG

SEQ ID NO: 492518 - protein, 362 aa, unidentified
MDYFCGLDVGMDASAICVVDDKGEVVLQTSAVTDPGAIKAALKPYLGRLRRLGHEAGSLSPWLHPELIKLGLPALCLETLHVRAALKAQRNKTDKTDALGIAHLMRTGWFRKAHIKSEPCYRLRLLLTHRRNLKRKFLDLENAVRQSLKAFGIRLNRVGRGGFAQAVREAVAHDGLVSELTDAMLNARAALWKEYCRLHDLVVKLVAGHELCRRFMQIPGVGPIAALSFMTAVDDPSRFRRSRDVAAYFGLTSRRWQSGASIDVQGRISKAGDGDVRRALYEAASALMTRYKKKDKVKSWGLMLAKRASHRKATVAVARKLAVIMHAMWVDGTFYCGDPDVPQADLKARTAAKERKLLGAHA

SEQ ID NO: 492519 - protein, 315 aa, unidentified
MNSQILFVGIDVAQESLEIAVRPTAEQWQSTTDEEGLAQLTHRLQRLQPTLIVLEATGGLENLVAATLAAGQLPVVVVNPRQVRDFAKATGTLAKTDRLDAQLLARFGATVQPEPRPLPDPATQQVQDLLARRRQLVEMLTAERNRLGQAPAHLRERIAKHIEWLEAELAEVEGELEAVEQACAAWQQQSQLLQSVPGVGPVVARTLLAQLPELGRLNRKQIAALVGVAPFNRDSGTLRGKRAVWGGRAAVRAALYMAAVAAVRCNEVIREFYQRLRAAGKAAKVALVACLRKLLTILNAMVKHGTPWRSPLQST

SEQ ID NO: 492520 - protein, 357 aa, unidentified
MNRTHTLSFAGSHFSVGVDMHRKNWKVSIRSAGIELKTFSMNPSPLELLAYLHARYPGGIYHIVYEAGFCGFWALRVFQQHHVDCIIANPADVPTTNKEKTNKSDPIDSRKLARELEHNSLHGIYIPSLEQEELRMLMRLRYRIVQQQTRTKNRIKGLLHTQGVDIPLQFTGNKRWSHAFILWLKSLPMSTSAGTFTLHNLITQLKELRQHNTNILKQLRTEATQATIAPLINALLSVPGIGFITAMTLYTEIMEMKRFPNENHLASFIGLVPSLQSSDTTIYANNLTVRQNSFLRSLMIEAAWTAVREDPALTVKFNHLAQRMKSQDAIIRIARTLVRRIRHVWITHEHYVYSLVA

SEQ ID NO: 492521 - protein, 412 aa, unidentified
MSKIEITAVGIDVSKGKSTVAVRRPGGEIVMMPFTVLHTTEGLAELTNTLRSIGGEIRVVMEHTGMYWRPIALALKEGGFFVSVVNAMLIHDFSDNSIRKVKTDRADSLKIANYALTFWQDLRDYSVEDETRQMLKIQSRLYERTLNSSIALRNGLISLLDQTFPGANKLFDEQRTKAGHIKWVDFVRRFWHKDCVAASSLSSFADTFQKWCKRTGYHYSLSDAERIHGIARNSVATLTKNDSTKLIITQAVDSLNAVYDTLQILRNEMQHLASMLPEYEVVMAMQGAGPITGPQLMAEIGDVRRFTSKGALVAFAGVDAPPFQSGTFDSKSRHVSKRGSPHLRRVLFTICSVILQHSDPENAVFQFMDRKRAEGKHFYVYTVAGGAKFLRIYYAKVKEYLNTIDSQTGCVA

SEQ ID NO: 492522 - protein, 326 aa, unidentified
MFFIGIDVSKAKLDCSLLRDVTSSKRRAKSVANSKVGISELLIWCAKQQVNVHELHAILEGTGVYHEQAALALADAGATVSIVNPAQVKDFGRSLGVRTKTDGVDSLVLARFGAMLSPRPWTPPAQEARMLQALLARREAIAQDLQRERNRLEKADAADTPALIRQSIVESIAFLEKQLAKFQQDIDDHINKYPDLKADRDLLISIPAVGPQVGNHLLTVMHTHQFQSAEQLAAYLGLVPVERQSGTSVRGRPRLSKAGPARVRAILYMAAIVGTQHNPHIKALYQRLQDRGKTKMSALGAAMRKLVHLCFGVLKSRQPYQANYAI

SEQ ID NO: 492523 - protein, 342 aa, unidentified
MNGDYDGRQYVGIDLHRRRSVIVRMTEQGEQLGWVRIDNDPVALGLELAKAGPDPEVVLEATYGWYWAVDALQTAGAHVHLAHPLGVKGFAYRRVKNDVRDAADLADLLRMHRLPEAYIATPHERELRELVRHRAKLVALRSGLKAQVHATLAKQGQLPAASDVFGRAGMAWLRSAPLELVYRQRIDSLLELIDAYDGEIETFRTMIANRFTGHRGYRALQQISGIGPTFAAVFIAEIGDINRFSRPEKLCCWAGLTPRHRESDTTVHRGPITKQGSKLVRWAAIEACQHTRAGTKLSADRSRIIAARGRNIGIVAAARRLLTLVFYGLRDGEIRALAARAG

SEQ ID NO: 492524 - protein, 344 aa, unidentified
MNISMIGLDTAKSVFQVHAVDPSGKVAMKRKLQRGELIPFFEKHEACTVVLEACGAAHHWARVLTGLGHDVKLIAPEAVRPFVKKGRKNDAADAAAICEAASRPSVKFVSAKSLEQQSVLTLHSARCLLVKQQTMLANALRGLATEFGLTVPKGIGKLEELAALVNADEAFPETARHVLTGLFDHCRATAASIETVEAEIVVQARQDETARRLATIPGIGPITASLIAATVGDIGMFKSARHFAAWLGLVPRQYSTGGRNRLGRITKTGNREIRRLLVLGATSMVYRAPQWKSAAGLWTRAVLERRPVRLVTVALANKMARIAWALMTRKEVYHAKGRAAAAAA

SEQ ID NO: 492525 - protein, 392 aa, unidentified
MYIVGIDIGKNHHEASIVSPKGKQIGRSLRFATTHTGADSLMSFIFKNIGNSPCVFGMEATGHYWYPIYSFLKAKGYTIYVINPIQSDSLRKMYIRQTKNDSIDSFLIAEVIRFGQFGTTSMADENILAMRQLCRYRDSVISSRTEIKLRIGTIMEQIFPEYEKQFSSLWVSTSMGILEKYLTPENIENTPIDELFEIIKDKSHNRLTRAKAISIKEAAADTFGIKIAQDAFSFQLKQLIDRMNFLDKQIEALDIEIMKYYEQFDCYLHTIPGIGIIGAATILAEIGDISRFKNSSALVAFAGIDPTVRQSGEFNSTHNHMSKRGSPYLRHAIFLAATTCSFHNSPLNAYYKKKRDQGKHHLTATGAVARKLTTIIYAVLRDSKPYEPKKFC

SEQ ID NO: 492526 - protein, 342 aa, unidentified
MNTVYVGLDMGSSSFHQTAINNNGSITMNRSFSTSEANLRAAFADLRGEIHVHLEAGELAPWAAAVIGPLVTRVVCSHPRDNAWIAKDNDKCDRVDAYKLADLLRLNRFKEVHYAPDQPRRDFKQLVQHYDELTAHQARWKTKLKARLRMQGVIVTGERLFSATGRKAVLTRVKSRAVHTAISQLYEVLDQAVAAQEQARLLMLRAAQAFPEIKLLRTAPGVGPIGACRFSAYVHTPQRFSSTRKLWKYCRLSVSHRSSNGKPLRRPKLDYSGCGRLKDVSRKAFEVALRSRTDNGFKRTYQRALETTHDKTHARLTVQRKIISTLRAIWVTRTPYRDELSR

SEQ ID NO: 492527 - protein, 326 aa, unidentified
MNSVRMHIGVDVGKSSLDVCFPDGKKEHLNNNKPGRARIIHAAKKLGAIVCFEATGIYEEDLANECLAAEVRAARLDAWKTRQYAKSRGRIEKTDRLDSEMIRDFASSLEEGKLPFVKPRSAAHSLIKEYAKIRENLMNARVVVSSQLEFVRDKSARRNIIAIVERIEREIARLEDECGKAVDEDERMSSLSRRFLEVKGVGPCLVRAIFAECPDIGSFSKKGIAKFCGKAPIASKSCTVEKQSRMRRGRQGLRQAFHMAALSASKHNHVLRETYMRLMANGKPKMVALGAVGRHLAILLNNIAKYPDFKIRHEPEDGKRKLHATC

SEQ ID NO: 492528 - protein, 328 aa, unidentified
MAKPITICAGIDTGKRKLDVALDGSKEQLQVENTAEGHKVLLRWLHQHRVKRVGIEASGGYEQPVVSELRRMRIVVVVFQPAQVRAYAKFQLQRAKNDKIDAALIAACTAAVRKIHAAPDPRLQPFAEQLTMIDQIGEDIARLKNRSESCRDAQINKLWKADIARLEKREKAALKALVTSIRKHPDLARRLDLINSVEGIGLPTAVAILVRLPEIGRITREQAAALAGLAPYDDDSGEHVGVRHIEGGRKRLRRALYTASLAASFRWNPQLIALYQRLTAAGKQHKRALVACARKLLIFANTVVARGTPWCGQPPAAKASPTTASSVS

SEQ ID NO: 492529 - protein, 402 aa, unidentified
MTAPARPAPVVVGGSDTHADTVHVAAISTLGREVADREFPATAAGYRAAVAFLTSHGPVDQVGIEGTSSYGAGLARAVTNAGLQVIEVNRPSRADRRRQGKSDPLDAYHAARAVLSGRATSDPKDQSTEAIRSLHNTRRSAVKARTAATNQITAMLITAQDGIRSKYRALQGQPLITALAKCRTAVVDSVDAAVLTALKALAHRHQFLTAQAEELSTLIDALVTTANPALRAAFGVGPDTAAQLLITAGANPDRLRSEASFAALCGVSPVPASSGKTTRHRLSRGGDRHANNALYRIALSRMAHEPRTKQYVARHVAAGRSTKEILRMLKRAIAREIHRLLTHKVALPEYADLRPARQAKNITVTAAANAFNIWPTVISRIERGLQRDDDLANRYRTWLQAA

SEQ ID NO: 492530 - protein, 351 aa, unidentified
MYYIGVDYHKKYSYIVVKDEQGRREQKGMVDNTRQEFQKFLELYQPGKAVLEATRNWELVYDWLEEILDDVVLAHPLKVRAIAEARIKTDKISADILADLLRSNLLPEAYVPSKETREAKSILRQRMFFVRVQTMVKNRIHTISDRHPEVLSDAPDVSDLFGASGIEWLKQAVFPGEDNRLLVSELELLEVLKHKISQSNGIVRELGRGDNKVKLLRSIPGLGPFFSVLVAKEIDDIGRFSSPKKLCAYAGLVPSTYASGGKVFHGRITKQGNKWLRWALIEAVSPAVRSDPDLHAYYERIMIKKGRNAAKVASARRLLTIVYRVLTQGRLYERRTCKRIDLTRLPSCVPS

SEQ ID NO: 492531 - protein, 330 aa, unidentified
MNYSHFVGLDVGKKSFDASLVSLDQELSHHTFPNTPEGIEELLHWIKQHGVEVETALFCAENTGSYVIDLCLSSYQYHFPLALECPLTIKKSIGLQRGKNDRIDARRIAQYASLHYRKLRLYELPDKDLVRLRNWLVIRDNLVKQKVSSLKLLELTRETSRLADLMVPTTFLENQICQIKEKISYVEEEMEKIITENITLSTNYQLLTSIKGIGPVNAIVLLCVTDNFQRFSDPRKFACYSGVAPFEYSSGTSIRGKTKTSHLANREVKVYLTRAAITAIAWDPQIKAYYKRKIAEGKHKASVINAVRAKIIARCFAVIKRKTPFVTLSA

SEQ ID NO: 492532 - protein, 352 aa, unidentified
MEQFIGCDAHKKFSVFVAVNEKGQAGEACRVAHDREVYREFLARLPARSVIAVEATGHYGWVVDEFERAGHRPKLCNPYEAKRRMAMTKKTDKLDARGLAILLRNGTLPEVWIPPSELRDQRELLRLRLFLVRVRTRVKNRIHGTLARHNVQIPGSDLFTVAPRLQLGARLQELPLHSREAIEQELATLDFLKLQIESAERRLEAIMKASAEADLLKTLPCVGKILSMVLMLEIGNVDRFPTAAHLASYAGLVPRVHSSGGHTRMGQVCGNVNRNLKWAFVEIGNLIVVNQRWLAGTHVAKLYQRIKRVKNHQKAVVAVARHLAEAAWWVLSKQEVYREPQGPRQALSSTHG

SEQ ID NO: 492533 - protein, 412 aa, unidentified
MTAKDQFAAHVGLDWADKKHDVCVQFKNGDRIFHVIEHTPEALDIWLNELHQRVKGRIAIAIELKKGPVVYALQKYPFVTVFPIHALSLARYRQAFWPSGAKDDPQDAELALDLMLRYPHKIKAIEADNPDIRLLQQLVEQRRLLVEDKRRFVNRLINTLKQYYPQPLEWFSHRDSSLFCELIIRWPSLQQLKRARSDTVRHFMNAKGGPAVAYTEQRVASIASAIPLTTDKTVIEANALMATALASQIKLAGDLIRTYDERIESLFDTLPDAELFKSLPGMGPCMGPRMLAALGDNRDRFNSAEEIQNYAGIAPVTERSGQKSWVHWRWQCAKFVRQTFVEWTAKTVNSSYWARLYYRGQREKGKSHQSAIRALAFKWIRIIYRCWKTKTRYDEAKYLLALEARKSPLLKP

SEQ ID NO: 492534 - protein, 347 aa, unidentified
MKHYAGIDVSLNSSSVCVVDESGKIVREVKVVSEPVALIQCIKSLGMRVERIGLEAGPLSQWLHGALRESGLPVELLETRHVKAALSAMPVKTDRNDARGLAQLMRLGWFRPVHCKSMAAQEVRALLTARKLVQSKLYDIEMSLRGILRGFGLKVGPTTSRSFAARINHLAAGHPSLEIVAEALLSTHAAALCAFANLEKNVRQISRADARVRLLMSTPGVGPVVALTYVSAIDDPKRFTSSKRVGAHFGLTPKKYQSGETDISGRISKTGDSSVRAVLYEAAHIILTRPIHGGALKSWAMRLAKRAGMKKAKVALARKLAVVLHRMWISASTFDFEKANGCMRAAA

SEQ ID NO: 492535 - protein, 387 aa, unidentified
MEVRMVSTPSAATDNEPVHCYVAIELSKSSWVVGFQTPLTNKTSQYQVKACDARALLELIERIRKRVARELRRPVEVMSCYEAGYDGFWLHRVLKAHGIHNHVLDPASLQVNRRARRAKTDRIDADRMVRALIRYLRGEPEACSVVRVPSVEQEDAKRLHRERRRLIAERVQHVNRIKGLCATQGIYHYAPLRKDRLARLDDLRTGDGRALPTRLKAEIARELKRLEVLLEMIATVETERDVILTSAASTHLNAGKIKMLAKLKAIGPEFATTLVGEVFYREFANRRKLGSYVGLGSSPFCSGPVDRDQGISKAGNPTARSMMIELAWTWLRYQPGSALSIWFRERVGNLKGRPRRIAIVAMARKLLVALWRYLQTGLVPTGALLKA

SEQ ID NO: 492536 - protein, 342 aa, unidentified
MEHYAGIDVSLECSSVCVVDANGKIVREARVASEPQALIAWFGSLGFGLERIGLEAGPLSQWLFAGMKAAGLAVELLETRHVRKAFEAMPVKSDRNDARGIAQLMRLGWFRPVHCKSMSAQETRSLLTARKLVQSKLLDVENSLRGILRGFGLKVGKTTGQKFAGRIEELVAGHPHLQTIAKALLAVRAVLRTEFAAFEKQTRRMARSDRQARLLTSVPAVGPIVALTYASAIDDPTRFKSSKQAEAHFGLTPKKHQSGETDYTGRISKIGDAAVRTALYEAAHVMLTKPLKGCSQLKSWAMRIKRRAGMSKAKVALARRLAVIMHRMLADGTPFNAAATAT

SEQ ID NO: 492537 - protein, 477 aa, unidentified
MTTFPLTDHAGPVPIRHQYYAGIDIGYKNHTVAAIPVEAFGGRKPDTWQRAPVCKFSSDASGFEDLQRYLDKRSVDPNDFLVVREPTGGNYGLSLLFYLLGKSYKVVQVDNSAVGKYQELLAKETKTDPVDARTMARMGFIHEVIGQEFRIREVRQATEAQVALRILVTDYIRVQADVVRRRNQLQQVAAVGFPELKTFFKHSPTSATACAILAAFATPADIVSAGTEQVRRVLLEARAYTLAHHSDDLVALAKATIGVPLSERMRLRQTWLLEQIGTLEAQREQLLAQMEQASASHPYRPLIESLPVRSPIWTASLIAAIGDIAHFETPNEFRAYMGWFPMLDHSGKSANGTKLANRGVRLARRALGQMVFVLLTPRTADNPFRIYHQRLVARGMKPLKAVGHDAAKLATVLYYMLKTDRPYDEARHRRRMKLPQAQAAVVRPLDVPLEVLDAQVIEEQRHGYASDEIPQDEGAPL

SEQ ID NO: 492538 - protein, 360 aa, unidentified
MLAELVDAVVGIDTHRDTHQVEIALPTGAPIATCSITNDTRGYAQLLAFIVDHTPGPRLAVSIEGTRSYGVGVTRALGAAGLPIIEAEQPARKTRRGRGKSDPIDAHLAVQFALRLDADRLPTPRADGDRDALRILLGARHDLTMASTAQTNRLRALLRDGDDTDRELARGALPEDTLTALARRRLPHDATRAQAVRHGEIRRLAIALRAAARALKANRAQLQAIVDELAPGLTDRHGIGPVSAAQAIVSFSHPGRCRNDAAFAALAGASTLEASSGRTVRHRLNRGGDRALNRALHTIALTRMASCPRTRAYVARRTAEGKTPREIRRCLKRYIARELYRTLTATMINTTMISTAEIGA

SEQ ID NO: 492539 - protein, 409 aa, unidentified
MQPIIKSCCGIDVHKKMIKACIAKGPLDKPPKFEIKTFSTMTSDLLRLKDWLRQNEVEKVAMESTGVYWKPIFNILEDEFPIVLANPQHLKKTPGKKSDVIDCEWIATLLRCNLVPGSFIPTKPIRELRDLNRTRRKLVGVMAADKNRLQKVLEDANIKLTSVVSKVDGVSSMNLIQALMTKDELTRDEIKALVHGKLRSKIDQLVEALNGKLTDHHRFLLKIHLENIAFMAEQIQELDEEIAKRMIPFQKEAHLIQTIPGISTTTASAIIAEIGVDMSQFQDEARLSCWAGICPGNNESAGVKKNGKTRKGNKFLKATLVEAAWSASKKKGSAYSAIYNNIARRRGKRRATVALGHQILMDVFRVLNTGEPYVDEGAEAVFQRNSAARQQSAIRLLEQSGYMVTKAAA

SEQ ID NO: 492540 - protein, 316 aa, unidentified
MAKRVKEITLGVDVSKDELVIYDWDTEETITLENKASIIKDWFENLCGLVRVAIEPTSNYHLEFVEQGHALGFEVYLINPRQLANYRKAVDVRNKTDPLDAWLLARFLTRECDSLRPFKPLCAQSKQLWSLLKRRAAAVKARTQLKQSFAEIKLPTKALFSEIQRVLDRIDQRMMELIRKLGWWLDYQRCKSIPGAGKLNAAALVTVFHRGAFAGADAFISFIGLDICVRESGKFKGKSKLSKRGEAEIRRLLFCATQPARSYQPFDDYYLKQLVKGRSKIAAKCALARKLARIAFSLMTNQQSFKKQEIAYSISP

SEQ ID NO: 492541 - protein, 349 aa, unidentified
MSQTAQTAVAVIGIDIGKNSFHIVGHDERGAIVLRQKWSRGPVEARFANLPPCLIGMEACVGAHHLSRKLNGLGHDARLMPAKYVRPYSKGQKNDFRDAEAIAEAVQRPTMKFVATKTADQLDLQALHRVRERLVSQRTGIINQIRAFLLERGIAVRQGQRFLRAELPRILATPPDVLSPRMARVIEDLASDWRRLDERIEGLSAEIDVLARADSGCERLMSVPGIGPIISSAMVAAIGTGDAFTKGRDFAAWLGLVPRQMSTGDRTILGKISKRGNRYLRVLFVQAAWVVLIKPKSWERHGLKAWIEAAKKRLHHNVLAIALANKLARIAWSVLARGRGFEASKLQVA

SEQ ID NO: 492542 - protein, 320 aa, unidentified
MTQGKSFIGIDIAKTRLDVAIRPTDQQWQADYTEEGIQELAKQISELDPALVLLEASGGLEVPVVAALAIANLPVVVVNPRQIRDFARATGKLAKTDALDAHVLAHFAEAIRPASRPLPDADTQALTALVARRNQVMSMLVAEKNRLRTSRLPIRQRIQPHVDWLEHELDEIDRDLREMLRNSPVWREKENLLRTVPGVGPHMAISILAYLPELGTLNRKRIAALVGVAPFNRDSGTLRGKRAVWGGRSRVRAALYMATLVASRHNPVIRTFYQRLLAAGKAKKVALTACMRKLLVILNAMLKHRCSWQRPNSQIIGPCS

SEQ ID NO: 492543 - protein, 343 aa, unidentified
MQVVRIGLDLAKYVFAVHGVDARGKIVLRKTLRRDSVSRFFANLPPCLVGVEASNGAHYWARVLTELGHQVRLISPQFVTPYVKSNKNDRNDAEAICEAISRPSMRFVPPKSTEQLAVQAVHRIRRRLVSDRVKLVNQVRGLLAEHGIVIPRDITQLRRGLAELVERGNDDLSELVRSLMRELREELAELDRRITSYDRRIREIFRNSEPCQRLGRIEGIGPITATALIAAVGDRTCFKNGRQFAAWLGLVPKQRSSGGRARLFGISKRGDRYLRTLMIHGARAALARAGGKQDPRSLWLEKLRQRRHPNVAAVALANKNARIVWAMLAGNAAYEPELSMNAA

SEQ ID NO: 492544 - protein, 316 aa, unidentified
MQTVRDLGADVDSRTFVVACAARSVAPQRVANERRAILAWLRTVPPASRLGLEATGAHHELLADLAHRAGLQVFVLNARDVRRYAQGLGRRGKTDRVDAEVIARYVAHEHSELHAYLPPSKEQRALSRLIKRRAKLVAIKGALAQSLRGVPGVRQELHQVSARLERLIAQVEALMQCALHQLPAAHQAAQRIATVPGYGPLGSTCLGYTFTRVPYLNSDAVIAHTGFDPRPADSGQKRGRRRLSKRGPGELRRVLFNCAMAAAKTTLWRPYYQAQRRKGLSSTAALVILARKMTRVAFAVYQRDQPFDATRLRFNA

SEQ ID NO: 492545 - protein, 417 aa, unidentified
MKNIIMVPNTLILGIDIAKKNHYGQFIVNGEYIKKPFLIKNNKESFDCLLEIIEELKEKYETVHTLVGMEPTSHYWKNIAYYLKNKGIDICLVNPYHVNKMKELEDNSPTKNDKKDAKIISKLIYQGQYLTCMFEEEIYINLRLCSNNRLELKKQLIAEKVRLIALLDEYFPEFTKLFSNILGKSSLAILKSCPFPNNILDIGIEKLTQILKDATKNRVGLKKAILVYAAAENSIGIPVGLEGAKYRLELILKKLEWLQKEIDDVETLMKEYLDKTGYADFLLSIQGVGIVTAANFLAEVGNVSKYDDYKQIQKVAGLNLKETSSGMKKGKTKISKRGRANLRNILYQASMVMVAKNQAFKEIYQHLTKRQDNKLTGKQAIVALSVRLIKVMYTLCKKKIMYSHDKVHGLNSYQQAA

SEQ ID NO: 492546 - protein, 311 aa, unidentified
MTKLIAGMDLHSNNVVIGLMDMDGKRVAHQKVECRLSEVVKFLAPYKKRLEQVAVESTYNWYWLVDGLQALRYPVVLANPAGMEQYSGIKHADDTNDAFFLAELLRLKILPTGYIYDPHLRPVRDLLRRRLTLVHQRTALMLSFKSLYTRTTGLEMSLGELKELEIKAAQELYDHPANQLIAGMQIKHIEQLTESIEKIEKAVLGCARELPLYTKLTTLPGVGTILGMTITMEVGDIKRFAEAGHFASYCRTVEAKRTSNNKKKGPNNSKCGNKYLAWAFVEAANFARRYDEQCRLRAKRWPASWPRLPGI

SEQ ID NO: 492547 - protein, 364 aa, unidentified
MTFDTAKLHHAVAIAEEGRTGEVRFLGEIENSEAAAVKLVKKLSQRYRRLMFCYEAGPTGYELHRLIGRLGHECMVVAPSLIPKKAGDRVKTNRRDALELARLLRAGELTAVWVPDVRHEAMRDLTRAREAAVADLVSKRQQVLSLLLRLGRHYEGKRHWTQMHMKWLLSQKLAHAEQRIALEEMLLAVREAQGRVARLEQAIRTALPDWSLAEVVTALMAMRGFDLVSASAFLAEIGDLSRFATARELMGYLGLVPSEQSTGETTRRAGITKAGNRRARRILVECSWSYRHPPRLGKEKLAKVEAAPRAVREIAWKAQHRLTARYRALTRNGKKPTVVVTAIARELSGFVWAIDRAARPATVR

SEQ ID NO: 492548 - protein, 349 aa, unidentified
MLADRLDYVIGVDTHRDQHTLAVVAAATGAVVAQIVVETSARGYAEAHRFAERHAAGARIWAVEGAGHYGAGLTRFLAARDETVVEVGRQPRGERRLRGKDDALDAIRAARSGLASEAPALPRAGEHQEALRVLLLARRSAVDVRRVALVQLRSVIVTAPEQLREELRRLPLGQLLRRCSRFRRSESRPVDQHAIVLTLRSLARRIDAAATEADELEREILDHVRTLAPDLLEEPGVGPIVAAQLIVTWSHRDRVRSEACFARLAGVAPLPASSGLTTRHRLSRGGDRQLNRALHTIVLHRRQHDPATRDYIARRIAEGKTSRDATRLLKRYLARHLYRVMQNSSLAMT

SEQ ID NO: 492549 - protein, 345 aa, unidentified
MNKISMFFVGLDLGDKLSYITIIDQEGELIEESRLPTTRASFQRKFSTLQSCRVAMEVGTHSRWASHLLRELGHDVLVANARKLKAIYHNPRKGDRADAETLARLARLDPELLSPIHHRSPEAQADLAVLRSRDATVRSRTLLINHARSIVKSSGARLPSCSADSFAHKVAPDIPETLHPALLPILDTIASLTKQIREYDRQIELLCQDQYPETKLLRKVSGVGPLTALGYILTLEEPDRFRASREVGPAIGLVPRRDQSGDQDPQLRITKTGDPYLRRLVVGSAQYILGPFGPDCDLRRWGLKLAERGGKNANRAARRAKESCGWCCQEASRAASPSLENRRNL

SEQ ID NO: 492550 - protein, 339 aa, unidentified
MTQVITVGIDLAKNVVCIHGVDTHGHVVVKKRLARQKVLPFVAQLTPCLIGMEASGGAHYWAREFTKLGHRVKLMPPQFVKPYVQSQKNDPNDAAGICEAVERPRMRGVPVKSVVQQDVQALHRIRERQIKARTALINQIRGLLAEYGIVIPQRASQVRHKVPFVLEDAENGLTATAREWLHALAEELQALDLRIAATDQQIERVFAADEACQRLAQLPGIGPLTATALVAAVGDATDFKNGRQFAAWLGLVPRQHSTGGKTTLLGMTKRGNRYLRTLLIHGARAVLRAVDRKTDPRSRWLQGVKARRGKHCASVAQANKTARVAWALLAKDGHYRQAA

SEQ ID NO: 492551 - protein, 339 aa, unidentified
MKDIKILGVDIAKDVFQLCGIDEWGKVIYTRRVKRAQYVSTIASLKVGCVVMEACGGANHWYRTFMGMGIPTQLISPQHVKPYVKSNKNDRNDAQAIAEAASRASMRFVQGKTVEQQDVQALLKIRDRLVKSRTALINEIRGLLQEYGLTMARGAKRFYEELPLILASEAVGLTPRMKRVLNCLYTELLNRDEAIGDYEEELKAVAKANEDCQRVQSIPGVGYLTALSVYASVGDIHQFHRSRQLSAFIGLVPRQHSSGNKEVLLGISKRGNVMLRTLLIHGARALLRHVKNKTDKKSLWLKALIERRGMNRACVALANKNAPIIWALLTRQETYRCGA

SEQ ID NO: 492552 - protein, 341 aa, unidentified
MKNKLYAAIDLHSNNNVLVILDEHDRIVCERRLPNELPAVLSQLKPHGKKIQAIAVESTYNWYWLVDGLMDAGYSVKLVNTAAVVIYDGMKYSGDEHDARHLAHLLRLGILPTGYIYPKEERAVRDLLRKRAQLVRCHTAQILSIQNLVSRNTGHGITADKIYKLDDEAVNELCADDATRALAVQSSLAVLRCLDEQIRGLERVVLAKAKLKPQFEKLLSVDGIGNILGMTIMYEAGDMGRFAKVGQFASYGRCVSSSRWSNGKKKGEGNRKNGNKYLSWAFMEAANFAIRYNQRVRAFYQRKRAKTNRVLALKTVAHKLARACYHVLTDQVEFDVARAFA

SEQ ID NO: 492553 - protein, 342 aa, unidentified
MTIVAGFDVHRAQITFDALDTDTGELRRGRIDATPAAVESWVERFAGHEVHVALEACTGWLFASRALERAGAVAHLAEPVETHALRGRKRRAKTDREDARWLRQLLGEGRLPESWMPPEHVREWRSRSRLRKALLDERTRWLQRIRATLFHHGVDGAPERLRTGDGREFLEKLELPADALERIEIALEMVDSLERQLRPLEAELRKLARRQRGCRALMDLYGMGELTSLVTLTELGDVQRLSASRKAVRMAGIDIGVHRSDRRSRVGKLNRQGSPQLRWALYEAAQSACRPSSPDRQDYLALKARGLSHTRASLTLARKLARRSFHVLSALGPDALEPITTA

SEQ ID NO: 492554 - protein, 370 aa, unidentified
MLDTTTFIGLDVHARSIKAVSLDVMTGEVRCATFGYDAGAVAGWVRSVDPKARCVYESGVTGFDLQKRLSGLGVDCVVGAVSKMIKPSADRRRKNDRNDAEFLARMLSVGNVVEVWVPDDECEAARDLTRALEDARDDLSRSKQRLSKFLLRHGLVFDERTPAGRRKGNWTRAHWSWIESIRFAEGADNEALAYYVDAVRRAAEDKARLEGLVEAETRKPRWRKRVDSLRCLKGVDTATAADLVFEAGEFSRFRNARSFAAWVGLTPSEHSSGESDRGGAITKAGNKHLRKALVEAAWHYLTCSARPKEPARGQAPDPGARRHAAKGARRLVERRGALLARGVHNNKANVATARELACWVWAVGLMAEEA

SEQ ID NO: 492555 - protein, 396 aa, unidentified
MLDDGSQPAKLFNADNNQLGAETLVERIYNIAKEHCVSDILIGTEAASMYDWHLLEYLSESKLALEFNLKLYRFNAKWIKNFKKSLAPRGKTDPIDSFAIAERLRMGRLPKEYIPDIKYQPLRKLTRFRFHLMQQIAREKNFFLASLFLKAGAYSRISPFGSTFSATSLAVINDFFSVDELAAMPIEELTEFILEKGKSHFSKPAEIVDNLKRAARESYRLKPELAPAVNLILASTYNNIRCYKDQVKLVDSAIAENLKAFKHTLESITGIGPVYAAGIIAEIGDVHRFPNDSSLAQFTGLTWPKHQSGKFQAEETRMSHTGNQYLRYYLVEAANSVKRCDATYKAFYEKKYAEATKHHHKRALVLTARKLVRLVWTLLTKQVLYQPGYSSTSLAV

SEQ ID NO: 492556 - protein, 337 aa, unidentified
MKKFYIGIDISKEKLNFCYRKGLEIVLEEECTNDVAIIKKAFRNSLKTLNSTFDDVLVCAEYTGRYIYPLTVACQDMGLFLWIDDPTRIRNSFGIIRGKNDAIDAARIAEYAFRYSDKAVRYTIASKALVSIKNLLSDRGFLLQDRKRYQTQITDQRKYMEHSEFKRKSQRWNKVIKVIDEQIKAIDTEIDNLIASEPMLAHQKELLKSIDGIGDRIAINMIAVTAGFTRFRNARHFCSFAGLTPYRYDSGSSIRSKSRISKRANQNIKALLHLSAVNVATRMKENEYREYYERKIKEGKHVMSVLNVLRAKLVHRMFSVIARDEFYTKKYMPDFVK

SEQ ID NO: 492557 - protein, 355 aa, unidentified
MASITLLGIDLAKDVFQLHGLDELGRPQLKRTLRRRALVQFVAKLPACTIAMEACSSSHHFSRKFQQNGHEVKIISPQFVKPFVQGNKNDAADAEAICEAASRRKMRFVATKSVVQQDIQCLHRVRKRLVHNRTALTNEIRSIVGEFGIVFAKKRSALVKGIKGLLNGSCPREELSSEGLTLLQDLYSELLELDQRIENCELKLKKISSQPQCQRLFKVGGLGLLSVTALAVALADPGQFKNGRNFAAWLGLVPRHQGTGGKNRILGISKRGDMDLRTLLIHGARAKLRGINAKCRAERKLDPLEDWAYRLCQRQGYNKATVALANKNARIAWSISAHKTEFESHQAVASLKKGA

SEQ ID NO: 492558 - protein, 376 aa, unidentified
MNNHSEAFVAFDTSKLRNAVAIADGDRQGEVRFLGEIDASPAATAKLVKKLSTKYPRLMFCYEAGPTGYELYRQIKNLGHECIVAAPSKIPKKPGDRVKTNRRDAMSLAKSLRSNELTAVWVPDRHHEAMRDLVRAREAAMLDLRSKRQQVSAFLLRHGQHYPVDKKTWTKAHMSWLASQKLEYLEQRIAFEEMMLAVRQAQERLDRLEQAIRAAVPDWSLAALVTALMAMRGIDLIAATTFLAEVGDLSRFQNPRGLMDYLGLVPSEASTGDKIKRGPITKAGNRRARRMLVECSWSYQHPPRVGREKQQKVDAAPAAVREIAWKAQCRLNRRYRALIRRGKLKTVAITAVAREFAGFIWAIGREITITTRGAAR

SEQ ID NO: 492559 - protein, 416 aa, unidentified
MNNESPVVAGMDVHKKMLAVVVAKVDGNRIEYLSERFGTTRQDLDQLAHWLHQQQVTEVAMESTAQYWMPVWLALEEQFTLYLAQPRSTAAPKGRKSDWADAQRIVRRLLAQDLTLSYVPGREQREWRTMTRTRVEMSAQQVRLRNQMEGLLEQAQIKLSSVLSDLLGVSGRRILREMVQGETHPAYLASLVDKAVKASEETLQEALGGKLTATHRLLLKMYLEQWDLLASQIDQLNTRMAQALSQHQAAVHRLVEIPGVSLTAAQQIIAEVGPEARAFAAPQKLASWVGVCPGQHQSAGTEYSHRSPKGNRMMRRVLVQCAWASVKVKGSIFHQKFRALVPRLGPRQAIWAIAHRLLRIIWKLLHDQVNYVERGLDTNPAAVQLRIKRHLKELQRLGYAVNLSALAAIRPQEASV

SEQ ID NO: 492560 - protein, 346 aa, unidentified
MEHYVGLDVSLKLTSICIVDRTGNVEREGAVASDPEAIATFIKLHAPHVVRIGLETGATSTWLWTELNKMELPVICIDARHAKAALKMQINKSDRNDAMGIARIMQCGWYKEVCVKDLDSHATKALLVSRALLVRIKRDIENQIRGLLKNFGLVIGRAKMNVFAMRAAQLAEDRSELLAAVDPLLKAREAVEQQILDLDRKVLRLARNNAQVRRFMTAPGIGPITALCFLATIDDPARFKRSRSVGAYAGLTTRRYASGETDWTGRISKCGDKMLRSYLYEAANVLLTRVAKWSALKAWGVRLAKRSGLRKAKVAVARKLAVILHRMWIEGTEFKWSSKDAADQPA

SEQ ID NO: 492561 - protein, 411 aa, unidentified
MKRVYDNCCGIDVHKKLIVACFRKGNEQELREFGATTRELLELADWLKSGNCEMIAMESTASYWKPLYNVLEASELNTIVVNAHHMKAVPGRKTDAKDAEWIADLLQHGLLKASYIPSKDQRELRELVRYRKSLVGERTRELNRLQKMLEGANIKLSGTVSDINGKSARSILEYLITGESIDSEKYDEMYEKKVIAHNLKASKEQIIDDLNGIMTPLQRRMMKELLTHLDELNIHIKNLDDEINDFMKPEEKQAAKDIQDITGIGNSSAQAIISVIGADMERFPTDRHLSSWAGLCPGDHESAKKRKYGKTRKGNALLRSTLVICAHSAVKNKKSYFYAQFMRISAHRGKKRAYVAVAHSMLIAIYHILKDGVAFKDLGAEYYNQFNRERKINAYLKKLKALGWEAQAVAA

SEQ ID NO: 492562 - protein, 357 aa, unidentified
MNAMTFGLDIAKHVFQLYWVDPETGEIHNRRFQRQKLIEFLAQHKGRVALEACGSGHWWARKLMSLGYEVKLLHAKFVRPFVQTNKTDAADARAIWTAAQQPDMPAVTPKTAEQQATLVLHRMREQHIKMRTMMINALRGALYEFGLSFKKGRQAGLAEMRERLAEVEEDVPARMFEALREQFDLIGRLDKGIEGLEGQIKAWSQTQPECQRLMTIPGIGMLTATALVATIGDARGFRSGRQLSAYLGLVPRQHGTGGEVRLGAISKRGDRYLRMLLIHGARAVLFRAKDKGLWCEQLARRRPTNVTVVALANKAARTAWAVLMGNEPYERDHESKKAERAKQTANSALGQLRLQRP

SEQ ID NO: 492563 - protein, 339 aa, unidentified
MMDVTTVGIDLAKNLFQLHGVDERGRVVLSRRVKRSQLAEAVASLPPCVIGMEACASAHHWGRAFEKFGHTVKLMSPKYVKPYVKTNKNDCRDAEAICEAVSRPTMRFVSIKTVEQADLQALHRTRSLLVKHRTAVINQIRGLLAEYGLVIAPSPEKVRPALVRFLDDAASGLTAFARDTFAELYEQLRDLESRLARVTERVERVFRAHPMCRKLAAVPGIGPLTATALLAAVGRPQTFRNGRHLAAWLGLVPRQYSSGGKEILGGLSKRGSRYVRTLLIHGARAVVHRAEGRSDPQGRWLWTLKCRKGTNVAAAALANKNARVVWALLAHDDVYRPSA

SEQ ID NO: 492564 - protein, 330 aa, unidentified
MAKHNLISIDLAKNVFQVCGVTRHQKITFNKALRRRELAEFMANQVPVDVAMEACYSSHYWARCFQEMGHNVSLLPAQHVSPFVRGNKSDHNDAIAIAEAARRPNIIPVPIKSLEQQDIQSLHRLRERNVSSRTGLTNQARGLLSEYGIVAPQGHKSFCQLIHDVIDPSNTDLSAPLKIQLKNVVDDYYNLTDRVTEINEQLAQIAKTNPLCSLLLSIPGIGVINATAIYSAIGDGSQFNSGREFAVWLGLTPRTASSGEKFKSAGITKRGNCYLRKQLVHGARAALSRCKNKTDRLSCWANQLLARRGQQKACVAMAARMARIKVKALS

SEQ ID NO: 492565 - protein, 412 aa, unidentified
MQDILTCVMGLDVHRDIIVACLVKGAVDAEPEAETRTFSTLIPEMQKLRDWVIESECRNIAMESTGIYWQPIYEMLESCFDGEISILVVNARHMKNVPGRKTDMKDAQWIATLLRAGLLKGSFIPDKAFRELRHLTRYRKSVVHDITAQKNRIDKFLQSSGFRFTAFLSDTFGASGRNIIRHLIEHGSIDREALDKCLKTKTRNRIDEILVALNGSLSEHQCRFLNMVFRHLEDLEAHKHTIEDEITEEVLKHTDALNLLCSIPGIDVTAAAAIGAEIGTDMSAFPDSQHICSWAGLSPGNNESAGKRKSVHINKGNPYLKSMLCETAWIMASHRKLYLSGWYWKVKQRKGAKRATIALARKVLSIIYTMLKTGTPYSEECFEQRRQRCERKRANRMVNELQKLGYTVVAPD

SEQ ID NO: 492566 - protein, 362 aa, unidentified
MKKPSQHLIIAEVPRSITKVGMTIGIDLGDVWSHYCTLNEDGEVVDRGRFRTTPSGVEKWFTDLPKARIAMEAGTHSIWVSEQLQEMGHEVIVANVRELRAISHSDRKSDTVDAEKIARYARLDPKILRPISHRTVAQQEALTLIRARNLMVRLRTAAVNAVRGLAKPCGYRLPASSTLCFAKRCVAVLPPGLAQALGPVLEQIAEMTKKIKHYDRLIKRLTETEYPETQALIQVYGVGQLTALTYVLTLGNKERFQRSRDVGCYLGLRPKRSQSGDRDPQLGITKAGNIYLRTLLVECANHVLGPHGRDSTLRQWGLHLASRGGKQSRNRAIVAVARKLAVLLHRIWITQEPYIPFYGVAA

SEQ ID NO: 492567 - protein, 346 aa, unidentified
MKITTIGIDLAKAVFQIHGVDERGKVAVRKQLKRAEMLVYFANLEPCLIGMEACGSAHYWARKLGEFGHNVKLMAPQFVKPYVKTNKNDLTDAEAICEAVSRPNMRFVPIKNVEQQATLSMHRARQGFVKARTAQANQIRGLLSEFGIVIPQGIKSIAKRMPDILEDGENSLPGTMRKLLERLNDNLKEMDRQVAELELQIKLWHANSEASRKLEAIPGIGPITASAIVATVGNATEFKNSRQLAAWLGLVPKQHSSGGKQTLLGISKRGDTYLRTLMIHGARAVIRFAENKAEPNEWLCKLIGRRNKNVAAVALANKNARIVWALLVKGKAYEQDYMPTAKTAVA

SEQ ID NO: 492568 - protein, 374 aa, unidentified
MIKIARIGIDTSKGSFQLHGVNEKEEVVLRRTVRRRQFLEFMAKLELTVIGLEACGASHHWARALGRLGHRVMLIPPQAVKPYVSPGRKNDKNDAEAICEAMSRPRVGARLVAVKSVEQSASQMLMGVREGLLKRRTQLCNMIRGHGAEFGLVAARGLDKIEPLLARIAGDDGLPALVREMFADLGQEHAELGARIARIDKKLAAFHRSNELSRRLMEIPVVGPIGAGLMITKIVNPHGFRSGRLCAAWVGLTPKDHSTGGKQRLGGITRAGDESLRAVLVSGATAYIQQVRRGRIVPSPWLAALLERKPPKLAAVALANKTVRIAWKLMTSGERYDPNHRGDREGPGASQYGGLRAGPLAPSPTAGHGHAVAA

SEQ ID NO: 492569 - protein, 357 aa, unidentified
MGKSIIDLSSVTRVGLDLAKRVFRIHAVDATGSVVIARSVNRRTLLKFFDALPRCLVAMEACSSAHHWGRQLLELGFAARLIPPAHVKPYIRRNKNDAADAAAICEAAGRPGQRFVPVRSVENQAALMRHRARELMVGQRTAALNALRGHLSEIGVVAAQGVQNAYALKRLACDGVDDDGEIVVPDCVRLALAPLVRQIDALDEAIAAIDKELEASASTDETARRLMTIPGIGPITASALLATVQDFAAFSSGREFAAFLGLTPREHSSGGKPRLGRITKMGDRYLRKLLVVGACSALGARKGHNDALRRWASGMLERKTVKYKFKLTAVALANKLARIVYALAAKGGHYDDRPVAA

SEQ ID NO: 492570 - protein, 416 aa, unidentified
MAEHEQETIAWFAGVDWGSERHQVCLLDARGTTVGEREFPHSGEGLAELGDWLLSMASAASTVAVAIEVPHGPVVDALIDRGFVVYAINPKQLDRLRDRFSVAGAKDDRRDAYVQADGLRTDQRLFRRLQVADPRLIELRAWSRLAEELGAERVRLSNRMRHQLWRYYPQMLKLTKDLAAPWFLELWAIASTPAKAGRLRKSTVERLLKQHRIRRMDAETVLRILREPAIKVAEGVAEAASIHIRSLVARLRTVNRELREAERKLDELCTAVSEIEQTSGESLQRRDVAILRSMPGIGRINLGTLLSEASGPLSRRDYEGLRTLSGAAPVTKRSGKSLIVIRRYAAHVRLRDTVYHWARVATQRDPKCRARYTALRQRGHSHGRALRGIADRLLALACVLLQRQTLFDPHFGQPTA

SEQ ID NO: 492571 - protein, 392 aa, unidentified
MVVSVGIDVSKDKHDCFIVSSEGEVLADVFTIPNNIDGFHFLLQRIQDCTHAQDKIKVGLEATGHYSYNLLGFLLDNVLTTYVMNPLRTNIYRKSLSLRKTKTDRVDARTIASMLLSDMGLKPYTDTAYHNEELKSLTRYRFDKVKERAKLKSSIARLVCILFPELEKLVPSLHIASVYALLAEFPGAKQIAAAHLTRLKALLETASKGRYKRDMALEIRDASRNSIGSWMPAKSLELQHTIRLIRELDVEIAEIEEQIQSIMDELCSPITTIPGLGFRMAAMILAEVGDFTRFDSPDKLLAYAGMSPSTYQSGQLKNCYPHMEKRGSRYLRYALYNATKYVCHWNPTFAAYLAKKRAEGKHYNVALSHAAKKLVRLIFAMEKSRQPYCLAA

SEQ ID NO: 492572 - protein, 376 aa, unidentified
MEEVSTVFVGLDVHAETTAIAVAHVGREAPRFVGTVGARLGELLKALGKLGEPSTLLIVYEAGPCGYALVRELRVKGYRCEVVAPSLIARKPGERIKTDRRDALKLAAQARSGDLTTVSVPDECDEAIRDLCRARVDAVRARLKARQQLKAMLLRHGRRYTGKTSWTAAHERYLAELGFAHPAQDIAFTEYRHAISEADARVRRLTEALAQQIENWRMLAVVRALMTLRGLDLVAAATVVAELGDMRRFAHPRDLMGYLGLVPSEHSSGTTRRLGAITKTGNGHARRVLVEAAWNYRFPARISRILQVRQEDQPAAVRAIAWRAQLRLCQRYRRLSLRGMHPNKVCVAIARELAGFVWDLGRQVPPQAPKPATQHH

SEQ ID NO: 492573 - protein, 425 aa, unidentified
MGTFRVDVVGENFGAYIGMDWGDREHVFQLLDSATGKISEHKLRQCPDALQEWINELQQSYPEQKIAMAIEQSKGAVINFLMQYQFLVIFVINPKLAAKYRQAFKSSGAKDDGNDSGFILDILIRHREKLTPWKLEDRMTRTLQILTRKRRDAIRERTRLSNQLKAILKQYFPLAIEVAGDTLATVIACKFLQRWSNLESLKRSRTSTIQRFYIKHGCRQKRIIDNRLKAIQSAKPLTTDAAIVETSVMEVCMLTEQLLCVIKHIEKYDEAINNIFPSHPDAEIFSSLPGAGAVLAPRLLAAFGSDRDRFRTPVEVQNYSGIAPVTVQSGKKRLVRWRWACSKFIRQSFHEFAGESRKYSIWASAFYEKQRDSGNSHNAAVRALAYKWIRILFRCWKDRTIYDELVYIQALKRNGSDLFRYMVNS

SEQ ID NO: 492574 - protein, 341 aa, unidentified
MSEVTTIGLDLAKQVFHVHGADSSGRPMFSRKIARAKLASFFAAQPRCTVAMETCGGSHYWARELSRMGHDVRLIAPAYVKPYVKRQKNDAADAQGICEAAQRPTMRFVMVKSEEQQASAAVFRARDLMVRQRTQTINALRGLLAEYGWIAPKGLFHVTRLIARIEDPSCDLPPGARSVFLLMIDSIREQDKRIRELDREIARRAREDADARRLMTIPGIGPITATALLALAPPAESFRNGRDFAAWVGLTPLQHSTGGKQKLGEITKMGERTLRRLLIIGSAAVVLHAARRGAPAGSWLAQMIARKPRMLVTVALANKTARIVWAVLAKGEDYRAPVAAA

SEQ ID NO: 492575 - protein, 323 aa, unidentified
MKPILGIDVSKLKLDLALRRPDGRWRTKVVDNTPEGFAALAAWLTKQEVSTVHACMEATGTYWEACAECLAEGGHTVSVVNPAQIKAFGGARLARTKTDRVDARLIAEFCATHGPQPWQAPTPAIRELRALVARRQALDAMRTQEKNRLAVAREAVREGITAHLEYLDEAIAEVERAIREKIDRDPTLKAQRDLLDSIPGLGEKTIPTLLAYYGGVARFTRAKEAAAFAGLDPRQHESGSSVRGKPRLSKIGHGALRRALYMPAMVAITKTGWGRAFRDRLRAAGKAPMVIIGAMMRKLVHVAFGVLKSGKPFDAALHGVVKG

SEQ ID NO: 492576 - protein, 352 aa, unidentified
MQTPQLFIGIDVHKKNWSVSIRTDLFDHKTFNMTSDPGILIDYVNQHFQGYPVECCYEASCCGFFPYRQLSQAGWHVKVLNPSDIPQSAKNKDQKSDRLDCRHLAKQLHSGHLTGIYVPDEQQEQLRSLFRQKDNLTKVIRKLKSQIKAELLYYGIKIPLQYDTPRWTMELTAWLNRLEWKHSSGHSSMQSKLRYLDFVRQEWLALNTELRKYASTNYTEDYQLLMTIPGIGPTIAIGILAELGNIRRFKKFDQLASYVGLIPSIYSSGETVQVRGLTYRSKSLLRSYLVESAWVSVRRDPTMQDYYRSHKGKQPNKIIIKVAHKLLCRVWHVIKKGEEYKIGLKENPAEAS

SEQ ID NO: 492577 - protein, 342 aa, unidentified
MAIAILGIDLGKNSCSLVGQDATGRVVLRRRMRRETVMTFGATLPACIIAMEACCGAHHMGRALAAQGHTIRLMSPEYVRPYVKAQKNDDRDAEAIAEAATRPTMRFVTLKSEAQLDMQTLHRVRDQLVGERTALMNQIRAVLLERGHIVPQGRAKLAASLESLLDTEAVSDLTPRMRSLVADVRERWQSLDGRIAALDAEFAEQARTDESARRLTTIPGIGALNATALVAAIGDVGTFARGRDLAAWLGLVPRQVTTGGRPRLLGITKRGSKYLRKMLIQGARAAMPTLRKSDTRISQWLRGLLARAHANTAVVALAAKMARTVWALLRHKRVYEPAAVAA

SEQ ID NO: 492578 - protein, 412 aa, unidentified
MTSLKQGIIQDNMRVVFGIDVSKASSEVAILVNGEKVHGYTISNDAIGFARLLGDLRTVHKPEIIFEATGVYSRRLQTFLDDNGYAYTRLNPLEAKKQLDSLRVRKTDQIDAEKLAQSQFVLNRKPTYVQEEVYQNLRDLSRFYQNLTEDIVRAKNRLHKVLQVTFPELENILSTPSGEQYWNLVIAFPCKDCVLELSNDELSKSIRLSTSKRISDKRVAYLAEKLIALANQSYCAVKKTSPILEEVRYYAKELLRLYEQRQAVLDEMVELAQPLPEYDILLSIPGIAETTATSIIGELGDIRRFQSANQINAFIGIDLRHYESGNFLAKEHITKRGNPYARKILFKCIHNIASASHTNPCHIADFYEKRKRQSQTTSTKPHTIASIHRLIRTMYYLIMHNKLYDYASTQNR

SEQ ID NO: 492579 - protein, 387 aa, unidentified
MGRVIIGMDPHKRSATIEVIDDGENVLAQGRFGTDSAGYQAMLKAGRKYRHRTWAVEGCNGIGHHIAQRLVADGETVLDVPAKLSARARVFATGQGRKTDPVDAHSVAVAALRSKGLRQVAVDDATVALRLLADRRDELGRARTDTVNRLHLLLLELVAGGAKKDLSALQARALLNTVRPRGIVGRTRRQLASELITELAVIDKKIKTADAQLTELVAATGSRLQELKGIGPSGAARLIGDVGDIARFASRGHFASWNGTAPLDASSGEQERHRLSRAGNRRINRALHIMAVVQLRHDTEGRAYYRRRVAAGKTPMEAMRALKRRLSDVVYRQMVADAKAARTGPGGQSGATVQSSAAGPIPMASSSDQSLPGPADTHPKTLLLAGA

SEQ ID NO: 492580 - protein, 346 aa, unidentified
MKYFAGLDVSLKEISMCVVDDDGSVVFRKSLPFCPLAVRDALKEQKLMPERVVHESGQISIWLQRQLEDLGLPAICIDARSAHKVLSAKLNKSDRSDAEGLAQLARIGWFTAVHVRSEDADRLRAIIGARDRFVRLRMELEAHVRGILKTFGIRLTAIGNGRQRQRFRDQLSAARQSDPALAMIIDHVLPSHEALCAAAAALENEITLIAKRHDLSRRLMTIPGIGPVVALSFLALIENTDRFPNTANVGAFLGLTPRRYQSGEVDYSGRISKRGDAAMRRLLYEAASTLINRVKRYSPLKSWAVRLAARRGFKKAAVATARKLAVLMLTLWKTGEEFHWTKEAAT

SEQ ID NO: 492581 - protein, 367 aa, unidentified
MSDREIILGVDTHKDIHVAAIVDQVGRLLCTSEFLASERGCRRMLAWARRYGAVRLAGVEGTGSYGYGLARLLEAAGVEVREVNRPNRSLRRLRGKSDPADAEVAARAALSGEASAVPKDRDGPVGQLRALMVARRGAVKARTQTSNQIKALLVTCDEAVRGRLEGRRDGELARCCGRLRATDGTKTALRSLGRRWLHLDEEARALQAEITQIICSVAPKLILRPGVGVLSAAQLLITAGDNPGRLRNEAAFAALCGATPVDASSGKTTRRRLSRGGDRSANAALWMIAHVRMVRDPRTRDYAARRVRRGNTRKDERGVAREGQARGDRGRRGRGGEGRARGSELMIRMTLWTYTKLTDAAGPRSSS

SEQ ID NO: 492582 - protein, 373 aa, unidentified
MPKYSTAFGMDVHLRSTTVCALDADTGEAVTRRFPGNPWGEIAGWMDGFPGPSLAAYESGYLGFAPQRELAGLGVECVVAAVSKIPRSAADSASKNDGNDAARMAKAILAHDISPAWVPSPEVEGIRDLAGAYDGATARLATAKQRLLAFLAKRGFVYGGTTPAGNPRKYWTYDFLRWLDKVRPEDDGGVRTLAALRNEVEAAAEARADLLSEYRAAVDASPIAAEVAALQSIKGCAFALAAAFSAEVGDFTRFRSGRQVTAYFGLAPSQRSSGDSVRLGGISGAGNALVRKLAVEGSWCYAAARHQPKLMPRDTGVPLEIRMHGRKGSERLLRRRKEMLARGVPAAKANAATAAELVRWLWALGMMCREGAE

SEQ ID NO: 492583 - protein, 453 aa, unidentified
MADAPKAERTPPPEGPCISSPGSRRPEPVRAARTMNTDWTQHACFAALDWAADHHDVVVLDRHGAVQIEFRFAHNAEGWAEFTQKMQPFTGAPITLETSSGPAVDQLLQRGWAVYPIAPTAAARYRERKAPSGTKSDRHDVWSMADALRTDGHAWRPLRPQDEATATLRALCRDEIALIEQRTALVNQLQAALREYYPAALAAFDDWTAPYAWALVLQFPTPGQLQAAGKRKWEKFLHTHRLWRSQTVADRLKLFASAQALPASAAVTTAKSLLAVSLVKVLFTLQGQLDEYRRRITEAFKQHPDHDVFGSLPGAKATLGPRLLSELGSVREEYPDPDALMCQAGVSPVSYQSGQVNKCRLRRACNKVLRATIHLWANASRLTCDWAQVYYAYKRAEGHSHASALRCLGKRWLKILWRLWQNRQPYDEAKYLAQLQKRGALTWGQLSATKAGE

SEQ ID NO: 492584 - protein, 388 aa, unidentified
MNIVLPATAEQTAIRTQLGAIFVSLELSRSTWLVTSLSPGGGEKMSKHSVPAGDIAGLRERFSSLTEKACARMGKIVPIIVIQEAGLDGFWIHRALVSQGIESWVVDPASIATSRRRRRAKTDKIDGEALVRALLAYKRGEPRVCAMVRVPTPEEEDRRRICRERKTLVTERTKHVNRIKGLLFSQGIFGYEPMRQDRRAKLDELRTGDGRPLAPHLKAELDRELDRLELLMQQIKAVEADRDALVVPDRDGNQAPSQVAMLLALRGIGPEFANVLYSEGLFRQFGNRRQVAAYGGLAPTPWQSGSIDREQGVSKAGNPRLRFTMIELAWLWTRHQPDSALSQWFRERVKLDGRRKPTIVALARKLLVALWKYVTAGVAIEGAVLKAA

SEQ ID NO: 492585 - protein, 400 aa, unidentified
MKTVLSVDVAKNKSMIMLMNNEGEILIDTKEIKHNLREFEKVKEEIEKINPENLTVFMESTGTYHLPVERYFKENGFNTLVINSLTTKNNFDTIRKTKTDKKDCYRLAKLFFVNEVEYHEISKKDLYANLKAMIRQYFYLTQVNIRCKNRYKRLINICFPEFEGFFARNRIYEDTALNFIKAFPHAYIVREKRIDALYNNLRKVDARHDYYYKRLARQLKDTAMDSFPGVDKDHADVKNLSDMASILQENNRLIDEIRKNMIELAKQSPYFEIVNSFYGIGEVLAAELLGELGDITRFDNHKQLIAFCGLDPAIVQSGKSINVHGAISKRGDKYARWILFNISQMVVKLGHQYPSHPVYNYYLIKKAEGKHYYESLTACSTKILRMLYSMCKNNKRFLEE

SEQ ID NO: 492586 - protein, 341 aa, unidentified
MKIIGCDFHPRFQQIAFVDRETGEYGERRLNHPEEAEQFYRSLVGRPVRIGVEATGDFRWFRHLMEELGHEFLLGDATAIRAACPRRQKTDKRDARHILNLLVEDRFPVIWQPSAENDEMRQLLLHRCRLVRMRTRVQNQLDSVAKNEGLLSSRVWSAKRRSQIEALPLPGWYGHRRADLLGLLEELNKRIKPLDEAVCKAAEGNPEACLLMTHPGVGPIVSLAYVLTIGDWKRFPRGKQVGSYLGLIPTEESSGNMRRLGQVSKQGSVLVRWLLVEAAVHAQRHDPSWHRQYVRLSMNKHHGVAKVAIAHKLAVRLYWMLRSGDDYSKVMERSSHAGQSV

SEQ ID NO: 492587 - protein, 416 aa, unidentified
MALIRWVGRAIGLDVHRDFCVVAICEEGVVRSAGRVPSTPEGLRALAASLLPSDRVALEVTGSCWEVARILEPFVQRVIVVSPDDTGISSARAKTDKLDARTLAGLLWKGELDAVWMPDERCQVLRRRLARREQLMRGRTRAKNEIQAVLARRLQAKPGFADLFGVTGRRWLADLELPLEERESVDAGLRQIAFLDAEIAAVDKLIARQALDWPEIRRLMTVSGVNLICAASFLAAIGEPSRFLTSRKLVAYLGLDPKVRQSGEAPARSGRISKRGSANARWALVEAAWSVVKQPGPLRAFYERTRARRGHGRAIVATARKLTVLFWCMLTRGEDYAHQRPALTKKKLRQLELTSGAPARSKEAAGIWSTNRAIVHAERALAMQAEVSYKRMVADQQAGAPARKVGASATPERAST

SEQ ID NO: 492588 - protein, 455 aa, unidentified
MPRKTTGDRPELKPVNVGAAAIDIGSKMHMAAVNPACTDVPVRTFGTFTEDLHDLADWFKACGVTSVAMESTGVYWIPVYEILEQRGFEVILVNARYAKNVPGRKSDVSDAAWLRQLHSYGLLRGSFRPDAEIATLRAYLRQRERLVEYAAAHIQHMQKALMEMNLQLHHVVSDITGATGMRIIRAIVAGERNPDVLATYRDVRCHSSIETIRAALVGNNRHEHVFALTQSLELYDVYQAKMLDCDRKLEALIAALNNKGVKSVGKLSKPRIKTKQVNTPTFDVRAALYGVLGVDLTEIHGLGPSLALKLIGECGTDLRAWPSAKHFTSWLCLAPGNKVSGGKVLSSRTRRSSSRAAALLRLAATTVGRSDTALGAFYRRLSSRAGKSKAVTATARKIAVLFYNTLRHGMSYRDPGADQYEQQYRSRVLANLRRRAKSLGFVLQAIPGDANPAVS

SEQ ID NO: 492589 - protein, 416 aa, unidentified
MNAVGIDVSSRKSTVAVLRPLGEVVCLPFDVTHDIAGLASLVEKLKALDGETRVVMEHTGRYYEAVEKALHEAGLFVCAVNPLLIKEYGANSLRRVKTDKADAIKIARYALDNWADLRDFTPMDAIRYDLKTLNRQFQLASKQRTASANNLIALLEQSFPGIRKCFDSPVRSDGTQKWVDFAHSFWHVDCVRKQPFPAFCERYRKWCKRHAYLFKLSNAEEVYALAKRAVVLTPKSKVVKVLVQEAANQLISISRSVEVYRAEMDRLAAMLPEYPVVMAMYGVGKSYGPQLMAEIGDVRRFERKQALVAFAGIDPMPNQSGDKNVRSNKSSKRGSPYLRKTLFNVIRTYLQCAPQDEPVFQFLNRKRAEGKPFYVYMLAAANKFLRRYYAKLRDYFASLDTLQPVAPIPTILKATL

SEQ ID NO: 492590 - protein, 359 aa, unidentified
MKKTAKKLSFAGIDIYVGLDVHKNNWTVSIYVNDYEHKTFSQNPQPSLLVTYLNKNFPDGNYHIVYEAGYCGFWIYEKFKACGIDCMVVHPADVPTTDKEKRQKNNRVDCRKLARSLSNGDLTPIYVPHRDALEDRCLIRSRRNLVKQQTRFKNRIKAMLTRYGILVPEQFENSRWSGQFINWLEEIEMHRPAGKMALQIDIDELKRYRSQVATADRAIRELSKTDLYKERVHNLLTIPGVGIITAMTLLTEIVDINRFENSDKFAAFIGLIAGEHSSGEEDHVTHTKLTSRCNKYLRSMLIESAWVAARKDPALMLYYHNAIKRMKASKAIIRVTRKLLNRIRFVLKNNKEYVPAVIK

SEQ ID NO: 492591 - protein, 411 aa, unidentified
MIKENYIYVGIDLHKETHTAVMIDCYNQKLGEITFPNRPADFPKLVTKVKKCNTDGKEVVYGLENAYGYGRALAVWLIDKGYLVKDVNTAISHRQAKHRGAMYRKSDSDDAKAIALATLNMLDKLPDACPNDAYWSLGQLVHRRDNIMKQRTRLVNQLHEQLCIAYPSYKQFFNDISRPTALYFWEHYPSRKYLKGKSVEDLRAELVPVSHNKCSTKTCEKILDAVASDKVKNNAYQDARDMVTLSIVSDLQHYDKQLAEVDKMLEQMYKMLGCTLTTIPGVNVITAVKILAEIGDIKRFSNANKLAQFAGIAPLHLSSSGKGKDLATKQGNRRLQATIYFLAIQMVQISSKGTPRNPVVRAYYEKRKAEGKTSQQALICISRRLISIIYGMLKSGTEYRMPVMENTGETV

SEQ ID NO: 492592 - protein, 342 aa, unidentified
MEITTVGIDLAKSIFQVHAVDAAGQIVVCKALRRAQVVPFFAKLPPCLVGMEACGTSHHWARELIRLGHDVRLMPPAYVKPYVKRGKTDANDAAAICEAVTRPSMRFVPVKSTEQQAALALHRTRDLLVKQRTQLVNMIRGLLAEFGIEMARGLRHALELAARLSAGDAAEVPPLAQRVVTGLADQIGAVQIQLTRLEKELLAWHRDSDLSQRLATIPGVGIVSATALAASVSEPERFRNGRQFAASLGLTPLQNCSGGKERLGRISRMGDRYLRRLLVVGMTSLVRRAKATPTSVDPRLPALLQRKPVRVVTVAAANRTARVAWAIMTRGGTYRAPAATAA

SEQ ID NO: 492593 - protein, 360 aa, unidentified
MSFNGTSVGLDVHALSVVAHAVDEESGLVERARLCPDHGEVLRWLGQLRGPLRVAYEAGPTGFGLARALAEARIECVVAAPSKLIRPAGDRVKTDISDAAHLTRLLRLGEITPVTVPEADVEAVRDLVRAREDARADLMRVRHRLSKLLLRQGRVYSGGQAWTGLHETWLRQQRFTDAHTAAAFDHHFDAVLSATAARDHLDEQIVGVAASPRWADTVDRLGCLRGISALTGLALAVEIGDWSRFTGASIGAYVGLVPTEYSSGASRVLGSITKAGNAHVRRLLIEAAWHHRASYRHPGPTMRARWAKVDPALKARGHAGNRRLHQQWCRFLERKKHPAVANVAIARQLAGWCWSLATLD

SEQ ID NO: 492594 - protein, 295 aa, unidentified
MNNSVIGLDIAKNIFHLFTLLADGKTLKKKLKRSELLGFFANYPASIIGIEACGSAHHWARELTKLGHEVILLNARFVKNYVIGNKTDFNDAEAIREAVTRPKKRVVAIKTVAQQDIQLVHNIRKELVDQRTALVNQTRGLLSERGIVINQGITQIREQLPLIVEDAENGLTALSRELFAEQYEKLKTLDDEIKAHDQRINRLCNANDLSKRFLDVPGVGPLTATIVAADIGDGGKGYKSSRDYAASLGVVPKQHSSADKQNYLGISKRGNRYIRTLLIHGARAVLKIVRKKRIS

SEQ ID NO: 492595 - protein, 340 aa, unidentified
MTITTVGIDLAKNVFAVHGVDQNGKTVLVKSRVTRAALPGLIAGLPPCVIGMEACSGAHYWARLFRQYGHEPRLMAAKFVPPYRMAGKSGKNDAADAQAICEAVRRPHMRFVPVKDESQQAMQCLHRTRQGFIEEKTATYNRLRGLISEFGVIAPQSTDALRHMISVQKSSLPLQVQQCVDDLLEHVDRIEANITEYDRILSRMAKTDHRSQRLMELKGVGPTTACALVACIGNAHDFKNGRQLAAWLGLTPSQYSSGGKSKLGRITKAGDSYLRTLLVQGARSVLIGAEKRTDPFSRWVCSLVERRGYWRAVVAIAAKNARLCWASLHYGDDFRLYSAS

SEQ ID NO: 492596 - protein, 409 aa, unidentified
MMKQNIIFGIDVSSKSSTVCVVIDRIKQGETFKITNDSFGYQDLLDRLNQYLITPLAVFEATGVYSLSLQAFLEDYHIKYLKLNPLKAKKLMDNNLRHNKTDKVDAYRLALIQFNAPQKLRAPQPKEYHELQNASRYYEELTQALIINKNQLHRNLQSAFPQIESILSTSSGRVYWTIVSLFPHAQYVLNHNENQVFQSLLAISGIGRQRAHYLTTRLYALARQAYPYDNESSITIRAIQRNIANLLSLSAERDNVINYMEKLAMQANARSLNIYESIPGIAKTTAVRLVAELGDLRRFDASAQIDAFVGIDPGRYQSGEKDSHLGITKHGNHLARKILYRTITQMETVKATQPCHITDYYDKKKRSSNSRGYKKIAIASVHKLIRTMFALVKHDQLYDYNVATHNQRL

SEQ ID NO: 492597 - protein, 413 aa, unidentified
MVQAIIERCCGLDVHQETVVACLLVGAPGAHPMKEVRTFRTVTRELEALRDWLLEAGVTHVGMESTGIYWRPVYAVLEGHFELIVGNARHMRNVPGRKTDVKDSEWIADLVRHGLIAKSYVPPRPLRDLRDLLRYRRKLVESQAAERNRLLKLLETANIKLASVASDVFGVSGRAMLRALIAGEASPEAMADLAKGQLRRKRTDLILALDGRLEAHHRFLLAMQLRRLEAIEADIAALDLRIGERLEPYSAPHALLMQIPGVDWVVAAVLIAEIGVDMSVFLSVYHLAAWAGVCPGNHESAGKQKSGRARKGNIHLRTILVGAAISASRTKGSYLKDKFHRLKARRGGLRAALAIAHKILVSAYHMLAKNLPYRDLGAAYLDQISQTRTVANLKRRLERLGYRVTLEPNAQAA

SEQ ID NO: 492598 - protein, 346 aa, unidentified
MQQVSTIGLDIAKNFFQVHGVDAAGQVVLRRQLKRTEVLKFFAKLPPCLVGLEACAGSHYWGREIAALGHEVRLMPPVRVKSYGKWGRKSDPLDAAACCEAVSRPGMEFVPVKTLEQQAALMLHRVRQLLIEQRTRLSNAIRAHLSEAGLIAAKGDAGFQALLGLLANAEDPHVPALLRPILAPLVRQWEEACAQIKELDRQIGAWHKSNADSLRLASVPQFGPVIASAIVATAGDAARFKNARRFAAWIGLVPSQNGTGGKIKLGPITKAGDRYLRQLLVIAATGLIRRVRKDAAVSPWLFGLLNRMPVKQAAIAMANKLARIAWAILVKAGSFRENAAPGAAAA

SEQ ID NO: 492599 - protein, 368 aa, unidentified
MINTNLDLNNCLYIGVDVHRYTHTALAADRFEEKISEITFDNNLTGITDFLSWTRNLDEPSKTRIIGIEGSGGYGRAVSSLLAREYEQIYEVNPILTRQRRAFGTKGDKSDSVDAGLIIQVLTRNLGKLPRVTAQDRSDEISALGELVGLWSDLTSQATRLKNQLRRVFYRADSDWSATRRKAFSDKSLNAWKKKLKSLSNSKNMAISTISFTANTKIAELGRIKTKREDVEIKITEILGKLDSKLTTMPGVGNITAASILVAIKGIERFSSLDKFVSYAGIAPTQRSSGKTRKFVQNKKGNRNLNKAIYTIALIQLRCVPIAKSYFEKKVAEGKTKKHAMRCLMKIMASKVYGMLKSGKVYRQPIIN

SEQ ID NO: 492600 - protein, 377 aa, unidentified
MSNIIKWPGEADGPNPNQFLYVGVDIHKDKHTAVATNCFGHKLMEMEFANTAKDFKQFVASMQSLADRQNREFIFGLEDSFGYGLHLAKHLFDSHLPVKMIPPVLVDRSRKYETHPEKSDSLDALGVAKVLIQRIDTLPDYSISITDELAKEIKELAMDRDFLVKEQTRIKNQLHRLLHKTYGSEYQKKFKDIFALKALRYWKKYPTGKAYILVDDSILKNQVRRKINRLMDIRQECKEIENELKILLDRTGQKLPTMNGCGTVLASAVMAEIRNIERFHSPAALAKYAGLAPRQKSSGKTIRHVKSKSGNRKLNMAIHRIALSQISNSGNQYAKAYFKKKITEGKSKNQALCCLKRKLVNIIYMMLKHKQAYNYQK

SEQ ID NO: 492601 - protein, 348 aa, unidentified
MNELHYIGFNVHKKTISYCIKTAAGDVVEEGAIAAQRTVLREWASARTVAWRGAMEATLFSAWIYDTLKPYSAGLEMAHPAKMKAISAGKKKSDTIDARTIADLVRCNLLPVCYVAAPRIRELRRLLRYRSLAVSEAVRMKNKMAGLLMETGAEYVKEKLHRKKYFANLLEQLEDVPESVIDLLRLSRGALEMFECTQRRLVRELRADAELTDRVERLMSIPAVGEITALTWALEIGDAHRFRSAAEAMSYCGLTAALKSSTGKQQRGPISKQRNHWLQTTLIEAAKLAPRWNAQLAALHARELERGHRNRATLAVARKLVAYLLAVDKSGVPFQVGAPAEESTPRAA

SEQ ID NO: 492602 - protein, 338 aa, unidentified
MPTDQTGQTYALFVGVDIAAQTAMVATQRPGAKASRSLTIEQTPEGYTSLLRQLQATGFVPCQVLVVMEATGSYWMSLATRLVHEGFAVSVINPAQAHHFAKALLKRAKTDAIDAQTLAQLAMILQPEPWTPPPQIYYALQQRLAQRDDLLNLRQQVRNQLHALVQHPEVIAEVRARMESLLATFASQLTEVESEITAALSQDSAWAAAATRLQSIKGVGWVTAAWTLVTTLNLTSCDTVDALTAYAGLAPMPRQSGSSVWHRPSIGHTGNGRLRTAFYMATLSAAQHNPVIKAFYTRLREVGKPEKVARCAAARKLLHIAWAVVKKDQPFDPNYALG

SEQ ID NO: 492603 - protein, 356 aa, unidentified
MQTQVTKKINFTGKDLFIGLDVHKKSWSVTIVVEGMEHKTFTQPPDPEALHKYLQWSFPGGNYHSAYEAGYCGYGIHRRLNDLGIKNIVINAADIPTTQKDKLHKRDPVDSRKLARGLEKNSLRGIHVFDRDMEELRSLNRTRFYLMRDLRRSKNRIKSFLLYYDIPLPEEFDNNQWSLKFIAWLKQVKLQTTAGQEAFSHLITSYEHHRQQLLILSRILRLRISQHDKELYNLLKSISGIGPLTSSALITEIGDINRFPHIDDLGSYVGLVPRVRESGETTHTGGITFRCNNFLRVLLVEASWQAIRQDPALMQYYHKHVINSKGHKVIIKIARKLLNRIRYVMKNRQPYVTGVA

SEQ ID NO: 492604 - protein, 352 aa, unidentified
MKIIGCDFHPSYQQIAMVDTETGELWDGRLEHEQGEALRFYRALEGQTVRVGMEAVGNSQWFEQMLAEMGHELWIGDAAQIRRLVVRQQKTDRRDAKHILDLLIDGRFPRLWVPSTQMRDVRQLLRHRQKLVEIRTQVKNQLQHLALNQGVRRKSRLWSSEGRAVLEKLPLAGWTARRRSDLLAMLDRLQEQVGELDRAVRAEAEQRPEVRLLMTHPGVGPVVGLAYALTIGPATRFPRGKHVASYLGLIPREHSSGGHQKLGSISKQGNTMMRTLLVEAAQTASRFDEELRRDYGRLKAKKHSALAKVMVARKLAVRMYWMLRENKSYTQLYAQRPVARMQGSPGHSVVAG

SEQ ID NO: 492605 - protein, 407 aa, unidentified
MRRVYDIVAGIDVHKKWLYVVIATEGAGEQRLRVGSTSRELQALAKQLKAAGVECVVMESTANYWRPVWAALEGDFQLYLAQAQSNAAPHGRKTDYGDAIRLVRRFRAGELRLSYVPEVEQRGWRLLTRTRVQYRRDITRLRNRMEGLLEECRIKLSGVLSDLLGSSGRRILRALIEGETDTEKLAALGDASLKATPAELADAVNGQLGDTHRLLLEQSLDQIEALEADVEDLDKCLGEAQQAQQEVIRRLCAIPGVGVVAAREIVAELGPTAASFPTAAHAASWIGVCPGRQQSAGRSYSDACAKGSRNMRRILNQCAWAAVRTRGSWFQEWFRKMVPRLGIQKAIWAVAHRLERVIWIILHKGVEYQERSTSGNQAEYLKRRLKSTLRALRKHGIDVQTALAENS

SEQ ID NO: 492606 - protein, 350 aa, unidentified
MNPKQSLAGKTVFVGIDVHKTTYSVCVVCESEIVGKASMPADAQALLQYLKRFAGSKVCSAYEAGYFGFKLHRTLEANGIENIVINPSAIEVAANDRVKTDKRDARKLAELLSLHRLKGIRIPTIEEEEHRMLTRTREQLMQQRSKIATQILAKIRYLGIEIPDLPQHVNKHFVARLLAAQLPPEVHSALNAMTNIWSALREEIKTIDKRLLEQAKSDGEKEKTYRSAPGIGPLAARTLSNELGDMSQFKNERALFCFTGLTPSEHSSGEKTRRGHITRQGASRLRGVLVEAAWNAIRADAVLNSIYRNIAARRGKQRAIVATARHLVGNIRACFRKHELWKSELKAIPA

SEQ ID NO: 492607 - protein, 378 aa, unidentified
MKRILKIGMDVHTTNYTLCAMEPIIGEDDRVFATIKVTPDYKNILLFIENLKTKLGLNDEYDIQCGYEAGCLGYSLYKQLTAAGVKCVILAPTTMLTPQGVRIKTDMRDAYMIAQCLSYGGYHAVYIPTEDDDSVKEYLRMRNDHKLALKKIKQQINAFCIRHGFCYDGTKWTQAHLKWLKKLEITNQLYRETLDEYMASYEEQEAKIERYDKRIEEIAEQTRYHDKVKKLECFLGIKTHTALSLIVETGDFGRFAKGNQYASYLGLAPGENSSSDSIHRLGITKAGNSHLRQLLIEASGGICKGAVGHKSKDLRARQNGNTAEVIAYADKANTRLRSRYYKFIRHGKKRNVAVAAIARELACFVWGMMTDNIEMKAV

SEQ ID NO: 492608 - protein, 420 aa, unidentified
MRNAGIHANSLLEVRRMYNAVGIDVSKGKSTVAVLQPGGTVIRKPFDVSHTSQNLNELADYLSSLDGTTKIVMECTGRYHEPMIKALSEAGLFISIVNPHLIKNFGNNSLRKVKSDPADARKIARYTLDNWTELRQYSGMDNTRTQLKTLNSQFSFFMKQKVAAKANLIALLDNTYPGVNKLFDSPTREDGSEKWVDYAYSFWHADCVRKIGLKAFTERYMSFCKKHHYIFQQDKPEKLFNASKELVAVFPKEKTYKLLIQQSIQQLNLASEHVERLRREMNELASTLPEYSTVMGIYGVGKTYGPQLIAEIGDVSRFTHREALTAFAGVDPGVDESGQHKSKSNRASKVGPARLRKTLIQIMTTLLQNAPEADPVYRFLDKKRSQGKPYYVYMTAGANKFLRIYYGKVKECLRNLEQTE

SEQ ID NO: 492609 - protein, 415 aa, unidentified
MRVHRNCCGLDVHKKIIAACLIKEDADGNSIDEKRLFGSMTRDLHELAQCLCAAQVTAVAMEATGAYWMPVWNVLEPSGLQLLLMNPEHYKAVRGKKTDLKDGKRIAELLQDGRLEGSYVPGVAIRVLRDLTRYRTKLVQYQSSIANRIQRLLEQCNIKLASVASDVLGVSAMAMLRALAEGETDALRMAAMAKKQLRKKIPQLQLALEGCVLPHHRWLLREMIEDLDHVGSKITRIEETIEQQMRPFQSAVERWVTVPGIKHRLAWTLAAEVGPSVEAFPSAADIVSWAGVCPGNNQTGGKRKSGTTRAGNPWLRRAWCEAAWAASKTKGTYLQAQFRRLAALRGPKRALIAVANSILTAGYYMLQRATSYQDLGPDYFDKRNTVRATHRLVKRLEALGHRVILEPRFNADPSS

SEQ ID NO: 492610 - protein, 351 aa, unidentified
MLIIGCDFHTRFQQIAMMDGTTGELVKRRLEHGTGEAERFYAALAAPARVGIEATIATQWFEKMLTRYGHELWFGDAAEIRAAMVRKQKTDDRDALHILDLLMQNRFPRIWVPSAAERDVRQLVRHRHKLVRLRTSVMNQLHALAMGQGVCLRKKLWTRVGRQKLESLQLDPWASRRRRELLELLDRLDPSIEELNRAVISEAESRPTAVCLMQQAGVGPVTALAFVLTVGPASRFANSKKLVSYLGLNPSEESSGGRRRLGAISKQGNTMMRSLLVEAAQTASIYDPELRRDYQRLKFRRGHSGVAKVAIARKLAVRLYWKLREAAQPVPLAPMQGSPALSVVGASLSSF

SEQ ID NO: 492611 - protein, 385 aa, unidentified
MYQVHYSLGLDIDKSSFKACLKAKEANSKGVVKATRTFSNNLQGFKELDQWIKKHKKLPDTQFKVIMEATGVYHEYLAWHLYEQKYLVHIVLPLRAKRYMQSLGLKSKNDKIDAHGLADMAMQQELEPWKPCSKNLLLLRSLTRQLEMLQESRTIFRNQLESVTHLAICDKMVVKNLKSLIRTIEKDIKKLKERVAQFVKEDPVLSNKYKLVEPIKGLGLLTFATVAAETGGFELFENQKQLVSYAGYDVVENQSGTHVGKTRISKKGNTHIRRIMFMSAFNMVTYKVSPFLQLYDRIYGRTKIKMKAYVAIQRKLLCLIYALWKNDSPYNPEYQTKNPSGNHDPKPLFSVGPTGPGTKVATGYAVATLDGLPCNQSPEALFSVT

SEQ ID NO: 492612 - protein, 370 aa, unidentified
MMYVGLDVHEETTVASFRNAAGQVVKREVVATSPTALRGMFRGLRGSIRIALESGPQAVRVVAILSTKHRHVLVCDGRRNRLLASGTKTDSIDADKLSDLLRLGALRPVYIGDAHVQQLRCLVHHYSRVTGDRTRALLRLRALLASIGVRVKGRTSLRTVSLRAVREPSVRFVARALVEQIKFLTPVLQAAKTRMVAHAATDPMFVLLQSCPYIGPIRAAELLAIVGDAHRFPTSRSFCAYGGLAVEQRVSSEHRIANGKFVRQSGNLGVRRLNRNGNPRLKSILKDVALGASLGRGVLRSLYEAHIERGKRPAIARVALARRIASIIYSMWKSAEPFTPERLKSAIVCSGRASTDPLVLGPCVSPKVRR

SEQ ID NO: 492613 - protein, 396 aa, unidentified
MKTTLKTSARVADPATKISRAQDFSNHDLSVGIDVHKKRWQVAVLCDGVCLGNVSLEADSDLLIRHLRGRYGNAQFRCVYEAGPFGFALCRALWAAGMECIVVNPADIPGTDAERRGKTDAVDARRLANHLAAGLLRGIHVPTEKLQKHRSLIRFRKKLWGDLTRCKNRLKSELEFQAITVPPQFDNPHWSHNFLQWIEQQAARDTELQDTLELMLEEVRHLRLLLLKTEKKLRALMRTEPYVKQEGLLRSIPSIGPLTAQLFVLEVGDVTRFKNFDALNRFVGLCPDEHSSGERQQHTGITQRRHNQLRSHLVEASWQLIRRDPAMLDAYKKLCGRMKPEQALIRIARRLLRRMRAVLLSGRLYVKGVEGGSSTEINAPEPPAKKRRQPKPATTD

SEQ ID NO: 492614 - protein, 409 aa, unidentified
MELLIPRCAGMDVHQATVVITVRLPGDDGGRRSLTETFGTMTPDLLALRDWLQAHGVTHVAMESTGVYWKPVYYVLEEAFTLLLINMHDLKHVPGRKTDVKDSEWLAQLLECGLLKASFVPPPPIRELRDLTRYRVQQVRDQAQETNRLHKVLEDAGVKLSTVVSDVMGVSGRAMLAALVEGQTDAVALADLARGRLRTKLPALQRALQGRFRAHHAFLLRQILSKIDFLEETIAQLTEEIDARIRPFEAMLTALDTIPGVDRIAATSIVAETGGDMQRFPSAGHLCSWGAMCPGQNESAGKRRSGKTRKGNVYLRRTLIQAALAATRKRDCALQTRYHRVKRQRGHKKAVVAVGHQILEIAYYIMRDGVTYHELGADYFTRRDRERTMRRSIKQLEALGYRVSIEDAA

SEQ ID NO: 492615 - protein, 425 aa, unidentified
MDFKQNQKINQVTEKTLVVGIDIAKRTHYACFVDDRGRVLQKSFSVYQSNNGFEYLYQRILTEMKESEKTEVIVGIEPTGHYWLNLAYFLEERGISLVMTNPMHVKRSKELDDNLPTKHDRKDALVIARLVKDGRFSYPRILKGMEAELRAGSTFRSKLTEELGAVKNMIIRWLDRYFPEFVQVFPSFGKMAMAALECTPFPSDLHQKHPDEVLSLYRKVEGLKSPQRPKAVRLIEVAASSIGVTEGCEMARIEIATLVRRYHQLEKDIEGITERLVELVKMSVEYEWLSTVPGLGDTTIVDLLAEIGSFSHYEDPRQLIKLAGLTLRENSSGMHKGQKRISKRGRRKLRALLFRVMMPMIRHNEAFRKLHEYYTNRQVNPLRKKQSIVVLCGKLLKVLHGISTKHKAFDAQRMMRDIPSLLEAA

SEQ ID NO: 492616 - protein, 341 aa, unidentified
MEHCGIDLHLKSSEVCVLDEAGRVSERSRIPTSEASFRRWFGGRERMRICLEAGGMSAWAERILARLGHEVVVCNPARVRLIAESTLKNDSVDAETLARLVRMDVRLLRPIQHRSETTQRLRGMLRVRGILVANRTACMNGARGLLRSFGYRVPGTTIQRLARALATREIPEELLALVAPLVATALELAEKIEALNHEVRAVGQGFAEVERLQTIPGVGPLVALAYVLCIEDPGRFRRSRDVAGFVGLRPRMRESGERSRFGSITRTGDSEMRRLLVQAAHGCLRSRQDSDLKRWAEQLAARVGKKKAVVALGRKLAVIMHRVWVSGAVFEPSHEVAAQAA

SEQ ID NO: 492617 - protein, 337 aa, unidentified
MSEISILAIDLAKNSFQVCGVRADGVVVFNRSVSRTRLYQLLTEQDRCVVAMEACATSHHWGRVAQSYGHEARLIPANYVKPFVKRQKNDRVDAEAIAEAAVRPSMRFVAVKSAEKQGRAVAFRTHQCLVRQRTQLINSLRGHLAEFGIVAAKGPASLKLLENVLAKPDVDLPGPVREMGALYLQQIGQLTEIIEQLADDLESATKTDEELRRLCTVPGIGPVTAGAIAAFAPDLETFESGRNFAAWLGLVPRQRSTGGKARLGAVSKMGQCDIRRLLIVGAMSVIRWVVRKGGSANRWLASLVARKPRMVAAVALANKMARTIWAMTTKEQDYRMA

SEQ ID NO: 492618 - protein, 418 aa, unidentified
MEIIYERVAGIDVGKKIIAVAVRTPGERPGKRRQQLRKFNTYYQTLTEMVAWLIAEGVTHVSMEATGVYWRPVFHALCEAERALEVLLVNARHVKNVPGRKSDALDAVWLAELTECGLLRGSFIPPREIAAIRELTRYRKKLIEQRTSELQRLAKVLEDGGIKIDSVASALTTLSARDMIEALINGERDPGVLAEFARGKMRRKISDLRLACAGRFGAQHALMCTLHLEHIDHLADMIARLDTRIDEASLPFVRQTTSLATIPGISERAAQVIISEIGIDMARFPTAAHLASWAGLCPGNNESAGKHRSGRTRKGSKELRALLTECAWSAGRTSTYVGAQFRRFHRRFGSKGGKKAATATAHTLIVIIWHVLAEATAYRDLGSDYFTRRLDSPEARKRRLIHELEALGHKVTIEPAAA

SEQ ID NO: 492619 - protein, 330 aa, unidentified
MEQHYIGVDLHKAFFQACALSATGVRAWEDRFPRTPEGLRVFANRCHGDTRIAVEATGPTWHFVDALQPTGAQICVVDTRKTRLKAGYAAKTDRLDARRLADALRRESVVSIYIPPVEVRELRELCRGRHHLVRVRTRVVQTIRALLLRSGVGDPPVTRLYSPRGLAWVAAVHLPDDSDAVLRRLARVLQRVHEEASAADAAVRARASTDPIVDALQTIAGMGPVLGLTLRAEIGEITRFPDGPHLASFAGLVPTVDISANHRWYGRITRKGSPWIRWALVEVAMHAMKRNDDTGRRARRIAIRKGVLKARVALARMLCADVVRVWPRVD

SEQ ID NO: 492620 - protein, 331 aa, unidentified
MKNKQFVGIDVSKKTLDIFILKTKFHFTITNNPLGFVSLIEVCSKHLEEDIDQVFFCFEDTGRYSKLLSVFLEQSDYNFALLNALDLKRSMGLTRGKSDKKDARMIAMYAWRKRDELNKSNLPGPAIDQLKQLLSLREKLIKHRTAFKNTGHDLYDCYIDGEFNFIKQRHAHMLDHLNNEIDLVEKEITRIIRSNENFYNSFNLLTSVRGIGKVLAFYLIVLTENFKKFDNPRKFACYAGIAPFEYSSGTSVKGKTKVHSIANRHIKSLLNMAAMASIQLNGEYKTYYHRRLAEGKNKMSTLNIIRNKLVFRAFAVVKRGTPYVDLSKFAA

SEQ ID NO: 492621 - protein, 361 aa, unidentified
MVQSMSLVGLDVHASQTHAAVLDVASGELRGVRLRMAPGQVVEFLATLPRPVRAVYEAGPTGFGLARAGIDRGIDVRVVAAGKVPRASGDRVKTDKRDAERLARLLAAGELRFAFVPSVADEQFRDVIRAIEDCRGDLMRARHRLSKMLLRRETRWSGQGSAWTQRHMSWLRSLRFEDLCSQATFVDYLSGVEMLVARRAALLAVLEQVIPDSRHAPTIARLRCFRGIDTLSAAGLCAEVGDWARFKPKQLSGFLGIVPTEHTSDTKRRQGSITKAGPVHARRLLVEAAHHYRHHPVIGDALARRQHGQDPRVIAVAWRAQQRLHQRWQVLAKQRRKPAGVVAIACARELAAFCWEAATLT

SEQ ID NO: 492622 - protein, 329 aa, unidentified
MVFLGIDVSKGRLDCAVLAAEGGRPPGRRSFRNDAEGAERAATWTTQVSGAAAADTHVILEATAAYHEPVAHRLAALGMRVSIVNPAQVRSFAKGIGVLGKTDRIDAQLLARYGQLARPRAWFPPARALLDLQGLIARLDDIEADLRREGNRLEQARTRGCPDVVEQSLLASLAALKSSRETLRRAIAAHVAAHGELQADLERLLTIPAVGPKTAVRMLAMLRARGFDSARQAAAYLGLVPVERQSGKSVRGRPQLSRAGNPRLRAALYMAAVVSIRRNPDLKAQYERLLGRGKCKMAALSAAMRKLVHLCFGVLKGEGGYRAGAATPA

SEQ ID NO: 492623 - protein, 388 aa, unidentified
MRKPNDMSRCLAALEQDSTLVAVIELGQQSWLVAGIVPGIERHPLKKLAVDQEALLKLLQRWCDEARDPIKRICVAFEAGRDGFWLARWLRMHSIEAYVIHPTSVSVSREHRRAKTDRLDTELLKRAFIGWLRGETDHCSMAAIPTLEEEDGKRPTRERESLVGERTRIVNRLKSCLVRLGIRGFNPKLRKAAECFANLRTPEGAPIPPNTLEELKRDTVRLRLVRDQIKEIDEARLMRLQAVPQRGANAMVLLLARILGIGVETADMLVREVLSRQWRDRRAVARYAGLTGSPGESGKKRREKGLAKSGNARVRRGMIQLAWRFLRFQHDSELGQWFRARAVEGRRDIRKKMIVALARKLLIALWRLVTTGEMPAGVALRASSSLPR

SEQ ID NO: 492624 - protein, 341 aa, unidentified
MNQVSTVGLDLAKHLFQLHGADSAGAVVFRKRLRRGQLLAFLATLPPCTVAMEACGSAHYWGREIAKLGHTVKLIAPAYVKPFVKRQKNDMADAEAICEAAQRPTMRFVALKSANQQAAAVVFRTRDLLVRQRTQAINALRGHLAEFGVIASKGLVHTSKLIAALEDPASDLPQAARGILAVLVEELRSLDERVAVLDREIARHAKENAVARRLMTVPGIGAVTAAALTALAPPADTFRRGRDFAAWLGLTPVQRSSGGQERLGKTSKMGERALRRLLIIGASAVARWAARKGVPAGSWLGRMLARKPPMLVRVALANKMARIVWALLAKGGVYRAPGAAV

SEQ ID NO: 492625 - protein, 412 aa, unidentified
MRLFVGDDWAEDHHDIEVMDAAGRVLARRRLPEGAAGMAGLHELIGDRLGEDADDAEVMIGIETDRGPWVGALAAAGYTVFGVNPLQASRFRARHAVSGAKSDGADAHMLADMVRTDSHQLRAVAGDSPAAEGLKVLARAHKTLIWERTRQVQRLRHQLLGYFPGALEAYGEDLAAPDHLELLAKAPDPARAARLTRAQVSAVLKHAGRRKITDRATAILAALRGEQLGRPPAVTAAYAAAVRALTAVIITLNQQVKALQSEVEENFGQHPDAEIYLSQPGLGRILGARVLAEFGDDPHRYRDGKARRNYAATSPITRASGKRKLVAARFVHNARLVDALNGQAFASLRVSEGARAFYDQQRANGHEHNDALRRLANRLVGILHGCLKTRTPYNEQTAWSHREKLPRSDLAA

SEQ ID NO: 492626 - protein, 356 aa, unidentified
MKQVSKLDFTGQRIYTSLDTHKRSWKVSIFTEHFEHKTFTQPPDTEVLVHYLQRNFPGAEHRVVYEAGFCGFWIHDRLREKGINCIVVNPADVPTTDKEKKTKSDPVDSRKMARSLRNGELTGIYVPLREKIEDRSLIRTRQAMVKKQTRCKNQIKSALYFYGIVIPEELAEGRWSRKFITWLTEIQMTRASGNIALKTLLSELLYLRQTISDLTKEIRRLAHTQEYAENHRLMKSVIGISTLTAMTFLTELVDINRFKNLDTLASYVGLIPDVQGSGEKETTTGITSRRNPQLRGILIEAAWVAVRKDPAMMMTYNQLLTKVSKKTAIVKIARNLLNRIRYVLKNKQEYVPAVVQ

SEQ ID NO: 492627 - protein, 366 aa, unidentified
MKKISTVQIFESEIFKEQRLTIGMDLGDRSSCYCVLDEAGRILLEQKVAMTPEAMKQTFSKIPRSLLALETGTHSPWVSRLLTELGHEVIVAHAQKVQLITKSNRKDDRHDARTLARLARIDPELLGPVRHRSAQAQIHLTVIRARAELVRARTAMVNAARGLVKSYGQRLPKCGTRKVSRELGAGLPAELGEVLEPLLKEIESLNERIKEYDERMEKIAKESYPHVELLKQVKGVGTQIALTYVLTLDDPHRFPKSREVGCFLGLRPGRRDSGESQPQMHISKEGDPYLRTMLVQGAHYILGPFGEDSDLRRWGLTLAARGGKNGKKRAVVAVARKLAVLLHRLWVSGEEYEPLRNSHQAMRAVA

SEQ ID NO: 492628 - protein, 364 aa, unidentified
MLIIGCDYHPGFQQIAFVDTDTGELSERRLEHREQAEQFYRELKQQNPAVRVGMESSGHSRWFERVLHELGFELWIGDPAEIRTKRVRKQKTDRQDAQLILQLLLENRFPRIWVPDAENRDLRQLLWHRHRMVQMRTRVMNQLHVVPLNEGLRRKKALWRPAGRKELESIALAPWASRRRQDLLDLLDQLTPKIQELTRALEEEVEKRPVARLLMTHPGVGPLTALAYELVIGTPERFHCGKQLASYIGLVPTEESSGNRRRLGHISKQGNVLLRFLLVEAAQVTVRSQQEWRSKFFHLAMRRGRKIAKVAMARKLAVHLYWMWRQGSDYGQTQKLGSHAGEPGHPDGVQSITDVMIGHPAPSK

SEQ ID NO: 492629 - protein, 376 aa, unidentified
MERGSLMLNTATFVGLDVHARSIKAVALDAMTGEVRSATFAYDAAAVAEWVRSLDPAAKCVYESGVTGFDLQKRLAALGVDCVVGAVSKMIKPSADRKRKNDRNDAEFLARMLSVGNVVEVWVPDDECEAARDLVRALDDAREDLKRCKQRLSKFLMRHGYAFSETTPTGRRKGNWTAAHWAWIRSISFPEKADGDALAYYVDAVRQAMEGKARLEKLVEAEASKPRWKRRVDSVRCLKGIDVTSAADLVFEAGEFSRFKNARSFAAWLGLTPSEHSSGESVRQGGITKAGNKHLRRVLVESAWHYLGCSPHSKGLAKGQAPDPAARRHAAKGVRRLVERRRAMLERGVHKNKANVATARELAAWVWAVGCIVESA

SEQ ID NO: 492630 - protein, 343 aa, unidentified
MKEDRKKCIHAGVDVHDKTYVAALWSQETRTVVKRWTQPSSAEQLIRTLEPYRGQIRRVVYEAGITGFELARALTEGGYEVEVIAPKSMARGFDEAKSDRLDCAALARLDAAGELRYSRIPTREEEADRQVVRMRENVAVSIRRVKVQIKCFLMQYSLPRITSWSRRGIEKLCSMELPEKLRFSLDILLCELKSFVELYKEVEKKIAEMSSKELYAGNVERLTEIKGVGVLTAMTYLTEIFRPEEMTGGIAVGKHTGLAPQVSRSGSGLKRKGSVLSGNKRLKRVLVEAAWRWAFSDPLGRRYFSRYRKLLGSSQKAIVAVARKLSIIMWMMVTKNESYRVAG

SEQ ID NO: 492631 - protein, 311 aa, unidentified
MDKEYIGVDVSKDTLDVAEYTSNKTWQAANSEEGIGQILDVLIKKSPALVIMESTGGYEFSLAVALSKNNVPFAVVNPREVRNFAKATKKLAKTDSIDSRVLAHFAAVIRPEPQKVPDEATQEMEDLLARRNQLVEMITAEKNRLHLARKSVKGEIVEHIDFLETKLAGINSNLSEKIKQNPILNIKEKILRSVPGIGQVSTFSLLISLPELGELNRKQIAALVGVAPLNHDSGKYRGKRVTWGGRKGVRKVLYMAALSAIKHNIIISSFYNHLCEAGKVKKIALVACMRKLLTIVNAMLKNNTPWYYAVC

SEQ ID NO: 492632 - protein, 326 aa, unidentified
MEATTQNSSRPALGIDIAKKTFDAALLQGAKLSVGHFDNDAKGFVKLSRWVSDQGADQFHACMESTGVYWEPLAVHLHQAQQRVSVVNPLRIHGFARTELARNKTDREDAARIARFCHLHTPYPWQPLPAERRKLRDLTRHLHAVKKAKHQHSNRLEGTPPEWLMQSLKRTLAHFDEEMALLWKEIQAHINRHPEIKRQRKLLETIPAIGELTATLLLAELPNIERFASARQVAAFAGVTPKHRQSGSSVRGRTQMSKMGQARIRCALYMPAIVARTHNPMAKALADRLAERGKCPMVIIGAMMRKLLHIVYGVLKSGKPFDPQHA

SEQ ID NO: 492633 - protein, 425 aa, unidentified
MNRNMNVKINQVTEKTLVIGVDIAKKKHYGCAVDERGRILQKAFPFTQSFDGFEKFYNTILDLKEVHEKSEVIVGFEPTGHYWMNLASYLTNHGIRFVMVNPMHVNRTKELDDNLQTKNDQKDARVIAQLIRDGRFSFPRIIEGVEAEIRNGASLRAKMQEDLSALQNRMIRWIDRFFPEFRQVFKSFGKNACAVLEKTPLPMDFQGKSPEELAFLYRQVEGLKVHSMPKIRQLITLSNQSIGLTEGLMMARYEIATLLSQYNQIARQLEDLSNELIELANQMTDYAYMVSVPGVGPNTVVELLSEVGSLTRYEHPRQLIKLAGLTLRENSSGQQKGQKKISKRGRKRLRALLFRVTLPLIQHNPAFKSLFNYYITRTNNPLRKKEAMVVLCGKLLKILHALCNKQIEFEQKQMMNDLHCLVRAA

SEQ ID NO: 492634 - protein, 311 aa, unidentified
MTEHTIGIDISKTHLDAFRHDDQAARQFENTPQGIRALIRWLGQTPVARIVFEPTGPYHRALEMALAGRFPLVKVNPLHARRFAEACGTRAKTDAVDARILARMGAALNLEPDAPISEKHLVLRDLQMARTALVKDRTRLRNRSHVQLNPVLKRQTKARLTLVERQIAELDAEIARHIADDEALQRKREILCSIPGLGPIAAALILTFLPEIGTLDRKQAGSLAGLAPHNRESGQWKGKSFISGGRKPLRDALYMPALVAMRFNPDLKSKYAALREAGKPAKVAIVALMRKLLETANALVKTDRLWVEKAP

SEQ ID NO: 492635 - protein, 350 aa, unidentified
MDRYIGLDAHTSSCTVATIGQSGKRLHSQVVETNAKALIEVIRGVPKDRHLCLEEGPHSNWLYEVLSPHVQEIVVALVNESRGPKSDKLDAFGLAEQLRVGAIRTKVYKKRGSFGRLGYRVKAHALLVADSVRVQSRIKALMRSRGVAVAGGDVYSTSERDEWLLKLPHSARSLAELLYLEYDGVEGLRQRAEREMITEARKHDVYRIIQTCPGIGEIRAAQILPVVVTPFRFANKRVFWSYCGLGIVMRSSADWVRGRDGQWVRAPVQQTRGLNRNFNRILKGVFKGAATTVIGRAQDEPLYRHYVNLLDGGTKPNLAKLTIARQIAAIILALWRSKEVYDPKRVGHAA

SEQ ID NO: 492636 - protein, 345 aa, unidentified
MQTMYYIGLDVHKRTISYCVKDGSGTIRTEGTIPATRFDLDRWMKTLPQPWTAAMEATVFTGWIYDHLRPHAAALKVAHPLMLRAIAAAKKKNDCIDAKKICDCLRCDFLPECYMASTGIRERRRTLRYRNLLVRQMVQMKNKIGMLLMEAGVSYNKQRLHKAGYFRELLATNPDIDEGLSSLLRLCRETVVRLGKTESTLVRSLERDSLLVERVERLMTIPAVGPITALTWALEVGDVQRFSSIKKAVSYCGLCGAEKSSGNTVQRTPLSKQRNKHLQCTLIEAAKMAPRNSPELAMLYEKEKQKGNANRATLAVARKLVAYLVAVDRRQKEFLTVERENRTAA

SEQ ID NO: 492637 - protein, 378 aa, unidentified
MPSESTVHIAIELSVSSWLIAARLPGAEKSRLHRIEGGDTAALLALFAELRSRASAKVTGEANVACCFEAGRDGFWLHRLLTAHGVAAYVLEPTSILVNRRARRAKTDRLDAEGMLRVLAAWLGGDRQVCSMVRVPTPDEEDAKRTHREREHLVQEKLRIENRIQALLFAQGIRARPSLRSWARDMAELRTGDGRALLPLLRTELNRLRRRLVLILELIRELEAERAEALAASANDAVVRKITALQRIRGIGSNFAAVLVREVLYRSFANRRQLASYVGITPMPYQSGGMDRDRSISRAGNPRARTTLIQLAWLWLRYQPGSALATWFRERVGTLQGRTRRIAIVAMARRLLIALWRYVETGVLPEGVEIRAEAAPMA

SEQ ID NO: 492638 - protein, 374 aa, unidentified
MNSVYHTELSSLEETRCQFNGTKADIKSAEGRMRPVCALGIDVHQDFYVVVMQEGSSNPKPPQRFGKEAFLQWAARLKQCYGQVHAVYEACGFGFCLQRQLSALGIECYVVCPQKLDELAKRVKTDSLDARALCLRLDRFLQGNRAALALVRVPSEEEEQARALHRQREQLVKVRKVLEAQGRSLMVNHGIEPVQQWWKRRAFAALSVPHWMRVLLQNTQPILLSLQSQIDQLTLQLQNAATAEPPRGLGKMTSVIIDREIGNWHRFSNRRQIASYTGLCPGEYSSGQKRLQSCVTKHGNPRLRAALVELAWRMVRFQPNYRPVRKWTDRLRKGQLTTGSKRKKAIIALARELAIDLWRIRTGRLTPEQLGLEI

SEQ ID NO: 492639 - protein, 337 aa, unidentified
MEFCGIDLHSNNCVVVITDEMDKVLVSRRLPNDLDKVEHLLAPHRDELAGVVVESTYNWYWLVDGLAAAGYPVKLANTVAMKRYDGLKHSDDETDATHLAHLFRLGILPTGYIHPREQRALRDLARKRMQLVRTRTQQVLAVENILARSLGARLSSNAIKRMNVEQVDELGLASDVAMAVKSNVVLIRTLNEQVAALEHRLLEGVAPRPEFALLKSIPGIGEVLAIVILLEAGDIGRFAEVGQFASYARCVDSARYSNGKKKGEGNTKNGNAYLVWAFIEAANFARRFNQEAKRFFERKQAKTNSVVATKALAHKLARASYHILKEKQPFDVKRCFA

SEQ ID NO: 492640 - protein, 426 aa, unidentified
MHDNRNERINQISEDTLVIGVDIAKCVHYACAVDERGSEVKKSFSFRQSRQGFETFYATILKVMESHQKKNVVVGFEPTGHYWMNLSSYLTDRGIRFVLVNPLHVKQTKELDDNLQSKNDPKDARVIAKMIPQGYYSIPRDMTPIEAELRHGSAFRARLKKQGASTQNRIKRWIDLYFPEFISVYKSIGMNASTVLSSYPLPEDLVREDPEKLLENLKILGGKHFSVKNLTKLLDVAATSIGYQESPEMARAEIQILLTQMKLLEEQLVSIEKQLVTLAKQMTDFDLFLSVPGIGENTVVEILSEIGAFSHYKSPRQILKLAGLTLVTNSSGKKEGNKRLSKRGRKRLRSLIYKAIFPILHAIPAFRSLYDYYSEHREHPVAKKEALLILCRKLIQVLHGLSKRGETFNEERMVADISFFGNQEAA

SEQ ID NO: 492641 - protein, 403 aa, unidentified
MNPCITIDVSKETSHVQGFLDNNVPLSKPRKILHTKEGFSNILTVYNQIVYRTGIKPTVFFEYTGVYHKTLMAYLKANNLSFIPIPPLVAAKVRKSDLRNKKTDARDCKTLSFVYYEDKVKKYYEPTKDEKRLKDLQRYYMITEKQYQEITVHLYEMIDTIYPFYKSIMSEFDCFTSLKFLQKYPHPDYVTSHREKTLIKDFMEITGHGEKYATKVIHKLLNVINDTIPGCCNDDFEVEMLKDYATQALFYKTRLNKTLEEINRIIAQDSSKKSLVENIDSIPGVARNTAARFIAEVSNVDRFKSSKALIAFAGTDPNINQSGIVDGKHLSITKCGNKRLRTILFIMVRSMIRKRVPANPIKDFYKKKTQLGLPPKVVLVACINKLLGIIYQLNKTGEVFVLK

SEQ ID NO: 492642 - protein, 338 aa, unidentified
MGEQYVGIDLHRRRSVIVRMTGGGEVLETVRIDNDPVALSLELAKAGPDPEVVLEATYGWYWAADLLQACGARVHLAHPLGVKMFGYQRVKTDARDSTNLAELLRMDRLPEAWLAPPEIRELRELVRYRAKLVALRSGLKAQVHAVLAKEGVRVPMSDLFGVAGARLLDQLHLGHAYALRVASLRSLIAAYDQEITMLGREVSTALAGDVGYLALQTIPGVGPVLAAVFVAEIGDVHRFAAAPPLCSWAGLTPRHRESDTTVRRGPITKQGPRLVRWAAVEAVQRLPGGSKQAADFHRIADRRGTGIGRVAAARKLLTLVYYGLRDGQVRCLAPRQAV

SEQ ID NO: 492643 - protein, 315 aa, unidentified
MPNLYANFIGIDVSKNKLDVYDTKNEKFYSVSNDQKGINHLIELFKPSADLLVLIDLTGGYEYLVTAAFFQEGFNIHKAQGLNVKQFVRSFGQKAKTDKIDAKMLTIYGAKMQESLRLYQPNDNQLKELISRLEDLKDMLRKENNRKEHFQDKAAKHSLSSSINFLKKQIEEIEVEIKQRIDKDKELKDKAKAINSVKAIGNKTTMILLAALPELGKANRNEIAALAGVAPYANDSGITNKRRRTSSGRPFVKKTLFMCALVAIVHNHQLKTFYQKLVSNGKQKLVAIVAVMRKLLIIINNVCKDFYAQRTFTNA

SEQ ID NO: 492644 - protein, 345 aa, unidentified
MEIRTIGIDLGKTVFHLVGLNARGEVVVRKKCSRTQLLRFTSNLRKCLIGMEACGGSHFLGRALREQGHDVRLMPAQYVKPYVKRNKNDYIDAEAIAEAVTRPTMRFVPIKTDDQLDLQSLHRVRERWVKGRTAVINQIRGLLLERGITMRKGRKHLEASLPEILEDAENKLSGALRALLTQLQVQMQYLDRQIEESDQLMVRIAGELEPCRRLVAIPGIGPVLATATIAAIGNGAAFKKGRGFAAWLGVVPGEHSTGGKQQLTGTSRRGNKYLRKLFVLGAHAVLLQRTKQSSGLSTWLASLVSRKRKQVATVAVANKMARMVWAVLCKGEAYRPPLVAQLNPA

SEQ ID NO: 492645 - protein, 343 aa, unidentified
MQAVTTIGLDIAKSVFQVHGVDAKGNVVVRRQLKRRYVLSFFEKLQPCLVGIEACASSHHWSRELQALGHTVRLMPPAYVRPYVKRQKNDAADAEAICEAVTRANMRFVETKTTEQQSCLTLHRTRHLFIRQQTAVINAIRAHLAEFGIVAPVGRNGVDELLRVVADPNDKRLPAIARACVAALGSQLRMLKTQILQFDRMIMAWHRSNELSKRLDKLPGVGPALAAALVASVANPKAFRSGRDFSAWIGLVPKQNSSGGKDRLGNISKQGDRYLRSLFTTGALAVIRYAKIHGTGHRPWLTTLLARRPTKVAAIALANKLARMAWAMMAKGEPYKEPVALAA

SEQ ID NO: 492646 - protein, 368 aa, unidentified
MNEVITYVGMDAHKKDLFIAMLIGRENTPVTWQLANEPGAVRRLIRKLEREAPGRVEMCYEAGPCGYALQRQLTTARVSCQVIAPALIPRKAGERIKTNRRDARKLAELLRAGLLTEVRPPTPDEEAVRDLCRARDDVREDVQRCRHRLGKLLLRRGLHSSGRNWTRAHRRWIDSLEWAHPAERVVVDDYLLAIDQQEARLVELDARLTEIAQTAPYREPVAWLRCFRGIDTLTAILILAELHDVRRFPSAPELMAYLGLVPGEDSTGEKQRRGRITRTGNALVRRLLVETAWHYQHRPGVGVALARRRKGQPSRVIAIADKAQQRLCRRFRKLAAEHKPAPKIAVAIARELAGFLWAALQPASVSAS

SEQ ID NO: 492647 - protein, 412 aa, unidentified
MTETNQFAAHVGLDWADKKHDVCVQFKNGERTFHVIEHTPEALDVWLTELHQKVKGRIAIAVELKKGPVVYALQKYPFITVFPVHALSLARYRQAFSPSGAKDDPQDAELALELMLRYPQKIKAIEPDNADIRLLQQLVEQRRQLVEDKRRFVNRLINTLKQYYPQPLEWFSHRGSLLLCELIMRWPSLQQLKRARHDTIRNFLNAKGGRAMALTEQRVASIDNAIPLTTDPSVIEANALMAAALATQIKVVSEIIKTYDERIETLFDTLPDAGLFKSLPGMGPCMGPRMLAALGDNRDRFNSAEEIQNYAGIAPVTERSGQKSWVHWRWQCAKFVRQTFVEWAAKTVNSSYWAKLYYQGLREKGKSHQSAIRALAFKWIRIIYRCWKTRTQYDEAKYLLALEARHSPLLKP

SEQ ID NO: 492648 - protein, 408 aa, unidentified
MRLFVGDDWAEDHHDVELMDEAGKVLARRRLPEGAAGMAQLHGLVGAYLGEEPDEAQVIIGIETDRGPWVAALAAAGYLVFAVNPLQAARFRDRHGVSGAKSDAGDAHALADMVRTDSHQLRPAAGDSPEAGGIKVLARTHKTMIWERTREVQRLRHQLREYFPAALEAFADLDAPEALELLGKAPEPARAALLTRAQVSAALKRAGRRNIPERATAILAALRSEQLTQQPALTAAYAAAVRALIAVITALNEQVKVLEQQVRDHFGRHPDAEIIVSQPGMGPVLGARVLAEFGDDPRRYADGKARRNYAATSPVTRASGKKKVVAARFVHNDRLVDALNAQAFSALTASPGARAFYDQQRASGHGHNDALRRLANRLVGILHGCLKTRTLYDEDTAWAHRQQSQQAA

SEQ ID NO: 492649 - protein, 353 aa, unidentified
MGVYIGVDLQVRTETVGWMDTSDGEVHERTLEHDREDVRGYYAPLAVPAVVGVEASGYSLWFHQWIEETGHRLLVGKASAIRQFARRRQKNDQRDAQLLLDRLLHGDFPSVPVPSPASRDVLALLRYRHRLVRMRTMLRNGLQAVALSQQLRLGPRRFTVRGQQQFVALPLTGAYAAQRQHSLRLLESLGERVAAIEKELEARAQQDARVLRLRTHPGVGWLTGLAVVHALEPVGRFDRARRIAAYCGLDPREHSSGEVQRFGHISKQGNRLLRFLLVEAAHAAVREDEELRRFYFRLEARKNSAVALVAAARKLVLRLYRMLREEIDYDEFRRRGRDARRARVGHRSVARQD

SEQ ID NO: 492650 - protein, 351 aa, unidentified
MYIVGVDYHPSFQQIAFLDQETGECGDRRLDHSDGEAERFYRELRQKGVSMRVGLEATGYSRWFERLLVELGIEVWIGNAAEIKAKRVRKQKTDRQDAQLLLKLLEENRFPRIWVPSPENRDLRQLLWHRHRLVQMRTRIMNQLQALAMNEGKRWKHRLWSAEGRALLEKFPLAPWASRRRQDLLELLDRLTPTIDELTAAVEQEARRWPEAVRLMTHPGVGALTALAFVLIIGTPGRFARGKQIGSYIGLIPSEDSSGGRQRLGHISKQGNALLRFLLVEAAQAATRCNQDWRQRYWHLAMRREKSIAKVALGRQMAVRLYWMWRNGCAYSQSLEFGSHAGQLGTGHGVQ

SEQ ID NO: 492651 - protein, 456 aa, unidentified
MEHYYLGIDVSKGYADFVMLDDKKQPIEESFQLDDTFDGHCRLYEILCTFCENHPECMIYAAVESTGGYEDNWFNSLVKFQGTLNLRTARLNPLGVNANSKADLKRNVTDKISAQNVAEYMIAHPEKVSYQHHDQLASLRKQWGFINMLTKQSTQLFNQLEPLLYTANPEVLTYCKNGMPGWVLKLLMRYPTASDLSKAKVVSVARIPYISSARAQDLIIIAKRSVASATDKITAQLIMETVKQILHLKKIITSQIDLMVQQSSVPEVDLLKSFIGIKDYSAIGLILQIQAAERFPSVKKLASFFGLHPVYKISGDGVGRFRMSKKGRKEPRKILFMVALTAIRSNPLIRGIYLEHTQKGMEKMAAIGLCMHKILRVIYGMLKHNMAFDPEIDWKNREKSYQFKRKVHQDKNRRYQDFDAKAPISRRQNSKRKEQKQSHSDNNTNNGIIASAPLSP

SEQ ID NO: 492652 - protein, 403 aa, unidentified
MVYVGVDWAEAHHDICVVDEEGHVLAKRRVPEGLEGVGKLHALVAEHAEDPASVVIGIETDRGLLVGSLVAAGYQVYAINPLASSRYRDRHATSGAKSDSGDARVLADLVRTDRHKHRPLAGDSNLAEAVQVLARAHQGLVWTRQRQANQLRNALREFYPGALAAFDDLDAADTVAILERAPTPVRGRALSQAKIISALRQGGRARNLEAKAAQIQAQLRQPQLEAPTLIAEAYGHSVAAIVAVIKQLNLQIAALEQELAANFEMHPDAEIYLSLPGLGFVLGARAMAEFGDDRTRFLNPKARKNYAGTAPITKASGTRKVVLARVARNRRLADACYQWAFSALTRSEGARHRYDVLRARGQTHHQALRALGNRLVSILHGCLTNRQSYSEHLAWLHQSELAA

SEQ ID NO: 492653 - protein, 352 aa, unidentified
MTETSPDVSLTIFAGIDTHKDTHHAAIIDYLGREIADRQFPATATGYQALLAWLNGTGITARVGVEGTGSYGSALAMVLQAAGIDVVDVDRTDRRSRRFHGKSDTLDAYSAARLAASGGARTIPKAHNGDVEAIRFLHNTRRSAVKSRAEAITGLKSAVVNAPETIREQLRPLTSTTLVKACALLRPGTVAPGEIDAAVKTALRSTARRIQFLDEQIKALEAHLKVLIDATATGLVTTFGVGYETAAQLLITVGDNPHRIADEAAFASLCGVAPIPASSGKTNRHRLNRGGNRQANRALHIIVMARLKYDQRTRDYRDRRLAEGKTKRDIIRCLKRAVAREMFQLLTHKTTA

SEQ ID NO: 492654 - protein, 417 aa, unidentified
MQTDLSPYTAVIGIDWADKKHDVCVQVAGSDRRELSRIPHRVEEIDEWVQTLLKRHGAPMAVALELSRGPIVSALQKYDCFVIYPINPTTLATYRKAFNPSGAKDDPTDAELALDLLMHHPEYFQPLKPQSVEMRTLMTLVEQRRRLMNDRIRITNRLRNALKQYYPQALEWFDHIDTPLFCAFIKQWPTLDQAKRVRTATLGKFFHAHKMYRKSVLERRLQAIKCAAPLTRDPAVIVPYRLLALTLVDQLEVALQSIARYDDEIAALAPEHPDYEIFGSLPGAGPHLAPRLLVAFGEQRERFANAAELQKYSGVAPVTERSGQKSWVHWRWQCPTFLRQTFVEWAAQTINKSYWAGLYYYQQRAKGCSYQAAVRSLAFKWIRILYRCWVTRTPYDEAKYLKALRHRGSPLLAAQTT

SEQ ID NO: 492655 - protein, 418 aa, unidentified
METEQTGYRVVAGIDVHKKMLAVVVHRQNGEQVVYEKRKFGTMKREINDHLVAWLQHLQVTEVVMESTAQYWRPVWYGLEPHFKLHLTHPLKTRAPRGRKRDFRDAQRLADRWCSGDLEDSFIPGAEQRSWRWLTRNRVHLQRMVGIIRNQVEGLLEQGGIKLTAVASDPFGVSGWAILELLVKGETDVKVLAGQARGVLRKKDAQLQEALAGKLDPVYRFLLQQHLEKVKLLRQQISDINELLALLMKEHVVTLHRLGKMPGVDLHAAQELLAEIGPGAAAFPSGGQLASWVGICPGSQESAGICYSHRSAKGNRYLRRLLCQIAWAAIHVKDTFFSSLFHRLKPRVEAKGAAWAVAHRIVKVIWLILHNGVEYIEKGTAPVNPRTLQRKFRRLVREFGRQGIDVKALLEQELATPA

SEQ ID NO: 492656 - protein, 367 aa, unidentified
MEEKKKTLTRYVGIDLGKRTYEVAFVGKGGKVTRSNGKTFPDARQSLYRKLRSGDKVALEAGNMAFIMAKEIEKAVGCQVYVLNPSQLALVYASMKKTDKEDSLKLAHILEDCREERLPLVPVPSDREIGRRKILASYRRVKQGRTRDINQLHGLFVSQGITTKVRKELATAQRRQEAIKELTGLERQEAEYLLKSLALCDQRIEELERQMEKESAGDKMIECLQSVPGVGPKVAFAFVSHVAAERFENASQVSNYLGLVPRVYISGDTVRYGPITKRGNSYLRALLVQAAWALIKSKKGDKLKERYFYMTIEKSKSKKKAIVAVARRLAEMLYTMMRDKTWYASRPFIPKVKAKGAEEKAQLAISA

SEQ ID NO: 492657 - protein, 342 aa, unidentified
MTITTIGLDLAKSVFQVHAVDAEGHVVVRKALRRPQVLPFFAKLPSCLVGMEACGTSHHWARELTKLGHEVRLMPPAYVKPYVKRGKTDAGDAEAICEAVTRPTMRFVPVKSADQQAALALHRTRDLLVRQRTQLVNMLRGLLAEFGIEMARGLHHALRLAGQLSTGEAPEAPPLARLVVKGLADQIGTIQLQLARLERELLAWHRSNELSQRLATIPGIGVISATALAASVIEPERFRSGRQFAASLGLTPLHNCSGGRERMGRISRMGDRYLRRLLVVGMTSLVRRARIQPASVDPRLSAMLARKPARLVTVAAANRTARVAWAIMTRGGTYRAPISAAA

SEQ ID NO: 492658 - protein, 354 aa, unidentified
MSKQSNLTVATMGIDIGKNSFHVVGLDRRGAIVLRQKWSRSQIETRLAAMPPCLIGMEACVGAHHLSRRLQGYGHDARLMPAKYVRAYSKGQKNDFRDAEAIAEAVQRPTMKFVATKTADQLDLQALHRVRERLVRQRTSIINQIRAFLLERGIAVRQGFRCLRSELPGILAKRSDTLSPRMMRLIEDLAGDWRRLDERIEGLSTDIASVVEQDPACERLMTVPGIGPIISSAMVAAIGTGDVFSKGRDFAAWLGLVPRQISTGDRTILGKISKRGNRYLRVLFVQAAWVVLIRSQSWERYGLKPWIEAAKKRLHHNVLAIALANKLARIAWAVLNKERNFECARTNAMAPQPA

SEQ ID NO: 492659 - protein, 412 aa, unidentified
MEAIIERCCGIDVHKKTIVACLMVGRHNGKPQKTIKTFSTMTRDLLACKDWLESEDCTYVAMESSGVYWKPVFNILEDSMEVILANARHIKNVPGRKTDVKDCEWIAQLLRHGLIKGSFIPPRAIRELRDLTRYRRKLIQTKSSELNRIHKFLEDANIKLSSVVSDINGISAQDMIYHLIKEDMSPKEMAELARGRLRKKITELEKALEGHIREHHCLIIKVSIQMIASYDKAIDKLDREIDQRMKPYREESERLQSIPGLKKKTAESIVAEIGVDMSRFPSDAHLSSWAGLSPGNNESAGKRRSGKSTPGNRWLKGSLTEAAWAASKSKGTYLKARYHRLASRRGKKRACLAIGHTILIMAYHIIKEQCTYRELGADYFDRLNEVHVIRRLTSRIQALGYELYLRKLPIAA

SEQ ID NO: 492660 - protein, 350 aa, unidentified
MNVNHYIGFDVHKKSISYCVKVADGQIVEEGKLRATHDALRQWAGKRPEPWHGAMEATLFSGWIYDTLKPFAAELQMGHPALMKAIGASKKKNDKLDARKIADLVRCNLLPACYVASAEIRELRRMLRYRNLVVAQATRLKNKVSGLLMEVGAEYNKQQLHGKEYFTELLDTLEEVPESVKDLLRLSRGAMEAFEATQEQLVVRLQKEPLLAQRVMLLKSIRGVGPVTSLTWILEVGDPQRFSSVAHAVSYCGLTSALDSSADNQKRGPISKQRNAHLQTVLIEASKIAPRWNPQLAAVHAREVERGNRNRATLAVARKLVAYLLAVDKSGQPFQPRTPLAAETEVAKVA

SEQ ID NO: 492661 - protein, 370 aa, unidentified
MSQSSTLFIGMDVHKESIAVAYVAQDHGAEVTYLGTIGTRQCDIDQLSRKMQAKAKHLLFVYEAGPCGYWLYRYLTKKGYDCWVVAPSLIPKKPGDRVKTNRRDAVQLARLARSGDLTTVYVPRVEDEAIRDLTRTREDTISDLKDAKFRLKAFLLRQDIRYAGRANWGPAHLRWLSEVVCHTPAQQIVFQEYVRAVNEHTERLRRLEQELQEQGKSWRLNPVVEALQALRGVQCTVAVTMVAEIGDLTRFENPRELMKFLGLIPSEYSTGDHRRQGSITKAGNTHARRALVEGAWAYRYPAKISRHLQLRLEKQPKIIQDISWKAQVRLCRRYRRLVSRGKHANVVTVAIARELAGFMWAIAKQVPLAA

SEQ ID NO: 492662 - protein, 367 aa, unidentified
MFHSDYTVGCDAHKHYSFFAVLDAQGHVVEEQRVPHHPGALRAYLSRFPAGTPVALETVGNWYWIVDEIEAAGCTPRLAHALFAKKMMANIHKSDKLDAKGLATLEHLGSLPTVWIAPGDVRDARELPRTRMAFSKSRASLKNRMHSTLAKYALSLNTQSDIYAPKWRPPLLKLFDQLPEETHRCMLQELELLGLVQEQIDQLEVRIKERIQLTPSMQVVQTVPGVGTILSIVITLEIGSIDRFSTPKKLAGYSGLVPRLSASGGHIHYGRMVRQANNYLKWAFIEAANVVVRHRHHPNWRNKYVSHLYERIKRRKGHAVAVGATARYLSESAFWVLKKSEPYQEPPHWAPGGMKHPISLSQGKVPA

SEQ ID NO: 492663 - protein, 376 aa, unidentified
MRQLYQGGFTAKTEIKNGKLDASCYQNIMKSRKYQFSIGIDVSKATLDFVIIKERISLSHHKITNSPEQIIELLARYKQIQGFKKTNTIIGLEKTGIYSNHLIEVLSKLKFNFTVINSLHLKRSLGLTRGKNDKIDAERIANYLYSSADLLKLWEPKRQIIQQLARLSSLRNRLITINAGLKKPLKEQASFLKASIAEKYSKLCLGSLQALDTDIQQVQELIKSTWSSDEKLKRLMEIIISVPSVGEVTALEILITTNEFKDISTAKKFACYAGVAPFDYSSGTSVNKRTRISRIANRKIKALLHTCAMCARSSVPDLKAYFERKTQTQGKAKMLVLNAIRFKLIARIFSCVNADRVYQKQPPIATQPTELTPASI

SEQ ID NO: 492664 - protein, 354 aa, unidentified
MADEIAVVGGVDTHTDFHQAAVIDSIGRHLATAPFPTTPDGYRRLLEWMRSHGAVLAIGVEGTGAYGSELARFLQANEITVIDVDRPDRKARRAKGKSDPVDAYAAATAVLSGRASGRPKTRDGIVEAIRSLRVVRRSAIKSRTQTINQIRTLIVSAPAEVRERLRGLPTYQLIAQLSRSRPGSDLADPTCAVRTALRRLARRYQHLTGEIAEADAELDPLVAQAAPGLVELIGIGTETAAQLLITAGDNPDRLRSEASFAHLCGAAPISASSGRTNRHRLNRGGDRQANHALYTIALVRMRYDPRTRLYVARRTAEGMSKKDIFRCLKRFIAREVYKYLISTNIPQQELLQAA

SEQ ID NO: 492665 - protein, 414 aa, unidentified
MGLARWVGRAIGLDVHRDFCVVAICEDGRVRSAGRVPSTPDGIRTLGESLLATDRVALEVTASCWEVARILEPYVERVVVVSPDDTGISSARAKTDKLDARALAVLCWKGELDAVWMPDERCQILRRRLARRQQLVWGPTRCKNEIAAVLQRRLVERPPISDLFGVTGRRWLTRLELPVEERESVDAGLRQIAFVDAEIVAVDRLIAQQALAWPEIRRLMTVPGVNLICAASFMAAIGEPSRFLTSRKLVAYLGLDPKVRQSGDAPARSGRISKRGSANARWALVEAAWSAVKQPGPLRAFYERTRGRRGHGKAIVATARKLAVLFWCMLTRGEDYAHQRPALTKKKQRQLELTAGAPARSKAAAGIWSTNRAILHAERALAEQAEVSYKRMVTDQQAGRPSRKVGASATPERA

SEQ ID NO: 492666 - protein, 338 aa, unidentified
MKLYGGIDLHSNNSVIALLDEEDKLVYRRRLPNDIELVRLELEPFGEDIEGLVVESTYNWYWLVDGLMDAGYQVHLANTAAIVQYEGLKYTDDDTDARWLAKLLRLGLLPEGYIYPKSERPVRDLLRRRGKLVQQHTSNLQSVQNLMARNRGHSLSANRIKRLTYEEVDALLPDADLALAVKVNLAVMRTLEGVIAVLEKTVKGRIKLRPAFRPLLTVSGIGEILGLTIMLETGEIGRFAKVGNYASYCRCVGTERISNGKRKGRGNAKNGNKYLAWAYIEAANFAVRYNPKIKRYYQRKCARTHPVVAIKTVAHKLSRACYYILRDQVGFDVNKAFA

SEQ ID NO: 492667 - protein, 345 aa, unidentified
MERYIGIDAHRDSCTVTVLNARGKKTQQHVLPTEGGALVECVRSLTWSLHLCVEEGEWSEWLVEILSPWVGQVVVSQTPWRPGPKSDATDARDLAERLRTGRLRTPIYKAPRQWARLREAVRLESKLTQDVVRTKQRLRSLYRRRGLTCSNDAIYAPRHRADWIRKLPQSLVPSAEILGQELDVLVEFQQTAERHMLTAARKFPIRRILETAPGIGPKRAARLLAIVVTPHRFRSKRLFWSYCGLAVVTKTSSDWVAQAGGRWVRAPVIQTRGLNRACNRQLKDLFKGAANSALRGKPPNALRDAYERMLEAGTKPNLARLTIARKIAALVLAMWKSESEYRIMS

SEQ ID NO: 492668 - protein, 347 aa, unidentified
MNSVGIDLHRKRSHVAVIDDEGTETLSRRITNDPATFLELLAELEGDSRIALEATYGWEWLADALQDAGYELHLSHPLRTKAIASARVKTDAVDARTLAYLLRADLLPEAYIAPRELRDLRDLLRHRVALTRVRSALKNRVAAILAKNGIAAPYSDMFGAGGLRFLAELELREAPRRRLDSTLALVADFTREIDQTSREIDARAKEDPFVEVLCQIRGVGRYIAMLVIAEVGDIGRFETARRLCSWAGMTPTVRSSDQRIRLGHISHQGSPALRWALVEAAQHAARGGGPLREAYERISKRRGRQVAKVAVARKILTLCFYGLRDGEIRCLAPRANARTVRTTAVST

SEQ ID NO: 492669 - protein, 400 aa, unidentified
MVDIDAVGVFLGLDVGKQTHHGRGLTPAGKKVFDKQLPNSEPKLRAVFDKLTARFGTVLVVVDQPASIGALPLTVARDAGCQVAYLPGLAMRRIADLYPGEAKTDAKDAAVIADAGRTMPHTLRTLDLTDEVTAELTMLVGFDQDLAGEANRTSNRIRGLLTQFHPSLERVLGPRLDHPAITWLLERHGSPQALRKAGRRKLVEVVRPRAPRMAERLIDDIFTALDEQTVVVPGTGTLDVIVPSLAKSLAAVHEQRRALEARIEALLEAHPLSQVLTSMPGIGVRTAAVLLTTVGDGSSFPSAGHLASYAGLAPATRQSGTSIHGEHAPRGGNRQLKRAMFLSAFAALHDPASRTYYDRCRARGKTHTQALLRLARHRISVLFAMLRDGTFYEPRSPRPA

SEQ ID NO: 492670 - protein, 411 aa, unidentified
MGKIFCGIDWSERHHDVALVDQDGQLLAKRRIEETNAGWAELLTMFADAGDSSHEPIPVAIETPRGLLVAMLRATGRPVYSINPMAVARYRERHTVSRRKSDHADAMVLANILRTDAHMHRPLPHDTELARSIAVLARAHQDATWRRTKASNELRSALREFYPSFLNAFANKPDFLISADARAVLAIAPTPAAAAKLTKTRIATALRKAGRRRGIDALAAELHQALHHPQLRQPTLIEQAMGIQALTLLSTLDTECRNVDQLGQACATAFAQHPDYAIITSFPGLGDTAGARVLAELGDDRHRFADARAVKAYAGSAPVTRASGRSISITHRRIKNDRLAAAGWIWAFAANVHSPAAKQHYRRRRDLHGDRHAAALRHLFNRLLGCLHHCLQNRQTYDESKAFATLQPTAS

SEQ ID NO: 492671 - protein, 370 aa, unidentified
MEIESEASKSEDECKVFNLIKMKTRVLKESLGIDVSKDSLSFCLGVLQADLSKRYKVSSDVNNNDHGFKQLDRWISNNKSLVNQPSIVMESTGVYHEGIAIYLYNMGYAVNVLQSGRVKRYAQSLDQRSKTDALDSKMLSMLGCERELTAWVPPSEQMQQLRGLSRERSSLIKERSIELNRAHALKRSIYKDHKAEKRYQARMELLNEQITEIESEMQALIKADDVLSEKIEYLLSIPGVSFISAATIIAETLGFAQFENAKQLTSYAGYDVVLRESGNYQGKTHISKKGNKHIRAVLHMPSMTAIRVNPSLKPFYNRLKPTKQKPLIALVAVQRKLLLLMYSLWKNEMYYDPMYEIKKRQESKIPSRAG

SEQ ID NO: 492672 - protein, 421 aa, unidentified
MKNSAARKLRQVPAGYLVVGIDPHKRKHAAVAITGDLQVQAKFKFANSRAGFEQALENARIEMVKTSCRGVIFAIETGGHFWRNFAYYLEGRGIPFRLISPLTLKRMRDGRDLNRRKNDFRDAEMAAGVFLTGDFTESKLLQGVYADLRSTHNAYYRLVKERTRIINLLKGLLDGLFPEFTQVFKNPCGRTALVVLSTCPSPSAIASMSEDAFVQAIRIGRQGRLMRGKLRVLHQAAQTSIGIKPGSDAVAMEVSLLVGRYQLIEQQVDRLVKSLIGLVDRTEEGKYLLSIPGVNYLSTAALLAELGPLKSYSNAKQLTKMAGANPIQSESAGKRLGKTPMSKKGRPRLRYSAWSAVIPLLRHNPDFRAWAKRLRERPAHANPLNGREVVGAALNRLLRLVYVLAKKQEFYRSPQAALVAN

SEQ ID NO: 492673 - protein, 456 aa, unidentified
MNRNRSKAKIDRKMPMVHPNAAAIDVGATMHMAAVRADRTPEPVRSFGTFTADLHRLVDWFTECGVETVVMESTSVYWIPIFELLDARGFTVFLVNARDAKHVPGRKTDVSDAQWLQQLHSFGLLRASFRPKGQIAELRAYVRQRERLLEYAASHIQHMQKALTEMNLQLHHVVVDITGATGLRIIRAILAGEHDPKMLAQLRDYRCHASAETIEKALTGSYRAEHLFALEQALALYDAYHEKVSACDARIEGVLKELSIGRGRRSASLLSPRRPRTDQVNGLAFDVRAALFTLLGKDLTQIDGLGPYLSLKLIAECGDDLSAWASAKHFTSWLGLAPSNKISGGKVLSSRTRRCGSRAAALLRLVTVGRTDTALGAFYRRLSARIGKAKAVTATARKIAVLFYNAIRHGMDYVDPGASYYETRYRTRVIDNLHRRAKVFGFVLQPVEPTPGVAVS

SEQ ID NO: 492674 - protein, 458 aa, unidentified
MKHYYLGADVSKGYSDFMFLDAKKRRIEEDFQLDDTFDGHQKLYHILSGFCDQHPDAQIFAAVESTGGYENNWFDALVKFQSNLPLKIARLNPCGVHNNSKAGLERNITDPISAENVAKYMIEHPENVTYQQQDPLASLRKQWSFIKMLLKQKTQLLNQLESNLYGANPEILAYCKNGVPKWVLSVLVRFPTAAKLAKAKKSSLVLIPYVTEQKAKELIQIAQKTVASANDQITAQIIKATVKQIQQLTKTIEAQEKILTEACSIPEVQLLKTFPGISDISAIGLILEIGSVERFATAKKLSSFFGLHPIYKKSGDGTWGFHMSKKGRVVPRQILYMVAMVAVQCNPLIAEIYLKHTEKGMKKKAALGLCMHKICRIIYGMLKHNSAFDANIDRNNRKKSIKADTKKIRRDKRRRYQSFDPKAPVSGRHNKKRKERKQSQSDNIAHNGIIKASVPVSV

SEQ ID NO: 492675 - protein, 352 aa, unidentified
MSEYAGQQFVGIDLHRRRSVLVRTTVSGDVLEATQILNDVDRLNSVMERAGESPEVVLEATYGWYWAVDALRAAGARVHLAHPLGVKAFEYRRVKNDLRDATDLADLLRMGRLPESWIAPPATRELRELVRHRAKLVGLRSHCKAEIHAVLAKCGIQVLMSDLFSDPGNDLLDRVPLPGPYAARVQSLRRLIDDLEDEIELFTRLTRGRLVANPDYVALQQLPGVGQILAAVFTAEVGDVGRFRSASQLACWAGLTPKHHESDTHVHRGRITKQGSRLVRWAAVESVKALGPRTVVGAYKKQVADRRGKNIGTVAAARKQTEFVFYALRDHHVRALHPPRPPAPSPVGAAAA

SEQ ID NO: 492676 - protein, 372 aa, unidentified
MNKKVIYIGLDVDDTQYHGAAFDKGAGEIVSFKCRPTLKGLIAQLEKMQKYFSVESLKLCYEASYIGHCLQRDLMQAGYDCDVISPGSIPRKGSKSIKTDRIDALDLAQFYANDLLTIVQVPNAATEQDRDLLRSRQQLMKQQNDLRRHIQSLLRRNGLHYKAETNNKTHWTKHHCCWLERTVEGCSGSLGTNLQLLLRQLESINEIVSAYSEEIELMAKRPNYQQAVSALVCYKGIKNLFALTMITEIGDVKRFAHPRQLSAWVGMDIREYSSGGKHHRYGITRQGNRHLRTAFIEANQRAYRTTKLSREIKTRRANANPEYIAIADRCLRRLSKKGNRLLEAGKHPNKVKVACAREMIGFVWESLNKVAA

SEQ ID NO: 492677 - protein, 321 aa, unidentified
MSQPPVPPVCVGIDVAKAKLDVFVDTADQLFTVDNTVAGVQQILDRLGQHVVQLIVIEATGRHHRRLAVDLMLAELPVAVVNPRHAREFARAQGKLAKTDHLDARLLADFARRLNPRPSDKPSTNQPLLLNLVARRRQVTQMTAAEKMRLHDADDKITRSMINKVLRVLDQQREDLDRQIAKLIESDDDWKNRKDLLTSVPGVGDATASQLISDLPELGKLNRQQIAALAGVAPLNRDSGSMRGKRTTWGGRAAVRTALFMATFSARRCNQTIQAFAERLTAAGKPYKVVMVAAMRKLLTILNLLIRENRPWQTTPPLQNT

SEQ ID NO: 492678 - protein, 329 aa, unidentified
MYNVGIDVGSKELVMVIRHKGKNQKARSFKNTHEGHAQIIKTLTSKKGEVRVCLEATGIYHFDLAVALSRSNTVEVMVVNPKASRHYAEALMARSKTDQVDANILAQFAETMPFVSWQVPDDKTLELRAFSRRLAALTKLKTQMKNQLHALESSISVPEIILEETQTSIEFLELQIHRLKEHALTLIGSEETLQRSLEITTSIKGIAETSAIQLLGELLILPRDMNNRQWVAFAGLDPRHYQSGTSVSKKPRISKAGNSYLRQALYMPALCAAHRDPHVNAYYQHLIEDQGLKKMQAVCAVMRKLLHAIHAMLKNESHFDSTRFFNMAA

SEQ ID NO: 492679 - protein, 387 aa, unidentified
MPQPNDFSRCLTSFEQNSTLVAVIELSQSSWLIAGTVPGIERQPLKKITPDETALLRLLHRWRDEAIGKGRTITRIAVAFEAGRDGFWLARWLTKQGVEMHVIHSSSVAVSREHKRAKTDRLDTAMLTRVFLGWLRGEHGHCGMVAVPTIEEEDAKRPGRERENLVSECTRIINRMKSDLVRLGIRGFKPQLRKAPQLIEALRTPEDVPIPPHTLEELQRDFARLAILREQIKAIEEARLQCLEDAPQTGPNAMVRLLASVIGLGVETAYMLVQEVFSRTLRDRRAVARYAGLTGAPNESGSKRREKGLAKAGNARVRRGMIQFAWRFLLFQEDSALAQWFRARTESAAGARKTQMIVALARKLLIALWRMVNTGEVPHGVVLRQAA

SEQ ID NO: 492680 - protein, 353 aa, unidentified
MQIVGALDVHRRQITFKTIELATGEVRRGRITPAVRQSVREWLAGFAAGEAQFALEGTTGWRFVVEEIERAGHRAHLADPAETAAKRGRKRRAKTDNADCDLQLKLLLAGELPGSWIPPAHILELRTRVRLRKTLIDQRTAWQQRLQAQLFHQGVPAGLRPRTRAGRAALARAELSPAGRELVELALRMIDAIDRELAPLDRQLCSFARRQPGCRALIARLYGVGPVSATAILAELGDARRFARSDDAVRHSGLDVTVYQSDKKRAPGHLSHEGPELLRWALFEAALSAARAGSPDHAYYLEVAERIDHNRACLSVARKLCRRAYHILRELGDEALAPVAGDPHAEEAIAAAA

SEQ ID NO: 492681 - protein, 456 aa, unidentified
MKVVYRRCAGLDIHKDSLSACIRMRGKGGKETEVEEQVFSTCTQDLIRLRKWLRDRKVKQVAMESTGVYWIPVWNILETGSLELTLVNPATVHALQGKKTDRIDAARIAEYLQYGLLSGSFVPPKPVRQLREVTRMRVHVQRDRNRVICRIGRLLETVNIKLSSVASDIVGKSGMAMLRALAEGQNRPELLADRALGHLRSKIPALVLALEGRPDEHFRWMLRGLLDKLDALDKEVATIDLELRQRLSDNDDLLERLATIPGVDRVVAQAVLAEVGDLSAFPDAAHLASWAGLCPGNAESAGKRFSGRTRKGNRYLRRILTQSAWAASHRKDSFLQSFYFRIAHRRGNKKALIALAHRILLIMWKIIREGDVYREKGGNFFDRVRPLNTARKLTRRLESIGFTVALEQKPMTPVPAAMAVPPEVCSKCNRWRLTKCIHHNPKPKRTNKKRSLKSTV

SEQ ID NO: 492682 - protein, 345 aa, unidentified
MEIHTIGIDLGKTIFHLVGLNQHGEVVERKKFSRAQLLRFTANRQVHLIGMEACGGSHFLGRALREQGHEVRLIPAQYVKPFVKTNKSDFIDAEAIAEAVGRPTMRFVPIKSDDQLDLQSLHRVRERWVMRRTAVVNQIRGLLLERGITVRKGRRHLDVALPEILEDAAGKLSAALLLLLKQLNLELEQLATRLEEAETLIQLTAKNNEACRRLDAIPGIGPVTATALIAAIGNGAAFRKGREFAAWVGLVPREHSTGGRQKLLGISKRGNAYLRKLFVQCARSVLQQGSKQSARLSAWLGELTARAHRNVVCVALANKLARIAWAVLATGQAYRPAEPTTAAAA

SEQ ID NO: 492683 - protein, 350 aa, unidentified
MDKELYFGVDVSKKTLDLAYYDGESIDWKKAHIKVSNNNAGFKKIGSWVAKVSKGFDIVLFCMEYTGLYTQDFRLWLEEKHYIYRMVEPRKMHRFEPDLDDGLRSLDRIKTDELDSFRIAIYCEQNHRKILRNPSKLPPPVYFKLKRLLAERKQTVKQSVLYKQQLHDICAYDTDLSVERKNGQLKTLNDALKGIDNEIDMYIKEDADISKNFSLLTSIPGIGRVVALETIVLTENFMAIDNPRKYACYIGVAPFKKESGTSVRKGSSVSKKGFKQAKADLSIACLVCMQHIPNIRDYWERKRKEKCSGIVFNAIKFKVILRMFAVIKRGTPYVETDNYRNGKNKQPGVN

SEQ ID NO: 492684 - protein, 415 aa, unidentified
MAPRKRKKAPVSEALPPQLATVTLHAAGIAVGAEEHWAAVPACDDPQPVRRFGANTADLEALADWLWDCGITTVALESTGVYWLPLFEILEARGFQVLLVDPGKMPRDGRPKTDVHDCQWLQRLHTYGLLSACFRPEDQVIVLRSYLRQRAALLADAARDIQHMQKALTQMNVKLQHVVSDITGMTGLAIMKAMLAGERDPHKLAQLRDHRCKQDAAAIAQALYGNWRAEHLFALQQALERYEFQHRQIAACDERIAAQLQTFADRSQGEPLPPKRGQRRRHRNRPAFDPREPLHRMSGVDLTRIEGIDETTALTILSEIGLDMSKWPSENHCTSWLGLSPQRRIAGGKVRRSRTRPTTNRAAAALRLAAASLHHSHSALGAYFRRMKSRLGTPKAITATAHKLARLVYSRHYRF

SEQ ID NO: 492685 - protein, 443 aa, unidentified
MSKFKKTFELTYPNAAGIDIGASSHFVAVPTDRDDQPVREFASFTEDLHAIADWLTACGIDTVAMESTGVYWIPLFELLESRGFTVFLVNSRHVKNVPGRKSDVLDCQWLQQLMSFGLLSGAFRPQGDYAALRVVARLREMLLRYQATHIQHIQKALLLMNILLTEVLSDVMGETGQKIIRAILAGERDGETLARYRNGHVKASEEEITKALQGSWRDEHLFSLKVAVELYDFYAEQLLACDQQIEQLMKDLARYDLKPEKHKRRGGKPKNAPKFDARLLLMQMCGVDLTRIDGIDVTTAFKVLSEIGADMSKFKSAKHFASWLGLCPGTKISGGKVLSAATKRTANKAAKALKMAAVNLRNSQSALGAYYRRLCGRMDKGKAVTACAHKLARLIYAMLTKGEEYVDQGQTYYEEKYRERVLKNLTKRAEALGFQLTPVPEMA

SEQ ID NO: 492686 - protein, 344 aa, unidentified
MSEVIIIGLDIAKYVFHVHGADERGRVIFSKRISRGKLLDFFAAQPNCTVALEACGGAHHWARQLTQLGHEVRLIPPAYVKPFVKRQKNDAIDAEAICEAAQRPSMRFVAVKSERQQAAGLVFRTRDLLVRQRTQLINAIRGHLTEYGWIAPKGPSHVAMLADLLEEEEMASSLPEAARAMFRLMLDLLAGLNGKIADLDKEIARRAREDEVSRRLMTVPGIGPISATAIAALAPPAETFAKGRDFAAWLGLTPLQRSTGGKRKLGATSKMGERTLRRLLIIGSSAVVLQASKRGAPKGSWLEQMLARKPRMLVTVALANKMARIIWALLVKQENYRAPVAAKA

SEQ ID NO: 492687 - protein, 330 aa, unidentified
MNSICLSTDQLTPALPVLGLDVAKKSVQAELRTNGKRVRFGFENNAKGFAQLARMLKEQGALKVWAGLEATGPYSHALALWLHGQGHRVSLLNPRRVKQYARSAGNRNKTDLLDAAIIADFVCAHLPAAWQPPTLEVAQLQALVRRREELSLMLQAEKNRLEGVASHVRCSLERIIDTLSAEKTRLEKLITQQIRSHQQLSRDHQLLCTIKGIGSLTAAILLAEMARPGQVERARQAAAHAGLAPRREQSGTSVRRNRALGKEGNRYLRKALYMPALVAIKYNAPLRYFASRLRTAGKPKMSIVCAVMRKLIHIAFGVLKHQKPFNPSLA

SEQ ID NO: 492688 - protein, 359 aa, unidentified
MLVERTSVGLDVHARSVAAAAIDGVTGELKRARLTPSHDHIRSWLGELAGPVAVAYEAGPTGFGLYRSLTALGIRCVVAAPSKLQRPSGDRVKTDARDAVHLARLLRLGELTAVCVPSVDQEAARDLVRAREDCRGDLMRARHRLSKLLLRQGIVYCGGNAWTDAHDRWLRRQRFDSPATTTAFESDYDTILTVAARRDRLDNTIAELAADSEFTPVVRRLACLRGISTLTAFALAVEIGDWHRFTGNTIGSFIGLVPSEHSSGASRVHGSITKTGNTHARRLLVEAAWHHRASYRPGKTMHQRWERAPAAARARGDAGNRRLHARWITFNLRRKRPVIANVAIARELVGWCWSLAVMD

SEQ ID NO: 492689 - protein, 330 aa, unidentified
MIKYSNKESGMETWIGIDISKDTFDAAWEQDGKKEHEKFSNTTAGFKALLKWVPDGSKFVMEATGTYHLRCATFLAGSGLHVSVENPLAIKRFIQSDLRRCKNDVSDSFSIAKYGREKSPRAWTVPSEEAREARRLQGLIELLREQISAQTNYFHALQQEDLKDDAQKLCKASIAKMKVAIADAEDRFKSIVSRFWKDDVERISSIPGVGKMSACKLIAKVEDFNRFENSRQFMSWLGMTPRNMQSGTSIHVNGGITKMGDGRLRTQFYMCAVSAIQSNGRCRAMYERMVSKGKPVKVALVAVACKLLKTAYALVTKKQMYNANFLQFAP

SEQ ID NO: 492690 - protein, 319 aa, unidentified
MAQNDLVVAGIDVAKDKVDVCIRSLSLRRTFASTAEGRRELATWLRRKKVGKTVMEASGGYERDWAKALRGAKIEVRIVDPKRVRSFAQSAGRFAKNDTIDAEMIAWFAETFGEARGQAYDAAREQLHQMVHARQALKDMQSRLASQGEHAVPAAVQRIHARISKTIAVELVKIEAEITTLIQATPRFAELAEIIESVPGLGRTTSAALIADMPELGQANNKIVASLLGVAPYDDDSGRRRGERHIKGGRRRTRNIFYMACLGAATQHNPVLKAFYDRLVAKGKLKKVALTACMRKLISILNIMIERRQKWDTKRYAVS

SEQ ID NO: 492691 - protein, 379 aa, unidentified
MDEPITGFVGLDAHAESTAIAFAEAGRSAPRFIGTVGAKLPQLLKALGHLGEPSSLMVVYEAGPCGFTLARELLAQGYRCEVAASAKIPRRPGERVKTDRRDALKLAGLARAGELVAVVVPDERDEAIRDLSRARVDAVRARLKARQQLKALLLRHGRRYSGKTSWSAAHERYLAETAFEHPAQDVAFTEYRVAASEGQARVERLTLALQQQVAQWRLRELVQALMSLRGIDLVAAATIVAELGDLRRFTHPRQLMGYLGLVPSEHTSGSKRTLGGITKTGNSHVRRVLVEAAWNYRFPARISRILQLRQEHQCPAIRTIAWRAQLRLSHRYRTLRARNLQHNKICVAIARELAAFIWEIGQQIPQIIDPLNRASAAMH

SEQ ID NO: 492692 - protein, 379 aa, unidentified
MLGASKQVRSVASATEPHAWLSARTRVVESTQEDRAVVTIGIDTHKATLASCAVDELGRELAARTFANDPPGHRRLLAWASRLGPERRFGIEGSGSFGAALARGLLAAGELVIEVPATLTDRERRHLRQRGKSDPADALAIARVVLREPTLHRLMPVAIADDLKQLVGARDELGAERTRVANRLHADLLVLAPGYGEQIPNLVAARHLAAVGRLLGRSTGIRAQLARKRLARLRALDREMGALEVQLAKLVAASGSSLPRLPGIGVLLAAKLLGETGDVRRFRSEAAFAAVTGTAPIPASSGQTQRHRLNRGGNRQLNRALHFIAIVQARTYPPARAYVTRRQAEGKTWREALRCLKRHLADVVYRTMLLDLRARQIRA

SEQ ID NO: 492693 - protein, 344 aa, unidentified
MSYFAGLDVSLRSVSICVIDGDGKIALERTVPFEIENVIACLRSVEGTIEQVGFEAGVMSQHLYHGLVAADFETICMEARQVAAALSAMRNKTDKNDARGIAQVLRSGWFSEVHIKSRDSHYNRARLTSRKTVLRKCIDLEQEVRGLIRVFGVRLPTPLSHRKFEQTVLPIIEADDQIAYALMPMIEAWRSLYAAFLELDRRVKLTARKDPVCLLLMTAPGVGPMAALAFKAAVDDPSRFKFSLIVGAHFGLTPRQFQSGEKDQTGHISRAGDADVRAALYSAANSLLMRTKAPSHLKTWGMRLVRTRGRRRATVALARKLAVILHRLWVNGTEFRLTGIEVQT

SEQ ID NO: 492694 - protein, 305 aa, unidentified
MSSSVGIDVSSTALAVHIRPEAVNFNVSNDLNGFKQLVEKISEYSLSQVLLEATGGYECAALKALQQAGIPVCRINPSRARSFALSLGKQAKTDPIDAAVLAHFAEVLPPQRCIEMTAERTLLRELLLQRDRFVQQRDDDKRRLKQAQSPCVCASLERHIVYLKLEIKALEQQSKELDDDRLLRLTQVKGIGMITAAKLVALLPELGQVDSKEIAALVGVAPFNQDSGKHSGKRSIWGGRARVRRALYMACWVVIRHNKDFNARYSALRAQGKCAKVAVVACMRVLIVRLNAMLKSGTAWREQLA

SEQ ID NO: 492695 - protein, 365 aa, unidentified
MISKEYFIGMDVHKEFVQMAVFEEKGEEPIYERRLENDTELLVKEATRFARKGKTFVAYEAGCLGYIIQRAMEKAWITCYVLPANKVAKKRDNRIKTDKRDARLIGRELRSGSIRPISVPDVTDEAVRDLLRCREDANEDLRRVKQRLLKFMVRHGHIFKEGSNWTLKHWRWMDMTEFAHEHERTVYEEYRSQIKALEERLTRLEKQITETAESPRYKAKVNKLRAFKGIDYIIALSVLCEIGDFKRFAGAKAFMSYLGFVPSESSSGGKRRQGGITKAGNGHLRRLLIEGAWHYTKGARTGKRLEQRRKNCSANEIEIADRALHRLNKKYIKLVFKGKHKNVAVTAVARELAGFIWAAQVSSAA

SEQ ID NO: 492696 - protein, 401 aa, unidentified
MTSVGIDVSKGKSTVCILRPYGEVVASPYEIQHTEPELRALVSHIQSIEGEVRIVMEATGAYHLPLLSSFKDAGMFVSVINPLAMKKYASTAIRKGKTDKLDSVRIANYGIDHWFKLADYTLPDELYAQLRLLGRQYAHYITIRIECKLALTDLLDRTMPGIKTLLSGKRSEEPTKDKLSDFVAEYWHFDNITKKSEVQFIHSYCAWAKKKGYHASEPKAKAIYALACNGIPTLPSSAASTKMLTLEAVRVLKEVNKTLETILTQMQALAITLPEYDIVRAMNGVGDVLVPRLIAEIGDVRCFHSGSALIAFAGIDSPSFQSGSFTGTRRKISKRGSSLLRKTGYEVMKCLKTVKPAQDNAVYLYMLKKEAEGKPKKVAKIAALNKFLRIYYARVSEVYAS

SEQ ID NO: 492697 - protein, 334 aa, unidentified
MTSYVGLDVSLAETSVCVLNSDGKVRYEGKAKSLPDDLVACIRQHAADAERVAIETGQTTALLFKAMKTAGIPVVCLETRHAHKVLSARRNKTDRNDARGLADLVRVGWYREAWVRGASAHAIRSLLLARRMLLVTRRTLENTLRGAVKRFGLIITKTAGGTFTRRAVAAMELDPAYAAFAQPILAVLETVAAQIRVYERQLQSVVRGNATIARLMTVPGIGYLSALAFYSTIEDPARFKRSDDVGPYLGLTPRTHQSGEVDWSGRITKTGDNMTRAYLFEAANVILTRVTKPTPLRAWGATAQRAQRNEEGSGRSGAQTGSHDACHLERWHRI

SEQ ID NO: 492698 - protein, 344 aa, unidentified
MKNTTIAIDLAKSIFEVGVSDRPGHVVANHRLSRDEIVRFMANQQQTTVVMEACGSAHYWGRTFQSFGHDVKLLPPLYVRPYVQRSKTDRADVKGMLEAWRNTDIRPVPVKTESQQQLTALHRIRAGWMAARTTRINSARGLLREFGIVFPLGAAALAGRVQELIEDADSALSMPLRQLLHEMVLEIGELESRIKLIHKQLEAIAAQTPVVERLLTVPGIGLLTATAFVGFIGDASRFPSGRHFAAYLGLTPSEHSSGLRRRLGRISKHGDVYLRTLLIHGARAVLMAAQRQSNPRGLHLWGLQLQRRIGNNKSAVAIANKMARIVWAVWKSGEPFHSRLQDVT

SEQ ID NO: 492699 - protein, 410 aa, unidentified
MTDGQVTVGIDIGSHMHRVAIGTPEKKIAEEFDLPHNKDGFEKFFERISYYENTYQVPVVIAMEGFNGYARPLDQMVQKKGYRLLNVNNLKLRRFKEIFPSPAKTDAIDARKILELVRLQPLLTDQEVILQEVREVPREHQMLKRLTRRRRQLVCEKAAVLNRMQSDLHAVSPELVELARNKDGLAFLRFVTCREDLRQLERVQKRTLLGIKGIGKGFAGKIQEWQKKAQFSEEAEYAGPMIIEDARRILELKKRIKALDTQIGGLCERSRLAGIVRSIPGFGLTCTSEIVAEIGTMDRFRSEQSLAMYLGMAPLDNSSGRRKGTRHAKQVNIRARTAMMTAMNRHILRVEESELYYRKKRNEGKKHNQAIRSLGRHMVRVLWSMIRNGHFYENREVNNIMEVVKEAIPA

SEQ ID NO: 492700 - protein, 358 aa, unidentified
MRYRIQGFQASMCKVGTGLCCVAYLIIVGENTMKAVTWIGVDIAKKSFVAAQRTFEGFQTEPFALDPKGLKAFANWLPDEPQLQIVLEATGPYWRAFTEGLNSVAPQIAIAVVNPRRVRDFAKASPHASKTDVLDAQVLVHFAETFTPDVLNPSGDRACRQLRALTRHALQLTQQRDQVRDQHEKVAADPDTPKFVLRSLKQHQKHLDQALKRCWAQARESLHRDPHLQESFRLMLSIPGIGDKTALTLISEYGASLGQTGPKQLTRYAGLDIVFFLSGTSVYRLPHISKQGNWRIRRALYMAALSAIRHNPAVRSYYLKLVAKGRPKKSALVAAMRKLLHQCYGVLKNQIPFDPAYA

SEQ ID NO: 492701 - protein, 470 aa, unidentified
MTNYYLGSDVSKGYADFQFIDTKKQKVGASFQLDDTHTGHAALYLRLQDFLNEHPDSQLYVALESTGGYERNWYASLEKFQSSLPLHVAILNPAKVKFNNDVGHKVTTDALSAYGVAAYMVAHPEKVSFESQDYFTSPKRHWKYLQMLNKQKTQLFNLLQSELYLVLPDIQAFCKDGYPQWVMRLLKQYPTAKRLSRARVSTLAEIPYVSEQRAIDLIQAAKQSVASVDDALAEEMVRSLVTQIQQLEQLIKSLIARLKQELTMPEIELLKTFTGISDYTAIGLMIEIQSIHRFERSQNLASYFGVHPVFRQSGDGASGFKMSKQGRKEPRRLLFMVAFSASIHNPVIRHHYQMHLAKGMSRMAALGACMHKITRVIFGMLKHNTPFDPAIDQKNRDRTKAKSAKVLSAAQIARIQEFDKTAPVSRRQNKKRKEQERLSQKANGIMNGIGCSAPEKINENKSTITSNLTG

SEQ ID NO: 492702 - protein, 313 aa, unidentified
MTTLTLGIDVSKQNLDVFDSHFQKHQRLKNTGEDMDQIINLYASFQDKQAIIESTGVYQRLIHQKLEEAGFRVCIVNPYKTRCFAKSAGFLAKTDKVDSKMLCVYGQKVDCRVTPYASSAQQELESLVHYKQILKDELIRLRNQQEVGHASPLVQTLIEQQTKEIQSHLAQIEKQIETVLETDDNFRHQCEKLETVPGVGKGTIATLLCSLPELGTINRKQLAALVGVAPLAVESGTLRGKAMIKGGRAHLRKALYMPVLSCIRCNQPLKMFYDRLRQKDKTTKIALIAVMRKLILTLNVIIKTNSSWKQKNA

SEQ ID NO: 492703 - protein, 355 aa, unidentified
MDSKKYIGMDVHKESISMAVMNGAGKIVMECVIETKANMILQFFDGMRGDLQVTFEEGTSAAWLYDLLKPHVTKLVVCDPRKNASMKEGNKSDKIDARRLAELLRLNHLNPVYHGEHGLRSLKELVRSYLTITKDLGRVMTRVKAIYRSWAIPCSGKQVYAPRHRAEWLGKINEPGVRRRAEFYYQQLDALRTVRQEVRRELLAEGKKHQAWKRLCQIPSIGPIRSAVLLGILQTPHHFRTKRQLWTYSGFGIETHRSADHRSVDGQLQRAKKQISIRGLNRNCNHDLKNLFKGAAIVASSKPGPFQEFYTALLTKGIRPEMARLTLARKIATIVLMVWKRGACFDAQHLKPQTA

SEQ ID NO: 492704 - protein, 411 aa, unidentified
MEQNGVVDESTRFVGLDVHRRYATVAAVDSKQQVVLTARRIDFNDFDEWVRKHLRRTDVVTLEATSNAWHLYDMLVPLVASVTVANPIQVALIAKARVKTDPRDALTLARLLAVGMLPSVWVPPVEVRELRALGGHRRRLIKQRTQTRNRLRAVLYTHNLFPPAGEAFGPANRPWWQGLDLPASEKLRVRHDLSILDSLEPLVKEVDAELVRQSSLEPWAEQAAFLVQLPGIGVHSAMQLLAAIGDIARFDAPHKLVGYAGLGARVHSSGEEHYGGRITKQGRRDIRTTMVESAWVAVESHTYWKALFERLAVRVGRLKAIVAIARKLLVVVWHVLAKQVADREAVAEQVAGKFLEWSWKLGRVNRDGLTSGAFIRRELCRLQLGDKVTAISRGKRKFPIPLSEHADQAVG

SEQ ID NO: 492705 - protein, 351 aa, unidentified
MGKRRTWPRVCRELPNRTWLSSPTVPDDFSAIYSILRTLELKTSRAFPGQCTPGRLGIEAGLATHYVARELAALGHDVKQVPPTYAKPFRQGHKNDFRDAYSVAEAVQRPTTRFVPAKTDEQLDLQALHRVRSRLVSERTAVINQIRGFLLERGIIVRQGLRFLRQALPDILAKRTDVLSPLMVRIVADLASDWRQLDERIEPVTDEIETLAKSDDSCRRVMTVPGIGPIISSAMVAAIGNGAAFARGRDFSAWIGLVPKQMSTGDRTILGRITKRGNGYLRTLFVQAARVILLRPASWPKHSFGVWLARAAQRLHRNVLAAALANKLARIAWTVLAQGRGYEARITKAAV

SEQ ID NO: 492706 - protein, 343 aa, unidentified
MDQYVALDVSLQKTAVCVLNVSGRVLIEADVPSEPAALIAFIQTHAPRAARVGLESGPTSPWLWHSLKAAGLPVVCMDARHAHAALSVRPSKSDRNDARGLAEMVRMGWYREVQVKSLAAHERMALLGVRRRLVDMRVEIDGQIRGILKTFGLVVGSGNKGAFAQRARMLAQDHPVLSALIEKLIEVREVAVAKVVALDKEIRRFVRDDLTLRRFMTVPGVGPVTALAFRSTIDEPNRFKRARDVGPYLGLTPRRYQSGETDRQGGISKCGDRFTRTCLYEAASVLLTKVQRWSPLKAWGTRLARRIGSKKARVAIARKIAVILRCIWTDGTEFWWTKETATA

SEQ ID NO: 492707 - protein, 391 aa, unidentified
MALYVGIDVSKEKFDACGIGDEGKKIFSLSCSMNREGFDKLMLQLAARSTASLLLGMESTASYHIALFSYLTAKGYRVAIINPLLIANFAKLSLRKTKTDKKDALTIAQFLLLRREALATGSPRLTELKDLCRRRERLVDQMTSLKNDMKRILSVTFPELETITGIFTKSTLRLLTQFPSAHAIGKAGYDAVAAIVISRSRGRKSSASIQALMDAATASVGVASPAKDLILKQEAGLLIELQKQAEEIMKLILDLSGEKIKRDAKILTSMRGIGDKTAFNFLIELGGDVKAFENDRKLIAAAGLDPTTYESGKYKGKSKISKRGNRHLRRVIWLMTTKVIINNQVFRSYYLKRRKDGLIYKMAVLATAHKLIRVMFSMLVNQKCFEPERRK

SEQ ID NO: 492708 - protein, 332 aa, unidentified
MQKDFYIGVDISKKTIDVAIYKKEKASKASVCEKFSNSPDGFKEMKRWLRKCGVSLTNALFCMEATGHFTYDLCLFLEQQEVSYSVQSPLHLKRSFGLTHGKNDKVDAYRIASYAYLHREDIKLSQLATNSIRKLKALMAERKSLVVEIARCKAQLKEVGSHSSSPGTIKRTKELLEFLETQVQDIEKDMAQTIDSDAELKNNYQLLLTISGIGIVNAVNTIVATHNFKMFDNARQYASYIGVAPFEHTSGTSVRGKTHVEPGAKMLKADLTGAVRTCINHDKEIQKYYERKIAEGKSYGVVANAIKFKLLLRMFAVIKRGTPFVKKADHLI

SEQ ID NO: 492709 - protein, 417 aa, unidentified
MHYVGIDWADQAHQVCFMTKDGRILSESTITHDGRGFDRLRTSLDELGPVEINLERSDGLLVDWLITQGWAIFVTPPRIFASHRPRRSKDDRGDARLLADLRRRNDPDSRPLVVHSETVEELRGLLRAHNQLHRHQVKIGNQLRQTLKDYYLGAVRAFSRINGPVTLAFLTAYPTPEAAQAASYEELADFLRRHGYTCMQHFDRLYQRLQAPAPQARVAAGHSAHMLVLVELLKTLHQQLSQLTRQIQHTFAAHPDAKWWQSFPGAGPLTAPRLLAAIGDNPAAFPSYQMLQATAGTVPITRQSGQKRVVKFRWACSHPLRKAVTDLARNSIRESGWARSYFYNQRALGHSRARAYRALANRWLRIIWTVRQRGEVYDEARHIANRSRQGRSPTQSPALIPANDEPALVDTCQVSIR

SEQ ID NO: 492710 - protein, 415 aa, unidentified
MALKIVYKICCGIDVHKTFVVACIASTNDKGVTSYESHRFSTYTSGLKTLLQWLIDRNCKDVCMESTGKYWIPVYNILEKGCSIVLAHPKYVKAIRGKKTDKKDAKWIADLFKHDLVAGSFMPPSDIRQLRDLMRYRFKLTCFKSSEKNRLQNCLTVSNIQLGNVVSDTFGKSAQAILDKILENPADTSFDLEPLVFKSLKKKLPELRDAIDGYITPEQAAKLKIIKEHFDNLEARKAELEELILALAAPYQQELAILQTAPGISSDFTAIGIISEIGTNMEAFPSAKHLCSWAGLTPTNNESAGKKKSVRVSKAGCYIKPLLVQCANAVIKSTKHPEMRNRYLRLKKRRGHKKAIIAIARMLLTALYHMLKNGENYNAELYRKSDLPPVDREITVEQALMIARNQGYKIKSATA

SEQ ID NO: 492711 - protein, 387 aa, unidentified
MPQPNDLSRSLVALDQDSTIIAVVEMSQSSWLVGGVLPGIERQPRKKLEPSPERLLALLHRWRDESVRAGRTITRIAVAFEAGRDGFWLARWLEARGVEAHVIHPSSVAVSREHRRAKTDRLDTELLKRGFLGWLRGERGHCSMARVPTIAEEDAKRPNRERECLVKERTRLVNRMKGTLARLGIRHFRPTLRNAAEHLAALSTPEGSPLPPNVAAELERDIARLRLVIGQIKQIEEARRQRLEEQPERGPHAMVRLLARVVGIGIETADMLVNEVLSRPLRDRRAVARYAGLTGAPDESGAKRREQGLAKAGNARVRRGMIQLAWRFLRFQKNSALAQWYQARTADHRGATRKTMIVALARKLLIALWRFVTIGEPLDGVTLRPAS

SEQ ID NO: 492712 - protein, 359 aa, unidentified
MNKNSMFFVGLDLGDKFSYITIIDQDGELIEESRLPTTKASFQRKFSTLQPCRLAMEVGTHSRWASHLLTELGHDVLVANARKLRAIYHNPRKGDRADAETLARLARLDPELLSPIYHRSPQAQADLAVLRSRDAIVRCRTLLINHARDIVKASGSRLPSCSADSFTHKVAPDIPEPLLPALAPIIDTIASLTKQIRAYDQKVKALCSQRYPETKLLRPVGGVGTLTALGYILTLENPHRFRRSREVGPALGLVPRRDQSGDRDPQLRITKTGDAYLRRLLVGSAQYILGPFGPDCDLRRWGLMLAERGGKNAKKRAVVAVARKLTVLLHHLWKTGEIYDPFYLAKKYDQAPEAIPAAA

SEQ ID NO: 492713 - protein, 303 aa, unidentified
MNVTTMGIDLAKTVFSIHGTDQHGKVVVRKRLNRPKLLSFFAQLPPCLIGMEACSGAHYWAREMTRLGHDARIIAPRFVAPYRKSSKNDDNDAEAICEAVGRPNMRFVPIKTEDQQAVLCLHRIRRGLIKERTAQINQIRGLLAEFGLIIPQGRYHARHRIPEILEDAENGLPMLARRLLNNINQRILQLDEEVLAYDREIEAMARRDEQAKRLMAIPGVGPQTATAILASAPDPRQFKSGRHFAAWLGLVPRQYSTGGKPRLGRMSAACGGLITEHQRQAEHACQRSLATASDDGTVRLRCC

SEQ ID NO: 492714 - protein, 418 aa, unidentified
MNEDGDTRGTRRYVALDIHKHYCVVAGVDREGRVLSQPVRVEHADLEGWLKKKLRASDQVVIESTTNAWHVYDLLSPLVERVVVANPIQVKQIATARVKTDIRDTLILARLLAANLVPEVWVPPAHVRQLRQLLSQRRQLVETHTQIVNRMHSVAHRHHLNHARGKRFNEKTTGWQKDKRLSTLEQFQLELEMENRAYMEKQISRIGKEVAKMSHQKPWAESMTYLMQLPGFGVITGMTVLAAIGEIQRFDSARHLASYSGLTPGLEQSGTKNRGKGMTKEGRRELRWALVEVAQRAVKSDPVWKTRFQELQKRMHRNQAIVAVARRLLELVWYVLTRRQPYRHFSQERIAYKYLTWAWQMDDEARDGLTRQQFARYYLMRLGIGHDLTRIALDPKHPRKISSEEELLTLRPELQHIE

SEQ ID NO: 492715 - protein, 410 aa, unidentified
MEVLYAVCCGLDVHKASVTACLRAPGDGPQRRQEVRTFGTTTRELLRLADWLSAAGCTHVAMESTGIYWRPVYNLLEGRFELSLVNAQHVKMVPGRKTDVRDSEWLARLLELGLLRRSFVPPAAQRELRDVVRYRKRLIEERAREANRVQKVLETANIKRGSVVTTVLGVSARAMLKALITGEGAPEQLADLAKRRLRRKRAALGEALTGRVTAHHRFLLDHLLRHIEFLDGAIAVCDRQVETRTAPDADALARLDTIPGVARRPAEVIAAELGCDMSRFPTAGDAASWTGLCPGNRESAGKRLSGRTRHANRTLRQALVESARGAVRKRDSYLAAQYRRLVKRRGDKKAIVAVAHSILVIAYHLLRDGTSYRELGGDYFERLNADRLTRYHTKRLAALGYAVTLTKCAA

SEQ ID NO: 492716 - protein, 414 aa, unidentified
MLKIVYRICCGMDVHKSFVVACIASTNEQGVTTYKSKRFSTFTGDLRRCVAWLAENNCKDVCMESTGKYWIPIYNILESTCDIVLAHPKYVKAIRGKKTDRRDAKWIADIFKHDLVAGSFIPTADIRQLRDLVRYRWKLTNFTTGEKNRAQNCLTVSNFKLDDVFSDVFGKAASSITTRILENPKEKIMDVSGFRTKGMKATDVEILAAVDGEMCVEQAEKLRIIRSHMDALELCKLNLQSLILATAEKYIPQLNIVATAPGIQAFSAIGVISEIGVDMSVFPTSKHLCSWAGLTPQNNESAGKKKTTRISRAGAYIKPLLVQCALSAVRAKQFPEVRNRYLALKKRRGHKKAIISIARMLLTAIYNMLKKNEPYNPELYRQSDRPPAHREVSVEEAVFILQRQGYLVSAPSAT

SEQ ID NO: 492717 - protein, 341 aa, unidentified
MKNKSFIGIDISKNVIDVSIFCEETPIKDFSHDVFNNSRKGFGEMCTWLKKNHVVLSNCLFGMEFTGSYSMELEKFLNARNYQFCMLSTHVVKHYPMGPKDKSDKIDSAKIADFLYRYNGTECVKPYNMPDKTMQRLKALMNERKFLVEQRTCFMNRRQLCITKEDAQLYDGYIKKFSRDIENIELEEQKLLATDDSLLSTYKNLLTIPGIGFVNAINVIVITRNFTAFETARQYASYVGVAPHSHTSGTSVRWRPRPSARCDGQAKADLSMAATVAVQYDAELQSFYNRKLGGKQDSDTKRKALNAVKFKLVLRMFAIGKQNRKWEPLDSKSSNEKLAIS

SEQ ID NO: 492718 - protein, 373 aa, unidentified
MKKVRFLGLDVHAETIAVAVAEPDGEVRSLGIIPNREESVRKLVKKLGPVEQLQACYEAGPTGYVLYWQLTALGVKCEVVAPSLVSVKAGDRVKTDRRDATKLARSYRAGDLTAVWVPNDEHEALRDLVRAREAAKQDQLRARHRLSKFLLRHGRRVPSGIKVWTQRYQDWVKEQVHFEQPAQEFTLLDYVHEVEHMTDRIRRLEQAIGEAVKLAPPGMQEVIQALQALRGIAQISAVTIVAELGEISRFEQARQLMGYSGAVSSEHSSGKRTQHGPITKTGNAHLRRIAMEAAWAYRHRPTIGAALRKRQEGLSEDVKEIAWKAQYRLHKRYRNLVAAGKEKQKVVTAVGRELLGFIWAIGVQVERNSKRVA

SEQ ID NO: 492719 - protein, 423 aa, unidentified
MNKYKYRATKFQQINWKRVQEKAADGQVILTIDVAKEDMYSVLLKPDRTVIETFRWCHPHETRMFVEQIVAIGADRVEAVLEPSGTYGDALRRLLCEAGVTVYRVSPKRVHDAAEVYDGVPSLHDAKAAYLIGRLHLEGVSRPWTEHDERRRTLRAQLTIVDFYQERYQRGLNRLEALLARHWPEAPYCLDLDSVSLLRLLAQYGDPAAVAAEPQAAEELLRKAGGPGLKPAKIEALLGSAGTTVGVPCLEAEREVIIWLAAELLEARAGRREIERALEPEVAMQPSLTRMVAGVGKRTAVVLYCALGDPENYTDAQSYAKAAGLNLKERSSGKHKGKLKLTKRGPGVARRYLYFAALRLITKDGPAKRWYDAKVARDGGVKGKAIAAIMRKLVKALWHVGRGAEFMEYKLFDTVKRGLREAA

SEQ ID NO: 492720 - protein, 351 aa, unidentified
MNTQITATPKLFIGIDIHKRSWKVHCATDLSSGKTFSMPPDAELLYEYVAKHYTGYEVSTAYEAGCCGYRAHRCFVGYGWRSLVVNPADIFRRGKERHTKTDRIDAQLIARELKDGRLSGICVPDKCREQLRSLFRRRNDLVKDMRQIKSYIKMQLLYYGIRIPQEFDNDHWSHKFRDWLDELDFGYDTGNEVLRSRMRSFRFIDREFREVSTLLRRYTKKHFKKDYMLLRSIPGIGPIVASGILSELGDLRRFGNIKHLAGYVGLAPGIYQSGDTIRHTGVSMRAHRLIRSYFIEASWQAIRTDPVMQGYYRKHHGKNVKSVIVKVARKLLSRTLAVIKTETPYAIGVLE

SEQ ID NO: 492721 - protein, 326 aa, unidentified
MATDLFQGKRMTIPADPETLRNFVEKNFPDHEVHCAYEAGCCGYSAHRSFEGYGWQSLVFNPSDISRTGKSQFQKSDQIDADLICRELRDNRLVGITVPDLERDHLRCLFRRRNDLVKDLRQIKSKIKMQLLYLGIKIPAEFDNSNWTKSFRRWIDELSFENETVKAAMNSRKAHFDFLEASVREVSNELRKYCRKHYKQDYMLLRSVPGIGGIVACAILSELGDLRRFNNFRQLAAYVGLMPSIYQSGDNTRSLGISPRGNSIIRSYFVEASWQALRFDPVMQAYYRTHAGKNSKAILVKVARKLLSRTMAVIKTRTPYQTGVVA

SEQ ID NO: 492722 - protein, 350 aa, unidentified
MSNNKNVATFGIDLAKSLFHVCGLDADGKRVVSKKLRRTQIVTFFANQPPCVVAMEACAGAHWLGRKLNGLGFQVRILPAQYVKPFVQNQKNDANDALAIAEASQRPSVKPVPIKTQSQLHLQALHRVRDRLVNQRTRLINQIRGFLLEEGIILRTGVGNFKSQLPAVLSDPSEEISPAMAALINELWDELLGLETRLKSINSQIEAWASQDQSARRLQSVPGIGALSATAIIAAIGNAAQFNKARDFSAWLRLVPKQHSTGGKTTLGRISKSGNPYIRRLLIHGARSCMLHLNREKDRLGAWITDLERRMPFNKVVVALANKLARIAWVILTRPAATYEQVQAARPASC

SEQ ID NO: 492723 - protein, 415 aa, unidentified
MEGLSPLYRRVAGIDVHRMLHVVTVLIEQPDGSIAKHSREFGGFKRDCRALAQWLVELQVQLVVMESTGIYWKSVFSHLENAGITAWVVNAHFIKHVPGRKTDMLDSEWLAVLARFGLVRGSFIPPKDLRELRLVSRYRRKLNALCSGQINRLHKILDDAGIKLGAVVSDIHGVSARAMVRGLIEGQSEAVLLAHARGALKRKTEELAASLDGDLSERHLFVLRHLSDSIEALQRQLAEIDAYLMAAMKPYAWAHDLLQTLPGIDQVAAALILIEIGDDMSRFGSPQRLACWAALSPGNHESAGKRKSGRTRHGNNVIRYILCECANAARWTKSTLAAKYKSLMVRKPHKKAIVAVAHKMIRLIYILLSRREPYRDQAIDYAAISAKKNAPRWIKQLKAIGKWPTPSIPAARTAA

SEQ ID NO: 492724 - protein, 381 aa, unidentified
MTTAVTHKTNVHTTEATLFVAFELSEKTWKLGFTMWHGQKPRERNVTARHQERVLDEISLAKHRLGLPETAPVVSCYEAGREGFWLHRFLLAHGITNHVVDSSAIEVSRRQRRAKSDGLDVRKLLSMLIRYEQGEHQVWQVVKVPSVEAEDQRHLHRDLETLKRERASTTTRIQGLLSSQGIQVSTLAKLPEQLDTLRLWDGTPIPPGLRRRVLRVYAHHTFLTEQIAAIEAERRAQLQTSSDASIDQIRQLMMLKGIGINGSWLLVMEFFGWRAFKNRREVGGLAGLTPTPYQSGESAREQGITKSGNPHVRWMITELAWSWLRFQPESALSVWFRARFGDGGKRLRRIGIVAVSRKLLIALWRFLETGVLPEGAVLKEG

SEQ ID NO: 492725 - protein, 360 aa, unidentified
MIFVGIDWAEHHHDVCLLDADGGELDHARITEGAAGARRLHELIARHADDPDQVVVGIETDHGLLVTALLEAGYRVHAINPMASARYRERYAASRAKSDRSDARVLADIVRLDRHRHRLIAADSDHAEAIKALARAHQQLIRARQRQVNVLRSHLREFYPAALQAFDDLTARDVLAVLAKAPTPQAGRALTRAQITAALRRGGRQRYLPTCAELIQAALRAEQLEATPMLTAAFGHAVQALAGVIAELTARIDALEEQVNRLLDAHPDARVVRSLPGLGGVVAARLLGEFGDAPGRFTDAKARKAYAGTAPITRASGTRQVVLARVARNRRLVGIYHGCLRHHALYDEHRAWGARISAAA

SEQ ID NO: 492726 - protein, 294 aa, unidentified
MIYHEQYDRLEAIPNTKVAIAKWLKTLAGTSAIAIEATNVYHVLFADMAYEAGCEVYVLDGYQLSSYRKSVNIRAKTDAQDARLLARYLKNEFDELRPWIPPSPLYRQLLSLFRRRAALVQARTGLVQSWANEPLLKTAFANQINSMKRLEALVEKKIRDVLQEAGLMGQVNRCMRVEGIGFLTAARLVTSYQRGEFSGANAFIAFLGLDLRVSKSGQRDGPRRLTKRGDPEARRLLHNAAMSGSRTPAWKPFYEEQRKRGFSTTQALVMLARKMARVVFALLKNQSEYQTKAA

SEQ ID NO: 492727 - protein, 438 aa, unidentified
MEEAGDEPLFCERAAGIDIGKQLVVATTRVPSDTRRGGRQQETREFGTTRRQLLEMADWLRCWQVERAGMEATSDYWKPVYFLLEREGFDCLLYQASQVKALPGRSKTDRLDSAWLARITEQGSLAGSFVPPEDIRRLRTHTRYRRRLTQARTAEKDRCEKLLEDAHLKLSSVISDIHGVSGRDMLRAIIAGERNPEVLAQKARTRMRRKIAQLREALDCSFFTPDHAFVLQMMLDNIDQLTAQIAVLDERIAILCEPYERQVAQLDDIPGFGVRTAQDLIGEIGVDMAAFPTAGHLCSWARLAPRVRESAGRRKGKNATGRGNPYIGGTLGEAAAGAGRTQTFLGAKYRRLCTRMPKKKAQGAIMRDQLVITHALLSDPEAEYRDLGTGYYEQRERTRRRASSHVRSLERLGYKVTIEPLTPDADPETGELITRTAG

SEQ ID NO: 492728 - protein, 419 aa, unidentified
MGKRRNRVCGADIHSDLIVATIECSDETILRERFGTTQSELQRFKDWIISNNCEQVAFEATGVYWVPVYDVLSSSIDTIVANPWMIKGLPKEKSDDHDSKSIASFCLNGQIKRSRVFSDDERDLRTMTRARSGYVKTRTQFRNRIHKYLALRGIKLRSGIRGIFGKSGRHVLNGLVEGKNIDEILDGIPSGRIRRKREIIKSAIAFGLDDTSKFLIKDALEVLDNLENKIEKMSNDILGRTMAKSKDLAIVMSVPGISFVSGSKILSEIGNYHDFKTPEQLAKWCGLVPGLNESAGKSKSCGITKQGSKHLRTILVEVAQVVSRMKNNRLNRFFKRIMARKNRNVAIIALARKLICLIHHLLVNQELFDMGFERSRRSQQKKNDRDQELSSEDLLQDRVAAIVDAYYRINAKSTSEGGG

SEQ ID NO: 492729 - protein, 316 aa, unidentified
MNTIVYVGMDVHKESYTLCCYSYDRDKVEFKQTIPSDYRLVLKYMERVREQYEGEVKFVCGYEAGCLGYSLYHQLTDHAVDCKILAPTTMAITNTNRVKTDRRDAGNIARCLAFHTYSEVYVPDDEDNAVKEYIRMRDDQKLMLKKIKQQILAFVLRKGKRFEGGKTYWTITHLKWLKNLELEGLDKETLSEYMITYEYLTDKIQRMDERIQSLAEGERYCEQVQNMSCLLGIKTHTALSLLVEIGDFDRFEKASRFSAFLGLVPGEDTTSDNVKRLNITKAGNSHLRRLLVEAAQSYTRGAIGHKSQDLKKRQSK

SEQ ID NO: 492730 - protein, 483 aa, unidentified
MKNKQPEKSKKAPGRPTQGHWHEMNRKQRREMMRKIQSDNLRLEVVHPDAAGIDIGNESHYVAVPPTRDSESVRRFGCTTAELKEMADWLKQCGIRTVAMQSTGVYWIAVYDILEEVGLEVYLVNARETKNLPGRKSDVQESQWLMKLHTYGLLRNSFRPSQEIRTLRTYWRQRNDLVRAAGRHIQRIQKALTQMNVQLANVLSDVSGMTGQAIIKAILEGERDPQKLAEFRDARVKASKEVIARSLEGHWQEDLLFVLRQEQNGYEFCQKQMAECDQRIEQYLQQREDRSAGASLPEEKRKERLRKKKKGNTPQFDLRTELFRMAGADLTQIDGVDVMTAMTILSEVGWDMSKWKTEHHFVSWLRLCPDNKISGDKIIGKGRLPTTNRATSALRMAASTLRVSNTYLGAQFRRLRTKLGAPIAIKAMAAKLARLVYRVLRYGMPFVDKGAEFYEAQHRTQQIKYLKWRAAKMGLQIIEAPAA

SEQ ID NO: 492731 - protein, 330 aa, unidentified
MNYVGLDIHTENIVYTVLSDDRNVKMRGKIVNDIEYIIEFLRNFEDGDLFVMDSTGFYEPIYDTIESKGFKVKLANPLKVKLIAESRIKNDKIDSEILARLLKNNWVPESYVPDKKIREIRRIVRTRINLKRVSTGFKNRIYMELKRLKIDYDGNLFTLEGRHFLRSLNNFRINIYLNSLEDIEKEIKIIENEIQKYSDIEEVKLLMTIPGIGLFSALIIYSEIGDINRFSNSRKLVSYAGLNPTTRQSSDIIYHGHITRQGSPYLRWILTECIHIHLIKDSHSNLSNYYRRMVKRIGKNKAIVASASKLLKIIYWILKEKREYIKNYAQ

SEQ ID NO: 492732 - protein, 341 aa, unidentified
MNQVSTVGLDLAKHIFQLHGADSAGAVVFRKRLRRGQLLAFLATLPPCTVAMEACASAHDWGREIAKLGHTVKLIAPAYVKPFVKRQKNDMADAEAICEAAQRPTMRFVALKSANQQAAAVVFRTRDLLVRQRTQAINALRGHLTEFGVIAAKGPVHTSKLIAALEDPASDLPQAARAILAVLVEELRSLDERVAVLDREIARHAKESADARRLMTIPGIGAVTAAALTALAPPAQTFRRGRDFAAWLGLTPVQRSSGGKERLGKTSKMGERSLRRLLIIGASAVARWAARKGVPAGSWLGRMLARKPPMLVRVALANKMARIVWALLVKGGVYRAPVAAV

SEQ ID NO: 492733 - protein, 569 aa, unidentified
MHHNTPLVHLGVGFDTARYAHHVSFLDEHKRTAAKPFHFTETAEGYQTLRQALDCLARKHPRLHLHIRIDAAGQYAENLLQWLHQLPYDTTISVGQPARNKAYRKVHFDKRKADPAESMACARFAIVERPGPTPHNPPEFQQLRDAVAMREAACKQQTRLVNQLHSLLARVFPELAVQVKDLSANYVLRLLDKYPTPEKLARATPEVLAKIPHLDQETAQTLQAAAAQSLGSHQGIIAEQMVRQKVREIRHQQAESAALEKLIQQAWEALPEGPHRRILSIKGIGPQTAAALVAKIVSIDRFDTAKALIGYFGVFPEEVDVSGTDRQGHPKQGTEIHMSRKGNDLVRRLLYTAAQCAVKWNPPVKALFARLMADGKDYNIAIGHGMAKLLRQVFALWKKDEDFDPQFETRHETNSDDPANKSRSPETKTAVGHKSLAVEPQRKVVTTTASKITRSTSHRKPRPLNFAELRQQVTITQVLEHLRWRPQATRGGQQRGWCPLHEEPNSTSRCFAVETEKNVYCCHRCGSEGNVLDLWIALSGKPILAAGWDLVETFALEPPLLKEGPPGTN

SEQ ID NO: 492734 - protein, 343 aa, unidentified
MPIVGGMDIHRKQITFDYLDVMTGEVQRGQISPADRQHLRAWLKRFAGVPDVAFAFEACTGWRYVAEELAATGVQAHLAEPADTAAARGRKKRAKTDRADAKLMRELLAGGRLPECWIPPEQVLECRALLETYHALRREHTAWVQRAHAVVFHQGAPVFHAFGEADGPAQLAALARARLSPAGRQQIGLYLRMLEVTETELDVLRGQLTATARHLAGAKALQDKLYGAGPVTALALTCWLGGKDRFSSARKAVRFTGLDITVYSSDGKRSPGHLSRQGPPVLRWCAYEAGKAHARGSAPDHRYYEQVKDRKDGKRAALSEARKIIRQACHLLAGLGDDAFTTV

SEQ ID NO: 492735 - protein, 428 aa, unidentified
MDQVNRNRLEEFRQLRQEVRHSGEYLIVGIDIAKDRHHAFLGTATGKTLLRRLVFSNDHEGFRKLLDHAEALRAQHGLKKVVYGMEPTANYHKPLGEYLITLGRTVVLVSGVTVKRNRESLDGRWDKHDVKDSANVADLISQGKCLYYEHPSVELRGLRGLLSLKRRLKKQEHGYKVRIRNHLIAQYFPEMDRDYEQLGAEGLSIVRWCFPASQIVQLDVDPFIERVRSRRIRVEKRRRLEAIWEKAGESIGCDGVPGVEHEAKVMVEGLRQIQELIKQTEEKILGLCKQFPEYSYILTIPGFGPDVSAKVLGAIGDPDRFQNGKQVLKMGGLDLSADRSGKDSDKATPEISKRGKADLRYALYQAALIASVQNRDVMIYYTNKIRGREREKGIHTKMRVKLAAKLLVIAWTLMKKKEAFNPAYLNAE

SEQ ID NO: 492736 - protein, 402 aa, unidentified
MNAVGIDVSKGKSMVAIMRPFGEIVSTPFEIKHTTSDINSLVELINSVEGESRIVMEHTGRYYEVLAHQLSEANLFVSTINPKLIKDFDNDSLRKVKSDKADAVKIARYALDKWQNLKQYSVMDELRNQLKTMNRQFGFYMKHKTAMKNNLISILDQTYPGVNTYFDSPARNDGSQKWVDFASTYWHVDCVRKMSLNAFIDHYQNWCKRKKYNFSQSKAEEIYGKAKELVPVLPKDALTKLIIKQAVDQLNSASTTVESLRTLMNETASKLPEYPVVMAMKGVGTSLGPQLMAEIGNVSRFTHKSAITAFAGVDPGVNESGTYEQKSVPTSKRGSADLRKTLFQVMDVLIKTHPQDDPVYQFLDKKRAQGKPYYVYMTAGANKFLRIYYGRVKEYLASLPES

SEQ ID NO: 492737 - protein, 425 aa, unidentified
MSEKIVVGIDVSKAFSDICILSPNNDIIKRMKISNDVIGMQSLISVLEKVENEYEDRAVIIMEATAHYHQILANFFRKHNYEVIVINPIQSGALKNINIRKIKSDKTDAYNIALLYRIKNYNETITHSDTVNSIKKLCRQHKELTDEIVEHINRLIAFLDISFPDYKKVFPDLQGKTPLSLLEKYPTVQDVLSPENKQDMIQLIKENSHKSYSYAEAKYEKLLQAAEKSIEVCIVNLSSAVLIQTTVSVIFSLQEALKAINDEIKRLSLLDEKFHKEIVLLQSIPGVGEYTACVVLSELGDVSNFSKPKELVAFFGLDPGVSQSGTYNRKNNKISKRGSPHVRLILHMLAKSNVYPNRNREYLNPVMRAYFEKKIAEKPYKVVMCAIMRKMVQIIFAVLRNQKSFELRTPEEHQKLIQKNSKLVA

SEQ ID NO: 492738 - protein, 341 aa, unidentified
MGEVSTIGLDLAKNVFQAHGAEASGAVLFRKKLRRHQVLTFLAGQRPCTVAMEACGSAHHWAREIGRLGHAVRLIPPAYVKPFVKRQKNDAADAEAICEAAQRPTMRFVVPKSEQTQAAALVFRARDLLVRQRTQIINALRGHLAEFGIVAAKGPACVPQLMQAVEDPAEPIPEIARPILQMLIEKLRRLDEQITRLDHEIAQRAKENDAARRLMTIPGVGPVTAVALAALAPPVETFKCGRDFAAWVGLTPLQHSTGGKQKLGATSKMGERTLRRLLIIGANSVLLQVARHGAPAGSWIARMVARKPPMLVRVALANKMARIVWALLARGEVYRAPAALA

SEQ ID NO: 492739 - protein, 349 aa, unidentified
MAMTIVEARPGITGGVDTHLDIHVAAALDPLGRLVGTESFPADAAGYKALLTWLEGFGQVGKVGVEGTGSYGVGLSRFLRRKGVEVVEVDRPNRQARRNHGKTDTLDAVEAARAAISGRASGVGKTKDGPVEAIRVLVVAKRSARQARVKAIVQMRHLGITAPDQLRSRLKGLSVTALVAEAAAFRPTMSPDPATAATKAALVSLAHRVQVLEAEIAELNEKIEALLWATAPELMGRFGVGPDTAASLLVAAGDNPERLHSEAAWAHLCGVSPVPANSGKSTGHLRRHTGGDRQANSALWRIALVRIAHDPETTSYFERRVKEGRTKRDVIRILQRYIAREVYRYLPRG

SEQ ID NO: 492740 - protein, 352 aa, unidentified
MHAITVAIDLAKDVFELAFADERGRVVERKRLSRRTLARTLEQRPPLRVLMEACGSAHYWARRFQRQGHAVRLLPARDVRPYVRGNKTDRNDVAGILEADRCGDIACVPVKTPEQQGIQALHRLREHLKAERTATINLLRGVLREFGLTIPAGALKVPAAVRDALEDGDNELPMPLRYSLDEQLQRLAQIQGNMAAIEQRLEEFATRDVAVQRYRRVPGVGLLTATALRASAGDLSRFRSGRQFAAWLGLTPREHSSGQQRRLGGLTKRGDVYLRTLLVHGARAVLQAARLKQRRGQALDPLQAWALKVQDTRGHNKAACALANKLARRLWAMEHHGQAFDPRHVSQRPIAR

SEQ ID NO: 492741 - protein, 349 aa, unidentified
MNTHITIGMDLGDRDHIIVVFDANGKEVQVSKVNNTKSAIMRYFSAYKNATVAIEAGTHSPWISAVLKEMGHKVYVGNPRKLRLIWDSDDKSDERDARMLALVCRVEPRLLWPIKHRSQKAHNDLNIIKSRSVLIKSRTALINHVRGIVKCCGERLPSCSAQSFAKRCRELIPEQLNSAVEPVINMIEQLNAQLRQLDRTIDQLYQSHYPEAQKLQTVTGVGPLTSLAYALTIEDPNRFSKSRQVGAFLGLTPRRDQSGLSDKQLPITKAGNRYLRQLLVSCAQYILGPFGPDSDLKRFGLSIAARGGKNAKKRAVVAVARKLAVLLHRIWLSGEDYQPFYQRRLSRAA

SEQ ID NO: 492742 - protein, 376 aa, unidentified
MVKIARIGVDTSKSVFQLHGVDEVEQVVLRRKLRRQDVLKFFAKLEPTMVGLEACGGAHYWARELRKLGHTVVLVPPQYVKAYVARGKNDMADAEAICEAMSRPRVQRRFVPVKTAAQSADQMLVGTREMLIRRRTQLSNTIRGYAAEFGLVAPKGLGRIKLLLTRIAVDDSLPSLAKDLFAALGQELAELGQRIAMIEVRLMAWYRGNELSRRLAEVPTIGPIGACLLPIKITDPRAFRSGRMCAAWIGLTAKDHSTAGKQKLGGITRAGDETLRSVLVAGATAYIRQVRCGRTTPSPWLADLLKRKPPKLAAVALANKTARIAWKLMISGECYHPAAAAEAREGRGAARREGSAPLPSLHPAPMSNGDGTMTAA

SEQ ID NO: 492743 - protein, 398 aa, unidentified
MTESSDYESVQVFIGVDVGKDTHHAVAVNRSGKRLFDKALPNDENKLRSLISDLKQHGQILLVVDQPATIGALPVAVARSEGILVGYLPGLAMRRIADLHAGEAKTDARDAAIIAEAARTLPHALRTLKLADEQIAELSMLCGFDDDLAAQTTQASNRIRGLLTQIHPALERVLGPRLDHPAVLDLLQRYPSPEKLASLGEKKLATQLCKLAPRLGKRLAADITQALTEQTVVVPGTNAAAVVLPRLALQLITLRKQRDEVALEVEQRVLAHPLYPVLTSMPGVGVRTAARLLTEVACRTFASAAHLAAYAGLAPVTRRSGSSIRGEHPSRRGNKPLKRALFLSAFAALRDPISRAYYTRKMSQGKRHNQALIALARRRCDVLFAMMRDGTFYPPTAS

SEQ ID NO: 492744 - protein, 458 aa, unidentified
MPRKSSNKAKSQRRRERALLQKVHLNAAGIDIGANAHWVAVPEDRDASPVRSFGVFTRDLVALCDWLKSCQVETIVMESTGVYWIPLYQMLERKGFEVRLVNAHHVKNVPGRKTDVKDCQWLQQLHTFGMLAGSFRPEAQMCVVRSYLRLRDTLSKDCNSLVQRMQKALTEMNVQIHRVISDITGVTGMSILRAILAGERDCLKLAQLKHPQIKSSAQDIAKALDGDYCQEHLFALGTALEFYDSYQLKIMACDRHVQDALSAFELKAKAPAPDVSRMRCAEKRLEALRRHHLEEMTGADLTKLPGLDLLAVERILSEIGLDMSRWPSEKHFCAWLNVAPNNRVSGGKILSSKPRKNANRAAAALRLAAQSAMQSKSAIGAFIRRIKSRLGAPTAINAGAHKLARLVYRMLKFGKAYVEIGQEAYEKFSKERILRNLQRKAHLLGFQVTPITVTVPVS

SEQ ID NO: 492745 - protein, 402 aa, unidentified
MTYDYVIGMDACKYFHHACVLDIDGTQVLSKRINQNEQSLRALFSAFSAYDHKVLVVVDQPNNIGRLTVAVAQDIGIDVRYLPGLAMRQLSRIHAGNAKTDIRDAYIIAHAAKNLPESLRSVDRVEEAFLQLKVLNGIDEDLARSYTRLINQIRSALVGCYPQFEQALRGQIIHRKWVLHLLARYGGPTKIKRLGKAKAAAFARRYKARNPEPVLDAIFAAISEQTVTIAGAHYAEMGVAMSAKDALLKLEHRQQIEKEVIKLINDIPHTQFLLSMPGIGPKTAAQILMTAGDMSDFPSAGHLASYAGLSPRTNQSGTSIMSNSLNRAGNKKLKNALWQSSCASIRFHERSQQFYERKRNEGKRHNAAVVALARRRLNVLFAMMHSGELYRDTPSSTNIATP

SEQ ID NO: 492746 - protein, 410 aa, unidentified
MDKVIIGVDPHKLSATIEVIDQHENLLGSGRFTTDKAGFAAMRKYVAAWPVRTWAVEGSQGVGRPLAQRLLESGEHVVDVPAKLAARVRIFDTGHNRKTDARDAHSIAVVAARTQNLRVLAPDGELEALRILVDRRDELSRQRVQTVNRLQRLLAELTPGQAKKDITARRAKAILAGVRPRDVAGKTRRRVAADELADLIAIEKKVKALTVDIKAIVEDRGSNLMDIPGVGPIVAARVLADVGDVARFADRNRFASWTGTAPLDASSGEQTRHRLSRAGNRRMNRMLHIAATTQIRLDTEGRAYYRRKLAAGKTRMEAMRCLKRRLSDAVYRQLLADGREAAQPDEAEGATTLETGPGGHCGATYESSAVDLPPHIDTSDQPLPGPAQTTLQPTSSHRKITKDQPHAAAS

SEQ ID NO: 492747 - protein, 402 aa, unidentified
MNCVGIDVSKGKSMIAVMRPFGEVVVSPFEVRHTASELSKLAGLLKSLDGETRVVMESTGNYHAPVAWLLHDAGLYVSVVNAMLVHDYGNNSLRRAKTDKKDAVKLANYGLDHWLTLPRYVPEEDTRLMLKTCYRQYQQYSKVRTMLKNNLISLLDTAFPDANRLFTSPPRADGSEKWVDFVAAFWHCECVCGLSEKAFTAKYQKWCRKHGYNFSEDKALDIYASACRHFGVIPKTDTAKLLVEQAISQLQTTSSALAALKQEMQSLAASLPEYPVVMGMFGVGPTLGPQLLAEIGDVRRFHSKKALVAFAGIDAPPYQSGQIDVRSRSISKRGSASLRRTLFLVMSVILQCAPIDEPVYQFMDKKRSEGKPYRVYMMASANKFLRIYYASVKAYLESLEHD

SEQ ID NO: 492748 - protein, 417 aa, unidentified
MRNIQPKKLKSVNSDTLLATVDIGKNAFSGYARCPDRSEMKPSDFSNNFAGFVRFWNTLVQRRKAHGLKQIVLGFESTGVYAEPLLHFLKDKPVRLVQVNPMHTKRVKELNGNSPNKTDQKDPKVIADIIELGHGLTVLIPQGAAAELRRLTQARERTIKRRTALFNQLHDLVFISFPEFFQVIKNIKTTSARYLLRHHARPESVVREGLASLTQALKRVSRGRLGPAKAQALFEAAASSVGLREGCLGVDLEIQALLEAIEGCERFVQRLETEMALHLEEIPYSRLLLSMKGLGPITVAGLIGEVGDFRHFDTQKEILKLAGLDLFEISSGKHKGQRRISKRGRPLLRKILYFAALNTVRKGGIMHEHYQQHLQKGMPRSKALIAIARKLLGIILALVRTQTEYAVDRQIELAKVA

SEQ ID NO: 492749 - protein, 338 aa, unidentified
MALYCGIDLHSRDCWLAILDGGLEVVREAKISNDLEAILEVLEPHREDLEGIAVESTFNWYWLVDGLMQAGHRVHLTNTWAVKQWEGLKYSDDRHDARWLAHLLALGILPEGYIYPKQTRSVRDLLRRRAFLVRKRTSFLLAMRGAFECRTGLRTTSGEVKQWTASDVESYLDDPVEALGITCLLEPMKALDGQIRIIEKEALGRARLRNEFAPLLSVWGIGKVLALTVMYEVGEITRFKKVGNFASYCRLVKTARLSAGKRKGSGNARNGNPYLSWSFSEAAHFAVRYHPVAKKYFQRKMSNTNGIIAIRALAHKLARASYYVMKDQVDFEPEKVFG

SEQ ID NO: 492750 - protein, 364 aa, unidentified
MLIIGCDYHPSFQQVAFVDGDTGELSERKLDHREQAEQFYRELQQQNRCVRVGMESSGHSRWFEGLLHELGIELWIGDPAEIRTKRVRKQKTDRQDAQLLLQLLLENRFPRIWVPDAENRDLRQLLWHRHRLVQMRTRVMNQLHVVPLNEGLRRKKALWRPTGRKELESIVLAPWASRRRQDLLALFDQLTPKIQELTQAVEAEVEKRPATRLLMTHPGVGPLTALAYELVIGTPERFHCGKQLASYIGLVPEEKSSGDRRRLGHISKQGNVLLRFLLVEAAQVTVRSQSEWRSKFFHLAMRRGRKIAKVAMARKLAVHLYWMWRQGCDYGQWHKFGSHAGGPGHPDGVHFITDVMIGHPAPCK

SEQ ID NO: 492751 - protein, 407 aa, unidentified
MPSKKYSLFIGVDVSRDSCEVAFLQAKNGIEAPPWDKIESLSVKPTKEDFENLRSKLLELSQPQNCIAAIDETGGYYGAPLSNFLNLIGCSLVYFPGYSGKLIREKLLLQETKTDRIDAKTLAYCLHLHQALGMKFNLVEVVKGTEDLALNLLQLCRLRQQLVAARVQATNRLSQILRAAFPEGISKNRETLLRIAHKYPTPADICADIELSKVKVLKHIRKRLVCLAENSVGVNSNALRASTMVWARYYLDLERQIGALDRKITRESIRHPYGHVLLSIPGVGPIRTALFIGLIKDVRLWENSNKLKKAFGFYGVTRQSGTSERTVRGKRGNRVGKTLVLQTVASIIRHADTHPNDFSCYYTRLRNRGVVPLKAMYKTGSKLLDVLYACLKTERLYQNRRTNPLPK

SEQ ID NO: 492752 - protein, 347 aa, unidentified
MNITTIGIDLAKSVFQLHGIDSYGKVLIKKQIKRAQMAEYFVNLKPCLIGMEACGSAHHWARKLEGFGHTVKLMPPQYVKPYVKTNKNDAADAEAICEAVTRPNMHFVPIKSTEQQAILSLHRIRQGYVKARTAQANQIRGLLAEFGLEIPQGIGYIAKRVPDILEDASNELPGILRIEIQSLLEHLNELDTRADNCEKKIVAWHKQSETSKKLEAIPGIGPLTATALVASIGDAKNFKNGRQVAAWIGLVPRQHSSGGKQNLLGISKRGDIYLRTLLIHGARSVIYRSGQKENPTDRQSWLNQLTQRRNKNVAAVALANKNARIVWAILNHNREYQNNHKTLRVAA

SEQ ID NO: 492753 - protein, 352 aa, unidentified
MNQIKYIGMDVHKAMTVIAVLDSAGKVLAEAIIETKGSTILDFLKSQRGDLHVAFEEGTQASWLYDLIHPHVSAVIVCNPSKIVRHGNKADKIDAKLLAELLRTGALTPVYHGEESARAVKELALSYISVVADGTRIKNRLKAMFRGRGIECNGAGVYDPDERKEWMAKLDSKAVRARADRQWQELDLVERLIEEAEDDLLAEARKYAATRILRSVPGIGPIRAAVTLGVVGTPHRFRTKKQFWGYCGLAVVTATSAEYELVNGQVRRSKKRPLLRGLNNNYNHAMKEVFKGAAKTVAAGVWKSRFEAMVANGAPESLARLTLARKIAAITLAVWKKGERYDQRKMKTMHAA

SEQ ID NO: 492754 - protein, 344 aa, unidentified
MPTSTPSPTRYHLFVGVDIAAHTCTTVWMAPAATPCRPVTLDQTPRGFAALQARLLAVDHAAADILVVMEATGSYWVALATTLAHAGFAVAVINPDQAHNFAKALLQRAKTDAIDARTLARLAATLHPAPWTPPPAIYTELQQRLAERDTLIGLRQQVRNQRHALVQLPVVVPAVRARMEELIATFDAQITAIEREITQVLPQDARWAASAALLMSIAGVGLLTAAWLLVTTLNVTIGATPAAVTAYAGLAPVPKESGTSVRGRGAIGHGGNKRLRTALYRATLSATRDNPLIKAFYDRLRAAGKPTKVARCAAARKLLHLAWAVVRKGQVFDPLYRQRHQSAA

SEQ ID NO: 492755 - protein, 435 aa, unidentified
MEDEVVKMEVVNPGAAGIDVGSRSHWVAVGQREEDVREYGVFNDDLFSLCDWLKESKVRTIAMESTGTYWQNLYAVLISRGFHVILCNGKFTKNIKGKKTDIKDCQWIQRLHSLGLLSSSFLPEGKTEELRTYCRHRQNLLHESASTAKKMQKYLRLLNLRLDVVVKDTCGLSGLRIIRAICNGEKNPEKLAELRHANCHTSKTDIARALQSNGREDYLFALGHELDMYDYLHRKIEECDLKIEEKLNSIIDHDENKKQHHIEPKPYKKVNKNTPKNIDLNLKSYQMFEGTDLLAIEGMSYSTVLALMSEIGVEGIRKFPTAKHFASWLRLAPNNKVSGGKVLSSKVPKGSNNLKISLRNAANAIGNLKDSTPLRDFFIRISFRKGRVSAISATARKLAVIIWNMVVKGVPYHNPEEYLFRDQKKKLGLLKRIQK

SEQ ID NO: 492756 - protein, 413 aa, unidentified
MLKICYNTCCGIDVHKKMLVATIATTDERKVTTYQTKQFSTFTNDIKKLKQWLIDNNCKDVCMESTGKYWIPIFNILEDSCNVIITHPKYVKAIQGKKTDTKDSVWIADIFKHGLVEGSFMPPLDIRQLRDLMRYRLKLVNCKSSEKNRFQNSLTVSNIMISNILTDTFGKTSKSILELILSKEDNVTLEEITPLLRKNLKSSPEQILESVQGNLTHEQNSKMKICLNHYDTLLDCIDQIEEAVLPLLIPYQNQINLILTVPSIKDVSAITILSEIGPDMSVFKDAEHLCSWAGLTPQCNESAGKKKSVHISRAGVYIKPLLVQCANNAVRDKKCPYFKLRYDAIKKRRGHKRAIIAIARMLLTCIYHMLSKNEPFNFEIYEQLTQKNFKSKDKKLNINNAIKFLESQGYKVS

SEQ ID NO: 492757 - protein, 400 aa, unidentified
MDNRSHAEIGVFLGVDVGNGAHHAVALDRVGERLLHRPLPNDEAQLRGLINGLRAYGPVLLVVDQPATVGALVVAVAHAEGVSVGYLPGLVMRRMADLHPGEAKTDPKDAYVIAEAARAMPHTIRSLSLPEETLAELIVLSGFDDDLASMINQTANRLRGLLTQIHPALERTLGPRIMHPAVLDLLQRYPTPEAMRTAGRARLAARLTKRAPRLASQLGEAVWLALSEQSVVIAGTAAAAVVVPRLAQQLDTLITQRAEVIEQVEELVDAHPLSGVLISMPGVGVRTAARILTETAGKDFPTAGHLAAYAGLAPVTRRSGTSIRGEQQSRRGNKKLKRVLFLAAFAALKDPVSRAYYDRKRDQGKSNNQAIMALARRRCDVLFAMLRDGTYYNPEHSAAA

SEQ ID NO: 492758 - protein, 416 aa, unidentified
MNAAGIDVSSRKSTVAVLRSFGEVVRLPFDVAHDTEGLASLAEQLKSLDGETRVVLEHTGRYYEPVAKALHEAGLYVSAVNPLLIKEYGANSLRRVKTDKADAVKIARYALDNWTDLRDYTPMDTIRYDLKTLNRQFQLASKQRTACSNNLIALLEQSFPGVRKCFDSPVRNDGTQKWVDFAHTFWHVDCVRKQSLNAFCDRYRKWCKRHGYFFKHSNAEEVYALAKNAVVLVPKSKVTKVLVQEATNQLTSISRSVETYRAEMERLASMLPEYPVVMEMYGVGKSFGPQLMAEIGDVRRFERKQALVAFAGIDPMPNQSGDKNVRSNKSSKRGSPYLRKTLFNVMGIYLKCAPQDEPVFQFLDRKRSEGKPFYVYMTAASNKFLRRYYAKVRDYLATLENLPPVDLDSTGLQESN

SEQ ID NO: 492759 - protein, 354 aa, unidentified
MSRKTTNLEAIATIGIDIGKNTFHLIGLDEKGAIVLRQKLLRGQVVTRLANMPLCLIGMEACVGAHHLGRQLKALGHDARLMPARYVRPYSKGQKNDFRDAEAIAEAVLRPTMKFVAIKTVEQLDLQALHRVRERLVSQRTSVINQIRAFLLERGIAVRQGLRALRTEIPIVLAMTDKLSPRMIRMIEDLCTDWHYLDERIETVSDEIATLSEEDEGAKRLMTVPGIGPIISTATVAAIGRGDVFSKGRDFGAWLGLVPRQMSTGGRTVLGPISKRGNRYLRMLFVQAANAVLLHPQSWEKHGLKSWIEAAARRLNRFKLAIALANKLARIAWGVLQGGRNFEVRSMKSAAQAA

SEQ ID NO: 492760 - protein, 443 aa, unidentified
MICAAVERCAGIDVGKTFLAVCVMTGPLDGETRTQRRRFATMTAELEALRDWLKQEGVTHVVMESTGSYWKPVYNVLETSVKVYLANPQEVKNRKGHKTDDKDGWWLAHLLRHAMIHPSFIPPRSIRELRDLTRRRKRLLGNATTEKNRIQKVLEDANVKLGNVLTDVFGVSGQLMLDALLKGEAQPAEIAQFAKHRAKRKIPAIIQALEGHRMSEHHRQMIRYSLKHLEFLEEQIGEIDADIVGKIKNAGLEHEWQLLQTLPGIQDRSAASILAETGADMEQFPTAKDLSSWAGVCPGNNRSAGKSKSSHTTGGNPWLRSALTECAWAAAAKKNCFLKDKFWRITSKSGGKKGPAIVAVAHLLLLLAYQVLRTHKPFEDRAAPPIDERQKQRLIRHHLRRLGKLGIAIRRYAPSAPGTTTPREYPDLVRPPKTSRQCSSPST

SEQ ID NO: 492761 - protein, 329 aa, unidentified
MVIASSLPVVGLDVSKATLAVCYQVNDQVKHLEVSNTKAGFQQLVKACGGQCQFVMEATGTYNLALAYYLHEQGGQVSVLNPLVIRRFIQMHLGKGKSDRKDAQWLLRYGQQQALTVWQPDETVLVECRQLEQVNEQLLKQKVMISNALEALQHQPIVSKLALKRLQQMLKTLTQQIEGVETELLALLERRFAAEMRLLCSIPGIGRKTAGMLLLFAGGFTHFDNYRQVIALAGLSPREHTSGTSIRGKVRITKMGGGLIRGKLFMCSFSAKKTNAGCAALFDRLVAKGKNKKLALIAVCNKLLKQAFAIVKSGVPYQADFSSKLAPSS

SEQ ID NO: 492762 - protein, 446 aa, unidentified
MGWRACEHWTIRALGFSRGLLVKWLWRTVTVQNGGNGLLFVGDDWAEDHHDVEVQDETGRRLGKARLAEGVAGVARLHALIGEHLGEDSGPQQVAVGIETDRGPWVAAVVAAGYQVYAINPLQVARYRERHSVSGAKSDAGDAHTLADMVRTDRRQLRPVAGDSSRGEAVKVLARAHQNLVWERTRQVLRLRSGLREFFPAALAAYGELTAPDTLALLAAGPDPTSAARLSGAQVTAALSAARRRGVPDKARAILAALRTPQLTQPEVLTAAYAATVRAQVAVLGTLNAEISKLEGQLEADFGQHPDAEIYLSQPGLGTVNGARVLGEFGDEAGRYADARSRENYAGASPITRQSGKKKTVLARYVHNDRLIDALHSQAFSALTGSPGARAYHDALRARGAGHNAALRQLANRLVGILHGCLKTRTHHEETKAWAHHTGADQRAAA

SEQ ID NO: 492763 - protein, 419 aa, unidentified
MSFKILKNNCCGLDVHKTWIYACIGITDSLKRTEYKEARFSSFTKGLNELCDWLSKYNCTDVCMESTGKYWIPVFNVLEKNNIWVTLSHPKYTKPQKGNKTDRKDAKWICDLYMCGMVKPSFIPPADIRELRDLVRYRFKLTCIITGEKNRAHNCLTVSNLKLDDVFSDIFGKSSRSITEQILQHPGETFDVAPFVDGRCKTPVEEIQAAVDGAISKEQAVKLRQCLNHIDELEMHKAEIEREIFRLSDKYESVLSLIRTVPGFDKTPMTAIQVLSEIGGDMSVFPTAKNLVSWAGCCPRNDQSNHKIKSTRISRAGSYFKPVLVQIANALIKSKKHPEFTTRYRRIKARRGHKKAIIAICRMILTAIWHILTDLKPYTPEGFLESRPVNESKILTTSQALNLMKQRGYIIKDDVVPVT

SEQ ID NO: 492764 - protein, 358 aa, unidentified
MEAQVKKLDFTDQNIYIGFDAHLKDWKVTIMTEDIVYKTFTQPPKPEVLYNYLKNNFPGGNYHSAYEAGFCGYWIHDKLVSFGINSIVVNPADIPTTDKERVQKEDKRDSRKIARSLSSGTLTAIYVPSLKTQRDRTLLRTRAMLVKDLTRYKNRIKSFLYFYGIGIDESFMNPQSHWSNRFMIWLESIDLGEESGKEALNVLIAECKNLRISILNVTKQVRKLSRTESYQEQVILLKSIPGIGLLTAMIILTELETINRFRNIDKMCGYIGLVPSTKSSGEKERTGDITPRGHNVLRTALIESSWTAIRNDPSLMKSYLSYIKRMDSNKAIIKIAKKLLSRIRFVLNNNKPYICSIV

SEQ ID NO: 492765 - protein, 343 aa, unidentified
MQTVTTIGLGIAKSVFQVHGVDAAGEVVVRRQLKRRQVIAFFQMLPSCLVGMEACASSHYWSRELQALGHSVRLMPAAYVKPYVKRQKNDATDAEAICEAVTRPNMRFVATKTPERQSGLVLHRTRHLFIRQQTAVINSIRAHLAEFGIVAPIGRNGVEELLNVVADASDKRLPNVARACVAALGAQLRMMKTQILEFDRMIRAWHRSSEMSMRLDHCPGVGPALATALVATVAAPKAFRSGRNFSAWIGIVPRQHSSGGKDRLGSISKRGDRYLRGLFVAGALAVIRYAKIHGTQHRPWLTALLARRPTKVAAIALANKIARMAWAMMAKGERYKEPVALAA

SEQ ID NO: 492766 - protein, 318 aa, unidentified
MEAVLGIDVGKADFHCSLLVEGRSRSNSFPNSKKGFDQLAGWLENRKVGKVHACLEATGGWSEELAIFLADRGHAVSIVNPMAIKGFGQSELSRTKTDKADAALIARYCLAMKPRLWQPPSPSQRRLQRLGRRRVALIEMRVQEENRLKGPGVDEVRASIETMIATITRQIAQLDAEIADTIDQDPNLRENRELLESIPGIGERVATTLLGELPNLKEFRSGKAVAAFVGLCPRELRSGTSVSASWVSKAGNAQVRRVLYMPAVVAMSHNPVLAAFATRLRENGKRPKQIIVAVMRRLLVLAYGVLKSGKPFKAALPT

SEQ ID NO: 492767 - protein, 387 aa, unidentified
MNRILKIGMDVHSTNYTLCAMEPTIGAEDRIFGEIQVAPDYKEIICFIESLKIKLGLADNYSIECGYEAGNLGYTLYHQLAAAGIKCVILAPTTMLTQQGHRIKTDKRDARLIAQCLCYGGYHPVYIPTGEDDAVKEYLRMRDDHKLALKKLKQQINAFVLRHGCQYTGTKWTIKHITWLRKLNLDPMYRETLNEYMASYEEQEAKIERYDKRIEEIAAEERYQKNAKKLGCFLGIWTHTALSLIVETGDFKRFAKGNTYAAFLGLTPGERSSSTNVNRLGISKAGNTHLRTLLIEAARGICKGAIGYKSKELRSRQRGQSADVIAYADKANTRLRSKYYKMIRHGKKKNVAVAAVARELACFIWGMMTENISITTAGTSAPCVSQG

SEQ ID NO: 492768 - protein, 342 aa, unidentified
MGIVTIGLDLAKNIFQVHGVDGTGKAILRKQLRRDAVEEFFSALPSCLVGMEACATAHYWARRLMALGHQVRLIPPTRVKAYVQPGKKNDANDAAAIAEAVTRPHMAFVPVKSEDQQAVLMLHRARDLLVRQRTMLINALRAHLAEFGIVTAQGRRKAVALIATLDELAIPDLGRKALQELASQLESCDHRITALEKEIFTWHKTNEPSRNLATIPGFGPITASRLAVTVTDPAAFKNGRALAAWLGLVPRQNSSGGKNRLGGITKAGDGSIRRLLVIGATSLLRYAKTKAPGDSDWLKALLERKPARVATVALANKMARIAWAVLSRGEVYRNNFALPVAS

SEQ ID NO: 492769 - protein, 453 aa, unidentified
MAKKAKKLHTSKGIELKIVNPNAAGIDIADTEMQVCVPAGRDGENNRRFGSFTRDLNEISDWLKACGIDTVAMEATGIYWIPLFFKLQQDGFDVQLCNAREVKNISEKKTDEADAEWLMLLHSYGLLKPSFQPENAARQVRNLARHRSNLLRSAGKEVQHMQKAMEQMNLKLTNVLSDIVGLSGQRIITSILAGKRDPEALSQLADGRCKRSKEEIALSLEGTWDADHMFELKQSYELYLFYQGKVSECDREIETMLKGFVADIDTDMAKLIRCKKTICKKNAVGFDVESYAYSLWGVNTMAISGMSAGSVLQLIGELGTDFVKKFDTPAKFCKWCNLVPNNKISGGKLISSRVPKRKNPVGQVFRQCANTVSKSKNPMGFYFRRLKSRGGHMAAIVATAHKIAEIFFIMVRDKVAYDEGRVGLDEETLLKRKIDRTQRALDALNAKLYATAS

SEQ ID NO: 492770 - protein, 344 aa, unidentified
MSNLDTCGIEVSAKELVVMLRRQEDLEPLRNFTNTPEGHTMVLRYLRRAGRVVRVCMESTGLYGLDLALALSGQEGIEVMVANPRAVRHFATALMQRSKNDQIDAGVLEQFAARMPFQPWQRPSVATLALHALARRLRELVEMQTAEKNRQHAAGLSQAIPAVVRRDLARSLRAQERAIERLTRQARQLIAQDPQLAERFELLDSVPGIGETSAVQLLGELGVLAPDLQARQWVAYAGLDPRQYTSGTSVHKKPRISKAGNKHLRHALFMPALVAVQHDPHLRAFYQHLLAQGKFKMQALVAVMRKLLHALHAMFQTHQPYEGSKLFRLNSAPAQEVTRALVAS

SEQ ID NO: 492771 - protein, 460 aa, unidentified
MEQVYERCAALDVHKAQVTVCVHVPDQAGERAELRAEFATMTGDLLGLRDWLKGLGVTHVAMEATGVYWKPVYYLLEDDFELLLVNAQHVKNVPGRKTDVQDAQWLCQLLEHGLLKSSFVPPQPQRELRDLTRYRKSLVWERGREANRLQKVLEDANIKLASVASRPLGASGKAMLRELCEGNNDPVALADLAKGKLRAKLPLLRQALEGRFRGHHALLVSHLLAHIEYLDQTIGELSEEIEERMRPFARERELLCTIPGVAERTAEVILAELGPDMSRFATHRHAASWAAVCPGHDESAGKRRSGKTRKGDRYLRRTLVQNAWAASHMKKGRLKQLFFGVARRRGMPKAAMAVAHRILQIAYFVIRDGTMYREVGVEMDEGKRQRTAKRLARRLEEIGYEVTVKPRAQPPAPHPRTPAGPGPLPGQSCSLCNRWGIACIHVRDAKRRHPRGLSNSEHSG

SEQ ID NO: 492772 - protein, 341 aa, unidentified
MLKFTIGADISKDKINFTLRFLNDYLLEKEVENATSALNKFIKEVQSIVKSIVKEKKAEYSVEFIMEHTGIYGNLLIECLAGQKMTMFVVAGLEIKNSTGISRGKNDKIDAKRIADYGVRFADKLKPYTLCDQTLSELKGLNTLRTQMVRIKAQLTQANDDIKKFQSKELQKKSDKLKKPVVNELDQAIEIIEAQMLELIKSDESIYENYKIAQSVPGVGKIVAVAFICATNNFTKFESAKALGSYCGVVPFGKESGRYKGKDKVSPIANKALKTLLHLGAVASIGGNNPFAVYYKRKVTEDKKNKMLALNNVRNKIVKTMFACIKNKTKYKADYSFPFAA

SEQ ID NO: 492773 - protein, 340 aa, unidentified
MHSTTIAVDLAKSVFEVAVSHRAGKVSERRRLTRVQFTRFLREQPPATLVMEACGTAHHWAREAESHGHRTRLLPPRDVRPYVVRNKTDRADAKGLLEANRNEDIRAVPVKTVEQHTLAGLHRLRSGWMATRTARLNPLRGLLRELGLAIPTGARQVVPHVEAWLGEGVLPAPLRGPVASCAREVRELEARIREVEQQLETISRTSGRITRLRTIPGIGVLTATALVAFVGDTQRFATGRHLASYLGLTPRERSSGPTRRLGRITKRGDPYLRMLLIHGARSVLHHAKRSAKSDRLRAWALDRERALGHNKAAVALANQLARIAWAVAGREEGYVARSAP

SEQ ID NO: 492774 - protein, 361 aa, unidentified
MTTAVIVGIDPHRKVFTATALDERGRRVADEHFANTSVGHHAALRWARELGTIERIGIEGTGGLGRALAEYLISAHVEVRDVPPHKTSLRQRGRHEGKSDLLDAHRIAAETQRNDALAYAFKQSSPSAPDAVHDQISLWHNARTSLRKIRVQLIGEIDALIAGLPEHLRTQLPEHNTARARINSIAQLETADVTDPTVTLRLQLIKYRTTMLRDVLAQDKTAEAELAALVARTGSHLTDVCGIAARAAAEILLETGDVRRFTEAGFARFTGTAPIPASSGEGGKRPVRHRLNRGGNRRLNAALHRIAMIQLRCEPRARRLYDNAVSRGHTRREAMRILKRHLSNILYRTMVRDTQPPPTLT

SEQ ID NO: 492775 - protein, 347 aa, unidentified
MKILSLDLGKNKTVGCDYERESGKHRFQTAFSTRAGLGQLVKEVKPDRVVIEVCSMAGWVCDLLREMGIEVQVANTSDDAWRWRKVKRKNDRCDALKAAQLSAVNQIREVHIPTIDVRQWRALIAFRQQLVRRRTRVKNHVRDLLLREGQILPRGGKCWTQLGVAQLAAMAQPLSEVGMNELWRGELAIELRQLRAVQAEIEVAEEKLDAIGAADPRVRLLRTIPGVGPRLAEAIVALLDRPERFRKVSEVSAYIGMVPKELDSGETQRRGKITRHGSRLVRSLLVEVAWAGLRHNPWVRETYQRISGGKKSRKKIAIVAVGRRLLVRCWAMLRDGTSWQSPAGKVA

SEQ ID NO: 492776 - protein, 314 aa, unidentified
MYHYIGIDVSKKVLNVFDGRKDLVFDNKEGLGSLKKYLKKRYPDFSKLVILFEATGIYSYHLKLLCAEQKIKAGIINPQASHNFAKSTGMRSKTDTCDARTIWAYHKLIQEKDIRIPQVDPVLITLSSYLASYRLTLKQRLSLANHLEGVKDKELCRLLKKEQKRLEKLELGLLMRMTAYVTENPELNEDYQRLLGISGIGQKTAISLLVLFRTYPDTNRRQITALLGLDPVQRQSGSSIKGRGRISKHGNQMMRKSLYMPTLVSLQYNGKIKAFYERLVLRHKPKKLAVIAAMRKLLLMAHAIYKNKTVYVPG

SEQ ID NO: 492777 - protein, 492 aa, unidentified
MTKSTRPFPKKQREKRQKKKIEKSVSSPSFEQVNPHAAGIDIGSKSHFVAVRTEAGEITVKEFDSFTSDLYELSKHLKENKVTTVAMESTGVYWIPLYDLLEEEGFEVKLVNARHVKNVTGRKTDVEDCQWLQKLHSFGLLSGAFRVVEKIRPLRAYSRQRSLLIESMAVHIQHMQKALFQMNIQLTNVLSDITGLTGMQIIRAIVAGQRDPKVLAQFRDRRCAKSVEEIEKSLTGHWKNEHLFSLQQALELYDFYQKQILHCDEKIKEALQELNGGNAPEEDSQNHDGKAPAKSRKPSKGNALHFDVKAYLQSITGVDLTRIPGIDGNSALKIIGEIGADMSPWKSAAHFTSWMGLSPENKISGGKRLSSKTKPTANRVAQVLRMAASTLYRNDSAMGGFLRRMKSRLGAPQGITATARKLAVLIYTMLKNGTEYVEAGLGSYEKQYEERLLKNLKKQAAKLGLSLVPSLQNQPPDPQTALLSVISTPLTS

SEQ ID NO: 492778 - protein, 319 aa, unidentified
MTRIICGVDISSRTLDVHLGNTDLQKQFTNTPSGIEALAAFCLEHQVDLVAMEATGGYEQKALHGLSAKGLSVAVLNPRSVRQFAQSMGRLEKTDAIDASIIALYAEVRKSKPVSLAPQAQQQLRAQVTRLRQLTALRTAQRNQARLIDDPLIQNSFVDLLEFIGKQIAVLEEQITVLIAADPLWSQLNPVLRTIKGVADRTVSRLFAELPELGTLSNKTIAKLAGLAPLARDSGQFQGKRHVRGGRAPVREILFIVGSVVARYEPDFIAFNDRLRKAGKPAKVVRIAIAHKLLTRLNAKARDLRLQEDEKQKQELKAA

SEQ ID NO: 492779 - protein, 423 aa, unidentified
MLETAQDEERIITHVAALDIGKALLVCCARVPDRARPGRRMQVIESYPTMTRSLIRLADRLGKLGVSRVVMEATSDYWKPVFYLLEAHGFEVWLVNARDVKHLPGRPKTDKLDAVWLCKVAERQMIRPSFVPPEPIRMLRDLTRYRVDLVTQAGAERNRAEKLLEDAQIKLSVVVSDLFGVSGRLMMAALIGGQRDPRTLAELAKASLRRKIPDLQEALTGRFTDHHAFLLGKMIDRVEQIEADIRDVDQRIEQQLAPFAQAAARLGEIPGIGPAAAATIIAEIGVDMTRFPTPAHLAGWAKFAPGVAESAGRRKGRGATGRGNRYLARALGTVAVSASRTSTFLGDRYRRIARRRGAKRAVVAVGRSILTIIWHLLSEPDTRFRDLGADFYLNHTSTERRKRNHIRQLEALGYHVTLDHAAA

SEQ ID NO: 492780 - protein, 322 aa, unidentified
MRYIGIDVSKATFVVAYSSDKGGEIRTFNNTTTGIKQFIGALPKDGSIHCVMEATGNYSALLLYMLNVARLTVSMENPLKIKNFARAMLSTVKTDKIDARLIALYGEKMNPQPFKIQGEAILRLRQKRTVIRQLTKQITAMSNLRGSLACLPVPDKGATHTVDETIKFLEKRRDRLQVELTDLVEIEFSRQLALLTTIKGIGITLATALIITTGGFTYFQNAKQVSRYLGICPTYEQSGTSVNIRGHINRNGDVYTRGLLYVAAWTASRFNTKCGETYTRLRQNGKPGKLAMIAVANKLVRQAFAVVTHDKEYVDGFVSNRP

SEQ ID NO: 492781 - protein, 397 aa, unidentified
MYIVGIDIAKRKHEAAVIDGEGTVIIKPFSFTNNCSGYNRLLAMLTKAKLPLDEVSFAMEATGHYWLALFTRLQKEGFRVQVINPVQTNSIRSFYIRQAKTDPRDALLIAEVIRFGHFSESTLHPENIYELRELCRGRHAIVSMQADVKRKVVALLDQVFPEYETAFTNLFSDTSMAILQTCPTPKELSEMPLEELCHLIEVSSHKRFRMAKAQELQVLARNSFGFAMAGDVFSTMIRLYAKHLDFLKQQVREMDCKIAEIMDTLDTPITTITGIGPTLGAYILSEIGDISRFSSAAKLAAYAGIDPTMRQSGEYNGVRNRMSKRGSPYLRHAIWLAASSAVLHDPALKLYFQKKRDEGKPYMASVGHACRKMVSIIYAVMRDNKAYTPYIPNEISA

SEQ ID NO: 492782 - protein, 333 aa, unidentified
MNYIGIDVSCKELVVVISVKGKARPAKTYDNTASGHKAIIKKCLKLKGKSRICLEATGVYHFDLAVALSRTQELEVMVINPKISHNFSKVLMKRSKTDEVDAEVLAIYCEKMPFDIWGRPADEVISLRAISRRIAALSKLKTQTKNQQHALSSTQETPDLVTATTQELISVLEQQIAMLRDAALVLIQEHAALKEAYSLITSIKGIADASSIQILAELMVLPKELSAKQWVAYAGLDPRHFESGSSVNKKPRISKAGNKYIRHALYMPALVASCHEPHIKGYYEHMINDNGLKKIQAVCAVMRKLLHAIHGMLKTGKSFDGERFYSFPSKANT

SEQ ID NO: 492783 - protein, 342 aa, unidentified
MEYFAGLDVSLEETAICVVDGDGRTAGEARVASEASAIATWFEATRLRPARLGLEAGPLAPWLQLGLEERGLPAVCIETRRMRSATLLMAVKTDRGDARAIAHAMRAGWYTAVHVKSMPSQELRLLLRNRKTLLEQRVRLDNVIRGTLKAFGIKLGRVSEARFADRVVALLEEHRPGLLDFVQPLLAVRLTLRRSYQALHRLVLRAVRDNPLCRRFMTVPGVGAVVALSVMTGIDDPRRFSRGRKVGVHFGLTPRKYASGEVDRNGAISRCGDAMVREALFQAAHTLLTRVQRWSALKAWGMRLAKRRGLRRATVAVARKLAVILHRMWVSGEDFRWTAEAA

SEQ ID NO: 492784 - protein, 395 aa, unidentified
MFIVGIDVAKRSHEVCMITSDGQTVQRPFSIRNNCTGYNLMLEKIRKHTNIKSQIVFAMESTAHYWLALFTRLRKDGYHVILLNPIQTSAMRDMFIRKIKTDAKDSFIIAELIRFGRYAENNVAQDRLLALKELCRNRFYLVDMAGDLKRKLIALIDRVFPEYEAQFDTIFCKSSVAVLKKYPTPQKLSNAHLDKLTELLWNSSNGHFGEWKARELKELARNSFGVEDCDGAYSTLILLMLDQIQSLSGKADALEKEISQLFQSFDTSVTTIPGVGPIIGAVILSEVGDISRFSSADKLAAYIGVDPSVNQSGEFQAAHAHMSKRGSPYLCRCIWMASQVAVQRDPMFRAYYEKKAAEGLKYMTIIGHVTRKMTAVVFAILRDHKVYEPILPTAA

SEQ ID NO: 492785 - protein, 317 aa, unidentified
MGEAKLDKYVGIDVSKTTLDLMVRPTGTRQQQANDADGIAQLVKQLRQLRPALVVCEATGGWERLLVGALAAARLPIVMVNPRQVRDFAKATGRLAKTDRLDAEVIARFAEAVQPEPRALPSADAQALDELVTRRQQLIDMRTAEGNRRRLAAGRLREQLDEHLAWLDRQLHDLDKELDHTLRSSPVWREQAVVLRSAKGVGPILTATLLSALPELGHLNHKEIAALVGVAPFNRDSGMWRGKRQIWGGRGPVRAVLYMATLSAVRTNPAVRSFYQRLINAGKLQKVALVASMHKLLTILNAMARDGRTWQPTKITS

SEQ ID NO: 492786 - protein, 401 aa, unidentified
MVSDFRKGRYNLMKIYVGIDIAKLNHFAAAISSDGEIIIEPFKFSNDADGFQLLVSKLESFDKNSIIIGLESTAHYGDNLVRYLVAEFYQVCVLNPIKTCQMRKNNVRKTKTDKVDTFVIAKTLMMQDDLRFITFFDLDMMDLKALGRFRQKTIKQRTRLKIQLTTYVDQVFPEIQYFFKSGLHQNAVYALLKEAPSPKEIASMHMTHLANLLKVNSHGHFTKEQAKELRVLAQKSVGANDSAISIQITQTIQQIELLDSQLEKIEAEMTDIMKFNDSVIMTIPGIGYINGGMILGEIGDIHRFSNPNKLLAFAGLDPSVYQSGNFQAKTTRMSKRGSRVLRYALVNAAWNVVRNNATFKAYYDAKRAEGRSHYNALGHCAGKLVRVIWKMLTDEVEFNLE

SEQ ID NO: 492787 - protein, 372 aa, unidentified
MNYNTVYVGMDVHKESFTLCAYTIDAEKGSHFQRTEAGYKNVLKYLEFLRTVYGNDANFICGYEAGCLGYTLYHQLTEHDVNCVILAPTTMLEQRSKRRIKTDRRDAEIIGKCLAQHNYSPVHIPTATDEETKEFLRMRDDHKLALKKVKQQILAFCLRHNYRFDGNSHWTAAHIKWLKSLNPEALYKEILDEYLLTYTTLSDKVERLDKRIEELASKDEYRESVKKLCCFIGIKTHTALSVLVEVGDFQRFASAQNFASYLGLVPGEDSSGDGQTRLGITKAGNRHVRMLLTEASQCYARGQIGFKSKELKSRQAGNSPQVIAYADKANERLRRRYYKMVLGKSKKHNVAKTAIARELACFMWGMMTEHIA

SEQ ID NO: 492788 - protein, 312 aa, unidentified
MAMLSFCGIDVSKDRLDVVVLPAGWFFSVSNDTAGWADLVVRLRPLTVSAIGLEPSGGYERGIIRALLAAGLSVRRINPNKLRQFARARGVLAKNDRLDARLIAEYVAIMPTRVVQRDAAVERLAEIVTMRRQLCDEHVAAENQAAHLEDAMLRRLSKRRQTRLEADIRLLDKRLAGIVAANVALAQRYELLTSMPGVGPVLAFTLIALLPELGKMSRKQIAALVGLAPYDFDSGKLKGHRSIYGGRMPVRNVLYMAALSASRYSPALKTFHNRLAAADKKSKVIIVAVMRKMITTLNAMLRDSAAWQPRSA

SEQ ID NO: 492789 - protein, 459 aa, unidentified
MVKAKARKGRKNEFQLINPHAAGIDVGSKFHIVAVSPEHDPNPVRKFSSFTTDLHRLADWLEAVGVTTIAMESTGVYWIPVFEILESRGFDVILVNARESKRVPGRKTDIKDAQWLQQLHQYGLLSASFQPSEKIASLRSYLRHRERLIEYAAAHIQHMQKALMQMNLQLQHVVSDITGDTGMNIIRAIIEGERSASKLASYRDHRCKESEKTIEAALTGNYRAEHVFALKQAVALYDFYQKQIKECDQEIEKTLEALNVDREAPSEPLPEARRKRRQKREPGIPIREKLFTLTGVDATQISGIGPHIALRLVSECGTDMTKWPTSKHFTSWLTLSPGNKISGGKVLSSRTRRTKNRATTLLRIAAVNIGKTQTALGAFYRRLAAKVGKAKAVTATARKLAVLFYTLMRYGKEYVEPGADYYEQQYRERVLRALTRKAAALGYRLTPKQENTLAAGAVS

SEQ ID NO: 492790 - protein, 345 aa, unidentified
MDHFSGLDVSVKETSVCIVDETGKIIREVKVASEPDALLPVLTKPAYHFKRIGLEAGPLSQWLFSALVEAGLPAICVETRHMRAALKAQINKTDRNDARGIAQMMRAGLYRPVHVKTLRSQKLRMLLTHRKLLQSKAIAIENDLRATLRNFGLKVGVVGTVKFEARIKQLVENVPDLVVLVEPLLVVRRALREQIGILHRRLLTIVRDDDVCRRLMTVPGVGPVVALTYRATVDVPARFRNSKAVGAVLGLTPSKYQSGEINRTGAISKCGDEMMRAMLYEAAHIMLVRSTKWSWLKAWAMQIARRRGLKKAVVALARRLAVIMHRIWTDGTEFRWTRGQTTAAT

SEQ ID NO: 492791 - protein, 353 aa, unidentified
MDKYIGLDMDCKKTVGYAIVPGQSESSATFGPDVESIRRYFCQERKGGYRLHAAFEISGQAGFLYDQLLDDVDSLHVANPTKMTWIYRTTKKNDRIDARKMAVLLSIGELPEVYMPSKEVRQWRQTILHRQKIVQKVGQVKNRIRAALKSEGHRKPAHVGSWWKRANLTWMQQLCEESVRCDSLWRLHVRNLLDELALLQSQRDRVTAYLDTYLDKQSAAKLLMSIPGVGPRTAEAVLAYTDDINRFSNYKKYCAYFGVTPKLDESGSFRRLGHISKQGPTVVRWLLCESGWKVVRHCPGLRAFYERVMAGQTSRKKIAVIALTRKLLCMMRAMLMTGELFNKKLVQEVLKAA

SEQ ID NO: 492792 - protein, 340 aa, unidentified
MDATTYGLDVAKRVFQMYWVEVETGEILNRRFGRDELIRFLAQRPAGRVALEACGSAHWWARKIKALGHEAVLLHAKFIRPFVQTNKTDAADARAIWTAVQQPGMRTVATKTEDQQAMLSLHRMRALLVKFRTMQVNQLRGLLYEFGATFRAGRAAGLAEIRARTAELEDALPGTMMCCLHDQLRRIDELQRDIDLLEKRIGVWQKQDAACHAITAVPGIGRLTATALVATMGDPKAFRSGREFAAFLGLVPRQSGTGGKVRLGPMSKRGDPYLRTLLIHGARSVMYHAKVPTPWQTDIQARRPANVAAVALASKIARTAWAILARGQEYQRNYVSVRPT

SEQ ID NO: 492793 - protein, 351 aa, unidentified
MENPTTIAVDLSKNVFEIAVERQGRICQRKRLNRRQLVEFFSRSPSATVLMETCGSSHYWGRKAQEFGHAVKLLPAQHVKPYRIGQKTDRRDAEAILSARHRESIVPVPVKTVEQQTICALHRVRAALMKTRTARLNTVRGLLREFGVTIAEGAERVLPAVREALSESPSPVPEPLHATLFSMMAEAGELDERSGQVEKQLKALSRTVPLVEGLETIPGIGLLNATAFSAMVGNFPRFKSGRKFASSLGLTPKESSSGKRRWLGSISKAGDPYLRTLLIGGARSMILAAHRTKRPHRLQAWALEVEKRRGRNRAAVAVANKLARIIWAVSTRGVPFKPQFDIQNTPKSVPA

SEQ ID NO: 492794 - protein, 372 aa, unidentified
MNYNTVYVGMDVHKESFSLCAYTIEAEKASHYQRTEADYKKVLNYLEFLRTIYGDDANFICGYEAGCLGYTLYHQLTANNVKCIILAPTTMLEQRSKKRIKTDKRDAEIIAKCLAQHNYSPVHIPTAKDEETKEFLRRGDDHKLALKKVKQQILAFCLRHNYRYDGNSHWTAAHLKWLKALTPEALYKEILDEYLLTYQALSDKLERLDKRIEELSTQDEYKEAMKKLCCFIGVKTHTALSVLVEVGDFKRFASAQHFASYIGLVPGEDSSGDDQNRLGITKAGNRHVRLLLTEASQCYARGQVGFKSKELKARQSGNTPAVIAYADKTNERLRRRYYKMVLNKCKKHNVAKTAIARELACFMWGMMTDNIA

SEQ ID NO: 492795 - protein, 348 aa, unidentified
MKFYTQQHRFYCGIDLHARTMYLCILDSQGREVFSQDLPSSPAAFLDAIAPFREGLVVGVECMFAWYWLADVCRAEGIAFVLGHALYMKAIHGGKTKNDEIDARKIAGLLRGGLLPMAYVYPSAMRGTRDLLRRRTFLVRRRAELLTHMQILHAQYNLPAPNKHLSYASNRTADLTERFTDTSVRKLVEVDLALIDQLDAHIGALELHLTRTAKVDDPQSYARLQSIPGVGKVLALVLLYEIHDIRRFAGEGQFLSYARLVRCSHESAGKKLGSGNKKIGSAPLRWALGEAACLMLRYSEQAKRWKARMEKKKGSAKTLGILAAQIGRVVYQLLRKGEVFDGKKFFGS

SEQ ID NO: 492796 - protein, 351 aa, unidentified
MSRKTDTVIARTIGIDTGKNTLHLIGLDDKGAIVLREKLTRGRIAARLANVPQCLIGIEAGMATHCVARELIALGHEVKQVPPVYARPFRQGHKNDFRDAHAIAEAVQRPSTRCVPVKTDDQLDLQALHRVRSRLISERTAVINQIRGFLLEHGIPVRQGLRFLRQQLPDILAKRIDVLSSRIIRIIEDLSGDWRRLDERIENVTEEIEELAHGTEGCRQLMTVPGIGPIIASAMVAAIGSGTAFARGRDFAAWLGLVPKQMSTGDRTILGRISKRGNRYLRTLFMQGARVILLRPANWAKHSFGPWLAAAAKRLHHNVLATAVANKLARIAWTVLVQARSYETRVTSEMA

SEQ ID NO: 492797 - protein, 320 aa, unidentified
MNCIGIDVSKQTLVTYDGKKERVFPNTTGLAELVSFVRRKGKGVAIVFEPTSTYSRRLETLCRQERIRCCYLNPRVIPHLREVAQERSKTDRSDAELLYQYGQEKAKAEARLLQRDPIAHALSAILSCYKAAQKARVTCQGVLEALRHDPDTPPALLTELKEQIVHLKAWEKKELNRAEGVVRADKEASSALGQLLSICGVGPVTAITLIGLFRRYPNTNRKQVVALVGLDPMERQSGSSVRGKPRISKRGNPEIRKLLYEVTLPAARYNPSIKAVYHRLKAKGKPEKVARIAAARKLLLMAHAIYKNRESYNAIKGEPT

SEQ ID NO: 492798 - protein, 382 aa, unidentified
MAQYTKFVGPDVHKDSIAVAVCDSKTEEVRFYGTIPNTEAATLNLAKKLSEDRSHLSFVYEAGPCGYVLHRQLTAAGYECRVIAPSLIPKKSGDRVKTDRRDALMLARLHRAGELTPVCIPGSEQETMRDLSRLREDLKAQERHLKQRLSAFLLRHGKSLPPKTTKWKPRFWSWIAELAFPHPILRIVLQEYGDAVKEIARRIAGIEAQIVRELETCSLAPVVRALMTLRGVDTITAFTLVAELGDLSRFETAPQFMAYLGLVPSEASSGGTVRRGGITKTGNGHVRRVLVEAAWSYRFPARKSGRIRERNEGQPPAICSIAWEAQKRLSFRYRHLAKSGKKQTVVTAAVARELAGFVWAIGCQVRGRSVTLPCSEENRWAR

SEQ ID NO: 492799 - protein, 341 aa, unidentified
MGSYVGLDVAHKQTAICVIDDAGEKRWEGKVRTAPELIAATVRERAPDAVRIGLETGPLCVWLWHALSEAGLPIFALHARQTSAALSLQANKTDRNDAAGLARIVRSGWYKAVAVKSLDAHKLRALLATRDQLVGMSTSLVNKIRSTLKTFGVLLGSGRGSAFETKVREAMPDDPIVRTLIESLLRLWRTVREQRQAIDSRLMAFARHDPVCRLLTTAPGVGAITAISFTTTIGDPRRFGRSADVGAYLGLTPKQYQSGDVKVIGRISRCGDTLTRKLLFEAATVVIARLKRPLSIKTWGEQIARRAGVHKARVAVARRLATVLHQMWLKGEPFRLDLPAA

SEQ ID NO: 492800 - protein, 450 aa, unidentified
MSKRGRSKERSQLRRINPRAAGIDIGSASHWVAIDPSLSQQPVREFAAYTRDPQALANWLVEHKIQTVAMEATGVYWIALFEVLRERGLQVCLVDARATKQVAGRKSDISDCQWIQELHSYGLLKQAFVPEAQIATLRSYVRQRDRWVVDASRAIQHMQQALELMNVKLTEVVSDITGTTGLAIIDRILAGERDAERLSELRNGRCAHSREEIARALLGSWHEEHLFALAQARDYYRYLGERIAACDVRIAAAMKACATPEGPRSEPPKVGKRDTSAHPFGFDAQGHCFQMTGVDLTAIDGVGANTVLTVLSETGTDLSAWRSERAFGSWLGLSPNPRKSGGRVVRSGTKPGAQRAATAFRLAARSLSNSKSALGAFYRRLRARIGAPKAITATAYKIAKLFYRMLKSKLPYQDIGQAAYDERFRARRLRSLRRMATELGFNLVPAPSGA

SEQ ID NO: 492801 - protein, 470 aa, unidentified
MSKPPQGDASAPRRRSTKTPGKSRRKKAAALPSLSITYPDAAGIDIGASSHFVAVPVGRDAEPVREFAAFTDDLRRLVQWLRDCRITAVAMESTGVYWIPLYELLEASGFEVHLVNAHHVKGVPGRKSDVLDCQWLQQLMSFGLLRGAFRPADEICALRSIWRHRDMLLSYQSRHVQHLQKALTQMNIQLHHVISDLMGVTGQAIVRAIVAGERDTQVLAGLRDRRIRADEAQIARSLEGTWRAEHLFSLKQALALYDAYASQIADCDAELERLLSALKAHEAPDELEGGPRGGPSKNAPRFNARKALFEASGVDLTRIPGIEASSALKILSEIGTDLSRFPSVKHFTSWLGLCPGTKISGGKTLSGETKRCANRAAQALRMSAQSLRQSRSALGAYHRRLCARMDRAKAITATAHKLARLVYFMLTRGQAYVDSGQQNYEERYQQRMVQSLTQRARALGFQLVPSSQSA

SEQ ID NO: 492802 - protein, 343 aa, unidentified
MVIHYIGADVHSNNTELCVERNGQIAQRHALPTTVRAIRRVLDGLQGQKYLTFEEGPLAGWLYRNLKDHVDSLTVCDPRRNRLITEAGDKDDRLDAAKLAALLRGGYLHPVYHSDDPQRVALKRWVMLYHDRVKDATRSINKLRGCCRAYGQRVPRRALRDPVMRQAWLASLQKDLADQVRLLWKSYAVHAAQVRAAKRQLARRARTFPIIAYWSALPGVGPIRSTTLFAYLDTPWRFQRKSQLWKYCGVGLQRTASGQDRYGRDRSARLRLAWAVNKRLKNVVMGSAMSATRSGANVFRDAYERMLARGTLARNARHAVARKMLTVMWGMWKNQQPFDTSLC

SEQ ID NO: 492803 - protein, 409 aa, unidentified
MNKVDIAPFEVFCGIDVGKSLNHIVALDRYDDKPLINRKVPQEEAEIRAALEEAGDFGLALVIVDQFGAFGRLVVGVAKSMDIPVAHMSPRRFRQVAETYGEDKFDEKDAFILADASRTTPRNIEFVGNRAESMAEIKVLSSRRDDIVEERTRCYNRLHDFIHQVSPPLEELFSKRKLHNDLEIRLIARYGGPIGFRQAGRARASTWAAELKYHCVDGPKKVEQVFDVLDRQTVMLPGAAVIEEQIRSIASRIIELLAEEKRLNLMIDQRAKMIPEVDLLQSIPGVGSVYAALIAVEIGDIGRFRDSNHLASYAGVAPRKEESGTSVHKRRKRKGGNRRLKNALMQSSQRSVQCDPLARAYYERKRAEGKKHLQALRALARHRVTMIFAMLNEGTFYEPPVEVDENGRG

SEQ ID NO: 492804 - protein, 337 aa, unidentified
MEYFAGLDVSMKETHICVVDRDGGVVLETMATTLPEAIAAALARAPSCQRVVFETGRMAPSLYHGLESLGLPVVCIESRQAYQALKSLATHKTDRNDARGLAHLARTGFFKPVHVKSLPAHAVRALIIARKKLVGQRVTLENQIRGLAVVFGVRLPRGLSPAFAAQVIGGSQGVAGLAGAMAGLLAARNAVLEAITAIDRDMKRLARSSEACRRLMTIPGVGQLTALAFVAAIDEPKRFRKSRDVGAYLGLVPRRYQSGEVDYTGSISKCGDRRVRTLLYEAANVMLTRYRGELALKDWALVIARRSTMRKARIALARKLAIIMHAMLRHGTEFRAA

SEQ ID NO: 492805 - protein, 368 aa, unidentified
MGKFITYVGLDVHKKTISIAFADEGDSEVRSYGVIDSDLCSLDKVVRKLVSRGGEPRFVYEAGPCGYGIYRHLKEQNILCMVAAPSLIPKKSGDRIKNDRRDAKNLARLYRSGELTAVHVPNSEDEAMRDLTRAREDSKTAERKARQQLNAFLLRHGLIYSGRSRWSLAHWCWISDIKMEHEAQQFTLQEYVDTVRSCSERVERITEKIRLLAGRWRFGPVVEALQALRGVCLVVAATVIAEIGDLSRFDNPRDLMAFLGLVPTQHSSGDKVKLGRITKTGNGHARRMLVQAAWSYRLPARVSRRLRDRQQNLPEKIWKIAWKAQVRLCARYRALIARGKPTQVTTTAIARELAAFMWAIFRTVEVGV

SEQ ID NO: 492806 - protein, 315 aa, unidentified
MTQTITAVAGLDIGKGQIDAALHERCETLAISNDAGGYPELIGWLQAHHVGRVGMEATGGYERGVARALREAGFEVVLLQPAQVRAYAGFKLRRAKNDRLDAELIAACAAAAQSRQEPDPRLEAFAEQLTFLEQIEEDLARAKTRLEGFRLPAQRGRLQAEIVRLRRLRAAELRSLVGALSAESDLADRLALAQSVPGVGLRTAITLIVRMPELGRITREQAASLAGLAPFDDDSGKRSGARHIKGGRARVRTSLYAAALPAAFQWNPALVALYRRLKAKGKEHKLILTACARKLLIYVNTVLERQTPWLDQPAG

SEQ ID NO: 492807 - protein, 293 aa, unidentified
MATMAINDIVTTIGVDLGKNVFHIIGMNARGAVVLRERLSRAKLPRRLTNMTSCLIGMEACAGAHHVGRQLAALGHDVRLIPAKYVRPFLKGHKNDYRDAEAIAEAVQRPTMRFVALKSTEQLDLQSLHRVRSRLVGQRTAVINQIRGFLLEHGITVRQGPAGLRQALPSILAQQTGELSPLLLRLLEDLVDDWRRLDGRIVDITTQIETLAKEDENCRRLMGTPGIGPLIASAMVAAIGNGAAFIKGRDFAAWLGLVPKQISTGDRTILGGISRRGNRYLRTLFVQVASRAG

SEQ ID NO: 492808 - protein, 483 aa, unidentified
MAKRKMSTFERLNSGEMNRRQRRELARKVAADDPELLIVNPNAAGIDVGNESHFVSVAPDRDPHPVREFGCWTAALRQMAEWLKSCGIDTVSMQATGVYWIALYDILEQYGIRVVVSNAQHTKNVPGRKSDVQECQWLRKLHTYGLVRDSFRLAEQMQSVRTIWRVRDRLVKDAGRAIQHMQKALTKMNIQLANVLSDINGVTGQAIIGAILKGERDPYKLADLKNYRAKASREEVARSLEGNWREDVLFELQQAVDSYHFLHQQMQECDRKLEGYMASLPTRTLNAPAQPESAPAGTPPKKKKAKKPRGNEPAWDLSAALARIYGVDLTTIDGINVMTAQTVLSEIGTDMSRFENEHHFASWLGLTPSKDKSGKTVRKGKKKVKNRVAEALRMAATTLLKSDSYLGARYRHLRRQLPTAAAAVKAMAHYLALLVYRMLTRGEAWVDRGRQHFERKRNQRELASLKSKARVHGFQLIPISQAS

SEQ ID NO: 492809 - protein, 455 aa, unidentified
MPRKRLGKKNKRVAPPILNPDAAGIDIGATEIYVAVPADRDPEPIRMFATFTEDLNHLADWLQQCGVRTVAMESTGVYWIPLMQILEVRGLEVYLVNAKHAKNVPGRRTDVSDCQWLQYLHSVGLLRASFRPAPDVCAIRSLLRHRNSLVEMATSHVQHMQKALDQMNLQIHHVISDITGTTGLAIIDAILAGNRDGQALAALRDPRIRASQDTIAKSLVGDYRREHLFTLRQSVDLYREYQRQIAACEEEIQRLMKGLETKADPAVSLPPAKDSVKKCKVMVPAKAMALREEAYRILAVDLTTIPGISVLHVQTILAELGGDVSRFRSAGAFSSWMGLCPDNDISGGKVLWTGTRKVNNRVAVTLRMAAQSLQKSESALGAFYRRMRTRLGAPKAITAAAHKLARIIYHMLKTREPYNESVFARAEIRHRQRTEYRLRVLAQTLGYTLAPVHTE

SEQ ID NO: 492810 - protein, 327 aa, unidentified
MKSIYVGIDISKKTLDICLIDQGLESYFKITNTIKSVAKFFKGLAEKQVQFFVAMENTGHYNYNLYEVLKCYSFKVYVVDSRHVKKSIGLARGKNDKVDAKRIAIFIERNHQDFQCWKPASKQVQAIKILLSQRRHKVKARQGLKQQNKELKIMKDLACVKKIISINMEQIKQLTSHIKTLEKLIELEIKEDKELHQNIKRIKTVPGIGPISAWSLVVKTEGFTRLTDPRKLACFTGVVPFEQQSGTSLKTKPRVSKMADKQLKCVLQMAAMRAVRMENDLQKFYLRKVKEGKNKMSVLNAVRNKLIHITMALIKNQTFYQNRLQMS

SEQ ID NO: 492811 - protein, 337 aa, unidentified
MKNLFIGIDFSKEKLDVAVITAVGLSETAQRECYEFKNSVSGFRQLVKWVERNSNGIATSSWLFSGENTGDYSKPLCNFLYGKGYDIWLENAKSIKDASGIRRLKSDRADALMIAEYAMRNYDKAFMYEPLSASLSQLRELFLYRQMVIRHRCSFQVRRGEKRLAMEKSPVKTIISQSGRHIVSELNKEIEKIDKRIAELIDSEEELKEIYHIVTSVPGIGCQNAVCLMVYTDNFRRFNYDARKIACYYGIAPFGKNSGASVHTDPHVHYLANRQIKAMLTQAALAAINHNPVLSQYYLRLVERRKKEAGGDEQCQEQTHTFGHCYGQKSPSFLSRI

SEQ ID NO: 492812 - protein, 490 aa, unidentified
MMTVNNKSRESTSPTRRRSGSRKGRRGLCLEDRPVHNPNAAGIDVGAREIFVAVPAGRDEQPVRVFNTFTEDLEQMAKWLVGCGIATVAMESTGVYWIPLYEILERHHLELCLTDARHMKNVPGRRTDWHECQWIQYLHSVGLLRAAFRPPEQVCAVRTLMRHRGQLVEMASQHVQHMHKALTQMNLQIHHVLTDITGQTGLAIVDSILCGERDPDVLAGLRDPRVKASPETVRKSLVGTWRMEHLFTLKQSRELYRAYQTEVAACDQQIEQLLGQFSPRVDPTERPLPPDRKKRQPRKRSRKGEPAKPTTDLDLRTEAYKLFGVDVTQIPGIAVALALALFTELGRDLSKWPTSSEFASWLGLCTDNDKTGGRVVFSRARRGKHRAGQLFRLAAYSLHSASGPLGDLRRMKTNGKKHRAGDIASRSEAAAAGQAAAHEKNRPLIDQNRQLMRGDLSASASRGSHADSSARVRGDIALGSRSPVVPTRTG

SEQ ID NO: 492813 - protein, 350 aa, unidentified
MNVNHYIGFDVHKKSVSYCVKAAEGRILEEGKLRATHQALRQWAQERQQTWRGAMEATLFSGWIYDTLKPYAGELQMGHPAMMKAIGASKKKNDKLDARKIADLVRCNLLPACYVAPPEIRALRQMLRYRNLVVAQAVRMQNKMSGLLMEVGAEYNKQQLHGKKYFTELLGTIAEVPESVKDLLRLSRGALEMFETIQRQLLVRLQKDPRLTQRVSVLKSIRGVGEVTALTWALEVSDPQRFSSVARAVSYCGLTSALDSSADKQQRGPISKQRNAHLQTVLIEAAKLAPRWNPQLAALHARELDRGNRNRATLAVARKLVAYLLAVDKSGRRFQIRSSSATEPEVEKVA

SEQ ID NO: 492814 - protein, 369 aa, unidentified
MADRITYVGLDVHKESIVVAVASGGLRGEVREYGRIANTATALDRLLRKLGDAGMVLRFCYEAGPCGYGIQRHVSARGHECVVVAPSLIPKRAGDRVKTDRRDAASLAKLHRAGELTAVWVPDPQHEAMRDLVRARLDAVHSLRRARQQLSGFLLRQGCHYGRPAWTKLHRRWLSGLVFEQAIHHIVLEDYIAAVEAAEARRDRLTAQIGTMLPDWTLAPVVAALQTMRGMAMVNAATLIAELGDLSRFADPRQLMAYLGLTPSEYSSGSSVRRGGITKAGNGAARRLLIEAAWSYRFPARLSRELLLRQESQPKPIRDIAWKGQVRLCARYRRLARTGKPANVVTTAIARELTGFVWAIARQVTVTPG

SEQ ID NO: 492815 - protein, 351 aa, unidentified
MDAITIGVDLGKSTFQVAVRGRGDRRGRQHRFTRAQFERFLRTQPAAHVVMEACGTAHYWARMVQGCGHRVSLLPPQYVKPYVRRHRKTDRTDAAALLDAVRNPDIHPVIPKTVAQQELLALHRIRRQWMTSRTARINAIRGFLKELGFPMARGAKTACVTARHLLADATTPIPCAWRTVLKMMLDEVHDLETRVQTIDRQLGQRAAEHAVAQRLQRIPGVGVLTATALLATVAHIHAFRNGRRFASWLGVTPSERSSGERRRLGCISKAGDAYLRALLTHGARSALRAAHYHERCRHPLGRLQRWALAVEQRRGHNKATVALANKLARVVWIVWSRDVEFCAEPQPAVAA

SEQ ID NO: 492816 - protein, 383 aa, unidentified
MKAVCGLDVHKDSVYLCILSEFGELIEKVFGVLTFQLEEMRDLMLHHHVVEVSMESTSVYWIPIWRGLSPHFKLNLANPYFIKQLPGRKSDVKDAQWIAECTMKELIRGSFVPPETIQQLRQYDRRIFDLNEEIVRKLSKLDAVLQRCNIRLSNYVSNVDSKSYKAVVRAISQGITDPEELVKLIHGRIINHHGIDVITASLKGVVSLAEINMISQLRDELDMAEAHKEKCQAKMLEICEREFPEELKRLQTIPGIKERAATSLIAEIGTDMNKFETANHLASWSGLKPRNDESNKKIKSRSITHGNVYLRKTIIECAWAASRTKDCFFSRFSYHQTQVRKKNKMKVLVAVARKMLIAVWHVLHDNTIYIDFTTDRKTSQTRG

SEQ ID NO: 492817 - protein, 391 aa, unidentified
MVCVGIDVAKDKHDCCILDSDGMVRADCFTIPNNMDGFKQLLQTIRNCTKKSDKIKVGLEATGHYSYNILGFLLDNGLPTYVINPLHTNLYRKSLSLRKTKTDRVDARTIATMLLSDVDLKSYTDIAYHNEDLKSLTRYRFDKVQERAKLKQSVSRLATILFPELEGLVSSIHGTSIYALLGEYPGAKQISEVHLTKLTNLLTTASKGRYGKEKAIQIREAARASIGSVIPAKSLELKHTIKLIQELASEINEIEDSIQQIIDELNPPILSIPGMGVNSAAVILAEIGDFSNFSSPDKILAYAGCSPSTYQSGKLTNCYAHMEKRGSRYLRHALYNATKYVCYWNPVFAEYLAKKRAEGKHYNVALSHAMKKLVRLIYALQKSGKAYLAAA

SEQ ID NO: 492818 - protein, 364 aa, unidentified
MKIVGCDLHARQQSIAMVDTETGELTEKRLMHEGNAVRDFYTSLEGPVVVGIEATGAMQWFLELLEELGIECRVGHPAKIRAAETRKQKHDRRDAEVILDLLVMKDRFPDIWMPSTEQRDLRTLLRDRHQWVKMRARLQHTLQAIALNHALREGRALWTAAGQRALQDLALPPYTDQRRDELLALYTQLEKRIQQLDKQVESEAQQRPGARRLLTHPGVGPVTALATEVFLGDPTRFATANQVASYIGMIPCEHSSGKRQRLGKLTKEGNALLRYLWVEATLHAVIKDAELKRFYRRKLIQKGMGKARVAAARKLGIRLWIMLRDEIDYEEFCRRGKLRQKGEAHAGMPDFNSGPAQAVTGSTE

SEQ ID NO: 492819 - protein, 397 aa, unidentified
MYIVGIDIAKRKHEAAVIDGEGTVIIKPFSFTNNCSGYNRLLAMLTKAKLPLDEVSFAMEATGHYWLALFTRLQKEGFRVQVINPVQTNSIRSFYIRQAKTDPRDALLIAEVIRFGHFSESTLHPENIYELRELCRGRHAIVSMQADVKRKVVALLDQVFPEYETAFTNMFSDTSMAILQTCPTPKELSEMPLEELCHLIEVSSHKRFRMAKARELQELARNSFGFAMAGDVFSTMIRLYAKHLDFLKQQVREMDRKIAEIMDTLDTPITTITGIGPTLGAYILSEIGDISRFSSAAKLAAYAGIDPTMRQSGEYNGVRNRMSKRGSPYLRHAIWLAASSAVLHDPALKLYFQKKRDEGKPYMASVGHACRKMVSIIYAVMRDNKAYTPYIPNEISA

SEQ ID NO: 492820 - protein, 317 aa, unidentified
MSKSFIGIDVSKNNLDVHILPEAMSLSYRYETKPVKALIKKLKTYAPELVVLEATGGYEITIGIALADAGLPVAIVNPRQVRDYARALGILAKTDKIDAYVIARFAQDVKPEARGQLTFKEQELKSLVVRRQQLVEMRSAEVNRLSRTTIPQVKNGIQKVVRVLDAQIKAIDDDLDNEIKKNPIWNQKLEVITSFTGVGDHTANTLLFGLPELGTLNRQEIAALVGVAPFNRDSGMLRGKRTISGGRANIRKALHMPTLSAATRWNKDLMVFYQRLIARGKKHKVALTACMRKLLITLNAMVKNNELYNPKFREVRP

SEQ ID NO: 492821 - protein, 445 aa, unidentified
MGCRARRCWREHLIIRSLEVSQALRTSPQAGGEGPKLLFVGDDWAEDHHDVELQDETGRRLAKAKLPEGIAGVTRLHAIIGEHLSEDDDATQVVVGIETDRGPWVQALIAVGYQVYAINPLQVARYRERRSVSGGKSDTADAHTLADMVRADRHQLRPVAGDSDQSEAVKVVTRAHKTLIWEQTRHMLRLRSALREYFPAALAAFADLTAPEALELLAKAPEPASAARVPLTRILAAVKRARRHHAAVKAEAIRDALRADHLGQPPVVTTAYAAMVRAQVAILTTLNTEIKALQEQVRTHFGRHPDADIYVSQPGLSAVLGARVLAEFGDDKTRYASAKARKNYTGTSPITRQSGKRKVVLARHVHNNRLIDAVGLQALTAIRASPGARRYYDQLLARGVGHRAALRQLGNRLVGVLHGCLKNKTIYDEETAWPNLTERPEHAAA

SEQ ID NO: 492822 - protein, 365 aa, unidentified
MKKSNKKQQGGTVAESKPAQVVGLDLGDRYSRYCLLSSTGEMMEEGRMQTTAAAIEKHFGSEPRMRIALEAGTHSPWVSRLLKGYGHQVIVANPRKIPTLTKSESKNDRNDAEQLARMAAFDPKLLHPIEHRNLERQQDLNLIHTRSVLVRARTMLVNSARGLVTSAGGRLPACSSEAFPEKASVAVPGELKAACEPLLKQIAQMNRTLVAMDKQIEGLAKKYPEIALLRTAPGVGPVVAACYVLTIGNPQAMETNRQAGAYLGLRPSQQQSGNCDPQCGITKTGNSYLRSLLVQSAQYILGRFGPDSELRCWGLKLAACGGKRGKKRAIVAVARKLAVLLLSMWRNGKKFEPFPQSATQLAKAV

SEQ ID NO: 492823 - protein, 363 aa, unidentified
MTVTSMPQTTWPGQSEQQPAEDVVLGVDTHKDVHVAAVITVLGALRAHQEFPATAAGYLQLLSWARSFGILHRAGVECTGSYGAALARFLSRENVQVIEVNQPDRATRRRRGKTDAVDAEAAARAVLSGRADVTPKTGEGPAADMRVLRLAKESAVKARTQAKNQLKAVLLGIDPELRESLSRLSNSALIAHCAELPSNGSASVFTLRLLARRIQQLTVEVKELTRRVNRAVRTCHPQLLDIIGVGPDSAAALLIAAGDNPERLASEASFAALCGVSPVEQSSGKTRRRRLNRGGNRQANAALYRIVVTRIRRDARTCAYGERRTKQGMSKREIIRCLKRYVAREIYRQIQPATTSVAASSTT

SEQ ID NO: 492824 - protein, 360 aa, unidentified
MDGNQERSAGRIVGGVDTHKDLHVAAVVDEFDRVLASQCFATTRHGYKQMLAWMRTFGSLQRVGIEATGSYGAGLLRYMQKAGVEVLEVTTPDKHDRRKRGKNDDLDAQNAAHAAFAGKRTVTPKSRDGMIESLRVLKACRKTAVAARRVALQMIQNTIVCAPDELRETLRKMTRMQLIRTRAAWRPDLTDYRNVASAYRITLKSLGRRYLELHDEIADLDTMIVAIVDELAPALVARNSIGHETAAQLLLTAGDNVQRLRSEASFAALCGVSPVPASSGKTTRHRLSRGGDRAANSALHIIAIGRLRTDPRTQAYVAKRITEGHSKLEAIRCLKRYIAREVFSLIKQRSQERHPAPTAA

SEQ ID NO: 492825 - protein, 343 aa, unidentified
MKATTIGIDLAKSVLQVHGVDARGNAVVRKQLKRDQVLPFFGNLAACRIGMEACGSAHYWARKLEKLGHSVKLMAPQFVKPYVKTNKNDAADAEAICEAVSRPNMRFVPIKNGEQQAVLALHRARQGFVTARTAQANQIRGLLSEYGIVIPQGLSHVSKRLPEILEDGENDLPGVFRQLLQRLGDHLRELHRQVGELELQIQLWHRQHDASCRLARIPGIGPLTASALVASIGDAKSFANGRQLAAWLGLVPRQHSSGGKSVLLGISKRGDSYLRMLLVHGARAVIRVAEKKPGYADSWLARLIGRRHPNIAAVALANKNARIVWALLKHDRDYRIGYQPAMT

SEQ ID NO: 492826 - protein, 400 aa, unidentified
MSVAVGIDIGAYKHAVAVCRAGQREADRWTMQISANRAGFRQLAGWMQTLAEPVSVVVMESSGHYWYNLASHLHRAGIPVSVVNPLESKYFGKRRLQRSKSDKADARTLAALGMHDQPRAQTPLAQSELREAARFSMRLVREQAEVCQRIQRLIDLGFPELREVWDDPTCVSALAVLRKAPTAAAVGRLRLDTLAALKRPGERGRAIGSAKAEQLHALAKASVAAPEMEAQVRFEMQLLIEQHDFLDRQIAVADARLATLLDGDTARRLLTIPGVGPATAGTLLAEIGDIWRFTDVDQLLAYAGVHPKEQSSGKKGERPETSWTMAKTGNAHLRAAAYRMAVVGITHNPVIRSHYARKRAAGKSPMNAVGHCMSKALALVWGVWRSGQDFDPRHGERRSA

SEQ ID NO: 492827 - protein, 510 aa, unidentified
MMTTSTLHTVPIGIGIDTSRYGHYVTFLSADLQPAAAPLQITETRAGYDQLVATFHKLKQRHPAAVFHIRLDAAGQYAANLEAFLHKLPFEKTVSIGDPVRNKNYRVAHFPKRKSDAVESYCVARFAVIEQPKTTSEYPAELLALREMASRLEAQTREVTRHVNQLHSLLARVFPELATLISSLAANWVLQLLAKYPTPAKISRARLATIREIPRISQEKAQRIHQAAQTTIASLTGDIAEQLVKSLVRQIQASQRERREFERMLIQAYEALPFANRIDTIIGIGVPTAAVLTAKIISIDRFDSPERLVGYFGIFPQEVASGIDADGNQRPRRHTRMSKKGNDLVRHYLYNAAMSACRYNPACRALYQRLKAKGVSGNAALGHVMRKLLHLVFAVWKSGQPFDPNHYQWEQPHATESDIQPPRKNNAAGHKQETSPERQVVTAAEAINVSASDTRVNAAARAIPSLLRSPNSERASEAPSERIRPTDIRTESSTPTKERNKNGVITPDTT

SEQ ID NO: 492828 - protein, 395 aa, unidentified
MKHILSFDIAKGKSVYCFIDEKRNVIRDATLIEHKKDEFDELFNFISKYKSLVVIMESTSVYHLPVENYFRSKAIDTIVMNPKLVKQYRDTLNKSKTDKLDCFKIARCYLGTIDNLYQKQDEYFMFNPLARQYWSLVEGQTRLKNRYKQLIEIVFPEFNLLFNDLYSDLALNFIHDFPHPVLFVNRRNDYLMNYLKTKNGTTQAFRFKNKVLKMKELAKNSLCYVSVDSLQVQNLIQVIEMIQYHKQEIEKIKNQLINNLKNTKLFKIMNSIPGFGDFSTALFLAEVGDITRFNERKEFISFMGIDSITSQSGIASYHGPISKSGSKFARTILFNVVTTLIQISAHTDKENPIYLFFRKKQSEGKHHYKCIIACENKLCKTIYKMCTSDCTYINK

SEQ ID NO: 492829 - protein, 391 aa, unidentified
MSMYFVGIDISKYKHDCCIISAADQQIVSKFTITNDKDGFEQLLISLNSLSNSEDIKIGFESTAHYALNLELFLENANHSFMEVNPVLIKEYKKSTTLRRTKTDSVDCESIARWLMTVEYKPHSKGFYHAYSLKSLTRLRDRLIRQRSFYLVKITNVLDHTFPEFKPFFNERLSKTAIYLLENYGSAEKMAHMNSVSYDKLRCISKGKFSIQQFLRLKELAANTVGVNNSIFDIELNSLLTLYNSLCKEIKNLEAEITRLIEEVHPHYMSIPGIGPISAAVIYAEYGDISNFSNPSQMLAFAGIEPGINDSGTESHGGRMVKHGSSQLRYVLLNACLPLIRFDLTFATYYAKKRAEGKKHRVAITHVAKKLIRVIYALERQDVDFNAQKLR

SEQ ID NO: 492830 - protein, 424 aa, unidentified
MQPQKSTACGIDIHKDFFVAAIVNRDGSAAIQKFEHTQDGLLALKSWVLSAHCPVVAMESTGNYWRPLHLTLEGYVELILANAYVIKRIPGRKTDAIDAQWIAELALNGLLSPSRVFPKDAREIRELTRARERLVDQCTKCKRVIHDVFDEACIKLSSVITDIFGKSGRFLIQGLLKGKTIDELIAGIPSKRVQKKERELKNAIKSGLSSSQVIVIEQNLQLIDRMTEQISQLDDEILCRMKDREEDLQIAMSIPGIGTIAAVTILAELGDYRDFDSPDSLASWAGMVPSVYQSADKLRTGSITKHGSKHLRRILTEVAQAAARTKNTRFSAYFRKLKNRIGYPKAIIALARKILCILWHLLINREFYIDALNTRPNSQNLIQKTVTPQSIERSIDILVKAGYCIQKSENSKNIQRFQGAADPS

SEQ ID NO: 492831 - protein, 342 aa, unidentified
MYYIGLDVHKKTISYCVKDAAGKIHQEGKIGSTRRELDAWIKTLPQPRMMAMEATIFTGWIYDHLLPHAEKVKVAHPLMLRAIAAAKRKNDKIDASKIADCLRCDFLPECYMTSTEIRDRRRTLRYRGLLVKQMVQMKNRISGLLMETGASFNKQRLHKVGYFTELMSGNEEIDCVRPLLKLSRETINRSQKLDYALVSSLERDPLLAGRLKRLRTVPGVGPITALTWVLEIGDVARFQSIKNAISYCGLCGAEKRSADKVLRTPISKQRNKHIQQVLVEAAKLAPRYSHELSLIYEKEKQGGNRNRATLAVARKMVAWMVAVERRKQDFVPAEERGGTVAA

SEQ ID NO: 492832 - protein, 430 aa, unidentified
MGRLKIVFPVCCGMDVHRDFVIACIASTNSQGVTEYQSKRFSTYTGDLRKLAAWLKENHCSDVCMESTGKYWFPVHNILEKDFHVVVSHPKFVKAIKGKKTDKKDAMWIADLFKHDLVRGSFIPPEDIRQLRDLCRYYQKLVWNTTGEKNRAQNCLTVSNFKLDDVFSNVFGKSASAIISQLLEHPGEAFDVAPFLDRRCKASPQEVQEAIDGTFSPWQAEKLKVIRKHISNLDDLRDALQKLIFKLAEPYSRQIELLLTVPGISDPMTAIRVIAEIGADMRQFESSKHLCSWAGLTPQNNESANKKKTTRIGKAGQYLKPLLIQCAIAASNPRSKLHPEILAKYQILKKRRGAKKARVAIARRLLTAIFHILLNDTPYQPADSSAKDSAPEQRIISLSQAFALLARIGYMISEVADISDLPLVESAPSS

SEQ ID NO: 492833 - protein, 331 aa, unidentified
MLCAVGVDVAKDTLSICRCYDSGRKETTTIRNNETDITKFIKEELSGYGNKIVMESTGRYHYLSAITFSENGFDARVINPLITKKYSSGTIRKVKTDARDAEMLAEIAIKEDDLPRQFNACRKDLEIRKKIGLLGSLEKQLQQFKSVLADYGETKEQLKMKMSLAEKDLLKTVEKISAAKEKLEKEISDLSLEDESRAELAKLYATIPGVSKYLAAVSSYFFEVDYDNDPKQWVAYAGLDVSVKQSGKWNGRGKLTKRGNPYLRKRLFCAAWGAMMHDDDFKKYYEYLREQGRSYIESMVIISRKLVRIMFYLAKNNSVYDPALLNLPSAN

SEQ ID NO: 492834 - protein, 315 aa, unidentified
MSDTFVGVDVAKAELVVACRPEGVVWTAPNDPAGIAATVTRLRTLAPALIVVEATGGYERALVAAVAAAGLPLVVANPRQVRDFAKATGQLAKTDRLDADLLALFAERVRPTPRPLPEPILQQLDALLTRRRQLLDMLTAERNRLEHAAAPIRRSLTDHIRWLERRVAEVDRDLDDTIENSPVWRAKENLLRTVPGVGPVVSRTLLAEVPELGRLNRKQIAALVGVAPLARDSGTLRGKRLVWGGRAPVRAALYMGALVATRRNVVLRTFYRRLIAAGKPKKVALTACMRKLLTILNAMMKTNTAWRPINQPVGA

SEQ ID NO: 492835 - protein, 418 aa, unidentified
MKQSSEIAAFVGLDWVDQKHVLSMQQVGTDKRQCFTLDQKPEALQSWIAGLRDQFQGRPVAIAIEQKRGALIYALMHVDFLYLYPVNPQTLSQFRKAFYPSGAKDDPRDADLLLEILMTHRQRLRLWTPDDELTRSIQLLSEDRRGLVDERTALTNQLTAALKSYFPQALDWIGDLHTARACAFLQQWPSLQQFQLSTSSKIRKFYREQGYRGSDRLELWVAGIKNASPLTPDGAVVLAGSMKVQALVPQILLLTQSIQRYDQQIAALFNKHDDSTLFGSFPGAGPSLAPRLLAAFGSDRGRFEFASELQELSGIAPVTERSGTNVWIHWRLACAKFLRQTFHEFAGQSILKSEWARNHYDQQRKRGKSHHAALRSLAFKWIRIMFRCWKDRKPYDESVYCESLRRRRLLPAAPQARS

SEQ ID NO: 492836 - protein, 451 aa, unidentified
MSRPQVIDDEEHERVHDRVAAIDVAKDSGMVCTRTPHPSRPGARRSTVWAVKARMGTIRKLGRQLARDGIEVVTLESTSDYWRIWFFVLEACGLAVQLVNAAQAKNLPGRPKTDKLDAQWLARLTEMGLLRASFVPPKAIRDLRDYTRARTRLVQERTRCYQRLEKLLEGALVKLSAVASKLTTESAKDMIKAMIAGQRDPKVLAGLARTRMKAKHDDLVEALDGMFDDHHGELAGLLLDQIAFLDQRVTQLTTRITAAVAAMPAAWGVDADGTAGPDAGAGPDAAVLPAVARLAQIPGISPDLARSIIAEVGLDMSRFPTAGHLVSWAGLCPSARQSGPRTRAGKKGQGDTWLRGSLGQAATGAARTDTFLGERYWRIARRRGKAKAQVAVARSILVIIWHLLADPAARFTDLGPGYYQARTDKDKKVKNHIRQIEALLGHPITITPKAA

SEQ ID NO: 492837 - protein, 312 aa, unidentified
MENKVYVGIDVSKDKLDLAIRPDGQEWSEGQDDASLERLVRKLKDIAPALVVLEATGGYEARVAALLATAGVAVSVVNPRQVRDFAKATGKLAKTDRLDAHAIAHFAEAIQPQVRYVSDEEGREMAALMSRRKQLIEMMVAEKNRMHTCLPKLLPNLKAHIAWLEQCLEELDKDVQDKIQNSAIWHEKDDLLRTVPGVGKVVSFTLLAGLPELGVLDRKKIAALVGVAPLNRDSGKYSGRRGIWGGRGDVRSALYMATLSATRCNPVIKSFYQAMVARGKLKAVALTAAMHKLLTILNAMVAQSKPWCPPIA

SEQ ID NO: 492838 - protein, 418 aa, unidentified
MIDDVQWFVGIDWATQNHRVCLLDVEGRHVSERDFAHGGAGLTELRDWLLEKTKAAPGQIAVAIETPHGPIVEMLLDQAFLVFAINPKQLDRFRDRFTVAGAKDDSRDARVLGGSLRTDRQAFRRLVVDDPLVIELREWSRIAEELQQERTRLANRVRQQLWRYYPQAIELTDDVADDWFLGLWQQVPTPAIAATVSEEVITRILKDHRIRRLDAATVLQTLRKTPLFVAPGTTEAACAHIRSLAARLHLVNQQIKEAHRALDGLCAKLEAPTESPSGQIRGQRDVTILRSWPGIGRIVLATLLTEAAEPLRTRDYHVLRALAGTAPVTRRSGKQCFVIRRHACNGRLQTAIYHWSRVAIQRDAVARRRYDALRRRGHGHARALRSVGDRLLYALCTTLKRQTTYDPNCQTAQTIASL

SEQ ID NO: 492839 - protein, 420 aa, unidentified
MKTWTEITHYAGFDWARDHHDIVIVDPQGNITTEFRIAHTLAGWQQFREKIQGYGAVAVAIETSQGAAIDQLLQSNVTVYPVHPLSAKRYRERKAPSGNKTDHLDAWALADALRVDGQGWSMLQPLDPLTQTLRLFCRDEMALIEHRTALVNQLQQALSEYYPAALEAFDDWTRPSCWEFIIHFPTPHQLVKAGKRRREQFLHVHRLWRPETVNKRLEIFARAEQFCGSEPVTAAKSFLALSLAKLLCTLEHQLQEYRKQIQALFEQHPDHDLFGSLPGAADKLAPRLLGEIGGDPDRFESVAVLQMLAGTAPVSFQSGQIHKVRIRYQCQKVLRYVVHLWANSCRKSCSWARVYYRQKRAEGKSHACALRCLGQRLLKILHAMIRTRTRYNAELHARNQQAHGSWVLKLVTKQAPLGSE

SEQ ID NO: 492840 - protein, 328 aa, unidentified
MQAGEGIVGIDISKNSFDVVLRGTGGERHRVFSNDQKGFNALAGWVEKGPERVVQICMEATGSYWEGLAEHLYQGGYKVSVVNPYQIKRYGDHLLNRNKTDKADASLIAEYCEKDRERLRAWKPLLPEIKALRSMGRRLDELQGMKQQEQNRLKSGVKDLVVIESIQENLKQLGAQIKALWKKIREHVDQHIDLREQQRLLTSIPGIGKLTAIKLIAEIGDIKDFDEASQLAAYAGLAPQQFRSGSSVHKQTRISKQGRTELRRCLYMPAVVATEHNPIVMDLKRRMLASGHVMMEVIVAAMKKLLHLVYGVLKSGRPFDPEYGMQFR

SEQ ID NO: 492841 - protein, 581 aa, unidentified
MGEPRGGNCEYVDNFPSHTTMNTLRKGLTFSTKDHNIILGQFGAWLTGVTEWVILIASDIRLSCPTAREENRLTKLRCLIYIGQPLMKHEYGAKIMVLCRTAHLQNLLPEKKGGAVMSVLNVGVDLGVTSKHQAEIRDEEGNKVRPSFSFSGSIEGFDCLCKHALEDATNGTKLRFICEPTSMSWFPLAIYARAHGHKMVRVKGQKAHDLREYYSKHSKRDKIDAKVLSLMPVVDRDSLEEVYLPDKLIHALDRRCRQREKIAKSIASTKTRLKSLYHWVIPGLTSYFGKPFGSRARAFYAKYTNPFKVKQLGLSKLTSFLSKAGRQEMDQELPEKVYYAAIEACKLYESSSEQIDFDEIQQEAECELDLLKSYEKVQAKVDATIERLYNQTHPSKNIETISGISETLGPVFVGIIGDPKRFPSQSKMRGYSGIIPEQDESGESSKKGLNITKDGPPRYRRGLYLAAEIGRQWDPQLAKIYYEQMVHKGNCHTQAVCAVATHLPARIHLILKEDRAYELRDLEGNPISKKDAKALIQRELTVPEEIRQQTRSRKRRRRKKEGYIHSQIRGLATTLQASRFA

SEQ ID NO: 492842 - protein, 447 aa, unidentified
MEEVTDEPLYRDRVCGIDIGKAGLVATIRVPAEKDPARRAAETRSFGTTKREVLALADWLRCWQVPAVVMEATGDYWKGPLYRLEAEGFECVLADAKQVRHLPGRPKRDPADSRWLAACFERGAVTPCFVATGEFRVIRLHTRYRRDLTEERTREKQRAEKLLESAAIKVSSVLTDLHGVTGRDIMNHLIAGDRDPKVLAQLARTAARRKISQLEEALEGAEFFTPAHAALLTVMLARIDRLNADIDQLTEVIERLLAPHEEQLQQAESMPGWGRRAAQDSLAETGPDMTRFPTGAHLASWAGRTPLDHQSGKRQGRSKAKKGNRYLGAVTGETAVAAGRTQTREGARYRRLARPPRQTQGPSRRRQHPVEGLPQAAVQPRHALCRPRPGLLRAPARHPPPDRPPRRQARRPRLRSHPRPPPQPRPRTRRNTQPGRLTQAATFTRLR

SEQ ID NO: 492843 - protein, 348 aa, unidentified
MTIVEKTRVVVAGVDTHADVHVAAVIDELGGVLGIEAFDTSETGYRATLHWLRSFGVVRLVGVEGTGSYGAGLARHLSRAGLELVEVDRPNRQARHRQGKSDPLDAVAAARAALSGLAVGRPKSRDGNVEAIRVLSVVRRSAASERIMTLNQLRHLCFTADPGIRERFEGLSVAELTRTAASLRPRPGDDAVRYSTLFAIRALARRVVYLRDENAELKSMLKPLIDSCAPGLMGVYGVGYDVAAKLLIVAGDNPERLHSERAFAHMCGVAPLPASSGKTQRHRLNRGGNRQANAALYRIVITRMSSDQRTRDYVARRRAEGKSLGEIARILKRYVAREVFPHLRTAVT

SEQ ID NO: 492844 - protein, 408 aa, unidentified
MESQIIFGIDVSSKSSTVCVVNDRIKQGESFRISNDSFGYQKLYEQLNQYLITPLVVFEATGVYSLSLQAFLEDYHIKYLKLNPLKAKKLMDNNLRHNKTDKVDAYRLALIQFNAPQKLRDPQPREYHELQNASRYYEELTRSIVTTKNQLHRNLQSTFPQIEEILSHPSGRIYWALVSLFPHAGYVLEKNETQVTQMLNSISGIGQQRARYLTTRLYAFAREAYPYDSKDSIIVRAIQRNISNLFSLQQERDYVINYMEKLAKAVNARALSIYLSIPGVARITAVRLVAELGDLRRFSTSAQIDAFVGIDPGRYQSGEKDSSLGITKHGNHIARKILYRVITQMETVKATQPCHITDYYDKKKRSSNSQGYKKIAIASVHKLIRTMFALIKHDQLYDYNIATKNKRL

SEQ ID NO: 492845 - protein, 433 aa, unidentified
MEVLYPRCAGLDVHKDTVVACVRLVAGAEVRREVRTFATTTPGLLELSAWLSEHGCTHVAMEATGVYWKPVWHVLSDGEFTLILANAAHVKNVPGRKTDVNDAEWLAELLAHGLMRASFVPPEPIQDLRALLRTRKQLVREQSSHIQRIQKTLEDANLKLASVLSNILGVSGRAILEALIGGETDPDHLLTLVQRGVKAPAERLRAALTGRLNQRHRFLLRLHLGQIDALQTAIDGIDQEVERDLTPFRAAVRLLRSIPGISDLAAEVIVSEIGTDMSRFPTAGHLLSWAGLCPGQNESAGKRRSSRMRKGAPWLKTMLVQCAWAATHKKGSYLQAQFQRLRQRRGPKKAICAVAASMLTAAYHMLKDGTLYQDLGTDHFHKSSPEAHAHRLARQIAKLGFSCQIAPLQEVVSIQDRIDVLAAADRLTVKPEG

SEQ ID NO: 492846 - protein, 418 aa, unidentified
MFKILKNNCCGLDVHKTWIYACIGITDSNKRTEYKQARFSSFTKGLNELCDWLAKYNCNDVCMESTGKYWIPVFNILEKNNIWVTLSHPKYTKPQKGNKTDRKDAKWICDLYMCGMVKPSFIPPADIRELRDLVRYRFKLTCMITGEKNRAHNSLTVSNLKLDDVFSDVFGKSSRSITEQILQHHGETFDVAPFVDGRCKTPIEEIQAAVDGAISTEQAVKLKQCLTHIDELEMHKAEIEREIFRLSDKYESVLNLIRTVPGFDKNPLTAIQVLSEIGGDMSVFPTAKNLVSWAGCCPRNDQSNHKIKSTRISRAGSYFKPVLVQVANALIKSRKHPEFTTRYRRIKARRGHKKAIIAICRMILTAIWHILTDLKPYTPEGFLESRPVNKSKVLTTSQALNLMKQRGYIIKDDVVSVT

SEQ ID NO: 492847 - protein, 335 aa, unidentified
MPLYCGIDLHSNNHVICVIDEKDDRVFEIKLENDSTLTLKSLSKYKRRLKGIAVESTYNWYWLVDALMESGYHVDLVNTAKVVQYEGLKHTNDKYDAFHLAHLMRLGILPTGHIYQKETRGLRDLLRKRMQLVQTRSAALIRFKSMIQLHSGKTIRADTIKTRKFKIPIVGDSNVQLALQSELQLIRALIDQIKLLEKSILDQVEPLAQYQLLKSIPGIGDILASTIWLEIGDINRFKSPGNFASYCRCVNSRRESNGKKKGENNRKNGNKYLAWAFIEAANFCVRRCEPAKRFCEKKTTQRNNIIARKALAHKLSRACYWVIKNQEPFQLSKLF

SEQ ID NO: 492848 - protein, 482 aa, unidentified
MKHKRHEKTKKAICGPTQGNWQQMNRKQRREMTRKIQSEDISLEVIHPDAAGIDIGNESHYVAVPPPRDSQPVQRFGCTTAELKDMADWLKQCGIRTVAMQSTGVYWIAVYDILEEAGLEVYLVNARDTKNLPGHKSDVQESQWLMKLHTYGLLRNSFRPSQEIRTMRTYWRQRNDLVQSAGRHIQRMQKTLTQMNLQLANVLSDISGVTGQAIIKAILAGEHDPDKLAEFRDPRVKARKGQIARSLEGNWQEDLLFVLQQEQDGYEFCQKQMTECDQRLEHYLQQRDDRSAGASLPEEKRKERRKKRKGNKPRFDLRTGLFRMTGTDVTRIDGIDVMTATTILSEVGWDMSKWETEDHFVSWLRLCPDNRTSGDKIIGKGRLPTNNRVSTALKMAASTLRTSQTYLGAQFRRLRSRLDTPVAIKAMAAKLARLVYRMLRYGMKYVDRGAEFYEAQHRQRQIKHLKSKASKLGFQIIQVPAA

SEQ ID NO: 492849 - protein, 391 aa, unidentified
MPMYFVGIDISKYKHDCCIISAADQQIISKFTITNDKDGFEQLLTALNSLSNPEDIKIGFESTAHYALNLELFLENAHHSFMEVNPVLIKEYKKSTTLRRTKTDSVDCESIARWLITVEYKPHSKGFYHAYSLKSLTRLRDRLIRQRSFYLVKITNVLDHTFPEFKPFFNERLSKTAIYLLENYGSAEKMAHMNSASYDKLRCASRGKFSIQQFLRLKELAANTVGVNNSIFDIELNSLLTLYNSLCKEIKTLEAEITKLIEEVHPHYMSIPGIGPISAAVIYAEYGDISNFSNPGQMLAFAGIEPGINDSGTESHGGRMVKHGSSQLRYVLLNACLPLIRFDLTFATYYAKKRAEGKKHRVAITHVAKKLIRVIYALERQDVDFNVQKLR

SEQ ID NO: 492850 - protein, 325 aa, unidentified
MNDAKYIGLDVHQATISAAVLDSTGKLVMESILETKAATILQFVHGLRGSLHLAFEEGTCAAWLHDLLKPHVTKVLVCDPRKNSLLKAGNKNDRIDARKLADLLRTGLLSAVYHGENGLRTLRELARSYLAITRDLTRVMNRLKALYRSWAIPCAGQQVYAPRYRSEWLGKIREAGVRRRAELYYQQFDALAILRQEVRRDLLAESRKHKAMNLLRQIPSIGPIRGALLIALIQTPHRFRTKRQLWAYSGLALQTYSSGEYRFVQGQLQRTARWLPSPLVPALAVRHKRSAPPPFSRDSAPSPRSLRSPSPTPRSADSPDENRSL

SEQ ID NO: 492851 - protein, 324 aa, unidentified
MIHYLGIDVSCRTLEVSDAPGTLTGQFANTAKGLASLLSWVHRHAPEGVQVVLEPTSTYHHLLVEALNQKGVPYTLVNPAHTAAFATVQGKRAKTDRGDARLLADYGASQGPQATPPPDQDQERVKSLRRHLAWLEREARSARNRLETARRSPWTLPEVLESLERTATALEEEAAQVARVLEARVAAHPRWQQEIALLTTVPGIGVKTAILLVSELPAQARCTNAKAWVAFCGVNPEPRESGTSRYSRLSRRGSPQVRAGLYMAAVAAMRWNPAVHALCQRLQAKGKSGRVRVMAAMNKLLHLCYGVLRSGKPFDPALHQPITP

SEQ ID NO: 492852 - protein, 355 aa, unidentified
MLNTKYIGMDIHKETISIAVLSAGGKSVMECVIETKASTILQFIHGLRGDLHVTFEEGTWAAWLYDLLKPHVTEVLVCDPRKNALLKEGSKSDKIDARKLAELLRLNHLKPVYHGEHGVRTLKELARSYLTITQDLTRVRNRLKALYRSWAIPCSGRQVYAPRHRSEWLGKISEAGVRRRAEHYYQQLDALRPLRQEVRRDLLTESQKHKAWKLLRQIPGIGAIRAALLIALMQTPHRFRTKRQLWTYSGLGLETHDSAQYCVVEGQLRRSKKPLMLRGLNQNHNHDLKAIFKGAALEASSGAGPFHDFYEALLAKGRKPTMARLTLARKIAAITLIVWKKEVSFDAKHLKQQAA

SEQ ID NO: 492853 - protein, 351 aa, unidentified
MEQHNTMTIGIDLGDRFSFFAVLNDAGEVVERERIVTHIDSFERAFAARPAARIVIEASTHSRWVSSLLAELGHEVLVANPRRLALIYGQDRKNDKRDAELLARVGRLDPELLCPVWHRSNQAHADLSLVRMRNQLVELRTKLISSVRGMVKSHGQRLPACSTETFHDKVAEHIPELLKAVAASALRTLAQLSEEVRALDRQIESLGRTRYPETTALRQVAGVGPVTALTFVLTLERPERFRHSREVGAYLGLVPRQDQSGDTDKQLRITKAGNVYLRKLLVQCSHYVLGAFGPDTDLRRWGLALAERGGRNAKKRAIVAVARRLDVLLHRLWRSGQVYVPLGYPPVACAA

SEQ ID NO: 492854 - protein, 343 aa, unidentified
MIKHSLMAIDLAKNSFQVCLLDPHFKVKKNLKLSRSKLLAFVLQHPADEIVMEACYSANYWARTFQHYGLNVKLIPAQHVKPFVRGNKNDKNDALAIAEASQRPNMRFVDIKTLDQQDMQSLHRVRERLLAARLRLTNQVRGLLSEYGVILPQGNYAFRTQLAEYIDQEHPSLSPVFRQELACLLEEFHHYQQRLEHINQQIKTVAQDNAQHQLLMTIPGIGPIIATAVTSAIGRGTQFTTAREFAVWLGLTPRQHASGDTSFQLGITKRGDRYLRKQLVHGARAAMRWCRKRDDRLSRWVNQLIARRGLHKANIALAHKLARIIWAVLQRHAPFELNKGALT

SEQ ID NO: 492855 - protein, 372 aa, unidentified
MSETIVACRSFIGVDLHKTTVTLVAVGPDGTEIARLTINTKCREKIRLWLLGLPGPSHMAVEAVGFVEWFIEYFRPYVDRIDIADATELSNRRGKRRKNDYKDALDVAQRLARGECPCGYIADDELMQLRKLGRHWRQLSKLLALNKQFMKSILLAANLRGPKFDGASAQRWLLAHGHLLKPAQRMAFANFTRVVQLIELQREPLRYAIIMASRSERFAPMTKLLQSVPGIGEIWSCIITAEIGPFERFPNADALEFWAGMTADLKESAGRTQSGSITKSGSRTLRWALCNAALTLCHCDAGQEAIRQRLIRKTGGIKGKANTAMGRRLLRTLYAMVRDNKPYQAGTPRNRNAAANKARAAKRARKNGKEAA

SEQ ID NO: 492856 - protein, 377 aa, unidentified
MHSENIAAYVGLDVHKETLAVAIAAPERLGEVRYYGTINNEAQAVRRLFQKLQGLYGNILSCYEAGPCGFGLYHQLTAMNIKCQVIAPSRIPKSPTDRIKNDHRDAISLARLLRAGELTPVWIPDLTHEAMRDLIRARAAAKRDSRVARQRILSMLLRTDKRYAGKHWTGKHRTWLANQSFSQPSQQIAFQHYCQSLEQIEDRILQLDQEISRLLPEWSLCNLVCQLQALKGVGQLTAITLVAELGDFSRFSSPKQLMAFLGLVPGEYSSGNSIRPRGITKVGNSELRRLLYEAAWSYRTPAKVGAWLIYYRPDSVTQYSKDIAWKAQQRLCSRYRSLTAKGKKSQVAITAVARELTGFMWDIALAAQSSFSQQKQN

SEQ ID NO: 492857 - protein, 459 aa, unidentified
MSRKGRRTKGMEEAHPFAGMSRINPHAAGVDIGAVEIVVCVPGAGDTQIVRAFGNYTVDLQAIGRWLKEHGVTTVAMESTGVYWIPLFEELERQGFECLLISSRSLRRVAGRKSDITDAQWIQTLHTYGLLESSFRPQAELIALRTLLRHRGQLVEHRSPHIQHMQKALLQMNVQLSQAVTDVTGLTGQTIMRAILAGERDPQKLASLREPGCKKSEEEIGRALTGTWREEHLFILKQSMEMFDFYTQQIQACDDEIERVYGETRPDWDGGELKPLSIGKRNSHSKNRPQNPESIRKHLKRISGVDLSAVDGFGVSLAQTVIMECGTDMGKFPDEKHFCSWLGLAPKHEISGGKVLKKNTLKTKNRAGQAFRMAANSVKQAECVFGVMYRRLKARLGPAQATVATAHAIARVVYRMLKYKVEYETISVEEYEKKYREQQLKYMKKKAAKLGYQLVPIPI

SEQ ID NO: 492858 - protein, 343 aa, unidentified
MQIRSVGIDLGKTTFHLVALGDNGKVLLKKKFTQKQLIAFTANMQTCLIGMEACSGSHFLGRALRAQGHDVKLIPAQFVKPFVKSNKNDFIDAEAIAEAVERENMRFVAIKTDDQLDLQALHRVRDRLMARRTALINQIRAFLLERGIVFAKSPIRLREALPEVLENVNEHLTPRMRNLVAMLWSEWKDLELQIVQMNDEVERIASSDAACRRLRQIPGIGPLVATAIVASIGNGAAFRKGREFAAWMGLLPKQHSTGGKARLYGISKRGNSYLRKILIHGARAVVLRSKRDRIAMGSWMSSLETRAPRNVLIVATAHKLARNAWAVLSTGQDYRAVPEALTV

SEQ ID NO: 492859 - protein, 350 aa, unidentified
MDRYIGLDAHTSSCTIATIGQSGKRLQSHVVETNAKALIEVIRAVPKDRHLCLEEGPHSNWLYEVLSPHVQEIVVALVNESRGPKNDKLDAFGLAEQLRIGAIRTKVYKKRGRFSRLGYRAKAHALLVADSVRVQSRIKALLRSRGVAVAGGDVYSTSERDEWLLKLPQPARSLAELLFLEYDGVEGLRQRAEREMILEARKHDVYRIIQSCPGIGEIRAAQLMPVVVTPFRFANKRVFWSYCGLGIVMRSSSDWVRGRDGQWIKAAVQQTRGLNRNFNRVLKAVFKGAATTVIGRAQAEPLYRHYVSLLDGGTKPNLAKLTIARQIAAIVLALWRSKEVYDPKKLGHAT

SEQ ID NO: 492860 - protein, 333 aa, unidentified
MKKIIHFIGIDVSKDTFDLALIKNNDPGQIMQKLFSNNITGFKNLTVWMKQQMICYEDTVFCIEHTGYYSKPLAKFIQARKGNLWMEMSLKIIRSLGIIGGKNDKIDARRIAQFAQRNQQDYKPYNPPRIIIEKLKVLLMLRQKLINNRTSIVVPVNELEFTDKQAGKEALRIASPYLKAIKKNIIGIDKKIEDLIAADKSLTKQYNLVCSVPGIGKITFCYLTYFTNEFQNYSQPKQLACYCGVVPFEYTSGKSVKGKPKVHNMANKSMKKLLHLAALSAINYYPEFKEYYQRKVNEGKNKMLVLNNIRNKLIIRVAAVIKNNQPYKINMTA

SEQ ID NO: 492861 - protein, 355 aa, unidentified
MSEAKYIGMDVHQATISVAIMDAGGKLIMECLLETKASTIVGFIQGLQGTLSLTFEEGTSAAWLHDLLKPHVIRLVVCDPRKAALLKDGNKSDRIDARKLAELLRTNQLKPVYHGEHGVRTLKEVGRSYLTLTQDVTRVMNRIKAVYRSWAIPCSGTTVYAPRHRAEWLAKIGEPGVRIRAQRLDQQLDGLQPVRLEARRELLLESHKHPAVKLLRQIPSIGPIRAALLVALLQTPHRFRTKRQLWAYSGFAVETHDSGEYRYVRGKLQRNRERITVRGLSANYNKDLKNLFKGAAISASTRPGPLRDFYVALIAKGMRPTMARLTLARKMVTITLTICKKGVDFDAKQLDQQAA

SEQ ID NO: 492862 - protein, 362 aa, unidentified
MNRNTGMSAGQIIGTMNGLQVMGLDIAKHVFQLHTVDMGTGEIANVQIKRAKVLEYFVNKPKSLIAIEACGGAHHWARELTALGHSVRLLHAKIVRPFVSGNKTDATDARAIWLAVQQPGVKFVGIKTAAQQATLTLHRQRELLMKMRTMQTNALRGLLYEFGATFAQGRKALFKDIERALEELSTQLPQMVRDSLREQVGRIKEMGDAMLEIEKRLALQLKADPHMQRIAQIPGVGLLTATAAIATMGEASAFKSGREFCAWLGLVPSQTGTGGKVRLGGISKRGDTYVRTLLIHGARSVLSHAKEPSPWLQQIKERRPANVVIVAQAAKMARTIWAVTAKEQSYQRGFQSLRPSAAMHAA

SEQ ID NO: 492863 - protein, 320 aa, unidentified
MNTDDRSIIVAGIDVSKATLDSAVLPSKEARSCSNDHAGVQKLMAWFKEQQVELVVLEATGGYENLVAAELAGAGLAVAIVNPKQVRDFAKGVGILAKTDAIDALVLARFGQVVRPPARPLDTVEQAFLGQLVTRRCQLIEMRTAESNRLGTVAGKKVRQSIEVVIALLSKQVDQLEKLIDEEIRKSPMWKAKDELYQSVPGIGPVVSRTLIAELPELGSLTRRQITALVGLAPYNDDSGKRRGRKAIRGGRGSVRRCLYLSCMALRRYPEKFGLITALFERLIKSGYKPNEALVACMRKLLHILNAIARTNKPFDPKMA

SEQ ID NO: 492864 - protein, 413 aa, unidentified
MTTNSQTEGNISHTTLHMALELSATKWKLGFADQIGRKPRVRSLDAGDFNQLRKEIAAAKKSFGLDSDAPVISCYEAGRDGFWIHRCLVSMDIESHIVEPASIEVNRKKRRAKTDRIDAQKIVIALMRWKAGDRFACRMIRVPNAEAEDARNLNREMRTIKNERTAHSNRIKSLLVTQGLTDMVIDRSFPDRLQRMRAAEGRPLGQQLRERLLREFERLALATEQIRHLQMQQAQMIRAAAKEIEKSESERRSPRAAVIAEHLTTLAGIGPVTSWTLSTEIFSWRDIANRRQLAALVGLTPTPHASGNEEKEQGISKSGRGELRVLMIEVAWGWLIHQPGSKLTKWYEMRFNDGTKRNRKIGIVALARKLLVALGKYVRDGEIPAGARLKSELKFTYQQSLKLPPTPPVDVAV

SEQ ID NO: 492865 - protein, 343 aa, unidentified
MKEISIIGVDLAKNVFQLHGAAADGTVLFRKKLSRPQFQRFMAEHPQCIVVMEACGGAHHWARELVRVGHEVKLIAPRYVKPFIKRQKNDAADAEAIVEAALRPTMRYVDPKTGEQQARAILFRTREQFVKQRTEAVNALRSHLYEFGFTAPEGIGYLPRLGAVLEDPSSHLPPLAREICRELLEQIANLSGRINAMKKRLDAITREGETSRRLQTMPGVGPISALAVETFAPPMEQFKRGRDFAAWLGLVPRQASTGGKQRLGKTSKMGQRDIRRLLVTGAMAVIRWALRRGAPGNPWLARLLERKPPMVAAFALANKMARGIWAMMTRGEYYRGPEIGSAA

SEQ ID NO: 492866 - protein, 389 aa, unidentified
MICVGIDVAKDKHDCVILNSEGKVLAGVFTIPNNADGFDTLLQKIHGCTSPDDKIKVGLEATGHYSYNILGFLLNQGLPTYVINPLHTKSMSLRKTKTDRVDAKTIAAMLMSNVDLKSYTDTAYHNEELKSLTRYRFDKVQERAQLKQSVSRLVTILFPELEKLVPTLHMSSVYALLIEFPGAKQIAEAHLTHLKSLLKDASKGRYGRDMATEIRDAAKRSIGSVMPAKSLELRHTIRLIRELDSEIKDIEAAIEAIMEELQSPITTIPGMGFRMAAMILAEIGDFSFFDSPDKILAYAGMSPSTYQSGHLSLAGTYSHMEKRGSRYLRYALYNATKYVCHWDPGFAAYLAKKRAEGKHYNVALSHAAKKLVRLIYALEKSRQPYRRAA

SEQ ID NO: 492867 - protein, 335 aa, unidentified
MNHVAIDLGSKQSQICIRRPGGTVVVERRIATCTVPDYLQNQPPSRIIVETCAEAFFVADAARAAGHDVRVVPASLAKSLGVGARRTKRDRTDAQNLSEASCRMDLPSVHVPSQASRARKTLCGMREQLVGCRTALINSVRGWLRMQARAPRRGDSVTFARRVRELGDRPSYVERQLSAIEELNEHITEADQELAEIAKKDSICQRLMTVPGVGPVTAVRFCAALDERERFASAHLVESYLGLVPGEYSSGERQQRLSLTKAGPAALRWVLVQAAWCARVWRKNDPMVRWSYEVERRRGKRIAVVALARKLAGILYAVWRDGSTYDPLRGAKAEL

SEQ ID NO: 492868 - protein, 315 aa, unidentified
MNKSPVYVGIDVSTTTLDVAVVPDIRHWQVSNDPDGIEILVKHIVALRPAGVVMEATGGIEMPVAVALYEANVFAALVNPRQVRDFARSLGILAKTDKLDATIIAKFAEAIKPEPRSLPNASTQELKALVARRRQLVEMLTMERNRLHTAMPQLRARIQLNVEWLLKQIEEVDNDISNSIQASPLWRAKDSLLQSVPGVGPVLSRTILAELPELGQLNSKQVAALVGVAPFNRDSGTLRGKRSIWGGRAHLRNMVYMGALVATRFNPVIKPFYQRLIDAGKAKKVALVACMRKLLVILNAMLKHGTLWTYSESKI

SEQ ID NO: 492869 - protein, 315 aa, unidentified
MEAMIERCAGLDVHQETVVACVLFGPLEKKPKTSIETFSTTTTGLLALSDWLATLQVSDVVMESTGVYWKPIWNILEGSFHLVLANARHVKNVPGRKTDVKDAEWLAKLLRCGLIESNFVPPEDIRDLRDLTRYRKKLIHHRTSEQNRIHKILQDANIKLTSVLSDIFGVSGRRILEAILNGEKIETDGLRKMVDWRTKASITDIANAINGRIRRHHRDMLRYHWEHMGYLEETIEELEKQIDQLLSPYRKEVELLDGIPGVNKAAAATFIAEMGVDMSVFKSAKHLASWAGVSPGNYESAGKKKRVKPHKEIKL

SEQ ID NO: 492870 - protein, 423 aa, unidentified
MLKLQYPICCGVDVHKNLIVATIVTTDSKGVSEYEQKPFSTINSDIQKFHDWLIENNCYHVCMESTGKYWIPIFNYLETDIDVCLTHPKYVKAIKGKKTDKKDSRWIADLYKFDLVRSSFIPPKDFRQLRELARYRFKLVCMNSSEKNRIQNCMTVSNVGIGSVFSDPFGKTATEIMSYLLENTADTINDKAVRKLIRKNTKANSDEIFAAISGYQIESDQAKKLELARAHLKYLEGMITQTEVELYVRIKPYWGFVELIAALPGMSEISATIILAEIGVNMDVFDDAKHLCSWCGLSPSNNESAGKKKSVRIAKAGAYLKPLMVQCALAAVKSKKEPYFAIKYGRIKKRRSHKKAIIATARMMMVCIYHMISEQAPFNPTDYTELMDPYFNQPKVVLNDKNVFDYLKSQGYDPSLLVKSNDK

SEQ ID NO: 492871 - protein, 465 aa, unidentified
MTVGKKFWRNRKERKEWARRLQSEDPGLEVVHPHAAGIDVGNSAHYVAVPPNRDQRPVRRFECFTADLHRMADWLQSCGVKTVAMQSTGVYWIPLYEILEERGFEVYLVNARHTKNLPGRKSDVQESQWLLKLHTYGLLNNSFQPVSEIRVLRTYWRQRAEHVRGVATCIQRMQKALTQMNVQLANVISDISGLTGQAIVRAIVAGERDTRKLAALSHPRIQASQEEIAKSLEGNWRPELVFVLQQEVDMYDTYQKRIVECDQQLQKQLGSLTGVTPPGIGQTQKLKSKPPAAKNAPRFDLGSELQRATGVDLTRIDGIDVMVAQTLVSEVGLDMSRWKTESHFASWLGLCPDNRITGDKVVRRGTRRVVNRAATALRQAANALLRSRSYLGAQYRRFRTKLGAPKAVTAMAHRLARLVYRMLKYGQAYVDKGTEYYEERFRQQQIQLLRKRAAKLGLQLAEIPA

SEQ ID NO: 492872 - protein, 403 aa, unidentified
MTMRRRAWVGIDVGKTSHHACAIDETGKVVWNQKVSNEQRAIEQLVTRACKGAEQVQWAIDLTSPMALMLITVLLCAEQSVVYVPGRTVNTMTHAFRGEGKTDAKDARVIAETARLRNDLSNVVLPDELVVELTQLTGYRADLMADWVRGINRLRALLGSIFPGLEAAFDYSTRTPLILVSGLCTPAEIRAAGIDGMTAFLVDNHAWPTGIVKSAATAAALANEQPLALPGEAGTAALVKRLACRLLELDREIKDIDKTITARFRDHPYARIIESLPGFGPGLGAEFLVVTRGDPASFATAGRLASYAGLVPVPKDSGRITGNLRRPKRYNRRLRRVFYLAALSSLRADGPSRRFYDRKRAERLIHTQALLALARRLIDVLWALLRDDREFTPEKPITATAAA

SEQ ID NO: 492873 - protein, 471 aa, unidentified
MIRSVGIDLHQGQHRARCLDERAQPCDSFSFQTTPEGLTTLEEHVFRDGSNPIIVLEPAGLPWLMVAVYLRSRHPDCQLVKAKTQKVAALRRYLRGPVKSDRIDALTLAKMSFIDPEQMDDIYLPLAEIHALQRLTRQRKRIEQDITGRKVRISAIVDGYLPGVRRTFNDAWSSPIRAFLRSRLNPFIVVRDGEDALHAFLSKNSYHSKWSKAQTRLVFLACQSVAAVCKLSEPAGTVNEEFFMNLQDEIARELRMLEADEVESEALAHRIAEIYQKLHHSDNLRTIPGVGEHTAPIFLATVGDPARFHNQSAFANWEGVVPGARQSSNAEAKGLRMTKAGPSIMRMALYQAGDIGRRWDPQLAAVYYREMVYHGKNHRQAMGAVMSHLGARVLTVLKVDRPYELRDIEGNPISKEHARKLILSKYHVSEDIRRERRRRNSKISKARETATYRTNEAAKAPQPVKVEAVSH

SEQ ID NO: 492874 - protein, 457 aa, unidentified
MGRHKSKNKGRDTMSVVHPNAAAIDVGATMHMAAVNADRTPEPVRSFGTFTTDLHRLVDWFAECGVDTVVMESTSVYWIPIFELLDARGFAVFLVNARDAKHVPGRKTDVSDAQWLQRLHSFGLLRASFRPKGQIAELRAYLRQRERLLEYGASHIQHMQKALTEMNVQLHHVVTDITGVTGLRIIRAILAGERNPAVLARMRDRRCHASVEMIEKALAGNYRAEHLFALEQALALYDTYQQKAFACDARIEAVLKELSVPRGREGGQLPAPRQNRSHQQNAMLFDVRAALFALLGKDVTQIDGLGPYLALKLIAECGDDLSAWPSAKHFTSWLCLAPSNKISGGKVLSARTRRSGNRAAALLRLAAATVGRTDTALGAFYRRLSARIGKAKAVTATARKIAVLFYNAVQHGMDYVDPGASSYETRYRARVIANLHRRAKAFGFVLQPIDPPPSAVS

SEQ ID NO: 492875 - protein, 398 aa, unidentified
MDLPVYYELETNNGNRDYRIQIGGHYMNYNTVYVGMDVHKESFTLCSCKYEDEKASHYQRTPASYKNVLRYLAFLRTIYGEDTRFVCGYEAGCLGYSLYHQLENFNVECVILAPTTMLEQRSKRRIKTDKRDAEIIARSLAQHNYSPVHIPTETDNQTKEFIRMRDDHKAELKKIKQQILSFCLRQGYQYDGSGNWTAKHVKWLRSLKPAGLYKEILDEYLLTYTILIDKLNRLDQRIEELASKEEYKESVSKLTCFLGIKIHTALSVIVEVGDFQRFVSARKFAGYLGLVPGQHSSGDDRNGLGITKAGNTHVRRLLVESAQSYTRGKIGYKSRVLRSRQAGNSPQVINYADRANERLRRRYYKMVLKDGKKYNIAKTAIARELACFIWGMMTDNIY

SEQ ID NO: 492876 - protein, 338 aa, unidentified
MVLYAGIDLHSTNSVVVAVDENGKVVGRARLKNRLDVIVAWLEPYRDALAGVVVESTYNWYWLVDGLKEQGYTMHLANTVAIRQYEGMKHRDDVSDARWLADMLRLGHLPEGYIYPRKERAIRDLLRKRAQLVRQNTRNLLSIQNLFSRNTGTSINSNEAKRLTPDAVDEVFEDPNVALAVKSNVAVMDCLREQISIVEDSVYGQVRLRKPFRRLTSVPGIGKILALTIMLETGDIDRFDDVGHYVSYGRLVGSSYVSNGKRKGSGNTKNGNAFVCWAFIEAANFAIRFDRTIQRFYERKKSRTKRIVALKAVAHKLARACYHMIKGDTEFEVTRAFV

SEQ ID NO: 492877 - protein, 483 aa, unidentified
MKRKSIFRNNSQKLDTAFIEAGLPEKVLLVPLDFAKLTHYACFCDGRGRYIRNAFTVKNNRAGIDYLIEQIEKTRKARSIRSKQHVIIGGEDSASYTCNFMDQLFERGYLTVRLSAKEVHQQAESLDSSTDKTALRAIAKTMLNRDARQASGSDPYKELRGLTRQRRRIVHLSTAVKNRIHTHVDRLFPGFLSKDSAVAPFSKASLQLMEKAFSAAAISRKSERVLTRLLSGQGVREPALAAQRLKEQADRAICAHDSSTRLSGQLITGELSLYQSLQSTLCDLDRECARILAQLPEAFVLSMRGIGITLCASIFAETGSLARIQHCDQINAYAGIVPKVKQTGGPEAPARIGGKRRSFNRVLKDYTLQAGNHLYLHGPKELMEDAARRKLQGKAVDTAMARRFLRIARALTKGHCIYLPASLRTDQNETDREERAQYILQTWPDLLLKWKRLGLQHEAFAPETPLGQWREIVQQIYDIELPL

SEQ ID NO: 492878 - protein, 338 aa, unidentified
MEVYARLDLHSTNTYVAMIDGENKVLYKQRHRNDVPAILSALDPFKKDIQGVVVESTYNWYWLVDSLMDAGYRVHLANVSAIKQYEGLKQIDDKRSSLWLANLLRLNILPTGYIYPKQDRPTRDLLRKRLQLVRNRTSHVVSVKNIIARNLGVRMKANDIKNLKSSEVRALFPDKETRLMVMSSVDLIQHCQEKIDEIEGLIAKKFKMKKEFANLLTIPGVGLILGFTIMLEVGDINRFPTVGDYSSYCRCIRSIRTSNGKVTGYGNSKNGNKYLAWAYLEAAHSARVHYETVRSYYERKRASTNKIVAIKTVSHKLARASYYVMRDGVDYDEARMFA

SEQ ID NO: 492879 - protein, 416 aa, unidentified
MDAIVERCAGLDVHLDTVVACVLYGKLDIKPKKEVKTFSTTTKGLLELLDFINQKECTHVAMESTGIYWKPVWNILESGAFDLIVANAKKIKNVPGRKTDVKDAELIASLLRCGLIEKSFVPPERIRDLRDLTRLRKELLGEVNRNKNRIHKVLQDANIKISSVLSDVFGETGKSILNQIIGNQCITEEFIYSLYEGRGKSKLKSTPMEMYEALNGKIRGHHVILLGMHNSNIVFLEKQINELEKEIDILLQKERDSLELLETIPGISKISASSIIAEIGTSMDVFKTEKHISSWAGLCPKNNESAGKKKRSGIKSGNNWLRSMLCECAWSATKKKDSRFKNKYWSMVPRMGRKKALIAIANMMLRLIYHLLKTKSTYKELEIQYFIDKDKRREDRIIKELKSKGYLVEKDSLQMA

SEQ ID NO: 492880 - protein, 349 aa, unidentified
MATACSVTLGVDTHKDLHVAVALDQVGRRLGVASFGTDDAHHPRLWAWASDFGPITQAGVEGTGSFGYRLAQFLTGSGVQVFEVNRPNRITRRRRGKSDPVDAEAAARAVLAGDATATPKNRSGPAGQLRALLVARRSAIKARTQTEQQLRSLILELDDAKRAQVDRRRIVELTSACAALAGTDGTSMALRALARRWQHLDQEIRDNDQDVTTIVKRVVPGLLARPGIGPVCAAQLLVTAGDNPDRLHSQAAFAALCGVSPVEHSSGKTQRHRLNRGGDRAANSALWIIANNRLMHHPQTRAYAARRTATGASRKEILRLLKRYIARQAFAEIRHALSPPDTLPDNSLT

SEQ ID NO: 492881 - protein, 396 aa, unidentified
MNTLNNQSFTAFVGIDWADRKHDVCIQAANSERREFAVIPHKVELLNEWAQSLHQRYGSPIAVAVELSKGPIVYALQKYDFFVIYPINPSTLAKYRQAFTPSGAKDDPTDAEFAIDLILRHPDHFKPLQPQSVEMRTLASLVEQRRSLVNDKIRITNRLRSTLKQYYPQTLDWFDHIDTLLFCDFITRWPTLKQVKRARKNTLKTFFYQHNMRFEQVLEDRLTSIKSASPLTLDDAVIIPHRLQALVFIEQLRVTLRGIKLFDEEIDQLARKHADYSLFSSLPGAGPSLAPRLLVAFGEQRNRYKNAADLQKYSGVAPVTERSGKKHWVHWRWQCPTFLRQTFVEWAAQTINKSYWAGEYYRQQPCQRMYLSGSCTWLGVQMDSYSLFVLADEHAL

SEQ ID NO: 492882 - protein, 341 aa, unidentified
MEPTVVGVDIAKRVFQLHWIAADTGEVFDRQLHRSDFLEHFANREPCLIGMEACGGSQHWARRLTELGHQVKLMPGKLVKAFVTGNKNDVADARAIWAAARHPGVKAVPVKTEAQQAVLALHRIRPQLVIFRRSQSNCLRGLLGEYGEVMGVGRAAMNRAMPDLLLRLELRLPQVLIDSLREQWQRLVDIDKQITLIEQRLRAWLHENPACRTIAEIPGVGFLTATAAVAAMGDPKAFRSGREFAAWLGLVPAQFGTGGKVRLLGISKRGDRYLRTLMIHGARSVMKHAKDPGSWAVQLSMRRPLNVVVVALANKIARTIWALLAHGRSYCESYPPPVNAA

SEQ ID NO: 492883 - protein, 367 aa, unidentified
MENVIMVGCAAHSENLLLMCALGKGAADKVEYSNTKAGRKALIAHLKSQATREGATRIVMAYEASSLGFGLYDELKEAGIECHVLAPTKMESSPQQRKTKTDERDAKKILEIIRGHILAGNEMPSVWVPDPETRDDREVVRARLDVADKLSAVKIQIQSLLKRNSLRRPEKLKSAWTQKHVAWLEGLTHNDSGLGFGTVEALKTLLHQKTALEMEVAQLDEALIALSETLRYAEPVRALLKEYGVGLMAALVFLAELGDLSRFSNRREIGAYLGVVPSSYESGENSDKKGHITRQGPGRIRKVLCQSAWAIIRGGNAEERSAYARVVGRNPKHKKIGVVALMRRLGIRMWHIGLEAQKKSRCFKVAA

SEQ ID NO: 492884 - protein, 430 aa, unidentified
MGLIAPTTIRPEREDQPLPYEWFVGIDWGSQQHQVCVLDRDRRRVGERAVDHDGASLARLADWLWGMAVGQPQRVAVAIEVPRGAIVEGLLERGFHLFALNPKQLDRFRDRHSVAGAKDDRRDAFVLADAVHTDRPSFRRLQLDAPPFLLLRELSRAEETLLEEFRRSANRLRDQLHRFYPQMLQLCSAADAPWLWDLLDLAPTPAHAALLSAEQVQRVLKAHRLRRITAPEALACLQAPALPVAPGATEAAQAHCGFLLPCLRVLAEQLRACGQQVDALLRTMADEPGAGERPSDVAIVLSLPGVGRKITAWLLAEAAQPLAARDYQVLRTHSGVAPVTKQSGKRRLVVMRRGCNPRLRHALYHMARVAMQRDTHFSSVYTALRAKGQRHGQALRAISDRLLRILVAMLRNGTCYDASRIRRESAVQMG

SEQ ID NO: 492885 - protein, 400 aa, unidentified
MRVVFGIDVSKASSEVAILVNGEKVHNYTMSNDAIGFSRLLGDLKTVHKPEIIFEATGVYSRRLQAFLDEHGYAYTRLNPLEAKKQLDSLRVRKTNQIDAEKLAQSQFVLNRKPTYVQEEVYQNLRDLSRFYQNLTEDIVRAKNRLHKVLQVTFPELENILSTPTGEQYWNLVITFPCKDFVLDLSKNELSKSIRQSTSKRISDKRVAYLAEKLTALANQSYCAVKKTSPILEEVHYYAKELLRLSEQRQAVLDQMVELAQPLPEYDILLSIPGIAETTATSIIGELGDIRRFQSANQINAFIGIDLRHYESGNFLAKEHITKRGNPYARKILFKCIHNIASVSHTNPCHIADFYEKRKRQSQTTSTKPHTIASIHRLIRTMYYLIMHNKLYDYASTQNR

SEQ ID NO: 492886 - protein, 377 aa, unidentified
MKAPSTRPAAVLGLDVGKSSHWACLIDRDGEVLASAPVRNREAELDALFASAPAGTLVVVDQFRNIGSLAVRRARAAGLVVAHLPGLAASRAAGLFAGEAKTDERDAAVIARTALGVPDSLSGVPGRGEALEAARALSSQRDHVVACATRDKNRLRAVLLESCPALEAAVDLSDRRWLELLAGFGGAWGIARSGAEGPRAEAAGEAAAASTAPPPALVEAENRQVRFLAARISEALDEAGALEAETAALLEGDETYACLLTVPGIGPRTAAQLAVSVDIGRFPDHDHLASYCGIAPRVRSSGTSVRSVRASRRGDARLKSLLIFSCNSLVRSSGRYGEYYRACRARGMGHGRALKAVARKRLRAIYAVMRDRVPYRE

SEQ ID NO: 492887 - protein, 346 aa, unidentified
MKQVCRIGLDIAKNKFQVHGVDKNGKDVFNKQLNRKNVLRFFANLSVCKVGLEACGGAHYWAREIEKLGHSVGLISPRQVKPFVINNKTDAADARAICEVVGRPSTRFVTVKTIEQQDLSAWHTIRERVIKNRTALANQIRGLLSEYGIVFPKGMNNLRKHLPEIIEDRDNVLSITARDFFSDLYLELHDADERVDQLDLKIKTMAKTHELCKRIMKIPGIGPITSTALVAHIGDGKHFKNGRSLAAYLGLTPKEYSSGGKHKRLGITKRGNVYLRKLLVQGARNVHRAWVNAVHTASDPRKTWIKGVSERRGKFMASVALANKTARIVWAVLARGEEYTPALAHG

SEQ ID NO: 492888 - protein, 411 aa, unidentified
MEAAVITAVGIDVSKSKSTVAVRRPGGEIVLRPCEIHHTNSDLKKLASTLKKLGGDIRIVMEHTSTYWRPIALTLKEAGFFVSVVNAMLIHDFSDNTIRKLKTDRADALKIANYALTFWDTLPPFNNEEETRLLLKMQSRANERITATATALRNGLIALADQTFPGVNIAFDPNTKNANGHEKWVDFFLRYWHKDCVCQYSMEAFTESYRGWCKRKNYKFRTDTAHKIYLLAQEGMATLPKCESTKMLITQACKSLNAVCEAKQSTQLEMQRLAAMLPEYEVVVQMEGAGPITGPALMAEIGDVRRFKNKKALVAFAGIDAPPFQSGAFESKSRHVSKRGSPHLRRTIFIVSNIILTRSNPENAVYCFMDKKRSEGKHYYVYTVAGSAKFLRVYYARVTEFLRSQPSSDAC

SEQ ID NO: 492889 - protein, 435 aa, unidentified
MEEVTDEPLYRDRVCGTGIGKAGVPATIRVPPDENPSRRMQETRAFGTTRRQVLALADWLRCWQVPAVVMEATGDYWKPVSCRLEAEGFECVLADARQVKNLPGRPKRDTCDSRWLAQDFERGAVRSCFVATPEFRVIRLHTRYRRDLTGERTREKQRVEKLPEPAAIKLSGVLAGLHGVSGRDIMEHLIAGERDPRALAQLARRRARAKIPRLEEALDGAGFFTGHHAALLDAMLRRIDFLDADVDRVSAVIGELLAPREEQLQQAGSMPGWRRRAAQDVLAEAGPDMTRFPTPGHLASWAGRAPLDHQSGQRKGRGKRKKGNRYIGAVTGETSVSAGRTRTREGSRYRRIARRRGKQKAQAALGSTQLKVLHKLWSNPGMRYEDPGEDYYDRQASIRRKTRYHLTELEDLGWDVDLRPRAEPSPDHQDATPAA

SEQ ID NO: 492890 - protein, 429 aa, unidentified
MNLRPIAGIDVGKFFSEMAILSPSNEVIARMKIHHDSTSDVEKAIELLKKTEKDFASRPFIVMESTGHYHKILFHSLCKAGFEVSIINPIQTDSIKNIGIRKVKNDKVDARKIALLYRFQELKTTNIPDEDIECLRSLCRQYYKLNDELTAYKNRLTAIVDQIMLNFKDVFPNIFSKAALAVLEKYPTPAHILKADRNKLISLIRNNSRRSLKWATAKYELLVSKAREFAPLSINNSSNITMLGVYISMIKTLEENIEKILKAIRSLIAEDMAKDTPVLALILELLQSIPGIGLLSAATILAEIGDFSAFSKPSKLVAYFGIDPSVMQSGEFTGTRNRMSKRGSKLLRRVLFTIALANIRTKREKTACNPVLFEFYKQKCQNKPKKVALGAVMRKIVCIIFAVLRDRKPYELRSPQEHAQRLAAKHGMA

SEQ ID NO: 492891 - protein, 320 aa, unidentified
MQCIGVDVSKQELVTYDGMKTRTFPNDRRLSGFSNYIDCAEHVVIVFEPTSTYSHRLQAFCARRDIPTCQLNPRIIPNLRKVSRKRSKTDQTDAELLYQYGMDRGRDEARAPKQVDRLGHALSAQLALYRVIQKARIAYQGLLEAWINDPSTPKTLLNRLRADIAAMKEKEADCVARAEEIVEVDEEASSTLQTLMSIPGLGPITSVTLLTFFRRYQTTNREQTVALAGLDPMQYQSGTSVHRRGRISKRGSRELRKRLYEATLSAARYNVSVRQLYQRLKEAGKPEKVARTAAARKLLLIAHAIYKTGEHYHSPINQGP

SEQ ID NO: 492892 - protein, 330 aa, unidentified
MTEVTTVGIDLAKNVFSVHGVDAGGAVVLRRSVGRTKLLELIAQFPPCLIGMEACSGAHDWARRFARLGHRVRLMAPKFVAPYRKSGKNDGNDAEAICEAVSRPSMRFVPVKSLEQQADLCLHRARQGFIEERTATINRLRGLLAEFGHVLPQRAVEVRRQVPALLEQLPSRAARCIGDLLEHVRELEAKIATFEREIEAHARHSALAQRAQARQGIGPITASAFVATVGDAKEFSNGRQFAAWLGLVPRQYSTGGKTRLGHITRRGDGYLRMLLVMGARSVLQRASRERDPLSRWALAVRERRGYHRACVAIAAKNARVLWALLSKAPT

SEQ ID NO: 492893 - protein, 466 aa, unidentified
MKHNRRRSPGKPRVSPTVLDRLNPNVAGIDCGSAEHFVAVPPDRDPTPVRSFTTFTTDLMRLADWLMACRVTSVAMEATGVYWIPIYEILEARGIEVLLVNARHLKNVPGRKSDVSDCEWIRELHSVGLLRGSFRPTDAIVALRAYLRHRQTLIESAGTYIQRMQKALVQMNVQLPLVVSDITGVTGLRILRDIVAGHREPHRLAEHRDHRCRASKTEIIAALTGNYRAEHLFALQQNLELFDACQAQLEACDRVIDAHVQTLTVRRPPAATPLPPPRVTKKPRDNEPRFEIRARLHQLTGGVDLTQIDGIAPYTALKLIAEIGTDMSRWPTEKHFTSWLTLAPKNKISGGRLLSSRTQPSANRAAAILRMTVMSLNRTQTALGAFYRRLAARIGKPQALTATARKLAILVYRALNGQLVYQDPGADAYDLQQRTRILRHLRQPAARLGFELVNRESGEILPPGVS

SEQ ID NO: 492894 - protein, 342 aa, unidentified
MSVYVGIDVHRKRSQVAVINQDGQVLANRNVPNGAEPILKVIGGLPPGTPAAFEAAYGTSWLVGLLEDYGFAPHLVHPSRCKAIASARLKNDKVDAAILGQLLRADLLPEAWIAPAPVRQLRALLRHRVALVRLRTRLRNRIHAIVADYGYDRPGGGYWTGPGRAWLASLELPAVSRELVEDYLGVIDALQQRIDRLDWEIRQRARADPRVKVLTQLPGVGPFTALVILAEVGDISRFGSARQLASWAGLTPTVRGSDRVAHYGHISKEGSVWLRWVLCEAAQTAKRSPEFAVTFQRIAKRRGKKIATTAVARKLATRAWHLLADAGHAAAPPPAAPQTAAR

SEQ ID NO: 492895 - protein, 394 aa, unidentified
MESLTVGVDVSKESFSAAGLDGKGTRCFAQDCAMDSDGFSKFLKTILAQQPDVSAIIVGMESTGCYHINLFSYLTSQGIRAVVINPLLISNFAKLSLRKTKTDKKDALTIAQFLLAHTDKISQMSVSQDMQDMRDLAREREALSHLISATKTEIKRVLQTTFPELERLCSVYSGIMLEFLKEFPSARLIGLAKPRAIAKAMEPRGSGNRISTFTAEDVIKLAKNSVGTVSPAKETILRGKISTLLHLEDRRDELTAMLTDYCNSLMVEDLEIVTSVVGIGNGTGTTFLAELGKIDSYETHKHLIAYAGIDPTVYQSGKFEGKSRISKRGNRHLRRVLWLMTVNVILNNDNFRAYYQKKKQAGLPYKKAVMATMHKLARMLFAMLSHKQRYLAHL

SEQ ID NO: 492896 - protein, 352 aa, unidentified
MIYVAVDIGKRRCVTCVMNQDGSILDTGSYPNTAFDASHYARQTVEKYGECKAVVESTGNMCMKTYEAFESNGVEVKLANPVKTRAIAEARVKTDKLDSKILAHLLRADLIAECYVPSKDVRLARALLSHRVNITREQTRIKNRIHSLLDKYDLECEYDDIFGAHGMRWLHTLHLNGHDHEILQSLLRQLEFQQDEEAKANSTIAKDALHSQYVPIIMSMTGFDYYGASVLAAYIADISRFPSPSHLVSWVGLCPSVYQTGESLYMGRMKGGNRKVRWVMTEAANTAIRSDPRMRAYYERKIRRHHHNVAVTHVANKMLRIIWHMLRENRLYNERKERLYQSKLKRMTHTAQ

SEQ ID NO: 492897 - protein, 318 aa, unidentified
MSAAENSKVSVGIDVSKNKLDIAVHESGAVWSSNNDSRDCPALAVKLKQLQATSIVLEATGGCETLVTAILAAAGLPVIVVNPRQVRDFAKATGQLAKTDRLDCCVLAHFAAAINPPVRPVKTEETQHLEALLGRRRQIVEMLTAEKNRLASNHDRAVSKDLQAHIAWLEQRLKSSDDELQRVLKNSPAWRERDQLLRSVPGVGPVLALTLLAQLPELGQLNRREIAKLVGVAPFNWDSGLWRGSRHIWGGRAEVRSTLFMATLSAIRFNPTIKPFYKRLIRAGKAPKVAIVACMRKLLTILNVMLKTQTSWRTVHSS

SEQ ID NO: 492898 - protein, 358 aa, unidentified
MRIIGCDLHARQQTIAMLDSDTGELEEKTLEHEGDTVREFYSALPGPILVGIEATGSMQWFLEMMEELGIECRVGHPAKIRKAETRKQKHDRRDARLLLTLLAENRFPTIWMPSTEQRDLRTLLRHRHQWVRLRSRVQHTLQSMALNHGLRRGHSLWSRAGQHALRALPLAPHAGERRKALMTLYPCLQESIDELDRQVSQQVDRHPPARRLMTHPGVGPITALATEVFLGDPLRFIDGKAVASYIGMIPSEHSSGGRQRLGAMSKQGNTLLRYLWCEAAMHAVERDPELKRFYRRKLVQKGLGKARVAAARKLGIRLWIMLRDQIDYQEFCRRGKARQESGSVRAGMPAINSGPAEA

SEQ ID NO: 492899 - protein, 398 aa, unidentified
MLGAKRKVVMKPFEVPHTVDGFASLAEKLNGLDGEVRIVMEHTGRYYESFAMSMYRAGFFVSAVNPLAIRDYQEGISVRKVKTDKADALKIAQFAIDKWEILPQYTPMDTIRYNLKTLHRQFQLSSKTRTALNNNLIALLEQNYPGANRYFDSPVRPDGTQKWVDFVDTFWHVDCVAGVSQNAFVERYRKWCKRHGYHFSEQKAIEIHTDARRKFPLAPKTDTCKLLVKEAVAQLNAISRTVETYRTEMNRLAAQLPEYDTVMAMTGVGKSMGPQLMAEIGDLRCFAHSKSLVGFAGTDPIKDDSGDKISGSNRSSKRGSPYLRKTLFVIMTILLQLQPQDDPVYQFLDKKRSEGKKYYVYMTAGMTKFLRIYYGRVRDCLKEKGLWDNPASQEVNPG

SEQ ID NO: 492900 - protein, 460 aa, unidentified
MFEETRKMMELFEKVGSKKVLIAGIDVSKNKFTIAAVNGMYESKIKAKDINLNKNSLDKLYKEIDSLIEKDGIKQLIFGCEPSGIYYKPIVKEFVRKYPGAMFKLINPSSTKANRDQRMEREKTDPIDAYAIVDLLIRGESYDLELEDNTFSIIKEYVRELDHLVKELVRFKNKVHAHTDELYPGLESQSNSFLASKYGKRFLKLLPKPETLTSLNPEDWQKMLSTQEYKLPKYLAVRLSDRSKSVVTGECQHFDTLKEYIIFLVEGYEQLEKRKNQIEEKLEKLIDSLDFGDNLKEIDGIETLTVARIIAYMGNPYRFKSGKEVASFAGLIPKSNQSGKMDKGKILSKKGHKKLRTTLVQAAQHVITSTGYFTAYYNRLVLENRKDPMIAIVATANKLIRVIMKMIQTGEKFNPPTAKDKALAKGRLNRLTSKELLDLSKRKRSESLTQDIKELYPIRV

SEQ ID NO: 492901 - protein, 517 aa, unidentified
MATIQRRGSSVRRKTMASVGKPRGVLHPRVQLVGAEHFGIVCFDCAKVRSKFLLADFFGRVLIPPTIVEHQRPDLDAAVALVREAFQTHQLHDGVVAIERTGRYHRVVQRAFAGAGLETRIIHPFVTKQYRQPVDPGNKTDDTDLAAIHRATVTGCALLETTRDEAWTTLQLVIRHRRDLVVKGAALNCQIRDHLEAALPGFAACFDKFWESPVPWHLLRHFPVERIRATSVTALAQSLRDAGFQQRTVQTVFDWALQAAPGDIAANQHHRIALVLHEDRLRKTLEIQALEREIAELLAQTPYILLLSFPGVNVVSAADFAGEMGPIEHYANAKCITGRAGLRPSRHQSDQVDKANGPLVRNCNRSLRAAIMRIADNLIVCNHHFQHLARQWAGQRKDPRHTRVKVGLCFCRIAFQMVAGRQVFRHPAIQGRHFIIDKLNAFHRDHGTGMADVLRDLQAAIRQVPKREHAAEAKPLQDELRRIQDGRRRGPQLLRDILPIVLARLGVGAVQSKASGE

SEQ ID NO: 492902 - protein, 345 aa, unidentified
MESMYYIGLDVHKKSISYCVKSGDGCIHAEGSVPATRMDLDEWIKTLPKPWTAAMEATIFTGWIYDHLLPHARALKVAHPLMLRAIAAAKKKNDRIDANKIADCLRCDFLPECYMASTEIRERRRTLRYRNLLVRQVVQMKNKIAVLLMEAGVSYNKQKLHKAGYFRELLATNQDIDEGLRSLLGLCREMLVRLGKTESALVRSLERDPVLRQRIERLMTIPSVGPITALTWALEVGEVGRFSSIKKAISYCGLCGAEKRSADTIQRTPLSKQRNRHLQTILIEAAKLAPRNSPALAMIYDREKQKENANRATLAVARKIVAYLVAVDRRQKDFLVIENEARTAA

SEQ ID NO: 492903 - protein, 335 aa, unidentified
MSLYCGIDLHSNNQVIAVIDDNDKRLLERRVPNELCATLSALEPFREDLLAVAVESTYNWYWLVDGLLDHGYSPRLVNTAAVQQYSGLKYSDDRHDAFWLAHLMRLGILPTGYICPREIRDVRDLLRKRLGLVRERARNLTSVQNILARELGHRVATAKVRGILDGDAKFRPAVRTAIAANLAVIETLDTVISGIQDQALEVIKPTSRHQRLKTISGVGDVLAPTIMLETGEIERFKSVGNYSSYCRVVDSRRESNERKKGEGNKKCGNRYLAWAFSEAAHFAVRYNDRARRFFDRKAARRNRMVAIRAVAHKLARAAYFIQRDRVAFDAARLFG

SEQ ID NO: 492904 - protein, 343 aa, unidentified
MDHFAGLDVSVKETSVCIVDDVGKIVREVKVTSEPEALLAVLTNPTHHFKRIGLEAGPLSQWLYSALAEAGLPVICVETRHMRAVLKAQINKTDRNDARGIAQMMRVGLYRPVHVKTLRSQKLRMLLTHRKLLQAKAIALENDLRSTLRNFGLKVGMVGKVKFEGRIKELVENLPDLAILVEPLLIVRRVLHEQLGILHRRLLDIVRNDDVCRRLMTVPGVGPVVALTYRATVDVPARFKNSKAVGASFGLTPSRHQSGESDRPGAISRCGDEMMRMMLYEAAQVMLTRTNKWSWLKAWAMKIARHRGIKKAIVALARRLAVIMHRIWVDGTEFRWTQDVATA

SEQ ID NO: 492905 - protein, 340 aa, unidentified
MTSHVCGIDIGKTVFHLIGLSKEGKIVAKRRFTRKQLIVHTVNMPACLIGMEACPGAHYLARVLRAQGHEVKLMPAEYVRPFVKSNKNDYIDAEAIAEAVQRPTMRFVPIKSEAQLDLQALHRVRDRWMGRRTAVINQIRAFLLEHGITIAVGPAHLKRQIPSILEDADNLLSPRMRALLVELRDEWEKLEMQIEEIDREFSQAVKKEENCRRLLTIPGIGPLTATALTAAIGNATAFHKSRDLAAWLGLVPRQHSTGGKSRLLGISKRGNPYLRRLFIHGGRAVVARAKRENHTFGNWLNQLEARSPRNAVVVAMANKLARIAWAVLTRGQDYRATACP

SEQ ID NO: 492906 - protein, 470 aa, unidentified
MAMKEPEEICDDAHEQIFERVCAIDVAKDSGKVCLRLAAESGTGRRVSRVWDVAARSRAVSDLADHLAELGVQKVTVESTSDYWRIWFYLLEARGLDVQLVNARDVKNVPGRPKTDKLDSVWLAKLTEKGLLRPSFVPPKQIRVLRDYTRLRVDLTAERARHWQRLEKLLEDALIKLTAVASRIDTLSVRDMIEALIAGERDPRRLAGMARAQMRVKHADLVEALTGQFDDHHAELARLLLDQIDGLNRQIETLSDRIDALLADLPIAPGPNGGPGAAAHHHGPSSEVPDAGASPEASRPIPPPIGTARDLADLLDEIPGIGRHVAEVVIAEIGLDMSQFPTAGHLVSWAKLCPKTIQSGTRSTAGKTGKGNRYLKAVLGDAAAGAGKTKTFLGERHRRILKRRGKLKAVVATARSTLVIIWNLLGSPGTRYTDLGEDYFVNRMDKGRRVRNHVRQLEALGFEVTLAVAA

SEQ ID NO: 492907 - protein, 362 aa, unidentified
MQIIGCDLHARQQTVAMLDTLSGEVVNRTLAHEGNDVREFYSTLPGPVRVGIEATGSMKWFLQLMEELGIDCQVGHPATIRAAEPRRQKHDQRDAELLLRLLVENRFPSIWQPSKELLDLRGLLLHRHQWVRLRTRIQNALQAIALANGLRRGSSLWSESGQRAIASLPLATHTAHRRSELQAMYARFEAEIEQLNQQVLEQAGQRPTAGLLMTHPGVGPITALATDVFLGDPKRFRDGKALASYIGIIPREHSSGGRQRLGGLSKQGNPLLRFLWCEAAAHAVRRDPELQRFYRRKLVQKGLGKARVAAARKLGIRLWIMLRDQIDYQEFCRRGQMQQRSGDACAGMPGPRYGAKSHRLID

SEQ ID NO: 492908 - protein, 444 aa, unidentified
MSNRVAPRRGTPDSCVYGGRWDDFPGCLPLLHRRKEDSLIRYHVGIDVGKSKHHACVHDMMEDRYTKVFPFTVDRPGFERFLLFLRQQGPVEEVLVGVEASGPYALTIGHFLLEHGYTVVELNPFQASQFRKAQGKKAKTDRVDARSLAAFVAVGSYKPLTLGDPLWENLRELTRFRADLVKDRTCQVNRLQETLAIAFPELGAHLASLDSPTALTLLAAYPGPQALAEAGTQAVSACLIEASHGRLGSAQAQAIVSAAGTTIGLLQRQRALALKLEVLAQGILSVNMQLQRVEAAIEDLFRQLPYDKSDFPVGGVQSLASILAEIEDVNRFPTLKQFLSHFGWCPQTFQTGGFRQEHPRMSHAGNRYVRRIVWMLAIMAVNTVPAYRDYMQRRAAAGKKKMHTIVAVGRKILSVIYAVLKTGRPYTPEGGASHSSPCPALTSL

SEQ ID NO: 492909 - protein, 359 aa, unidentified
MKTQLARSGRHTIGVDLSDKRSHVCVLDAEGQIASECTITTSPTAFRKYFVAIPSALVAIEVGPHSRWTSGLMAGLGHEVLVANAGRVSLIHQSDRKNDRLDARHLAKLARVDPSLLSPITHRDGTAQAQLSVIRARDVLVRTRTALINCVRGLVKPTGLQLPSCASAYFARKMAGLIPEVLLRAITPLLEQLESLSEAILRYDHEIERIARTERPETAQLEQVTGVGTLTALAFVLTVSDPHRFAKSRQVGSYFGLRPKQNQSGESAPQLGICKAGDSYLRRLLVGSAQYILGRYGPDTDLRRWGLKLAERGGKSAKKRAVVAVARKLAVLLHRLWVTRATYEPLRNTQKATLSGAAA

SEQ ID NO: 492910 - protein, 389 aa, unidentified
MRAVFGIDVSKASSEVAILVNGEKVHGYTMSNDALGFARLLGDLRTVHKPEIIFEATGVYSRPYTRLNPLEAKKQLDSLRVRKTDQIDAEKLAQSQFVLNRKPTYVQEEVYQNLRDLSRFYQNLTEDIVRAKNRLHKVLQVTFPELENILSTPSGEQYWNLVIAFPCKDCVLELSNDELSKSIRLSTSKRISDKRVAYLAEKLIALANQSYCAVKKTSPILEEVRYYTKELLRLSEQRQAVLDEMVELAQPLPEYDILLSIPGIAETTATSIIGELGDIRRFQSANQINAFIGIDLRHYESGNFLAKEHITKRGNPYARKILFKCIHNIASANHTNPCHIADFYKKRKRQSQTTSTKPHTIASIHRLIRTMYYLITHNKLYDYTSTQNR

SEQ ID NO: 492911 - protein, 346 aa, unidentified
MDKFDPCGIEVSAQELVVALSRDERAERLRSFPNTAEGHVAVCRFLASGSQRVRVALESTGLYGLDLAYALHREAHIEVMVANPRAVRHFASALMQRSKNDRLDAVVLREFAARMPFQAWVAPSPHCLALCAVTRRLETLTEQSTAEKNRLHAASLSVAIPSVVRRDLQRSVRSIQRAIVRLTKEARRILEGDPLLASSYHLLLTAKGIGPTSALRLLAETALLSEDLDVRQWVAYAGLDPREYQSGSSVHKKVRISKTGNRHLRRALYMPALVAVRHEPHLRAFYQHLLAQGKCKMQALVAAMRKLLHAVYGMLKRRQPYDGAKLYRLVVDSHAPSSEHCSAEAA

SEQ ID NO: 492912 - protein, 398 aa, unidentified
MPCSLSQPGGKRRRSLVFLNTREEYDRLIATLAAYGCSVVCALEATGHYHRPIAWRLVEAGFEVRLISSLAMARTREALHNSWDKNDPKDAQVILHMLKIGAVQRFHDPLRAGFNDIQELSKTHEAISRAKTEIQHRILTHYLPLYFPEVERFRGNTRSDWFFAFLDAFPTPAVITALGKDGFITAAWNVVGRKVSKERLLSDIYETARTSIGLPLPRDAAAIAMFRMVIAEARSLIRQRDNIEAMADNLLKDHPDYQALRSIPGIGPIVALTIMAEAGDLRRFHHCRQFLKFCGLDLSTQQSGLYRGQTRLSKFGNARLRRSFWQAAQVAVKYKENGFRDKFERYIAKDHDNPDLRRKAMTAITAKMARVAHAIIKNGSDYRPFYEGRVPGGRTSSA

SEQ ID NO: 492913 - protein, 412 aa, unidentified
MDVMYSCCCGLDVHKKTVAACLITSTEGPEPLKEIRTFRTMTADLLALADWLQEKGCTHVAMESTGVYWRPVYNLLEGQFELLVVNAQHIKAVPGRKTDVKDAAWIAELLRHGLLRGSFIPSKPQRQLRELTRYRSTLVQEHARTLNRLQAVLEDANLKLASVVTDISGVSARAMLAAILAGERDVEALSDLARRRLRAKRDQLKEALEGRVTAHHSFLLTEHLSMLEYLDEAIARVSGEIDQRLTADQEAIALLDTIPGVGQRAAEILIAEIGTDMRRFPSAKHLASWAGMCPGNHESGGKRLHGKTRKGSRWLRQILVEIAHVASKTKNTYLAAQYRRIAARRGKKRALIAVGHTVLTIVYTMLTRKQPYQDLGAAYFDQREQHRVERRLVQRLERLGYEVALHPRALAS

SEQ ID NO: 492914 - protein, 357 aa, unidentified
MVVKPIGEHSMHFYNHTHPYYCGIDLHARLLYVCILDHEGNTCLHKPIPASATELSKVLEPYIGNIVVGVECMHCWYWVSDFCDEIGVDFILGHALYMKAIHGGKAKNDRIDSYKIACLIKGGTFPLAYTYPKELRATRDLLRRRMKIIRHGAQLKAHVVNTTSQYNLPPNSGNLKYSQNRDAVKKLFSDSAVQKNINLDVALIECYTKEVDKLEWFIEKQAKQHNPEHFHILKSISGIGRILALTIIYEIGDIKRFNSVQKFASYSRLVKCKAESAGKSYGTSGNRIGNAHLKWAFSEAAVLYLRGNEKAQKYLTKLQKRMSKAKALSALAHKLGRCVYFMLKNEVVFDETKFLKS

SEQ ID NO: 492915 - protein, 340 aa, unidentified
MTEDTIIGVDLAKNVFQLHGAAADGTVIFRKKLSRPQFHRFMAHQPGSIVVMEACGGAHYWARALGALGHQVKLISPHYVKPFVKRQKNDAADAEAIVEAAQRPSMRFVEPKSETQQASAVLFRFREKLLKQRTELINAVRSYLFEFGHVIPKGPRHLRRAAELVSDETEPLPDEVREICRDMLDEIGRKTQRIDEALKQINAKSRQQETLKRLQTMPGLGPITAVAIETFAPSMETFRRGRDFAAWLGLVPRQNSTGGKQRLGRTSKMGQRDIRRLLIIAAMSVVNWASRGHGRSTGWLAAMLARKPRMVVAVALANKMARAIWAMSVRQEAYRSPATA

SEQ ID NO: 492916 - protein, 337 aa, unidentified
MTDVHILAIDLAKRSFQICATAPGGAVLFNRTVSRAKLEAHLREQAPCIVAMEACATSHFWGRFAQALGHDVRLIPPIYVKPFVKRQKNDAADAAAIAEAAVRSNLHYVAVKSAEHQARAVAFRTHQSFVGQRTQLINALRGHLAEFGLVVAQGPANLKSVVGMIDDGAIDLPDAVRDVARLYLDQIALLTNKIEELHSKLVHSTKVDDAMRRLCTVPGVGPVTAGAIMAFAPDLRTFASGRNFAAWLGLVPRQRSTGGKTRLGSVSKMGQADIRKLLIVGAMSRIRWIVRKGVLPDNWLGHVLGRKPRMVAAVALANKMARMIWAMMTREENYRMA

SEQ ID NO: 492917 - protein, 441 aa, unidentified
MEQSTRFVGMDVHKETIVVAVTATGEVGKATAYGTFPNTGAGLEKLVKRLRQAGSGPIKFCYEAGPCGYGVHRTLTRTGEDCMVVAPSMIPRKSGERQKNDERDAASLAVLHRGGLLTAVWVPDAAHEAMRDLIRARLAAVRAARQQLSAFLLRHERVYPGNRTCWTKTHRGWLADQAFAQPAQQIVLEESVEAVRLSEQRRHRVDGHLRAQIPTWSLFPLVQNLCALRGLDMIAAAGLAAAIGDPSRFATAPHFMAYLGMVPSEHTSGPKRRIGAITKAGDVHARTLLIEAAHSYRYPARIGRHKLTAVDAVPEAVRAIAWKAQTRLCQRYRQMTAKGKPNQVVVTAIARELAGFVWSIACITSDPVVSGNVVTEAYDEGTILWNEVTIASEEVARQIQQITPDTGRPRAPRHQSLKGTARRASKTGQTRAGSVDRSRTG

SEQ ID NO: 492918 - protein, 393 aa, unidentified
MNKEKGKINRIIGLDMHPDVFAAAALENCPADVSKTLWVQDRLPTAKLEQWARKCLLSGDVLVLEASGNSFEVARRLNALGHVCLVLESAQAAKIKENFCNDDRHSAIKLARVYLSGLAKIVWQPDEQTRQLREVFFAHKAAVKDCTRLRNRIRTFLNEHCVRLPKGTPLTQPKGLERAKELGQWSALQLGLITDAFEELWRVEQRRKRLEGLMVEELLARPEWARLWRLMGVRHRVAFALMAMIGEIGRFPTAKKLVGYFGLSPRKQQSGNDAKGREKGTGGTGRGDVRALLIQSAQNAMTQKSSPLNKWGVRIMARKGCRNVAVAAVARKLTVAIWHLLKGHFTPLLELSDHLETKLLKIATLLGKIKLKEMGFQQRTDFIQHYFHRIASS

SEQ ID NO: 492919 - protein, 353 aa, unidentified
MLAELADHVIGIDPDRDWITAAVLDAKTTGVIATAKFAADNDGYDEAVEWADTHTTAGDRSWVVEGSGSYGRGLSAALSRAGEWVIEFDRPHQRPTKDGAKTDELDAVRAAREALGRHRLHTPRTHDGHREALRVHTVTRDGVVRARTAAINELKALVLTSPDGLRSELRGLTTTVLIKRCAAFRTTASRPIAEQCVRNTMRVVARRIQHFNDEIEVHDAAMKQLIDDVAPQLVAEPGVGYVTAAMFIIAWSHPGRCRSEAAYARLGGVAPVPANSGQSQDRHRLNRYGDRKLNRACHMVALVRMHHHEPTKAYIARRRAEGKTDREIRRCLKRYIARNVWRLLEHQSPKMTA

SEQ ID NO: 492920 - protein, 315 aa, unidentified
MTQKKPWIGVDVAKDSLKVHVRPTNERWETTTTMAELKKLAKKLKSMDPQGVILEATGGWERKVVAVLKQDVPVIVMNPRRIREFAKATGKLAKTDGIDAEVIAQFGEKIEPEVRPLPSPEEEEKRSLLDRRRQLSDMLTQERNRLERMPRNMRKNLQRHIDFLEKELKGLDQEIKQGMEMDPEWKAKNECLQDVMGVGPNLSLALLGAVPELGHLNRKKIAALVGVAPFNSDSGKHRGERHIFGGRRHVRNVLYMATLCATRCNPTIRSYYRHLRKAGKKFKIAIVACMRKLLIHLNSLMRQHLALVEPVMATS

SEQ ID NO: 492921 - protein, 340 aa, unidentified
MNTMTLLGIDIGKHSFHLHGQGARGHQVLRKKTNRSQLLSTLAQLPACTVVMESCGGAHWLARQIGALGHEVKLIAPQYVKPFVKGNKNDFIDAEAICEAASRPAMRFCSIKTEEQQTLSALHRVRDSLIGHRTEATNQIHGFLLEFGISLPIGVTALHRVPALLDDPQHPVPLRLKGLVMRLYYQIQQLNDEIKDIESGLKQQLEEDDAARRLQSIPGIGPITASALLADIGDASNYRSGRDFAASLGLVPKQHSTGGKTVLLGITKRGDKHIRRLLVQGARAIMQHIDKREDALGPWVRELLTRRHSNVVACALANKLARIVWAVLAKGGQYDPHPNA

SEQ ID NO: 492922 - protein, 335 aa, unidentified
MTGIHDPLRRRITIGVDTHKNAHVAVALDQVGAVIGEITIPVDRAGYDQLEQWAGGLGEQADFGVEGTGSYGAGPTSQLRRRGHRVIEVNRPNRGVRHLRGKNDMIDAEVAARAVLSGTATAVPKTADSTVEMIRQVKIAKDTAVKARSQAIFTLKTVIVTAPAELREQLDQLNDRELIEECCTLRYETMSGPGDASRYTLRALANRYHALDSEARLHDRVLATLTDRVAPAFTSLFGVGDDSAAELLLVVGDNPERIRSEAALAKLCGACPIPASSGKTSRHRLNRGGHRQANAALHRIAIVRMRFHEPAIAYVNRRTAEGKARRKYSAASKGS

SEQ ID NO: 492923 - protein, 351 aa, unidentified
MSHKTAATVAHTIGIDTGKNTLHLIGLDEKGAIVLREKLARGRIAARLANVPRCLIGIEAGMATHYVARELSALGHDVRQVPPAYAKPFRQGHKNDFRDAHAVAEAVQRPSTRCVPVKTDDQLDLQALHRVRSRLVGQRTAVINQIRGFLLEHGIAIRQGLRFLRQQLPDILAKRDDVLSPRMIRILEDLSGDWRRLDERIEHVTEEIEVLAHSSESCRQLMTAPGIGPLIASAMVAAIGNGAAFAKGRDFAAWLGLVPKQMSTGDRTILGRITKRGNRYLRTLLMQGARVILLRPANWAKHSFGLWLTAAAQRLHHNVLATALANKLARIAWTVLAEGRSYEARVETKVA

SEQ ID NO: 492924 - protein, 431 aa, unidentified
MKNRTSQRIDEITQGTLIVGVDIAKYEQWARFVDYRGIEIGKAFMFKNDRKGFESIVAKIQEICNMTTLRYPIESVIVGMEPTGHYWKPFANYAMEKEYRVVGVNTYHTKKAKELDDNSPTKSDKKDAITIARLVKDGRFFDPYLPEGIYAELRNLTNARVSIMKRSGAVKNTITAILDEYFPEITTVFKNPIKGKASRQILRGCPFPAFILAMDEGDILAEIRKAVKKTVGIKKVRELISTAKGSVGVQYGLEAAKMRLGWLLDELELKEKQLEEVEQAMEAALHKTGYAAQILGIKGIGVVTAASFLGEVGDPLRFQNARQIGNYAGYNLVEDSSGKSKSGTCISKRGRKQLRSVLYQMAFTMVGTNAEMKALYQHLITRKTNPLKKKQALVVVSKKIITVIYSLLKKQETYKPELVLGTTRKELMLAA

SEQ ID NO: 492925 - protein, 456 aa, unidentified
MTQHKRKKSPAEQQLPAQLHAVNLHAAGIDVGAEAHWVAVPVEADPQPVRAFPAHTASLHALAAWLTLCGITTVALESTGVYWIPLFELLETQGFEVILVDPGTMPKNGRPKTDVHDCQWLQRLHTLGLLSAAFRPDDPVVVLRSYLRLRLTLLADAARHIQHMQKALTQMNIKLQHVVSDITGVTGLRIIKAILNGERDPRRLATLRDQRCKENEATIAQALHGTWREEHLFALHQAVAAYEFCHQQIQEGDAKIAAQLQTFEDRSKGEILPPKARKRHRNRFSFETRPLLHRMTGVDLTKIEGIDETTALIVLGEIGLDMSRWPSEKQFTSWLGLCPRVRVSGGRVLSSRTRPTANRAAAALRLAAASLHHAKSALGAFFRRMKARLGTPKAITATAHKLARLIYAMLKHGTAYVAGSMAEYEQKYRQRVVHNLSRKARELGYELHPVLGGPPA

SEQ ID NO: 492926 - protein, 457 aa, unidentified
MSQTKRSRKSRDFSTVNPAAAAIDIGATIHVAAVGPNRDKEPVHTFRTFTDDLYRLADWFAGCGIRTVVMESTGVYWIPVFEILEQRGFEVMVVNARDAKHVPGRKTDVSDAQWLQRLHEYGLLRASFRPQAEIAGLRAYLRQRERLLDYAAAHIQHMQKAMMQMNLQLHHVVTDVTGLTGMAIIRAIVAGERDPNVLATHRDRRCHASVETVCQALVGNYREEHVFALTQALELYDVYQTKVTACDKQIEAILKRLKKNAAPPAAKLLPVRRRTRQPNAPAFDARAALHAILGVDLTQIAGIGPSVALKLVGECGTNLAAWPSAKHFTSWLALAPHNKISGGKVLSSKTRRTSNRAASLLRLAAGTVGRTDTALGAFYRRLSARVGKAKAITATARKIAVLFYNTLRHGMSYADPGATYYEDRYRQRVLHNLQRRAKSLGFALTAVPPDPIQAVVS

SEQ ID NO: 492927 - protein, 405 aa, unidentified
MGHHAGLDWGGAVHAVCVVDEAGRIVVRFDVRHDAEGIAELIARLARIAPPAEMPIAIERPSGLLVDALLEAGHPVVAIHPNVVKACRPRYRAAAGKSDPGDAYILADILRTDGHRFRPLQPCSDEIRALRALVRSRDDLVAERVALGNRLRSLLDGFWPGAAAVFAHVDSPIALAFLQRYPTPDSAARLGEKRLAAFLAQHSYCGRRSPAELLCRLRAAPAGHAGETEAEIKGELVRSLAAVLSTLVAEIAKLTARLEHAVATLPDGQIVMSFPRAGRVCAAQILAELGDIRDRFQTEQQLAAEAGVCPVTHASGKSRGVTFRWACNHRLRQAVTCFADNSRHASQWAAAVYQRARARGCDHPHAVRILARAWIRVLWRAWVDRKPYDPNTHRAFQALVEPAQG

SEQ ID NO: 492928 - protein, 348 aa, unidentified
MKHESVKNEVILGVDTHLETHVGAVIDHAGRLLGTLAVPTDTAGYLKLLAWAQSLGMLQKAGVEGTGTYGAGLARVLRDHAIEVLEVNRPDRASRRLRGKSDPTDAESAAKAVLSGIATAIPKTQSGAAEAMRTISVARRSAVKAKTQAINQLRALLVSAPQDIREKLWKVKPACARTRNLGDSVLLQTLTSTLRLLAKRWLTLAAELKELDATLDRLTSQSARRLREQFGVGPQTAAILMAVAGDNPERLRNEAALAALCGVSPLQASSGKTTRHRLNRGGDRSANNALWTIAMVRMRSEPRTRAYVDRRTKEGMSGKEIHRCLKRYISRELYPIILADLADAAGVS

SEQ ID NO: 492929 - protein, 348 aa, unidentified
MNYIGTDIHISTLDFKVVNNLGKVKMARTVKTSAPNFLDFIKSVPTPRQVIIEEGPLAAWLLEICDKNREHLVISDPKRNKWIGASGEKEDPIDAEKLAQLARGGYIKEIHHPLGQRRRFRELITAYHDTNKSIVRIKNKIKAKFLQNGIQSQGKTVYSSKQRSEWRQKLPQEPALLVIIDSLWQQLDQIQDNLETILAEAKLQAKRYPEIALIDEIPGIGFIIAATIVAILENPHRFANKRKVWAYAGFGISKKSSANKTYSEKLGKEYNRTLKCVVEEAAQAAINRETDNAFRRNYARLTIQKGIDPHHAILTVSRDIIATAWAMWKKGEHYNPEIDKQLKTDVAA

SEQ ID NO: 492930 - protein, 345 aa, unidentified
MTTTTTTTMTPNQGLRACLGIDVSKATLEVCLLQDSLTRHRYRRTFPNTRCGLQALLEWLKGHHPQPVAAVMESTGCYGELAAHLLHEAGHRVSVLNARRIQQYALSRCRHNKTDQVDAEVIARFGFTEEDLPQWLPTPLPQAQLRELLHRSDEVTSALQAERNRLEAVGRRSAIVGSLRSHIRWLEKELARLEQAMSELLKACSDLAEDCARLEAIPGIGAKTARVLAAELPRNLESSRTAAAWAGVAPRLFESGTIRKPSRIAPGGNRYLRKALYFPAIVARSCNPRFKTFADRLAERGLSKKAVICAVLHKLLRTAFAILKHKIAYDPSHQSVIHKTSQNPA

SEQ ID NO: 492931 - protein, 359 aa, unidentified
MDAQEGAVRHIVGGVDTHKDLHVAAVVDEQDRVLGTRSFASTRQGYRQMLAWMRCFGQIQRVGVESTGSYGAGLLRFLQQAGIAVLEVTTPDRQDRRRRGKNDDFDAQNAAHAAFAGIRTVTPKSRDGMIEALRVLSAGRKTAVAARRIALQMIQNTIVCAPESLREGLRRMTRMQLVRTRAAWRPDLTAYRDVEVAYRISLKSLARRYLELDDEIADLDAMIAAIVNELAPNLVARTSIGHVGAAQLLLTAGDNPERLRSEAGFAALCGVSPVPASSGKTARHRLNRGGDRAANSALHIIAIGRLRTDARTQAYVAKRIGEGHSKMEAIRCLKRYIAREVFILIKQRQREINQTRIAA

SEQ ID NO: 492932 - protein, 441 aa, unidentified
MPDTPVTAPEPVWAAFVALDWGRQKHAWVLQPAAGGQPDRGYVENTPEAIALWAADLARRCGGQPITVALEQKRGSVVNLLLPYDHLVLFPVPASVSASYRKTFVPSGAKDDPGDAGWILDLLLRHRDRLRRLEPDDANTRLLLMLVEDRRQLVEDKTRLLLRLQDCLQQYFPQLLQWFDVDTPLLADLLERWPDLQHLQRCHDGTLRTFFRQHHGSADLTGERIAAIRAAVSATHDPAVLEACSTKARHLTESIATLRHQITRLERRRDELVASHPDTHIFASFPGAGRATVPRLIAAFGTRRERYQSAFQVECDSGIAPVHIRSGKLHRVSIRHACQDFTRQTFHEFAGQTIPQCAWAKAFYQAHCHKPQQHHAAVRALAFKWIRILYRCWKDRKPYDEQLYLTSLRRRRGLLGPGLASATSVGWTTVAGFSKPSEKNS

SEQ ID NO: 492933 - protein, 393 aa, unidentified
MVCVGIDVAKDKHDCFIISSEGEILADVFTIPNNAEGFDTLLQAIRRSTRPEDKIKVGLEATGHYSYNILGFLLDKGLPTYVINPLHTNLYRKSLSLRKTKTDRVDARTIAAMLMSDVDLKSYTDTVYHNEELKSLTRYRFDKVRERAKLKQSVSRLVTILFPELEKLVSSLHSASVYALLSEFPGAKQISSTHMTHLKAVLKNASQGRYGQEMAETIRNAARSSVGSVMPAKSLELQHTIRLIRELDAEIEDIETAIQAIVDEMQSPITTIPGMGVRMGAVILAEIGDFSRFDSPDKILAYAGMSPSTYQSGQLSLSGAYSHMEKRGSRYLRYALYNATKHVCHWDPTFAAYLAKKRAEGKHYNVALSHAAKKLVRLIYALEKSRQPYSNAA

SEQ ID NO: 492934 - protein, 337 aa, unidentified
MIVIGVDVHKYSLTAVAVDELGRTFAEHSGPVNEQVVAWARSLGGERLWAVEDCRHVTRGLEQALLVEGERLVRVPPRLTAPQRRRGRVRGKSDAIDALAVARAALQEPHLDGPRAGEETLRELKLLVDHRDDLVAERRRCQQRLRWHLHELDPTLQVPLGALDRAVWLDRLTRKLARREQTTQVKIARDLLGRCRALTRSISDLERELLVRTETLAPRLLKLAGCGPLSAAKLLCEIGPIDRFRSDSQLARHAGVAPLDASSGKHQRHRLDRGGNRQLNCALHRIAVTQGRVHAPARAYLERKQKEGKSRREAIRCLKRQLARTVYTALKSEPLLT

SEQ ID NO: 492935 - protein, 349 aa, unidentified
MNIKRIGIDLAKTVFQLHGVDSREQPVLRKKLKREQMLSFFRTIDPCLIGIEACSGAHYWARELQKLGHTVKLMAPQFVKPYVKANKNDAKDAEAICEAVSRPTMRFVKIKTIAQQDLQASHRIRKELVGQRTAKVNQIRGLLAEYGIVVGQAIEVLRKALPCLLEDAENGLSADFRILLKGLQEDLLALDERVAELDKRIHTLAHTHEDAKRLLQIPGVGPLTATAIISAVGDGSQFKRGRDLAAWIGLTPRQNSSGGKEQLLGISKRGDHYLRTLLIHGGRSVLRVAGGKDDPRSRWLKGISERRHKNIAAVALANKNARIIWALLTQKTDYEQKADELSSGESVCA

SEQ ID NO: 492936 - protein, 343 aa, unidentified
MQTVTTIGLDIAKSVFQVHGVDAEGNVLIRRKLKRRSVLAFFQKLSPCLVGIEACATSHHWSRQLKRLGHTVRLMPPAYVKPYVKRQKNDAADAEAICEAVTRANMRFVETKTPEQQSCLMLHRTRQLFIRQQTSVINAIRAHMAEFGIVAPVGRKGVEQLLAIVTDASDRCVPEVARACLIALAAQLRMLKAQILEFDRRIMAWHRSNETSRRLDAVPGIGPALATALVASVPDPKAFRSGRNFSAWIGLVPKQHSSGGKDRLGNITKQGDRYLRSLFTAGALAVIRYAKINGTQHRPWLTALLARRPTKVAAIALANKIARMAWAMMAKGERYKEPVALAA

SEQ ID NO: 492937 - protein, 355 aa, unidentified
MDNRKYIGMDVHKEAIAIAVLNAAGKLVMESIIETKANTIVEFLKGLRGELHLTFEEGTWASWLYDLLPPHVKRVVVCNPRRNALLKEGSKSDRVDARKLAELLYTKMLRPVYHRDNGMRAVKELGRSYVTISKDQARVMTRVKALYRSWGIACSGKQIYTVRHRASWLGKIKEPSVRRRAEFYYQQLDGLRSVRRQVRRELLLESGKHKASKLLRQIPSIGPIRAALLLALVQTPHRFRTKRQLWTYSGFGIETHDSAEYRYVAGQLERSKKPQQVRGLNRNYNHDLKNLFKSAATNAVAKSGPLQEFYLALVKRGIRPEMARLTVARKIAAITLAIWKKGVSFDAEHLKQQTA

SEQ ID NO: 492938 - protein, 389 aa, unidentified
MSQSFDASKSLTTLEQDNTVIAVIEMSQSKWLVAAVVPGVKRQPLKKLQADEEALLKLLYRWRTEAGQTGREIKRVVVAYEAGRDGFWLARWLRTRGVEAYVIHPASIAVSREHRRAKTDRLDTELLMRAFLGWLRGEKRHCSMAAVPAAEEEDARRPNRERENLVTERTRIANQMKAILARFGIRSFKPTLRKAAEKLDGLRTAEGTPLLENTRAELSRHLARLRVVREQIRAIEQERLHKLAAAPAEEKGPHAMVRLIARVFGVGVETADMLVNEVFARHLRDRKAVARYAGLTGSPDESGKRRRERGLARAGNARVRRGMIQLAWCFIRFQKDSALAKWFDARTADGRGSTRETMIVALARKLLIALWRLVTTGEVPEGVILRPAA

SEQ ID NO: 492939 - protein, 343 aa, unidentified
MEGYYVGLDISMKTTDVCVMDAKGRIIREQQVASHPDDIVELLAEINYDIETVGLESGPISHWFTEKLREYGLDARCLDARHLAGFLHLQINKTDKNDARGIAEAMRYGAGREVAIKSEEMRSLSTLLTSRRLMVRQRGQLMMTIRGMLKLHGIRLGALPKTPSVIPKIRQAIVDLSPLVKEAVEVLLVDLKGKFERVKAFDKELRREVRERPAAQLLMTAQGIGPVTALQYLVEIGDPSRFRRSRSVGAYIGATPRQYSSGETRRQGRISKCGSKELRSLLVEAAIVLMSRTGRWSKLKAWGLKLQKKIGKKKAAVAVARKLSVIMHTMLVKNEPFRFGEAA

SEQ ID NO: 492940 - protein, 327 aa, unidentified
MNATLDLLFVGLDVAKGKADVCLLQPDGRPLEESFENSRPGHEKLLAWLDRHRADRPIHAGLESTGPYSRPWCELLYASGHAVSLLNPARPKAYGQACGQRNKTDRVDARLLAQFVAEQQPSRWVPPAQEMEELKELTRRREELLTLAQAEKNRVESALCKSVRDSLARSIKALEKELGRVEDELEQLIGRHPSLRAKEKLLCSIPGIGQVTARKILAELPDVSCFQSARQAAAYAGLSPRRHESGKTVHKKGRLSKIGNAGLRKALYMPAIVAIKHNPVVQEFAQRLRANGKCESVIIGAAMRKLLHIAFGVLKHKKPFDPAYAKP

SEQ ID NO: 492941 - protein, 332 aa, unidentified
MTGKAGQMAHWIGIDVSKAELVVCVMDEARGVVKASFGNDAAGFRRLGKYLDKRVAAGSAVCLEATGTYGEAVAADLHERGYRVSVVNPLRIKRYAESQLRRNKTDQLDAQIIADFCRTQEPPVWTPPDPAWVELRALVRLLDDLIAMQVQEKQRLDSVTSPAVRAYLADHLTYLQAQIEQVTQQIKDHIDQHPDLKRQRDLLNSIPGISHLTSSRLLAEIRDITAFESVGQLVAFVGLNPRKRQSGKYAGQIKISKLGNAALRAALFMPARSAKRHNPLVQNLVTRMKAEGHCANAITVAVMRKLLHYVYGVLKSQQPFDPHYLVKQGLTP

SEQ ID NO: 492942 - protein, 344 aa, unidentified
MDTICILGIDIAKNTFQLHGADHTGNAVMRKRLPRHQLAAYVANLAPCTVVMEACGGANYWARVFQRSGHTAKLVSPQFVKPFVMTNKNDANDAQAIVEAASRPSMNFVPIKQVEQQDIQSIHRVRTRIVKNRTALINEIRGLCLEYGIVISPGAAKVKLSLCTVIAESTNELTPSSRECMHDLYEELIDVELRLKNLDTKIRQLCRQNENCQRILKIPGVGELTATAIVAAVPDPKEFRNGRHMSAWLGLVPRQSSSGDKQILLGISKRGDRYLRTLLIHGARAVLSHYKDLDNDYARWVGRKKATLSHNKAAVALANKNARIIWTMLSTGEEFNYGAQAAAA

SEQ ID NO: 492943 - protein, 418 aa, unidentified
MVEDVHWFVGIDWATQSHRVCLLDAEGRRVGEREFAHGGAGLTELRDWLLQKTGAAPGQIAVAIEMPHGPLVEMLIEHGFAVFAINPKQLDRFRDRFTVAGAKDDSRDAHVLGDSLRTDRKAFRRLAADNPVVIELREWSRIADELQQERTRLANRLRQQLWRYYPQIAKLTDDVGDDWFLALWQKVPTPAAATKASEKTIARILKDHRIRRLDAATVLQTLRETALFVAPGTTEAACAHIRSLAARMHLVNQQIKEAYNALDSLCAKLGMPDEESPSGQSREQCDVTILRSWPGIGRIVLATLLTEAAQPLQARDYHALRALAGVAPVTRQSGKQRFVLRRLACNKRLQTAVHHWSRVAIQYDAAARRRYDALRQRGHGHARALRGVGDRLLSALCSTLKHQTPYDADLRSMQPARP

SEQ ID NO: 492944 - protein, 360 aa, unidentified
MKIVGCDLHAKQQTIAMVDTETGEFTEKTLAHEGNKVREFYAALEGPVVVGIEATGAMQWFLQLLEELGIECQVGHPAKIRAKETRKQKHDRRDARLELELLMEDRFPTIWMPSSEQRDLRTLLRDRHQWVKVRTRVQNTLQAIALNHALRHGHALWSPAGQKALQALALSRYTRQRRDELLPLYVQLQKRIKELDRQVEEEAKQRPQALRLLTHPGVGPITALATEVFLGDAHRFATGNQVASYIGMIPCEHSSGKRQRLGKLSKQGNTLLRYLWTEAVMHAAAKDPELKRFYRRKLIQKGMGQARIAAARKLGIRLWIMMRDQIDYEEFCRRGKLRQSGEAHAGMPDFNSGPARAVTG

SEQ ID NO: 492945 - protein, 375 aa, unidentified
MKRRASGDKVVAPTITRSRKERLVNNDKYIGMDVHKATTVTAVLNSLGKIHSETIIETKGASLVDYLKGIRGTLHVTFEEGTQAAWLYDLIRPHVAQVVVCNPKKIAVQENKADKRDARRLAELLRMGQLEPVYHGEQSTRPLKELAQSYGTIVSDSTRTKNRIKALFRGQGIDCSGEGVYAKGQHELWLNQLDNPALRRRAARLFTQLEVLDELCEEAEKDLVTETRKHPAAKILQTIPGIGPVRAGIIIAFTITPFRFRTRKQFWTYCGLAVRSQITGEYVVVEGQVRRSKKPVLIRGLNRDYNHSLKEVFKGAAASAAMGAWKSHYQAMIANGTKPALALLTLARKLASTTLTLWKKGERYDVRKMNTSHAA

SEQ ID NO: 492946 - protein, 461 aa, unidentified
MKQSTRRKRSPQPCAQQLDVVHPNAAGIDIGSETHYVAVDPERDSQPVRSFGCSTPQLQDMARWLQACGVTTVAVESTGVYWVPAARVLEDAGIEVCLVDARQAKGVAGRKTDVQDCQWLRQLHAFGLLRPAFRPAAQIQPLRALWRHRREIIQECAQAIQHMQKSLEQMNLQLHKVLSDISGKTGLSILRAIVDGQRDPEHLVQLCHPNCKRPKQDFLDALTGHYQQEHLFILGQALQTFDFCKQKLRACDEELQRHLAAIPAKADKAALAAIPNRKRGNKAKNNQPTFDLRSELFALTGVDLTQVEGIDAVTAFTIISEQGTDMSRFPSEKHFASHLGLCPNNQITGGRIRKRNTRKVVSRAASALRIAALSLRRSQSALGQFYRRLHGRLGPAKAITATAHKLAKLIYRLLKYGEQYLHQTQEQYEQRHRDKLLKNLARTAKRAGCELIDAQTGLVLS

SEQ ID NO: 492947 - protein, 395 aa, unidentified
MYFLGIDIGKRTHVASIMNEEGKVLLKGFSFPNTTEGAESLIERMVDYSGAPSDFVIGMEATGHYWLSIFSYLHESDYLIHVVNPLQTDGWRKGTEIRKRKNDIIDSVLIADLMRYGSFVETVLSDENVFSLKQLSRYRTYLVGTASDFKRKIIAVLDQVFPEYATIFTKQGVFGKASKELLLAFSAPIDLENISSETLVQYLAELSRNRIKAEKADQLKQAASNSFGVKFAQEAFTFQLRSMIEQLKFIESQIKETEREIKHIMDTLNSVILTIPGIGPINGATILGEIGDIQKFSNPKKLVAYAGIDASVTQSGQYEATHNVMSKRGSPYLRKALFSAALVASQCDPVFSAFYQKKVSEGKHHLTALGAVSRKLCYVIHAILTKNEPYIIVSD

SEQ ID NO: 492948 - protein, 345 aa, unidentified
MLYVGLDLSRKRLDWQALLADGERAAIGAVPPDRDGLAKLVRRLGDGEGVLAVIESMSGARFVHDELELHGWDVRIADAVKARGIAPLACKTDTIDTWVLAELARLELVPEIWLPDPEVRAERERARFRLHLVKHRSSLKNRIHAILFQHAAPNPGSDLFGVGGRELLAGLQLPDPWASTVAASLELIDLLDERIAACEQELRRLGAEHRYIPLLMSCPGIGWVLAFTIASEIGDIARFGSPRKLVGYTGLCPRVEQSGERDRRGRLRKNGPSYLRWALVEAAHTANRHPCYRPVHERFLARHGRKRGTKLAAVEIGRRLAEAIWHMLTTNQPFAPAGAPASLAA

SEQ ID NO: 492949 - protein, 307 aa, unidentified
MRFYTKQHQFYCGIDLHARTMYLCIVNRDGEILLHRNMPAGPDPFLKAITPYREDLVVCVECICTWYWLADLCARAAIPFVLGHALYMKAIHGGKAKNDKIDAQKIAVLLRGGMLPQAYVYPADMRATRDLLRRRMHFMRKRAELLAHVQNTNSQYNLPEIGKKIAYKANRDGVAERFPDPAVHKSIEVDLALIGHYDDLLHDVELSILKAAKQDNANTLYLLRTVPGIGEILRLVLLYEIHDIQRFSRVQDFVSYCRLVKCAKESAGKRYGTSGTKIGNAYLKWAFSEAAVLFLRNNPHGQKYLPR

SEQ ID NO: 492950 - protein, 314 aa, unidentified
MFIGIDVSKARLDVAIRPSAEKLSVSNDEAGIQTLVKRLSELKPALIVLEATGGLERSVSGTLGSAQLPVVVVNPRQVRDFAKALGQLAKTDRIDAEVLAHFAEAIRPPLRPLPDKVSLELRSLIARRRQLIEMMVAEKNRLSTASKAVRKRIEAHIRWLETELDRADKDLDHSIRQSPIWCENEDLLRSVPSVGPVVSRTLLAELPELGRLNRKQIAALVGIAPLNCDSGTFRGRRGIWGGRATVRAVLYMAALVASRRNSVIRNFYKRLRDKGKAPKVALVACMHKLLIILNAMIKHKTRWSEIIPQTSLDF

SEQ ID NO: 492951 - protein, 361 aa, unidentified
MKRSSKYVGLDVHQATTVSTVRDDAGRVLARTVVPTEAEALREFFRGMRGPIHVALEEGTQAQWLHDLLVPVVHRVVVCDRRGKSRQGNKGDQPDADELSDLLRCGRLRAVYHETGDRAMLKELARTYTNLVEDSTRVMQRLKALFRARGIRTSGRSVYQREQRADWLRQLPDAGVRFRATVLYQELELLQELRPNAKAAMLTEARRDSAWRVLRTIPYLGPVRVAMLLATVQTPWRFRTKRNLWAYAGLAVVTHTTAQYELDGQRRVRRRRRAPLTRGLNRNHNRVMKDVFKAAATAAATRVGPLQDWYHGLLTRGMREELARVTLARKLAAITLHLWKRGERFDPTQLTVQAVHAHQAR

SEQ ID NO: 492952 - protein, 364 aa, unidentified
MQGREPVNSLLSLSPSDQSIMTSMQLKQTDPEAKPTLFAGIDVGAEELVLVIRKNGKPFDAQKFSNTPADRTRLVNKLVKLTGIIVCLEATGVYHFDLSLALHDAGVLLMVVNPKASHNFAKVLMKNSKTDAVDAATLAEYAARMDFVAWTRPTDETLALRSFARRINALTGQKAAAKNHLHALTAAQETPKAVLKDAKLAISQLEKRIDRLTAAALVLIDQQPVLARILALLTGIKGIAQTSAIALMGELLLLPPGLSHRQWVKFAGLDPQAFDSGKSVHKKTRVSKAGNRYIRSALYMPALSAKQHDPHVKAYFQHLLDNGKKPLQAVCAVMRKLLHAIHGMLKHDKPFDNTRFYAIPVAVE

SEQ ID NO: 492953 - protein, 402 aa, unidentified
MNQPILSIDVAKGKSVAAAFLSYQVCMYKPFPFYHSEEDLQRLLAILEELKSVSGQVPKVVLEATGNYSKPLASFFSFHGYSVILLNPLLTHQLKQKAVRKVKTDPIDAMRIAQVFYLQDPQPQVQLNETVHQLRVICRQYQHWTALYGEMQLHFRAVLDLLFPGYDKAFQKVCNRTSLELLSRFPTPAELLAADPEEVLKLLLSNRRGQAWNEKKLQQLLEIARHSLPDLHGIEAQKVVLRQYIHLLRTYQDCMSDLFQSMQTHAESMETYHLLRTIPGVGPLTAAMLIAEIGDIKRFPSVKQLTAFAGLDSAVHESGTFKSKKNRISKRGSSYLRTALYQATVAAISKQIHGPRNSTLFQFYQQKRDEGKPAKVAIVAASHKLLRIIFGMWNSGSAFQAQ

SEQ ID NO: 492954 - protein, 393 aa, unidentified
MKDIYGIEEISGIKDLWAGIDLHSNNHVIAIQDSRHNRVFRKKLSNDIEKTRTCLERFKKRLCAITVESTYNWYWLVDGLKESGYDVRLAHPAKISQYNGLKHTDDKDDAYFLAHLLCLGLLPEGYIYPKEERSVRDLNRKYRKFIEERTTHILSLKSSFNRSFSEHLSAYNIKKITDEQVEKMVADKNTLAMTMADVNTIRYLTNTIEKLEGLLLGQVKLKPEFEKLMTLPGIGKVLAISISLETGPISRFPTPGDYASYCRCVESLRKSNKKIKGKNNRKNGNPYLSWAFHEAAEKAKRYCPYAKKFFERKVKQGNIFIARNALAHKYAKACYHVLKEQADYDVTRVFESAKKKVKPIYKRKIKGRVSKPERGLGSEPLAPIGRAGATPLS

SEQ ID NO: 492955 - protein, 340 aa, unidentified
MGDKTHEVCVLDSEGRVVVRKQIVNTKAALVNVFKAYSGALVAIEAGTHSPWISRELEALGCEVLVGNARKLRAIWAAKQKSDIHDAEMLARIARVDRQLLYPIHHREVGAQQDLAVLKARDVLVAARSMMVNHVRSTVKMMGERVPKCSTDSFARQALEALPEGLLPALKPVIDEIAALTLRIRAYDKQIAELIETRHPQAKRLSQVPGVGPLTSLGFVLSLEEPGRFSKSRTVGAFLGLTPRRDQSGQTDKQLRITKAGDEFVRRLLVGAAQYILGPFGPDSELRRCGAKIAGKGGKNAKRRAVVAVARKLAVLLHRLWVTGADYDPEYQKRAAKQAA

SEQ ID NO: 492956 - protein, 329 aa, unidentified
MDISIKEIVCTTIDEHGNIVRKDKFENSFDNLDKYLSNFSHRDSFVMESTGFYEPIYDFMESRGFNVKLANPLKIKLIAESRMKNDDVDSEILAKLLKNNWIPESYVPPKEIREIRRIVRTRMQIKRTMTTYKNRIKIEMKRLHIDYKGDTFTIDGKAFLRSLKSERIDSYLRVLNAMEDEVRNIDKDLMKFQDIEEVKLLQSIDGIGLFSALMIYSEIGDIRRFTSSSKLLSYAGTIPSVRQSSDIIKYGRITRQGSKNLRWIITECLHIHLRFDPSSSVSIFYRRISRGKKRKGKALIAASNKLLKIIYWVLKERRPYVSSSTDQPR

SEQ ID NO: 492957 - protein, 421 aa, unidentified
MEVVAAHCAGLDVHRSMITACALLSDERGRARRVKSEFVTTRIGLERLAAWLRQLDVRTVGMESTGVYWMPVFAVLEAAGGFELLVLNPEHVKGIKGRKSDMKDAEWLADLIRHGLVRGSFVPPQPIRELRDLTRYRRTLVENQGSERRRLIKLLEAADIKLAGVISDIFGVSGRAILRALIEGGHSAAEMSKLVRGRLRRKRALVIDALGGELAEHRRDMLAMQLARVEADEADIAALDQRISERLAPYARQMALLMTIPGIDWVVAATVIAEIGVDMSVFPSQRHLAAWGGTCPGSNESAGKHKPIGARKGNSYLKTALCNAATAASRQRGSFFKAKYHKLKSRRGGGRAALAIAHKLLVCIYHMLSGSTSYHELGEDYFDRRDTQGAARRYVRRLQDLGFSVILAAHSQPPAEPANAL

SEQ ID NO: 492958 - protein, 405 aa, unidentified
MNAVGIDASKGKSMVTILRPFGEIVSSPHEVRHTSDQIDDLIREIRSLEGESRIVMEYTGRYHEPMARWLSDAGLFVSLVNPKLIKDFDNDSLRKVKTDKADSVKIARYTLDKWHKLKQYGAMDELRNQLKTMNRQFGYYTKLKTAMKNNLISLLDQTFPGANTFFDSPARSDGSQKWVDFVDTYWHVDRIRSMSLSAFTDHYQKWCSRKGYNFQPNKPAEIYEAIRNIIPVLPKDTMTKFIIRQAVNQINTASSAVEELRTRMNDIASQLPEYPVVLAMKGVGTSLGPQLIAEIGDVTRFTHKGALTAFAGVDPGKNESGSYAQKSVCTSKRGSAPLRKTLFQVMDCLIKTMPQGDPVYEFMNKKRSQGKPYYVYMTAGANKFLRIYYGRVKEYLSEHPETAEN

SEQ ID NO: 492959 - protein, 336 aa, unidentified
MTKNNFNQTSPIESVGIDVGKENLSICLLHQNQTHSFLEIKNTKLEINQFMQNNLSDYHNKIVLESTGRFHLLPAVMLSENQLDVRVINPLISKKYSSSSVRKVKSDKQDSQMLARIAVQEEKLPTTFDSSRKELDLKKKISLVASLEKQVQQLNAIMHDFCETKQMLGNSFSKVEKQLLLSVKRIVKQKNVLEKEIQTEAAGNKLTKHRELFSSICGVSPYVATIADAFFSDQYLESPKQWIAFAGLDVSVRQSGSWKGKCRLTKRGNAYLRKRLFSAAWGAKMHSKEFREYYLKLRAGGRNYVEALVIIARKIVRIMFALVKNKTEFNLGKIIF

SEQ ID NO: 492960 - protein, 344 aa, unidentified
MDHFAGLDVSVKETSICIVDDTGKIVREVKAASEPQALLKVLGNPTYRFKRIGLEAGPLSQWLFSGLAEAGLPVVCVETRHMQAVLKAQINKTDRNDARGIAQMIRAGLYRPVHVKTLRSQKLRMLLTHRKLLQSKAIAIENDLRGTLRNFGLKVGMVGKMRFEARIKELVESLPDLAELVEPLLIVRRTLRGQIVILHRRLLAIVRDDEVCQRLMTTPGVGPVVALTYRATVDVPARFRKSKAVGAVFGLTCARYQSGEIDWSGRISRCGDEMMRVMLYEAAQSMMRSKKWSWLKAWAMQIARRRGMKKAIVALARRLAVIMHRIWVDGTEFRWTREQAAAAA

SEQ ID NO: 492961 - protein, 482 aa, unidentified
MHPRVTNICPITRDVHRFTFELAGALEITNEYSGLAVAPAHLYCFRRSQAGMSHTLNLAQWSIVMEKQDDLPFAAYVGIDWADKKHDFCIEIPAEGTQEFDVIPHRINLIDQWVRTLHARVKGPIAVAIELTRGPLISALQMYDFIVIYPVNPGSLAKYRQAFTPSRAKDDPTDAALAVDMLRRHPERCKPLRPQSADMRALITLVEQRRQLVGERVRLTNRLRAALKQYYPNALEWFDHVDTMVFCDFIAKWPTLVQAKRARIATLNRFFHEHNVRFPSVVQSRITAIKEAVPLTKDDAIIVPYRMKAQAVVEQLKLLLGSIKAFDVEIDSVATRHADYGLFRALPGAGPSLAPRLLVAFGEDRDRFGSATEVQMYSGVAPVTERSGKKEWIHWRLQCPRFLRQTFVEWAAQTINKSYWAGEFYRQQREKGCTYQAAVRALAFKWIRVVYRCWQTGIPYDEAKYLKALERRGSPLMVKKTA

SEQ ID NO: 492962 - protein, 436 aa, unidentified
MKKREASKLEAITPTTLIVGVDIAKEVQWAKFTNYRGIELGKAIKFRNDRTGFENILASIEGVCKLKGLDKVILGMEPTGHYWKPFANYLILAGITVVMINPHHTKRAKELDDNSPTKSDQKDALTIARLVRDGRYYEVYMPQDVFAELRVLTNSRISLMRRHNSIKNSITTVMDEYFPEIVQAFKHPLKGKSSLQIMKSCPFPSLILELGVEGVLAEIKKAVKKTVGRKKAEELVEIAQNSIGVTYGINSAKLKVQLMIEELELLARQLEQIENAMEKALSDTGLKELILSIPGVGVVTAASFLGEIGDPLRFEHPRQISKLAGYNLVEDSSGNNKSGTSISKRGRKNLRSVLYQMARTMVAQNNEMKELYQYLKTRSNNPLKTKQALIVISKKIVTIIYNLVKKQAEYNARHSRCTKFTKKLCKLTIEQSLFAA

SEQ ID NO: 492963 - protein, 385 aa, unidentified
MKEQNFVPREFDIFGGLDVDKKSIAVTFMSHEGILQSFSMPYRAEHLLSYVHKHFEGKKIAFAYEAGPTGWGLYDRLTAEGHPCVVVAPSMIPKVPGQRVKTNRLDSQKLSEHLRGGQLKSVHVPSEPYRQLRHLTQLRDTFVKDVVAMKLRIKAMLLLEGLEFPPAPAGSQWSFLVKDKLKKLSCSGSVRFKLDRLLESLEHSEKQALQTIKEIRRFCQQDSELCPAIKHVSSIPGIGEIVASHLLARVGDPRQITNVRQLGGFIGLAPREHSTGERIGRGGITRTGDGRLRSKLIQAAWSAIRQDPELREFYRAVCQRHPRDRAARKAIVAVARKLTTRIYAVLKEKRPYVVREIVHSAPLTQEETVPQGTTRRLREPGEINS

SEQ ID NO: 492964 - protein, 387 aa, unidentified
MIYYIGIDISKYKHDFCIISNTGEVIVRNSSFENNKKGFQSLLDQLKPYNKSDVHIAFEATGHYSMNLELFLIDQGYSFIKMNPLVIHQFLKAQSLRRTKTDKADSLTIANYLMSVPYKPNSDILYNIFTLKSLCRSREQLIKERSKYQVLLTNQLDLTFPELKSFLDNRISTTLLFILEKYTNTEHISLMRDYDSIRCISHGKFSYSKFAKLKELAKNSVGHHDENTDLLISTYVSIIKTFNDKIDPIEKQISTIIKELNPRMLTIPGLGEISAATILSEYGDISNFSSPNKMLAFAGLEPSIIQSGTIENNGKMVKHGSGHLRYSIMNTAMIILRYSPTFYDYYLKKRSEGKCHRVALSHVCKKLIRVIYTLEKNNIDFDPSLLR

SEQ ID NO: 492965 - protein, 330 aa, unidentified
MRKVTAAGIDVSKDVLDVAVQREAARCEMGRFANDAAGHKKLLGWLTKGGRTVRVVLESTGTYSLDVALALHRARGVTVMVANPRAIKQFTGALMQRSKTDVTAAVALREFATRMPLVAWAPPPAPILALRGIARRIAALGVERTRERNRWHALHATAEASAIVSNDIAVNVRHLERRIELLTAQAVALIREHAELQAAFDLLTSVPGIAAHSALQLLPELLVLPHGMTVRQWVAHAGLDPRAHQSGTSVDRPARISKVGNAHIRRVLYMPALVAVQRNDHVRAFFEKLVARGKTPLQAYVAVMRKLLHAIYGMLATRTTFVGAKFHAAA

SEQ ID NO: 492966 - protein, 380 aa, unidentified
MGWTRRAPAPASRIAGSGLQKNQEHSMPHNTSRLEAVATIGIDIGKNTFHLIGLDRNGAIVLRQKLSRRQIEARLANTPPCLIGMEACVGAHHLGRQLKAYGHDARLMPAQYVRPYSKGQKNDFRDAEAIAEAVLRPTMKFVAIKTVEQLDLQALHRVRERLVCQRTSVINQIRAFLLERGIAVRQGPSALRSEIPIVLSMTDKLSPRMIQMIEDLCADWRYLDERIETVSDEIKTLSEQDEGAKRLMTVPGIGPIISTATVAAIGNGDAFSKGRDFGAWLGLVPRQMSTGGRTVLGPISKRGNRYLRMLFVQAAHAVLLHPQCWERHGLKSWIAAAARRLNRFKLAIALANKLARIAWGVLHGGRSFEVRSMKPAAQCL

SEQ ID NO: 492967 - protein, 608 aa, unidentified
MSTTTALDRIGVGIDTARYGHRVSFLRPDRQPAAKPLTVMENRDGYESLKECLNRLHQQHPQAHFHVRIDAAGQYAVNLELFLRDLKLPMTISVGEPKRNKDYQKAHFPKRTTDDTESQAMARFAVVELPDATPAPSDPMILLREVAGRLQAQVKQTTRAINRLHNLLARVFPELATLTEDIGVGWVLKLLDKYPTAERIAAAHRSSLEKIPYLPAEQAEALHQAAQQSVASLRGDVAEALVRDLVEQLRHSQRAEEKLRQMLIAAFADLPDSPHVQVLTIPGIGDATAAVLVAKIVDIGRFATPNHLVSYFGVFPEESSSGVDKHGKPLPPGTLVMSPKGNDLVRGYLWNAARAAIRWNPAIRALYRRLRARGKRGDVAFGHCMRKLLHLVYAVWKTNRPFDEKHFPWEGSSDTSLSTTTPLAADADATPSANENAVGHKRDLPAEPVVTTAASTVEPAPPAVKPAPQGTVATRPKVDFACLREHVTIEQVLQHLGLFASLRGRGQQRRGPCPVHSQPTAPERTFSVDLGKNVFQCFHADCGLKGNVLDLWAAVHRLPLYEAALHLAETFQLPRNREEEPVMGTRSPRTETARQSAPAAGPEAGGCE

SEQ ID NO: 492968 - protein, 342 aa, unidentified
MEKVYYIGLDIHKKNISYCVKLQDGSIVRQGEMAAERTAINQWTSELPGPWKGAMEATLFTGWVYDFLKPHALELKVAHPEMLKAITSAKKKNDRADSEKIADLLRVNLLPECYMASEEIRELRRILRYRNMIVRTSVKMKNKISGLLMEVGATYSKKRLHGKKYFNGLLETVEDVPSSVNELLKLSRSGLDMFQGVQRKLLDTLHDNSLIGERVKRLMTIKGIGEVTALTWVLEIGDPNRFSSIRQAVSYCGLCSAQKESGGKEQRGPISKKRNKHLQTVLIEAAKLAPRWNQQLAEIHTKELERGNRNRATLAVARKLVAYMMAVEKRQKDFEPMTAEAA

SEQ ID NO: 492969 - protein, 343 aa, unidentified
MRIVGITGGVDTHADTHVAAAIDHNGGLLGIESFPADQSGFEELLAWLVGFGELVRVGVEGAGSWGVGLSRFLHCQEIAVIEVDRPNRQQRRKHGKSDPTDAVSAARAVLSGEATVTPKSRNGRVEEMRVLLVARRSAREQRIQTLNQLRHLVFTAPEEIRVRFKDRPKTGLVTEAANMRPRPGSDPIIYQTNLVIRGLAKRIQGLNAEIKTIDQTLRLLIKKTAPGLVALHGVGTDTAASLLVAAGDNPERLRSERSWAHLCGVTPIPASSGKVTRHRLNRGGDRQANSALYRIVLTRMSTHDETRRYVARRRTEGLSTSEIMRCLKRYVARQTYKQLPHMI

SEQ ID NO: 492970 - protein, 481 aa, unidentified
MTARKKNTSKEVASGSPAASSQPGDGSAEVAEERVEVVRYAAAIDVAKGSGMVCTRVPGSRPDRKRQKVWQVEASYAAVVALMDHLRCEGVQRLVLESTSDYWRIWYYLAEAAGLQVWLVNAKDVKHLPGRGKSDREDSVWLCKLNERGMLRRSFVPPEGIRDLRSLTRTRSRLAQDQARHQSRVEKVLEDALLKISVVISDLFGASGRRFLDALVAGERSPAALAALGDRRLKATAEQLAGALTGRFREVHAFEIATHLRLIDTINDEIARMDARIEQQLASIPGVAPACTSCGLIGGGHSPGCLSDGTPVLGLVERLDEITGVGVRNAQVTIAELGTDMSVFPTPGHAAAWARLTSRTLQSGTTARPGRTGKGNPYLRGALGQSVMAAARTDTRLGEQYRRIARRRGKQKAIVAVSRVICEISAILIADPGARFTDLGAGYYSALNPRRQTRSRIRELERLNPGMKVTVTPVETAETAA

SEQ ID NO: 492971 - protein, 339 aa, unidentified
MEKVSTIGLDLAKNVFQVHGVNEAGKVVVARKLRRGQMLAWFAKLEPCLIGVEACGTAHDWARALQKLGHTVRLIPPAYAKAYVRRNKNDAADAAAICEAVSRPSMRFVAIKSEAQQALAGLHRVRELLMKQRTMLRNQLRGLMAEFGVVAAPGRRGLNELLAVLCDDADPRIPRSLREALLADAEVLRGLERKIEGIERQMVEAGRENATYRHLITADGYGPILSSAMVAMAIDPHAFKRACDFAASLGLVPRQDGTGGKVKLGPISKRGNSYLRRLLVNGATSLIISGYAKRDPWLKKLLATKPRKVAAVALANKLARIGWALMVHQEDYRHLPTAA

SEQ ID NO: 492972 - protein, 336 aa, unidentified
MNKVTLFAGLDYHQESIQVCVMDARAMVRVNRSCANEVGAVISTLRSAGEVGAVALEACCGSADLAERLSAEGGWRVELAHAGYVAKMKGSPDKTDYSDARLLADLTRVGYLPRVWLAPRVIRDIRQLVNHRQRLVNQRRDLKLRIGACLREQRVKIEDAGRWSKRWVHEARHHMGLSESVRWIIEQMMDQIKVVDGWIHQAEERLREATASQDLVGKLRKIEGVGEVTAWTLLAFVGRFDRFKNGKQLARYCGLSPRNSSSGQKEADGGLIDACCKNLRTVLIQAAQRLVRTELRWQMLARRLLDNGKPKSVVVAAVANRWVRTIHHRMLAPAAT

SEQ ID NO: 492973 - protein, 523 aa, unidentified
MARAPKSKKRSAPAPQTIHKARGVISPRVQRVGPEHFGIVCVDCAKARSKWMLTDFYGRILVPPTEVEHTQACFASMIERLRTALEQAGIRDQIVVIERTGRYHRPVQRAFAKAGFEVRIIHPLTTKQHRQPANPGNKTDDTDLAAMQRGAVNGFGLLEPPADPLSIRLQLLARHRRDLVEKSVALRSQIHEHLYAIMPGYSKYFEDIYDARIPLWIARQFGSATAILQAGLPGLIVQLRRAEIRVHLPTLEKILAWARTAPAAEDESHLHLKILTALDDDRLSKVRGVRAIEAELAGLLVQTPYVLLMGIPGINVVSAAEFAGEMGPIERYATARAITGRAGLFPSRYQSDHVDYPDGQLVRCANRNLRRAIMMIADNLVKCNDHFRVLATGWRLHGRDARAVRVQVAGRFSRIAYQMVAGRKAYRHPCCQQRDYILNKLLIFHTDNEIGYDQLMRNLDAAVAQLPRSEYREEAVPLADELDRVLKKRGKGPRPLSEILPVVLAKLGVKPVRLPKSGEAILT

SEQ ID NO: 492974 - protein, 343 aa, unidentified
MEHFAGLDVSVKETSICIVDDTCRIVREVRVASEPAALLQVLANPIYRFKRVGLEAGPLSQWLFSALAEAGLPVICVETRHMRAVLQAQINKTDRNDARGMAQMLRAGLYRPVHVKTLRSQKLRMLLTHRKLLQCKAIAIDNDLRGTLRNFGLKVGVVGTVKFEARIKELVENLPDLAELVEPLLIVRRTLREQIGILHRRLLAIVRNDDVCRRLMTIPGVGPVVALTYRATVDVPARFRNSKAVGAVFGLTPSRYQSGEINRPGAISRCGDEMMRVMLYEAAHIMLVRLAKWSWLKAWAMQIARHRGMKKAIVALARRLAVIMHRIWVDGTEFRWTREVTAA

SEQ ID NO: 492975 - protein, 374 aa, unidentified
MVDDTALYVGLDVSKEKIVVDLAEAGRNGEVRYYGEIANRADAVRKFVDKLAGRHERLCFCYEAGPTGYGLYRQLSGLGHECLVVAPSLIPTRPGLQIKTDRRDALALAALLRAGELSSIWVPDETHEAMRDLCRARETAVSDMRRARQHLLSFLLRHGRIFEGRSHWTKAHRNWLATQRFDHRAQQIAMEEYIRAIEQIEERRERLTQQMLALLPDWSLNPVVEAIQALRGVAQISAVTLVSEIGDFRRFRNPRQFMAWLGLVPREHSTGASVVRGSITKAGNTWARRMLVEGAWTYRLPARVGQEILKRSEGLPEEIRAIAWKAQVRLCQRYRRMQAGGRPTNIVIVAIARELAAFVWAIATTIPVTPTKAI

SEQ ID NO: 492976 - protein, 365 aa, unidentified
MPSVTSPAGAIHLGMDTSKNTIVVGVLMPGEEIPAVDRIFNDEDPVRRLVGRFPDPGLLRACYEAGPGGYDLHRLLASMGVACDVVAPSLIPKGGSDRVKTDKRDAVRLARLHRAGELTPIRVPSPAEEAVRDLARVRAAVLADRKRAQQRLTAMLMRHGRVWRNTYWTQAHRTWIAAQSFGEPALTAALAHYRATLDTRETELACIESELAPWARREPLAPAVARLCCYRGIADLTALTLAAEVVDWRRFPSARAFMGYTGLVPSEYSSGARTWRGHITKAGSGPVRTALIEAAWAYRFQPAIGVTLRRRQEGAAPDTIARSWKAQRRLHGKYRRMVNGGKAAPEAATAIARELAGFIWAEMTS

SEQ ID NO: 492977 - protein, 332 aa, unidentified
MGGALLATASFGADREGYRALIEWAAQFGTVLRFGIEGTGSYGRGLASAVRRHGHEVIEVARPTRQDRHRRGKSDLFDAENAARAVLAGQAEAIPKTADGAVEMIRHLKVAKDAAVKARTAAMQSLKAVLITAPAELRETLQPLPDTALLRRCAALRPGQLTSVTAAAKYSLRAIAQRWHNLHAEITAHEQLLGRLVDQLAPRLTATIGIGPDNASQLLLALGDNPARLHSEAAFAKLCGVCPIPASSGKTVRYRLNRAGHRQANAALHRIVIVRMKYHHPTRAYVARRTTEGKTKPEIMRCLKRHIAREVWTHTKHLRQHPHAHPPTTCHL

SEQ ID NO: 492978 - protein, 334 aa, unidentified
MWHVGIDLHRETVVIAAVNDTGEVTKPITVRCAETAAIVNVVKALGSFRAVIEASATYRWLYDLLQPYGTILLAHPFRLRAMVQQRTKTDKLDAQLLANLLRINQIPLAYIPPEPYQQLRELTRRRARLGRELAEAKIHLRALLARQNRQAPYRSPFGVRGLAWFRGQDFGWIENLVRDELLARLTHFGRQATIIDRHIERMSAAFPQVEALIDIHGVGLYSALLIVAEIGEPERFRSAKQVGAYAGLTCRVHQSGGHCYRGSITRQGSTWLRWIVVQAAIKVIHEDAALKNFYTRVRKRSSAKIARVAVARKLAEICWKRLLRWQREHANQAA

SEQ ID NO: 492979 - protein, 359 aa, unidentified
MTTMKSPTILAIDLAKAKSLFCWHDVVKGTHQIRQIPSTPKAFHDALLQQPVERVIIEVCDMAGWIKDLCEGLAIPLQIANGNTEGWRWRNVKKKTDKEDALKLISLSLTNQLPTVVLPDRPTRQWKSLILYRQKLIERRTRVKNKIHAILVSEGRAMRGGRQAWSEPSLAAVSKLARPLADCAIDELWRGQLHMELAALDDLDHAVGQLDQRLDALGQADARVIRLETIPGVGPRLSELVVAVIDDPKRFKNVRQVSAYVGLVPRRYQSGAMDRSGRISKAGCAKLRKLLMEIAWGMLVHNAHGRSVFQRISKGQKTRRKQAAVALARRVLGWCWAMLRDGTDWRDPAGGAAPSPVAT

SEQ ID NO: 492980 - protein, 355 aa, unidentified
MHGIAPTSRDVIGGVDTHQDLHTAAVVDAVGEVLGTQAFATTRAGYRAMLAWFASHGRLLRVGIEATGTYGAGLARHLDAADVVVLEIERPARRLRRQRGKSDEIDAEAAARAVLAGTAQALPKGRHGIVESIRTLRTVRRGAIKARSAAINSLKTMVVSAPAEQRERLDSLSTRALVATCAALRPDHERLADALQGTKAALRSLAGRITAFEGEIAELDAALTELVRRAAPQTIGLMAVGVEHAGQLLVTAGDNPERRRSEAAFAHLCGVAPIPASSGRTTRQRLHRGGDRAANRALHMALVVRLRPDPRRRAYVARRTKEGLSKMESIRCLKRYLAREVYRALRADLENLNGA

SEQ ID NO: 492981 - protein, 417 aa, unidentified
MRKARAIVGVDCGEQRHRFVMINENGEREASYWVENDLGKIFQAFDELGSLSKTAKLEVVTESIGSLGAMVSQAVRGRGDELFVVSTKALRHYRDLEGQPHKSDDRDACLAARMQLFGMEGVRTPAPVSEEEQALARLIRLRFRLTDQKKALGLRLRSRLLELAPVMASKDWEGPRHSSRAMVAILQRWPGLVGLERAHRKSIEKLLRKVTRNGDACVKMAKRLREAAKTIALEGLPREVLTMEMTILVAQLEANHQQLEQVRKREKELVNAHPVGQRLLTMPSVGYRTAAVLLAESLPQARVRSEAQLATYSGLTPLSRQSGNSSRSRLSRGVNRFLASAHYMSAVNACTRSPIDKSYHDKKRKDFKGHPAEFKKATIALARQRHKVIYRILAMGEVYDASRLAASTVNRARKTAK

SEQ ID NO: 492982 - protein, 407 aa, unidentified
MRLFVGDDWAEDHHDVELMDAAGRVLARKRLAEGVAGMARLHELIGQQLGEDAEDAEVVIGIETDRGPWVAALVAAGYVVYAVNPLQASRYRERHGVSGAKSDTGDAHMLTDMVRTDSHQLRAVAGDSADAGAVKVVARAHKTLIWERTRQVQRLRHQLREYFPAALEAFDDLDAPDALELLAKAPDPARAAKLTRAQVSAALKRARRRGITAKATAIITALRGAQLGQPPAITAAYAVTARSLIAVITTLNEQVKNLQGQVEADFGRHPDAEIYLSQPGLGPILSARVLGEFGDDPGRYATGKARKNYAATSPITRASGKKKVVAARFIRNDRLTDALMAQAFAALGASPGARALYDAERARGTEHNAALRKLANRLVGILHGCLKTRTLYNEATAWSHHENSMAA

SEQ ID NO: 492983 - protein, 366 aa, unidentified
MKKISTVRVNGNMIFKGHKLTIGVDLGDRWSCYCVLDEAGEILLEQKVATTPEAMKQIFEKIPRGLMAMETGTHSPWVSRLLKELGHAVLVAHAQKVQLITKSNRKDDRHDARTLARLARIDPELLGPVRHRSAKAQIHLTVIRARAELVSARTGLVNAARGLAKSYGERLRKCGTQQVSRGLAAELSVELREVLEPLLKEIESLNERIKEYDVRMEKIARESYPQVELLKQVKGVGTQIALTYVLTLEDPHRFPKSREVGCFLGLRPGRRDSGESHPQMHISKEGDPYLRTMLVQGAHYILGPFGEDSDLRRWGLKLAARGGKSAKKRAVVAVARKLAVLLHRLWVSGEVYEPLHNSDKAMRAVA

SEQ ID NO: 492984 - protein, 372 aa, unidentified
MRAKITKRILALNRRYGKAIKTKFGYDVSKLDLSLSLGFLTDKLVKEFTTHEDISNDLSGFKELLKWLRKSVDSSVDFLIVMEATGVYHQGIAHYLYAQGYAVCVMQSGRVKRYAQSLDQRSKTDALDSKMLSMLGLERNIRLWQPPSKELQELKGLSRERSSLLKDKVTENNRQGVISSSVYNNAKALKRHKNRLKLLNAQIAIIEEEMQELISKNEELKRKIDFLTSIPGISFKSAATVVGETLGFESIVNAKQLASYAGYDIVLRESGNFKGKTRISKRGNSHIRAALHMPSMTCVRCNPTLKQFYNRLKPNKAKPLVALIAVQRKLLILMYTLWKNEEVYDAKFETKKQQKHEALAARDNNLIAQLVS

SEQ ID NO: 492985 - protein, 352 aa, unidentified
MNVIHYIGFDVHKKSVSYCVKDAAGKILEEGKLRATRQALRQWAGDRTEPWHGAMEATLFSGWIYDTLKPFATELQMGHPAMMKAIGASKKKNDKIDARQTADLVRCNLLPACYVAPTEIRELRRMLRYRNVVVAQAVRMKNKMSGLLMEVGAEYNKQRLHGKKYFTELLGSLEEVPESVKDLLRLSRGALELFETTQKRILDRLQKEPRLVRRLEGLQSIRGVGVVTALSWALEICDPHRFPSIADAVSYCGLTSALVSSADKQQRGPLSQQRNAHLQTVLIEAAKLAPRWNSQLAAVHEREMNRGNRNRATLAVARKLVAYLLAVDKSGKPFQVQTPPAPATETEVPAVA

SEQ ID NO: 492986 - protein, 424 aa, unidentified
MKVTYQTCCGVDVHKSFLVATIIKTSSGIEPSYQKRRFSTFNNSILEFKKWLLENECLYVCMESTGKYWIPVFNILEDEINVTIANPKWVKAVKGNKDDTKDSKWIGDLFRLGLVRGSYIPCKKIRILREFTRYRYKLVSCRSSEKNRYQNALTVCNVALDSVVSDIFGKSSTSIIDYLLEQSGTSIDHEVIASKLLKRLKAKEDAVIESIEGYQMTDSQKYRMHLVRAHMDYITAAINDVDSEIESLIASDPDYENAVELLCTIPGVKYDSAITIISEIGIDMSQFCSSKRLCCWAGLTPGSNESAGKKKSVRITRAGVYLKPALVQCAHAAVKSDKSPYYKKKYESLVKRRGKKRAIIAIARMILTAIYQMLSTGEQWNPSDLYKVDMPEALLEKQKQKAIKQAQKLLIREGLLPPTEPIAS

SEQ ID NO: 492987 - protein, 344 aa, unidentified
MEHYAAIDVSLEWSSVCVVDAAGQIVREAKVRSEREALAAFFTESGLAFARIGLEAGPLSQWLHAGLVEAGLPAILIETRHVKAALKAMTVKTDRNDARGMAQLMRMGWFRPVHAKAPMVQEIRALLTARKLLVAKLRDVESSIRGILRGFGLKVGAVSKGKFEARIRELVTGQVMLERVAEPLLRARAALRTEYTTLHRDLLRTVREDAVCGRLMTVPGVGAVVAMTFRSAIDQPERFAKSKAAGAHFGLTPKKYQSGEIDRTGRISKVGDAMVRTALFEAANVMLTRAVRFSTLKAWALRVAGRHGMKKAKVALARKLAVVMHRMWVDGTSFCWGEASVSAA

SEQ ID NO: 492988 - protein, 417 aa, unidentified
MSFTPATVSAPVPARVCAGIDWASVDHAICILDVDGTVLDRFFVTHDAEGLRTLVRRLLKAGVDEVGIERGDGPVVDALLQAGLTVLVIAPGQVKNLRSRYGSAGNKDDRFDAYVLADVVRTDRARLRPLVRDSAATSAMRTTVRARRDLVGHRVAAANQLRAHLQLVFPAAASLFAAIDTTISLSFLERFTTQTQADWLSVKRLESWLRSVSYSGRTDPAVLHARLLAAPRGTTGTDAAVHAATTKAYVALLRVLNTQIAALEDNLTTQLKTHPDTHIYASLPRVKTLRTARLLAEIGDARGKFPTADSLAALAGVAPSTRQSGKVKAVTFRWGCNKQLRDALCDFAGDSRHDNPWAADLYDRAIARGHDHPHAVRILGRAWAHIIWRCWHDNLSYDPTQHRALQTVLAQTNTEAA

SEQ ID NO: 492989 - protein, 339 aa, unidentified
MNITMIGLDIAKNVFQVHGVDAQGSIQVSKALRRAKVETFFAALPPCLVGIEACGTSYHWARVLRALGHDARLIAPAHVKAYVRRNKTDAADAAAICEAVGRPTTRFVPLREVEDQAALGVHRAREMLVKQRTMLINALRGHLAEFGVVAARGHEGAEALCAIVADPEERRIPELLRPALMTFAGQIETLEAQIATIETQLKSWRRQDAMSRRLETIPGVGLITATAIAAKVRNPERFANGRCFAAWLGLTPRQHSSGGKVRLGPISKAGDRYIRRLLVSGAQSLLTASKSRRKPDPWLAKMLASKPRLVAAVALANKLARIVWAVMVRQTNFRAAAPT

SEQ ID NO: 492990 - protein, 322 aa, unidentified
MKKSNNYVGIDISKLTFDVAISGSDDKYKYFKFANNHEGFMMFLEHLKVSESICVMEASGPYYLKLATFLSEQAIDVCVINPLVIRRFSQMRMSRAKTDKKDAMLIAEYGKTENPGIWKPEANHVLELKQMQAYLEQLNKNRTGFVVQKEAFNQNPIKSEALEKSINSVLETIEQEMKNIEKKMELIIKTHHQEMFSQLKSIPGMGTKTSLLLIVISGGFSKFNNHKQLASYVGISPRIFESGTSVKGRSKICKMGMSKIRALLYMCAWSAKRCNETCKALYDRLVEKGKSKKLALIAVVNKLLKQAFAIATKKEYYSVKIN

SEQ ID NO: 492991 - protein, 350 aa, unidentified
MSIVIGIDPHKQTHTAVAVDGSTGVVLGEITVPARTPGFERLVRWARGLDGERLFAVEDGRHVSGALERHLIGRGERSVRVPPRMMGVQRRADRVRGKSDPIDATAVARAALARPDLPVATLAGPERDIGLLVSHRESLVRERTDRICKLRWLLHDIDPDLAPPPRTLNRFRTLDRLTQTLGAIESSVQVEICLELISRVREITVRANELEREIDQLVKASASVLLRIEGCASLTAAKIVAETAQVGRFPTEGHFARYAGTAPVPASSGASHRHRFNRRGNRQLNAAIHRIAVTQLRIHEPARDYVAKKRGEGMSKTEAIRALKRHITRTVFKTLTSMTQPADRLTAAAA

SEQ ID NO: 492992 - protein, 344 aa, unidentified
MEHIGIDVHKVESQICILTESGEVVERRIRTQRERFAAVLGERPRAKVLIEASTESEWVARCLEELGHEVVVADPNFAAMYATRSRKVKTDLRDARTLAEACKLGAYRAAHRTSDRQRHVRAQLSVREALVQTRARYISLIGALLRREGLRVASGNAVGFTKRVARVAMPGQLKSEIAPLLAVFESINRQLVWVDTRLEQLAKSDETVERLCTAPSVGPVTAAAFSSTVDDVQRFQSAHQVEAYLGLTPSEWSSGEKQCKGHITKAGNNRMRRLLVQVAVSILRLRSPRTEALRKWATGIAARRGKKIAIVALARRMAGVLFAMMRDRTRYFQAALPEPSAQVA

SEQ ID NO: 492993 - protein, 401 aa, unidentified
MVSDFRKGRYNLMKIFVGIDIAKLNHFAAAISSDGEILIEPFKFTNDADGFQLLVSKLESFDKNSIIIGLESTAHYGDNLVRYLVAEFYQVCVLNPIKTCQMRKNNVRKTKTDKVDTFVIAKTLMMQDDLRFITFFDLDMMDLKALGRFRQKTIKQRTRLKIQLTTYVDQVFPEIQYFFKSGLHQNAVYALLKEAPSPKEIASMHMTHLANLLKVNSHGHFTKEQAKELRVLAQKSVGANDSAISIQITQTIQQIELLDSQLEKIEAEMTDIMKFNDSVIMTIPGIGYINGGMILGEIGDIHRFSNPNKLLAFAGLDPSVYQSGNFQAKTTRMSKRGSRVLRYALVNAAWNVVRNNATFKAYYDAKRSEGRSHYNALGHCAGKLVRVIWKMLTDEVEFNLE

SEQ ID NO: 492994 - protein, 320 aa, unidentified
MSKKKSKSFIGIDVSKQQLEVAEHQSDYKFQCTNKISSFGQLIAELIVLRPALIVLEATGGLEKPVVNALNAVGLPVVVVNPRQVRDFAKALGQLAKTDRLDARVLAHFAAAIKPPLRPIKSKDEQELDDLMGRRRQLVEMLTDEKNRRGSATSDSVRKKIKEHIDWLEDRISEIDQQLKALLKTSACWQAKDRILQSAPGIGPVTSFSMIADLPELGKLDRQKICKLVGVAPLNRDSGQQRGSRHIYGGRAQLRSSLYMAALTASRHNPVIKEFYQRLRANHKPFKVAITACMRKLLSIINIMVRDSTLWKSSDAPVSA

SEQ ID NO: 492995 - protein, 396 aa, unidentified
MRIFGIDIASETHVLAGIDDEDRVLLKPTKVEETGAGHDKLLALLGEPLDTLVVMEATGHYWKNVFARLVTAGFVVAVVNPLAVRRFAEATLARAKTDAIDALQIARFGRAHRPRPTTLPSEEVEELRERVRLRDRWVQDLGDRVRQLHRFVDLGFPELTRLVKTLDSELATAILARYPTAASFRQIRPSTLAKLKYDGRHHVDEELAAALIDAAKRSCGMHHGEAYQLGVRTACEDIDVLRRRVREANRDIERRIDASELGQLLQTIDGIGPTTAARIVAEVGDPAEYKHAGALAAHFGLAPRVSHSGKHTPQRGGLHPLGDAKLRAKLWMPTLTAVVRNPWLKAFYERLCAAGKVPKLAMTAAMRKLVTAIYSVAKNRKPFVPRLSAKPTETSC

SEQ ID NO: 492996 - protein, 312 aa, unidentified
MPAKLPPTYVGLDISSDQLDYSRSENDEGRCAYTAEGIAELIKKLQVLLHARVICEASGGYEKRIVAELLQAGIEVCVVQPGRVRAFAYAEGLMAKTDRLDARLLRRFGEKIEVRLAVPTDPALTTLRELLEHRRQLTRQLIEVIGRLSLAGATLRKLLEKQRLFLEKQIAAVEGMIKDHIDQNPDLKQKSARLQQINGVGPVLSATILAYVPELGKIESNQLSALIGVAPHPDDSGLRNGPRHVRGGRAQVRRVLYMAAVCAARTNPILRAFYERLRANGKPAKVCLVAVMRKLVHLMNKLILNPDFSLVR

SEQ ID NO: 492997 - protein, 337 aa, unidentified
MSRARIYKEGNPTVQPNSNAKCWAGIDVSKDWVDVAVLVEEQKVEQIRCVRSLVELEQLAQKLLPYGPQGVVLEATGGLEGSVITALVAAGLKVMRMNPKRVRDFARAQGLLAKTDQLDAHILALFGARMQPPLRAWPEAERQQLGAWIARQQQLTLQRAAERTRLHQATEPQLRKSVERVIAFLGKELARLEKQMGKWMAQSEIWTEQESLLRTAPGVGPKTARLLLAQLPELGHINRREIASLVGLAPFACDSGHWRGKRRIHGGRGAVRAILYLASWSAVRPPGSLREFYRRLVAAGKPRQVALIAVARKLLLALNEMMRLNQPWRSPKESIPA

SEQ ID NO: 492998 - protein, 409 aa, unidentified
MIFIGIDWSKTKHDIGYMDDSGRRISHQVIPHSQIGFQQFHEQCEKLGLERDTCQIGIETSYNLLVDELWSYGYDNIYVIPPSVVKSSRGRFGSSGARNDKGDAFLLADLVRTDRLRLHPWKPDTLLTRQMRVKVRALYQLTHQITAATNQLRAVLQRYYPGVLQIFGDLTAQTALTFIQEYPTPASSAKLYREEFYAFLCRQRYPNPHRLASRLPELKNPMLKTCPDTVAIYQDAAVLHAQLLLQLVRTKLKTQRELTVLFKSHPDADTFTSLPGTGAFLAPALLVKFGDHRERFPAPASVQALAGTCPVTDSSGNRHRIYFRRGCDREFRHYVQQWAKASTERHRSQFADAYWHELLDRGFSKHHAYRCLANRWLAIAWRLWQDRTVYDEAHHLQQRLRRSRPNSMT

SEQ ID NO: 492999 - protein, 430 aa, unidentified
MKSITQNKKIEAITETTLVIGIDVGSETHYARAFDYRGIEFSKKPLKFSNSEVGFEMFKAWILDIKEKHEKDKVVPGMEPTGHYWFNLGKFLQDNKMKPVLVNPHHVKKSKELDDNNPTKNDRKDPKVIAGLIKEGRYMIPYLPDGIYADLRTASNMRFQIQSELTRVQNRISRWFNIYFPEYKTVYGKPDAISGMMILKKAPLPEDILTLGVEGVNQIWRDAKIRAVGKKRAQTLVEAARHSVGTKEGATAARIEIRMLLEDYESRNSRLQEVMLLIEELVKEIPMAEKLMEIKGVGIKTVSGFLAEVGDITRFSSPKELQKLAGLALVENSSGKHKGQTTISRRGRKRLRYLLFEVAMSLVGKNPEFGTLHHYYTTRKINPLKKMQSLMAVAAKLIRVFYAMLTKGVEYDPAKMLGDIKRPEAYMQAA

SEQ ID NO: 493000 - protein, 416 aa, unidentified
MEQIFMIKENYIYVGIDLHKETHTAVMIDCYNQKLGEITFPNRPADFPKLVAKVKKCNTDGETIVLGLENAYGYGRALAVWLIDKGYLVKDVNTAISHRQAKHRGAMYRKSDSDDAEAIALATLNMLDKLPDAYPNDAYWSLGQLVHRRDNIMKQRTRLVNQLHEQLCIAYPSYKSFFNDISRPTALYFWEHYPSRKYLRGKSVEDLRKELVPVSHNRCSTKNCEKILDAVASDKVKNNAYQDARDMVTLSIVSDLQHYDSQLAEVDKMLEQMYKMLGCTLTTIPGVNVITAVKILAEIGDIKRFSNANKLAQFAGIAPLHLSSSGKGKDVATKQGNRRLQATIYFLAIQMVQVSSKGTPRNSVVRAYYEKRKAEGKTSQQALICISRRLISVIYGMLKNGTEYRMPVVENAGENR

SEQ ID NO: 493001 - protein, 369 aa, unidentified
MQKRTNVATLSDLGKQKVAGRMTIGIDLGDRRSHFCALNDQAQVIARGSLPTTATAFRREFAALPPSLIAVEAGAHSLWVNQVLKVCGHEVLVGNPRKIRLITESDRKSDRADAQSLARLARADRLLLSPIQHRTQEKQVELSVIRARDVLVRSRTALINCARGLVKPMGLRLPACSTEAFAKRAASTDLPEILRVALAPLLKQIEAVNQAIREYDRQIEHIAATQYPETCLLKQIKGVGTLIALTYVLTLEDPHRFSKSRDVGAFLGFLPREKQSGERSPKLGINRAGNEYLRRLLVQGAHYILGPLGPDTDLRRWGLQLAARGGSHSKKRALIAVARKLSVLLHHFWKTGEVYEPLRKEQITKGAAA

SEQ ID NO: 493002 - protein, 390 aa, unidentified
MQFAADRLEAPTAIRTDLGAIFISLELNRSSWVVTSLSPGGGEKMSKHTVRGGDVAGLLKRFAQLREKAKGRTGKVFPLIVIQEAGLDGFWIDRVLQNEGIESHVVDPASIATSRRRRRAKTDGIDGEALVRALLAYKRGEPRVCSMVRLPTPEDEDRRRLCRERKVLIMERVQHVNRIKGLLFSQGVSGYEPVRCDRRERLDALQTGDGRPLPLHLKAQVRRELDRLELLLAQIKAVEAERDALLAAEQTKAPVAPAMLLGVKGIGPEFAAVLWSEGLSRPFENRRQIAAYAGLAPTPWQSGSVDREQGISQSGNPRLRTTMIQLAWLWLRHQPDSALALWFHDRVKRNGGRLRKTTIVALARKLLVALWKYVTAGVVIEGAVMKTVGR

SEQ ID NO: 493003 - protein, 470 aa, unidentified
MSIRNGTSRSGHSRVVLIRIEVVVQMESYAGVDWASDKHDVLVADPAGEKLLAATFAHDEKGLRSLCRQLVRLKVALVAVERPDGLLVERLLDAGLRVLALHPNQVAAARDRFRVSGGKSDRFDAFVLCELARTDHHRFRVLEPDCDQTKALKALTRGREDLVAMRTALGNQLRAELERFWPGPLGLFSDLHSRISLAFLERYPSPADTRGLGEARLAGFLARERYSGGQTRAQLLAKLRRAPAGRVGEHELATRRQLVLTHVSMIKLVGEQIKELERQIAAAIREHPDGAIFLSLFKGTFITAAELLAEIGDCRGRYPTRDTVAGDAGQAAVAKESGKRKTATFRWGCNKRLRQAFHTLADSSRHHNPWAQDLYAQAVARGHDHPRALRTVGRAWSRIVWRCWQDRVPYDPARHRALQRHITVTIPTPSGSVPDLAATQRMAGTAVTRRAARRAERNALDSRTPSAISR

SEQ ID NO: 493004 - protein, 353 aa, unidentified
MCKISRKGKGCEVRFEGPIWVGVDVHKNSYAVAVLDQKGRAIQFTMAADNDAFVRKIMSYGQPVAQVTYEAGPCGYSLYRACEAAGITALVAAPSRIPRPVTRGNKTDSLDCRKLADYAARDMLVPVRVPTEAEEMLRSLQRRRHGLTDRIRSTKQLIKSLLLEYHIEEPHGLAKWSKASVDALKHLVLGAALHDTLDSYLRELAFLETERHTVDQAIVKATPQPVLQRMKILQSVPGVGSVLATTFACEIFRPERFADGERLSSYVGLAPVVSQSGASAATGSLVRTGQQRLRSLLVECAWLHKSRDAGAELLYRRILSRTGLAQKAIVAVARRLLTLLWRLCIEDRMYVVA

SEQ ID NO: 493005 - protein, 355 aa, unidentified
MPSQPDVTVGIDLGDRHSHLCLIDTESGEIIEESRIPTTQKGLERRFSGRGPMRIAIEAGTHSPWVSRLLEGCGHEVLVANARKLRLIHAGGNRSDRLDAENLARLARLDPRLLSPIEHRGEASQAHVALVRSREVLVGTRTKLLNHVRGTVKSFGARLPGCSAKSFHAKVRDHLPEALVPALEPVLETIGFLNERIREYDRKLEAISEGSYPETALLRQVAGVGPLTALVFVLTLEDPARFETSRAVGACVGLTPGTHQSGDSDPQKRISKRGDETLRRLLVSCAHHVLGPFGPDSDLRRHGLKIAERGGKNAKKRAAVAVARKLSVVLHRLWVTGEVYEPLYNARRAQEAGAA

SEQ ID NO: 493006 - protein, 345 aa, unidentified
MEPMYYIGLDVHKRKISYCVKDSGGKVFAEGLLPATRLDLDLWMKTLPQPWSAAMEATMFTDWIYDHLKPHAAVLKVAHPLMLRAIAAAKKKNDRIDASKICDCLRCDFLPECYMASTAIRERRRTLRYRNLLVRQMVQMKIKISALLMEAGVSYNKQRLQKAGYFRELLATNPDINEGLKPLLQLCREMVVRLQKTESAMVRSLERDSLLVDRVEHLMTIPAVGPITALTWALEVDDVQRFSSIKKAISYCGLCGAEKSSGSTVQRTPLSKQRNKHLQTTLIEAAKMAPRNSPELAMLYDKEKQKGNANRATLAVARKLVAYLVAVDRRQKEFLTVERENRTAA

SEQ ID NO: 493007 - protein, 438 aa, unidentified
MRSIGLDVHKRFAEVAIIEGKGPPVRRRIGTTTPALRAFARTLRSADQLVLEATMNTWAIADLLRESGARVVISNPLRTRAIAEAKVKTDKVDAATLAQLLAADFVPEVWIPDAETRRLRREVATRAALVRQRTQVRNRIHAALHRCLEDAPVTDLFGTAGRKWLGQVLLPEEERAQVEAALRVHEAVQAEIALVDRRLAKVALMDERVERLMTLPGLGPTTALSLVAVTGDIRRFRRPAKLVSYLGLDPRVHQSGEREAWIGSISRAGHAHARSLLVEAAHAAVGAPGPLRSFFRRVERRRGTQVALVAVARKLVVLAWHLLTSGARYRLERATITRERRRALERRLGIPAVRRRPARGEPSIVIKKEREFAALLEAEAGYQADVGARTRKDAAAANGEATLRPSKGRDARRSLRPHRSALLTGSTASEEGGYASGA

SEQ ID NO: 493008 - protein, 342 aa, unidentified
MAIVAGFDVHRAQITFDALDSDTGEVSRGRIDATPAAVERWVGRFTGRDVHVAVEACTGWLFVCDALVAAGAVPHLAEPVETRALRGRKRRAKTDREDARWLRELVGDGRLPEAWMPPEHVRQWRSRARLRHTLIGERTQWMQRIRATLFHHGISATPEKLRTRAGRGFLEGLDLPHDARERIEIALAMIDAIEAQIAPLERELRQLARRQTGCRALMRLYGMGELTSLVTLCELGDVGRLSASRKAVRMAGIDIGVHRSDRHARVGKLNRQGSPQLRWALYEAALSACRPSSPDHADYLALKARGLSHTRASLTIARKLARRSFHVLRELGPAALEPIPTN

SEQ ID NO: 493009 - protein, 389 aa, unidentified
MFHDHPSVRPAAILTQFGAIFVSLELSRSKWVLTSLCPGNGEKMSQYSLTAGDIGGLLARFAELKRKAKERTGSDYPIITIHEAGLDGFWVHRVLQNEGIESYVVDAASIATSRRRRRAKTDKIDGEALLRALLAFKRGEPRVCAMVVAPSPEEEDRRRLCRERQTLIAERIIHVNRIKGLLFAQGISDYAPLRRDRRKRLEGLRTGDRRPLPVHLKTQISRELDRLELLLDQIRKVEAEQEALLAAESKAAPEGEPHNAVAMLLAVKGIGEHSAAILWSEGLCRQFSNRRQVAAYAGLAATPWRSGAVMHEQGLSKAGNPQLRTTMVQLAWLWLRHQPQSALACWFRARGERGRKGSIVALARKLLVALWKYVTHGVIIEGAVMKPAT

SEQ ID NO: 493010 - protein, 330 aa, unidentified
MDAISVGIDVGKDSLVVALYPTGERWTSETTAEAVEALVTRLRAVSPTIVIVEATGGYERAVVASGAAAGLPMAVINPRQVRAFAQALGRTAKTDAIDAAVLAEFGARVQPPTRALADAETQALAALLVRRRQLVEMIGMERRRLAQAPATGKITRDLRNHIRWLERRVDDVDDEIGTAIQASPVWRVQEDLLRSVPGIGPTTARTLLGELPELGRLDRRAIAALVGVAPFNCDSGHHRGQRHIWGGRASVRASLYMAALVATRYNPVLAVFYRRLRAAGKPAKVALVATRRKLLTILNTMLKHQSRWNPEAASTPASPSRAARAVAVPV

SEQ ID NO: 493011 - protein, 414 aa, unidentified
MDVLHARCVGLDVHKKTVVATVIISPKESGKPLKATRTFGTMTGDLLALSDWLMSYDVTHAAMESTGEYWKPIYNILEDNFEVWLVNAQHIKAVPGRKTDVKDSEWIAELLRYGLIRASFVPPKGQRELRELTRMRSTFVKERANLVNRLHKVLESANIKLASVASDVNGVSGKAILQAMIAGGSTPEQMAELAQGRLRGKRDLLSRSLQGYVKPHHRFVLSELLLQIDGLDETIAKFDEEIREYCRPFEEAVELLDTIPGVARRTAEVIVSEIGVDMSRFPTADHLASWAGVAPGNNESAGKHLSGKTTKGNQALVSALTQAAHAASRVKNSYLHAQFHRLAGRRGKKKAIIAVAHSILIIAYHLIKDKEPYTDLGNDFFEKRNVQTTTRRMVRRLEHLGYKVNLEVLIPVTT

SEQ ID NO: 493012 - protein, 433 aa, unidentified
MDEVTDEPLYRDRVCGIDIGKAGMAATIRVPSEKDPGRRMAETRSFGTTRREVLALADWLRCWQVPAVVMEATGDYWKPVFYRLEAEGLECVLADARQVKNLPGRPKRDPSDSRWLAACFERGSVSPCFVATPEFRLIREHTRYRRDLTAERTRDKQRAEKLLESAAVKLSSVLADLHGVTGRDIMDHLIAGQRDPKVLAQLARQRARAKIPRLEQALEGAEFFTPEHAALLQVMLARIDRVNADIAALTAVIDQLLAPYEEQLAQAGSMPGWGRRAAQDVIAETGVDMTRFPTGGHLASWAGRTPLDSQSGSRAGRARHKHGNRYIGAVTGETAVAAGRTQTREGARHRRLARRRGKAKACVATGNTQMRVFHKLLSNPGMRYADLGWDYYEPDRHTARQVSHHVGKLASLGYEVTLARIPEPGGPADPQAA

SEQ ID NO: 493013 - protein, 320 aa, unidentified
MSASSVVVGIDVAKAHVDVAVLGARFDAQRFDNEAEAHSALAAALKPLGVALVVMEATGGYETALACALQAAGLPVAVVNPKQARDFAKSMGRLAKTDSIDARMLAELAAVLVRRDDLARFLRPVADAQQQWLAALVTRRRQLLTMLHSERQRLQITPKGLHPSIEAIVAAIKAQLDDIEGQMVGHVREHFAELDRLLQSASGIGPVASATLIAELPELGRLNRREIAALVGVAPMANDSGSSRGRRRVQGGRFEIRRVLYMAALTASRRNPAIKTFYARLLAAGKLPKVALVACMRKLLTILNAMVRTRRPWNKSLHGA

SEQ ID NO: 493014 - protein, 343 aa, unidentified
MTQYVGLDVSLKETKLHVLNEAGNRVWRGRCATDPTAIAAAVRRYAPMAARIGLETGPLTTWLWTALTAEGLPMVCLDARHAKKALDMKVNKTDANDAEGLAHLVRAGWYREVRVKGRSAMLAKALLGARSQLLNMSLALENQIRGILKTFGRIVPKGAGGLFDKNVRALITDDGEIAAVIMPLLQARQMARSKCAALDRRLIGSVQGDGTCRMLMTMPGIGPLTAVAYVAALEKPDNFKQSRAVGAWLGLTPRRFQSGEVDYEGHISRRGDCQLRALLYEAASVLLTRVRRDSVLRRWGLMLWKRLGFKRAATALARRMAVVLHAMWKSGTAFNPTLGAATP

SEQ ID NO: 493015 - protein, 325 aa, unidentified
MNLSCVLGVDIAKLKFDVCLIKENGKAKHKVFANTTSGFKQLVAWLISHQVGSLHVCLEATGSYGEALATHLFDAGLTVSVVNPAQVKAFAASRLTRTKTDKVDAELIARFCLAQQPAPWQPPAPEVRQLQALVRRLDALIEMRVAEENRLSSGVSIDAVRESLETHIAYLFEEIKDTERLIREHINNHPDLKEQSDLLDSIPGIASTTAALLLAEITNFKQYKSARQVAAYAGLVPRERRSGSSVRGRTCLSKIGNARLRKALYFPAITALRCSAFFQQWASGMRERGKSKMAVIGATMRKLIHLAYGVLKTGKPFDPNWVKNV

SEQ ID NO: 493016 - protein, 384 aa, unidentified
MRSVGLDLGARHIAYCEVRDGAVVDRTSVKKLDQLKSRIGPGTARARIAFDSSREGWHVHDILVAWGHEPKMVDTTRVRAMGVGHHKRKNDALDAEVAALAVEEGRIPEAHVLSPARRALRAKLSVRGALVETRSQYVTTIRGLARAAGILLPTCAAENFVKKVESADLDSATRALVSPLVAVLVGVEDALRQVESELSEMAKDDPIIALLATAPGVGLIVASTFVSVIDEARRFRNAQAVGAYLGLVPSESTTGGPDKRRLGSITKQGNTFARKMLVQAAWLILRSRDHDDPLRKWGERIANTRGKRIAVIALARKLAGVLWAMWRDGTYYDPVGQAKASAQGARRSARSKTAHAEALERAAKKFQRRAVSRRDQASESTAMT

SEQ ID NO: 493017 - protein, 407 aa, unidentified
MEVLYPRCAGLDVHAGSVMACVRIASGADVTYQHRTVSATTQGLRELADWLATAGCTHVAMEATGVYWKPVWHVLEAQFTLVLANAMHIRNVPGRKSDTNDATWIADLLAHGLIRGSFVPPAPIQELRDLTRTRKQLVGEIARHTLRIQKTLEDANLKLTHVVSDILGTSGRAILHALIAGETDPARLADLTTGRLKASRAQLMAALHGRVTAHHRFMIELHLTQIEALDAAVRKLESHVGEALAPFRAAAARLTTMPGISDTAARVLIAEIGVDMTRFPTPGHLVSWAGLCPRLDESAGKRRSTRIRHATPWLKTTLIQAAWAATRKKGSYLQAHFLRVKNRRGPKKAIVAVAASMLTAAYFMLRDDVDYHDLGGRYLVDRDKQHLTKSLLRRLRDLGVVVEVKAA

SEQ ID NO: 493018 - protein, 483 aa, unidentified
MKPKQVESNKKASCRPTPNRWHKMNHKQRREMLRKIQSEDLSLEVVHPDAAGIDIGNESHYVAVPCARDRQPVRRFGCTTAEVKAMADWLKQCKIQTIAMQSTGVYWVSVYDILEEAGFEVYLVNANETKNLPGRKSDVQESQWLMKLHTYGLLRNSFRPSQEIRTMRTYWRQRNDLVRAAGRHIQRMQKALTQMNIQLANVLSDVSGMTGQAIVNAILAGERDPYQLAALRNWRVKASEEEIARSLEGNWQEEHLFVLQQEQDGYQFCLKQMAECDQRLQQYLRQQEDRSQGASLPEEKRKERLRKKKKGNTPQFDLRTELFRVTGTDLTQIDGIDLTTTMTILSEAGWDMSKWKTEHHFVSWLRLCPDNRISGGKIIGKGRLPTNNRVTNALRMAASTLRLSNTYLGAQFRRLRTKLGAPVAIKAMAAKLARLVYRMLRYGMAFIDRGAEFYESQHRNLQINYLKRKAATLGFQIIEAPAA

SEQ ID NO: 493019 - protein, 410 aa, unidentified
MDKLYAGIDVSKGSNVVYLMRPDGEKIKRFTVDNSPDGSERLVGDILSSFQRLGLSEVKIGIESTSVYGVGLMTYLREHVDLKPFNLELFVLNAKQVKHFKEIYSDLPKNDTIDSFVIADCLRFNRIGRSMYMADYKYDALKVHTRARFMAVQNLTREKQRFANLVFLKFSGLSQSNVFSKETGATSLALLESFDSAEDIARLSLDELAMFISEKGHNRFEDPLAVAEAVKAAVKNSYRPPKVIGDELNQAINICINTIRSMEKTVKEYDKNIERLMAVIPCTLTSIKGIGLVFASGILAEIGDINRFDNQAALAKYAGLVWKEHQSGNFTGETTRLGKTGNRYLRYYLLEAANSLRRCDPEFKRYYNLKYKEVNKFQHKRALALTARKLVRLVFRLLKDNRLYTPPAEI

SEQ ID NO: 493020 - protein, 409 aa, unidentified
MERLIERCAGIDVHQQTMVVTVRAPDASGARTVMTQTFGTMTADLLVLREWLLRHGVTHVAMESTGVYWRPLYYLLEDGFTVLLINMQHLSHVPGRKSDVRDSEWLAQLLECGLLRGSLVPPAPIRDLRDLTRYRKRQIEDRAQEVNRLHRLLQDAGLKLTTVMTDVLGVSGRAMIEALVHGTTDPTVLADLARGRLRSKLPALQQALRGQFRAQHAFLVTQILAKIDFLEEAIATLTAEIDRQLVPFEPTVTRLMTIPGLARRNAVTVFVETGGDMRHFPTAGHLCSWGSMCPGQQESAGKRQTGKTRDGNRYLRGALIEAGLATTRARGTALQARYYRIKRHRGHKKAVVAVGHQILEIAFYVMRDAVTYQELGGDYFDRRDRERTTRRHIKQLEALGYKVTLETAA

SEQ ID NO: 493021 - protein, 322 aa, unidentified
MQGKAMPEPNAMPVYAGVDVCKEWLDVYVHPSGQILRVSNDRAGLKRLKRVLAALPVARVVMEATGKHHRVAQRSLHAAGLAVAVVNPLRARLFAEAAGKIAKTDAIDARLLAVMGAALEPAETPPSPKALEEVGELVNARTAAMAERTALSNRMATAGTAFLKAELRRRHDACQRHLERLDAEIERRILAEPDMARRHAILCSIPGIGPVTAAAFLAGMAELGDCSGKQAAMLAGVAPVANDSGQRSGRRAIRGGRMPVRNAAYMAALSASRHNPDLAAFARRLEKAGKRPKIVLVAVMRKLVVLANTLISQNRLWSPIAP

SEQ ID NO: 493022 - protein, 386 aa, unidentified
MQRNDLSRSLVAFDQNSTLVAVVELSLKRWVVQGLVPGLSKQPLKALGPDASALLALVNRWQLEGTKGGGRIKRIVVAFEAGRDGFWLARWLRSRGIEVYVIHATSIPVSREHRRAKSDRLDTELLMRALLGWLRGERKHCQMVRIPTIEEEDARRPNREHQTLVGERTRNVCRIKSTLVLHGIRDFNPKRLKASERLETLRCPEGGSLPPNTLAELRREMAQLRLISGQLREIEKTREERLKRAPRQGTHPMVLLLAKILGIGIETADMLVHEILSRELRDERAVGRYAGLTGSPYDSGAKRREKGMSRAGNARVRRGMVQLAWRWIRFQKDSQLTQWYNNRTESARGDIRKTMIVALARKLLVSLWRYVTTGEVPVGAKLKAAA

SEQ ID NO: 493023 - protein, 425 aa, unidentified
MNFNTNEKINQVSENTLVIGIDIAKYKHFACAIDDRGRVLQKSFPIAQSHMGFEAFYERLLALKAIHDKQEILVGFEPTGHYWMNLAAFLTNYGIPFVMVNPMHVNRSKELDDNLQTKNDQKDALVIARLMRDGRFSYPRILAGVEAELRNGATLRAKIQEDLNALQNRIIRWLDRFFPEFTQVFKSFGKMAYAVLEKTPLPSDINGKTPEELLFLYRQVEGMKSPQLPKAKQLGEVAESSIGVTEGLVMARFEIATLLSQIQLMQTQLEKLTAQLIELAKQMTDYDYLASVPGIGDITIVDLLSEVGSLTQYAHPRQLIKLAGLTLRENSSGQQKGQKRISKRGRRQLRALLFRVMMPLIKHNPAFRALHEYYTTRANNPLRKKQSIVVLCGKLVKILHALCKKKTMFDEHQMMKDFAHLQMTA

SEQ ID NO: 493024 - protein, 349 aa, unidentified
MSRSPFADAAVFGVDLGKTRFDVMAADKSGKPLRRAKLTRSTILPFFEQVPRGLIGMEACPGAQWLARKLAAMGHTVRIIPAQFVKPFVKSNKNDARDAEAIAEAVVRPTMRFVEIRQEAQIDLQALHRIRDRISANRIQLICQMRAFCLEYGIAMRPGAGVFKLDMARILTDEDNDLTPMMRTLLRELWDEFVVVDARLAAVSKQVEAIADRVDAARRLMSIPGIGPLGATALLAAIGDGRQFRKARDLAAWLGLVPRQNSTGGKTTLLGISKRGNPYLRRLIIHGARSCIAHLNRERDRMGEWIGQLEQRMHRNKVVVAFANKIARMAWAVLTRPGNLYERVEPTKA

SEQ ID NO: 493025 - protein, 355 aa, unidentified
MIVIGVDPHKATHTAAAVADGIGELLAERTAKARRTGHEELLDWARSLADERLWALEDCRHVSVSLERFLLASGERVVRVPPKLMAGARRSSRTRGKSDAIDALAVARAALREPELASARLDGPEREIRLLVDHREDLVAERTRIQQRLRWHLHELHPELVLPAGCLDRRVWLERLARRLARAEQTAQVRICRELVSRCRELTRRAAELERELSALVHVHAATLLELPGCGVLTAAKIVGETAGAERFSGEAKLAMHAGTAPLPASSGAHQRHRLNRSGNRQLNCALHRIAVTQGRWHPPARAYLARKESEGRSRKEALRCLKRHLARLVYGRLCAREEEKMTSTNRPVLVPALT

SEQ ID NO: 493026 - protein, 337 aa, unidentified
MTIVMGLDQHRAQITAEWIDTETGEVIRSRVSPAHRAGVRRFCERFRDQELEVGLEATTGWRFVADEFQRVGARVHLAEPAETAALHGNKRRAKTDRADARHIRELLTGGRLPESWIPPAHILDLRARVRLRHTLAHQRGEWQQRIQAVLYHHGCSQRGNLITSEGRSWLAAQPLSATAREQVTIALSVIDALDAQIVPMEKELRAFARRQAGCKALMGQFGVGELTAVRFLAELGDARRFSSSRDAVRFAGLDITVHQSDQRRAAGHLSRQGPPALRWALFEASMCAARACSLDYEYSQAAERLGSNRARLSVARKILKRSFHLLRELGEEALAPA

SEQ ID NO: 493027 - protein, 409 aa, unidentified
MEVLYPRCAGLDVHKESVVVCVRVMAGGPVQATVRTFTTTTAGLLELADWLAAHGCTHVAMESTGVYWKPVWHVLASDFELVLANASHIRNVPGRKSDVSDATWIADLLAHGLLRGSFVPPPAVQELRDLTRTRKQLVRDLGQHTQRIEKVLEDANLKLTTVLTDVVGASGRRILEAVIAGETNPDALAKLASPRVKAAPVVLAEALVGRVTPHHRFLLREHLLMIDHLRQRIAAFDAQIGAALEPFRVAAARLVTIPGVSLVAAHVIVAEIGIDMTRFPTIGHLISWAGLCPRMEQSAGKRRSTRIRKGAPWLKTVLVQCAWAATRAKDTYLQAQFRRLKSRRGPMKAVVAVAASILTAAYHMLREGVPYRELGPHHFARVDKARLAQRLARRLRDLGYEVQLNATAA

SEQ ID NO: 493028 - protein, 414 aa, unidentified
MRTVYKNVAGLDVHKKIIVAAIIVQQADGTWLETKRNFGTMTVDLLELSDWLTAFGITHVAMESTGEYWKPIFNILENNFEVFVVNAQHISKVPGRKTDQSDAEWIAELMQFGLLKASFIPPLGQRELRDLTRYRSSFVRERSTLTNRIQKVLEGANIKLASVATDVMGVSGRAMLEAIIQGEASPEQMAELAKGRMREKREQLAKALEGRVKDHHRFVLTELLCQIDSLDETIERFGQKIEEYCRPFETAVQLLDTIPGVGREMVEIIVAEIGTDMSRFPTADYLAAWAGVAPGNNESAGKRRSGKTRKGNKALGVALNQAAHATAHTKKTYLSAQYRRLVGRRGAKRAAVAVAHSILVIAYHLIKRNEPYRDLGGDYFDKRRPEASTKLLVKRLEHLGFQVSLQQIQAPLAV

SEQ ID NO: 493029 - protein, 345 aa, unidentified
MEQISRIGMDTSKHVFQLHGVNAAGVPILRKKLRRNEMVAFFKKLAPTVIGIEACGASHHLARLLQSFGHTVKMIAPQLVKPYVKRGKNDAADAEALCEAMSRPTMRFVPVKTVDQQAALMLVGVRNRLIRNRTQLANTIRGHATEFGLIAAKGMAHLVPLLERIAADEALPALARELFASQAGEYAQLQAQIDEVDAKLTAWHRADECSRRLAKIPGVGPVGAALLKMKTPDPTQFQSGRQFAAWIGLTPKDHSTAGKVRHGGITRAGDEGLRSALVLGATAVIQQALRSDTASPWLAALLKRKPAKLAAVALANKTARIAWKMMLTGQAYGAKAAVAASAGAV

SEQ ID NO: 493030 - protein, 337 aa, unidentified
MIVIGVDVHKHSLTAVAVDELGRALAEWGGPVEGEVVSWARALGEERLWAVEDCRHVTRGLEQTLLGEGERLVRVPPRLTAPQRRRGRSRGKSDSIDALAVARAALQEPLLDGPRPGEETLRELKLLVDHRDDLVVERRRCQQRLRWHLHELDQRLAVPLGALDRAVWIDRLGRQLARREQTTQVRIARDLLARCRMLTRSIVELDRELQARTKTIAPGLLELAGCGALSAAKLLCEIGPIDRFRTDAQLARHAGVAPLDASSGKHQRHRLDRGGNRQLNCALHRIAVTQGRVHAPARAYLERKQNEGKTRREAIRCLKRQLARTVYTTLKNKPLLT

SEQ ID NO: 493031 - protein, 347 aa, unidentified
MRKIAYLAMDVHARNIVLGDMDANGKFSGNRGFATCENNIIKALKTVKAKTKYLIIEAGPLANWVAQTASPYVAQVIICDPRENALIHKSSNKRDEFDTQKLCRLLRLGEFNEVYRPESDQRAIFKAAVQHYLDLRDQLTALKHKIKAMFRQWGVIDVFNKSVYSTNGRDKYLKQVQQHPIYHQLKRLYELMDHTATMKQDAEKAMIALGRNYPEIKEFKKMTGIATVNAHTFDAFIQTPYRFARRNRLWKYCRLGVTDCTSDGKPLGYKRLDKAGIGELKALSHRAFMVAMKSDNEVKRFYLKSLQTTHNHTHARLNTQRKILAVMLSIWKKGQAYRAELFLDPCI

SEQ ID NO: 493032 - protein, 371 aa, unidentified
MAKRLKYIGLDVHKETIAVAVAEGERGGEVRFHGTIPNEDDAVRGMVKRLAGPGITLDFCYEAGPCGYGLQRLLTRQGQPCIVISPSMMPRRPGDQIKTDRRDAMTLARLLRAGELAPIWVPDEAHEAIRDLIRARRSAQEDTSAAKQSVRSFLLRHDRRFSGKSAWTKTYWRWLSEHRFDFAHQQLAFEEAKRRVLEAQARTARLEAALVEAVDGWRFAPLVRSLQALRGVRLIVAATLVAEVGDLTRFQNPKQLMAYLGLVPSEYSSGARVQRGRITRAGNAHARTMLVEAGWTYRLPAREERRYRDRVADLPEDIQAIGWKAQVRLCQRFRRLSATGKPQPKVNTAIARELVGFAWDIARRVQPVVAV

SEQ ID NO: 493033 - protein, 344 aa, unidentified
MNAVGIDVSKGKSMVAIMRPFGEIVSAPFEIKHTASGIHSLVELINSVEGESRIVMEHTGRYYEVLAHQLLEANLFVSAINPKLIKDFDNDSLRKVKSDKADAIKIARYALDKWQNLKQYNVMDELRNQLKTMNRQFGFYIKHKTAMKNNLIGILDQTYPGVNTYFDSPARSDGSQKWVDFASTYWHVDCVRKMSLNSFIDHYQNWCKRKKYNFSQSKAEEIYGKAKELVPVLSKDAITKLIIKQAVDQLNSASTTVESLRTLMNETASKLPEYPIVMAMKGVGASLGPQLIAEIGDVSRFTHKSAITAFAGVDPGVNESGSYEQKVFQLPNEAPLILERPYFR

SEQ ID NO: 493034 - protein, 386 aa, unidentified
MMNIVRPNLSVEVANQTTCFMAIELSKTSWVVGMLTPLSNKISLRSIPCGAVEKLMAIVDQTTNRVMQATGGPVQVVSCYEAGYDGFWLHRFLAAHRIINHVLDAASLLVNRKARRAKTDRLDAEKLVRVLMAYWRGEPKVCSIVRPPSVEDEDAKRLHRERQFLMKERVQHIGRIKGLLAAQGVYDFRPERKDWRNRLAEIRTGDGRPLPSRLKAEIDRQCQRLALVDTMLKEIDQQRDAAVESKSAPSETVVRIQRLTHLKGIGPQIATVLGTEIFYREFANRRSLGSYLGLTPSPFKSGGMDRDLGISKAGNPRGRTTMIELAWLWLRYQPGSKLARWFEQRTNGLKGRVRRIAIVAVARKLAIALWRYVETGLIPADAELKA

SEQ ID NO: 493035 - protein, 343 aa, unidentified
MQAVTTIGLDIAKSVFQVHGVDCNGQVVIRRQLKRRYVLAFFEKLAPCLIGIEACASSHHWSRQLLALGHDVRLMPPSYVKPYVKRQKNDATDAEAICEAVSRANMRFVPTKTPEQQSGLVLHRTRHLFIRQQTSLINAIRAHCAEFGIVAPVGRQGVEELLNVIADAEDEQIPEIARACLSALGDQLHRIKAQILEFDRMIGAWHRSCEASRRLDEIPGVGPALATALVASIADPRTFRSGRDFSAWIGLVPKQSSSGGKPRLGSISKQGDRYLRGLFTAGALAVIRYAKIHGIGHRPWLTALLARRPTKVAAIALANKIARMAWAMMARGERYREPVALAA

SEQ ID NO: 493036 - protein, 400 aa, unidentified
MLSIGIDVSKGKSTVCGMKPGGEIVYTPFEIQHTREGMSELLSLLRGSGEEVRAVLESTGSYHCPVVAALLENGIFVSVVNSLRMKRFCSQSIRKVKTDQIDAMQIALYGLAYWQELQPTRLPENTYRELQLLARQYYQMTSILIKAKVDFNALCDQVLPGMQELMNDHAGRHKLSDFVLRYRHTTHILEMGETRFRKDYCKWAEKKGYRNRERMAALIFATAQNGIPVLPNAPSTQIVITEAIRVLHTVEASRDAILTQMQALAKTLPEYSLVREMPCIGDTLAPRLIAEIGDVRRFHSKRALIAYAGIDAPPYQSGKFCANNRHISKRGNRYLRKTGYEVMQSYVMHKPANDPIFTFIEKKRGEGKSGKLAMVAGLNKFLRVYYGKVTELYRSLPAIE

SEQ ID NO: 493037 - protein, 323 aa, unidentified
MQGKVSFQEDAMPVVYAGVDVSKEWLDVHLHPLGESRRLSNDKTGIRQLKRLLARHRPKSIVMEATGKFHRPAHRSLWLDGFAVAVVDPLRARMFARACGYLAKTDRLDARFLALLAESLRPPADTPPSPHIEALQELVNARSAAKCDITALQNRSKTATTALLRGELNRLVRRLEQHVERLDKEIERCVGEDPQLCRKAEILTSIPGIGRVTALALMAGMDELGSCSGKQAAMLAGLAPIANDSGARTGRRSIRAGRPAPRRALYMAALSARRYNPALARFADTLKAAGKPAKVILVAIMRKLLVLANCLLSHDRLWTPNPP

SEQ ID NO: 493038 - protein, 359 aa, unidentified
MARENLTKLQLFVKAFCNHSFYVGVDVHKRSYHVAIRRVDGKTFTFVAAACPEILLKQLQDLDVPIAAIAYEAGPTGFGLARAVRNAGITPLVAAPSRIPRAILAGAKTDRLDCIRLADYSAKGLIKSIAIPSEAEEAARSLLRRRHKLLDRVRSCKQRIKSFLLQHGIQEPQSLQGWSQRAVRDLEQLDLSPEGRMTLQSLIRELSFFEEEKQLIEGCLDELSSREAHIEAIKYMQSVPGVGRIVSSTFRFELFSPERFRSSREVTSYLGLAPVVHHSGEKSPSGRIRPVGQRRLRSLLIEAAWLWRSKDPYASNLYKHFLGRMGISQKAITAVARKLAVILWRLSVEQRMYYCSVKA

SEQ ID NO: 493039 - protein, 413 aa, unidentified
MDKIYDICCGIDVHKKLIVACLNHKRKKELREFGATTRELMELAEWLQKNECEIVAMESTGSYWKPLYNIMESYGLHAIVVNPAHMKAVPGRKTDVKDAEWIAELLQHGLLQPSYIPSKDQRELRELVQYRKSLVGERTRELNRLQKMLEGANIKLSGTVTNINGKSVRKILEYILSGNEIDEKKYDEMYEEKLIAHNLKASKEQILDDLKGFMSPLQRRMLKELLQHLDELNVHIENLNDEIDNFMKPEEKQASQVIQDVTGIGNTSAQTIIAVIGTDMERFPSDRHISSWAGLCPGDNVSAKKRKSGKIRKGNALLKSTLVLCAHAAVRHKSSYFHAQFKRISTHRGKKRAYVAVAHSILIAIYHILKDGVKYQDLGAEYYNQFNAERKIHAYLKKLKALGWEPPKEAVPA

SEQ ID NO: 493040 - protein, 388 aa, unidentified
MRRSNQDRIVGLDVHPDSFAGAILQGMNPWKARVVSTSTRVALPLLEKWALHHTREEDILVMEASGNAFCVAERLRALKRKVVILESHRAGKVGKTYCATDRVDAIKIARIYLSALSPVVWQPDAKTRERREVFSAYQAVVKEGMRLKQQIKSMLNEHCVRLEKGFRLSHPSAIARLLQRRKWTPAQKMLLSQLHAGLVGARVRRQHLRHYMAQEILGEKELLRLTRLCGINLITLYGLIAAIGDIQRFANARKLSTYFGLNPTVEQSGNYEGSGALKRHGRGAIRALLVQSAKKLLQVNNPLQKWGLAIAARRGRNKAAVAVARKLCVAVWHVMQGHVIGAIERMDTLHTKLRKLATELGVPTIKQLGFQTKEAFVQKKLYLLKCYP

SEQ ID NO: 493041 - protein, 351 aa, unidentified
MLIIGCDLHPRYQVIALLNSETGELVTRRLQHENGEAGAFYASLPAPAQVGIEATGYTQWFERLMAELNYELWVGDAAQIRARAVRRQKTDSRDAEHLLELLSTQRFPRLWIPSPEQRDLRQLLKHRHKLVTMVTTLKNQLHFLAMSQGLCRKSKLWSERGREELESLSLGPWARRRRQELLALLDQLQPQIAELDVAVAQAAAADPAAVDLMTQKGVGPVTALAFVLTLGPVERFQNSRQVVSYLGLNPREHSSGGRQRLGGISKQGNPMMRWLLVEAAQTAVRFDPELRRKYQPLKFRRGGSVAKVALARRLAVRLYWRLRQRKAETQPVRMPGSSGSAVVLPRAGSRH

SEQ ID NO: 493042 - protein, 382 aa, unidentified
MAILAIDVSKSSLSFYSDFIGKGFVDNSPQGIFDLFNKASSSSSDFILVLESTGVYSFDVANYFFQNHIPVFWVKTDNMKLYRKILNRPKTDKIDAKLIFDIASKFPDSLVPFVNNSYIISELRNLTRLYLKLNEDIARLKLRLYSYVSLYFPKLDFKLNKTYESLLKDFTVEEIATMPLEELFEYIAKVSRHIVSSKDLAEKIQSLAKNALRLSPNPSNTLRLSIVSTIELIQHYEKQINLVKKEISKLIKRIPNTLTTVKGIGDITAAGIIAEIGDINRFRNASALASYAGLVWNIKQSGNYKSENTQLTKKGNKYLRTYLVMAANSLRIYDPIFKDYYQRKYTQTTTHKHMRALILSARKLVNLVYYLLKNNVPYVPNR

SEQ ID NO: 493043 - protein, 455 aa, unidentified
MNRKRSKSRVDRTLPMMHPNAAAIDVGATIHMAAVRADRVPEPVRCFGTFTTDLHRLVDWFTECGVETVVMESTSVYWIPIFELLDARGFTVFLVNARDAKHVPGRKTDVSDAQWLQRLHSYGLLRASFRPKGQIAELRAYVRQRERLLEYAASHIQHMQKALTEMNLQLHHVVADITGSTGLRIIRAILAGERDPEVLACLRHYSCHSSAETIAKALTGSYRTEHLFALEQALALYDAYHEKASACDVRIEAVLKELSIHRGRDIGSVPPASRRRHRTDQANALAFDVRAALFALLGKDITRIDGLGPYLSLKLIAECGDDLSSWPSAKHFTSWLGLAPSNKVSGGKMLSSRTRRSGGRAAALLRLAAVTVGRTDTALGAFYRRLSSRIGKAKAVTATARKVAVLFYNAVRHGMEYVDPGASSYETRYRMRVVNNLHRRAKAFGFVLQPLEPKS

SEQ ID NO: 493044 - protein, 323 aa, unidentified
MSGFVGVDIAKNTFDIATHLPNGKHKTKAKLGNDPKGFKEFETWLDKHVERSALIVMEATSVYHLELAEFVYNKGFRVCVVNPATTKAYADSELRRIKTDKSDAKLIADFAREKDQKLQPWAPEPLKYRQLKAMVRRLDDLQEMEQMERNRLDVSDEKVKDSINSVLRHIEKEIVETHKAIKKHIDDDPDMRQMRDLIVTIDGIGQKTLERLLAELGDLRKYSDPRQLVAAAGLNPKLQESGKLKGHTLISRIGSARLRAGLYMPGMVALKHNNAIMAMKERLEANGKAPKQIICAAMRKLLHFVYGVLKSGLPYDPKLALAR

SEQ ID NO: 493045 - protein, 338 aa, unidentified
MMKNAASIKTFGRCHSLGIDVSKATLEVVGIATTDVWKRTVGNQLADIERLAQSLVKAGYFGKIVCESTGHYHLLLALVFARYGLDLRIINPLQSSKHQTARIRKTKTDPVDGYVLATMCETERDLPKAANLQPNQVLARLRQGQLQSLDKQIQRLSRSLATYGETYAQLGLEANKSMETINSALTELRRAKQQLEAELESAYLDLAEADDVAQLQVLPGYSSLMASMVAGAFDRKVKSDRSWIAFAGMDISVRESGTWKGGGKITKRGNSFIRKRCYSAAWGAMMNYPEVRKYYDQLRAQGRHHVETLCIIARKLLRIAYAILVNGKSYDPKLAFPG

SEQ ID NO: 493046 - protein, 479 aa, unidentified
MNSEKYIGLDVHQATISVAVMDCRGKVVMESILETKAATLLEFLAGLRGTLSVTFEEGTWAAWLYDLLKPHVQKLVVCNPRKTALLKHGNKNDRIDARKLADLLRLNDLEPVYHGETGVRRLRELARSYLTLVKDLTRVMNRLKAMYRSWAIPCAGRDVYYTRHRAEWLSKIREAGVRRRAEHLYQQLDMLQHLRQQARRELLAESRKHAITAKLRKIPSLGPIRAALAVALIQTPHRFRTKRQLWAYSGLALETRTSGEYCYVRGQLRRSKKQVSIRGLNKDHNHDLKGLFKAAATRASVQPGPFQDFYQRSLAKGIKPTMVRLTLARKIAAITLTLWKKGENFDVEKLGKSSRRVPRGLRGRHVVKEHQGKLRTSRGLPRPMRIGTAMASRISRQAAKSGCACEWGGWGRLSDDGPGQHNPDRSEGPWGRAVGAARTEVPYSRIVPDTERGVHGESSGHEGRWQTRFLGRPCLIFRP

SEQ ID NO: 493047 - protein, 344 aa, unidentified
MKKVLIGIDFSKEKFDVAIIVKSTSMQVHAVFDNKVSGYRKMIKWIKSVVEEKTCSSWLFCDETTGGYSRMMSDWLYAQGYDVWIENALTIKRTFPLKRIKNDAVDAFMIAEYALRFEDKAQLYEPLSPALSGLRELFLYRHHLVRHRCSFQVRRIEKRFTQEKSPIKNTISQSARHIITEINEEIAKCDEKIKEYIESDDQLYSIFAIVTSMPGVGTINAVSLMVYTNNFTKFAYNPRKIACYYGIAPFGRDSGTSVYTDPRVGFIANKMLKSLLTQAALAAVRTCPQIAKYYQRLIERGKKPMVALNNVKNKMIAIITAMVRTGCMYQPDNICVATQSVNVK

SEQ ID NO: 493048 - protein, 416 aa, unidentified
MRVHRNCCGLDVHKQTIAACLISESEDGTSSREKRIFGTMTQQLRELAQWLAEAKVTAVAMEATGIYWVPVWNVLEQYGFELLLINPEHYKAVRGKKTDLKDGERIAELLQDGRLAGSYVPPVAIRVLRDLTRYRTKLVQYQSSIANRIQRLLEQCNVKLASVASDVLGVSALAMLRALAAGETNPQRMADMAKKQLLKKIPALQLALEGCLLPHHRFLLADMLEELDHIGSKIARLEQAIEEQMRPYQKAVDAWMTVPGVKQRLAWNLVAEVGPTVDAFPSAADLVSWAGICPGNNETAGKRKSGTTRNGNRWVRKALCEAAWAASKTKATYLQAQFRRLAAIRGSKRAIIAVASTILTIGYHMLKQGTTYRELGGNYFDKRNLLRTTRRLVKRLEALGHRVILEPTQSPFQSSD

SEQ ID NO: 493049 - protein, 373 aa, unidentified
MPKYSTAFGMDVHLRSTTVCALDADTGEAVTRRFPGNPWGEIAGWMDGFPGPSLAAYESGYLGFAPQRELAGLGVECVVAAVSKIPRSAADSASKNDRNDAARMAKAILAHDISPVWVPSPEVEGIRDLAGAYDGATARLATAKQRLLAFLAKRGFAYGGTTPAGNPRKYWTYDFLRWLDKVRPEDDGGVRTLAALRNEVEAAAEARADLLSEYRAAVDASPIAAEVAALQSIKGCAFALAAAFSAEVGDFTRFRSGRQVTAYFGLAPSQRSSGDSVRLGGISGAGNALVRKLAVEGSWCYAAARHQPKLMPRDTGVPLEIRMHGRKGSERLLRRREEMLARGMPAAKANAATAAELVRWLWALGMMCREGAE

SEQ ID NO: 493050 - protein, 336 aa, unidentified
MYSGIDLHSNNSVVAIIDDADRIVAQKRLPNDITKIVGFLARWQDDLAGVVVESTYNWYWLVDGLQDAGLHVHLANTAAIKQYDGLKHSGDETDAQHLAHLLRLGILPTRTILPREHRVVRDLARKRMQLVNCRTTHVLAVENIMARQLGERMTSNQIKQLTADTIDSLPLAADVGLAIKANVAVIATLQSQIEVLEKRLQERVKPRAQYGFLTGVPGIGQTLATVILLETGPIDRFVDVGNFASYARCVDSVHTSNRKKKGEGNVKNGNRYLAWAFVEAANFARRLCPEAKRFHERKKARTNNIVATKALAHKLARASYHILKEGKPFDATRCFA

SEQ ID NO: 493051 - protein, 352 aa, unidentified
MRFYTGQHQYYCGIDLHTKNMYICILDQAGKILVHKNLPTSPNALLQILEPFLPDVAVTVECIFTWYWIADLCREENIPFILGHALYMKAIHGAKTKNDKIDSHKIAVLLRGGMIPMAYVYPSEMRSTRDLLRRRMHFMYKRSELLSHIQNTRSQYNLPEFEKCISRKRNRTGISEHFEDVSVRKSIELNLTLLKQYDILLNDVELYLTRHAKEHDPNNLYLLHTIPGVGKILALVLLYEIHDINRFERVQNFTSYARLIKPQKKSAGKVTGSGNRKMGNAYLKWAFSEATLLFIREKQEIKELHLNLKNKHGKARALAIISHKIGRAVYYMLKNQKAFDMKYFLKIKDRAA

SEQ ID NO: 493052 - protein, 362 aa, unidentified
MFRPHTLYIRIRIVRKVSEPAFAMKDQDVTDVIRRKQQTAMRYIGIDVSKATFVVAYSSDKGGEIRTFNNTTTGIKQFIGALPKDSSIHCVMEATGNYSAMLLYLLNVAGIAVSMENPLKIKNFARAMLSTVKTDKIDARLIALYGEKMNPQPFKIQGEAILRLRQKRTVIRQLTKQITAMSNLRGSLACLPVPDKGATHTVDETIEFLEKRRDRLQSELTDLVEVEFSRQLALLTTIKGIGITLATALIITTEGFTYFQNAKQVSRYLGICPTYEQSGTSVNIRGHINRNGDAYTRGLLYVAAWTASRFNTKCGETYTRLRQNGKPGKLAMIAVANKLVRQAFAVVTHDKEYVDGFVSNRP

SEQ ID NO: 493053 - protein, 353 aa, unidentified
MKKQSRLQHVILGVDTHLDVHVGAVISHSGSLLGTRSVSVSSDGYADLFHWATEFGQLKVAGIEGTGTYGAALYRYLQSKGITVIEVNRPDRAKRRMHGKSDPLDAENAARAVLAGTATAIPKDQNGACEAIRMVSVARRSAVKAKTQAMNQIRALLVSAPQEIRERLWRAKPHECAKACLSVRSLGATEISITLMTTLKLLARRWAILAEELNQLDKNLDGLTQEHCKNLRSRMGVGPYAAAALVTVAGDNPARLRNESALAALCGVNPLPASSGKTVRHRLNRGGSRSANNALWTITLVRARSDPRTREYVARRSAEGLSTKEIYPCLKRYIVRELYPLIMHDLSVIKSPS

SEQ ID NO: 493054 - protein, 457 aa, unidentified
MSQTKRSRKSRGLFPVHPAAAAIDVGAAVHVAAVGPDRDKEPVRTFQTFTDDLHRLADWFAQCGIRTVVMESTGVYWIPVFEILEQRGFEVMVVNARDAKHVPGRKTDVSDAQWLQRLHEYGLLRASFRPQAEIAGLRTYLRQRERLLDYAAAHIQHMQKALMQMNLQLHHVVSDITGVTGMTIIRAIVAGERDPNVLASHRDRRCHASVETVCQALVGNYREEHVFALTQALELYEVYQTKVTACDEQIEAILKRLKKNAPPPASKLLPVRQRTHQPNAPAFDARGALHAILGVDLTQINGLGPYLALKLVGECGTNLAAWPTAKHFTSWLGLAPHNKISGGKVLSSKTRRTSNRAASLLRLAAGTVGRTDTALGAFYRRLSARVGKAKAITATARKIAVLFYNTLRHGMAYADPGATYYEDRYRQRVLNNLQRRAKSLGFVLREAGLDAARADVS

SEQ ID NO: 493055 - protein, 361 aa, unidentified
MAIDDSKRTLVIGILRPGSQEPDVHSIPNAPRHLRRHLQRLQREGDVQVCYEAGPAGYDLYRQCTALEVPCQGMAPSLTPRKPGDRIKTDRRDVRKLVRLFRSGDLTPIAIPDEASEAARDLLRCREDVQEDLLRWRHRLGKFLARHGRLYREGRNWTQRHWAWIRAQRFTLPVLARTLEEYVFTVEQLLARVAALDREIVALAETAAYRTHVGWLRCFRGIDTLAAMVLLTELGELSRFPHPRQLMAFLGLVPSEASSGERERRGSITKAGNGHVRRILVEACWHYRHPPRLGGRLAQRSAGQPPAILRQAWAAQQRLHRRYRHLVGRGKRPPVAVVALARELSAFLWAALTQGPAVQAA

SEQ ID NO: 493056 - protein, 462 aa, unidentified
MPRRKLKTTTRPRQARLVYREDAPTLQVQNPHAAGIDVHTDNHVVCVGPGLVQTFGAYTADLQAIADYLRQAGVTTVALESTGVYWIPLFEHLQALGFECYLIEPGQLRGCGARPKTDVLDCQWMQRLHTYGLLKASFRPPESVRALRAYHRQRQMVIRHAAAHVQHMQKALEQMNVKLTEVLSDITGVTGLRIIRAILAGERDPHTLAGLASPICAKSRDEFALALQGLWQPEHLFELRQAHDLFQTYQRLVDECDRQIKAELAGQPDRAGDKPGPGPRPRRSRKKNDLRFEATGPLFRALGVDLTEIEGIDVGTALVVLAEIGVDVSRFPTEKHFAAWLGLSPNTARSNRREKRQSPRQGASRLKQALRMCAQSVGRTQTPLGMFYRRIKSRIGGMGACTATAHKLARLVYRLLKYGRAYVKQGMDEYAAKMHTNAERILRKKAAALGYELTPRAAGATT

SEQ ID NO: 493057 - protein, 400 aa, unidentified
MSGLKGRFDCFVGIDVSKDKFDACGITGEEAKLFQISAGMDRKGFEKLKGHLASVSVSSVLIGMESTASYHVNLFSYLVSEGYKVILINPLLISNYVKMQLRKTKTDKKDAVVIAQFLLANGDTLIQRITPSLISDLRDLSRQRESLVDEMTSLKIEIKQLLNITFPELEHMVGIFTKSILNLLQQYPSAFALRDADLDQLSQMLIADSYGHKREAFAAALIKAAHSSIGINSTAKEMILKQKIALLFHLEDALQEITGMLIEMARKLMEEDINIMTSIKGIGDKTATNFLVEMGGDINQFERSGKIIAMAGLDPAVYQSGKHEGKGRITKRGNRHLRRIIWLMTTKVIQYTDIFNAYYQKRRKEGLPYKMAVLATAHKLIRVIYAMLTQRTTFCPQMNS

SEQ ID NO: 493058 - protein, 474 aa, unidentified
MKANTASNHSAKSIRPAKKLPVVHPHAAGIDVGATEHSVCVPEDAVPVGESPVRQFRAFTGDLDQLVEWLQACKVKTVAMESTGVYWIPLHQKLERAGLEVVLVNARHLKRVPGRKTDILDCQWLQQMHSYGLLSGSFRPSDDICVLRTYLRHRGNLVAGCGIQVQHMQRALDQMNIHLHHVISDLGGDTGLAILDAILAGERDPKELVKLRDVRCSKATIGDMEAALKGDWREEHLFVLQQSLECYRALQRQMAQCDDAIVKVLERVEVNPSQVPEEERPRNPVAQAPTGKKTRKKRARGNSPRQDLTEQLRRICGVDLTRVAGFNMLSVLILISEIGVDMSRWRNAKAFCSWLGLCPGNKISGGKILSTRTARVVNRAAILLRTLATTLARTDTWLGSFHRRMRARLGPAAANTATARKLATIVYHLLKYKEEYIDVDRVVYEEKFRRYRVGRLRRQAEELGYEITEIKAAA

SEQ ID NO: 493059 - protein, 282 aa, unidentified
MDQVIIGVDPHKLSVTIEARDRREVLRVTGRFGTGTAGYRQLLRAARQWPQRVRAVEGANGIGRPVAQRLLADGERVLDVPAKLAARARVFDTGQGRKTDATDAHAIVMVALRDTGLRELSSDPELMVLRMLCDRRDEISRGRAQALNRMHRLFLELLPGGAPVKKSTGQYKALLARVRPRDLAGKTRRRMAAGELAGLARYDARLKTMKAELKAAVQARGSHLMNIHGIGPAGAARILADVGDIARFPDRNHFASWTGTAPIDASSGEHTRHRLSRAGTAG

SEQ ID NO: 493060 - protein, 338 aa, unidentified
MAIVTLGIDLAKNVFALHGVDATGKSVLVRPSVARGKLLEIIAALPPCLIGMEACSGAHHWARMFEAHGHTVRLMAPKFVTPYRLSGKAGKNDAADAAAICEAVTRPSMRFVPAKSLQQQSELLVHRARQGFVQQRTATINRIRGLLSEFGVVLPLKAATVRREALHRLEDLPGWANTVVGDLLSEVSRLDERVAQYDRHIEQIAKASAPARQLMQLPGVGATTATALVAMIGRGQEFKCGRQLSAWLGLVPGQYSSGGKQRLGRITKAGDPYLRMLLILGARSVLQSAKDKTDPVSRWAAQLAARVGYWKAIVAIAAKNARMCWAVLARGEAFRLPA

SEQ ID NO: 493061 - protein, 351 aa, unidentified
MQPVPVLNLKVMDKFTKKSCFVGIDLSKPYIDAAIVNEKEPKRFQNARFSNDIKGFEALEKWILKQGVKTKDCLFCMEHTGTYGLLLFAWLTKQNLDFCVEPGLQIKRTLGMTRGKDDKVDARRIATYAMEKKAKLKQYELPSENLIRLKQILAYRDQLVRLRTSLKNSLQSHMEYQQISSLDFVTTDIQKQILLKDESIESCEKQIMGIIKSEEDLTQNFKLATSVKGVGLVIAAFMIVSTNNFTGFDNGRKYACYAGIAPFPNQSGISIRGKTKVSHLANKKIKTLLSNGANSAKSHDPDIKAYFERKIKEGKDYKSVINAISCKLVNRVFAVVKRQTPYVSTYQQKIA

SEQ ID NO: 493062 - protein, 332 aa, unidentified
MQKISTMRTSGKNIFQGQLTIGLDLGDRSSSYCVLNEAGEIILEQKLPTTPEAMQQAFGRMARSRLAMETGTHSPWVSRLLTALGHEVIVAHAQNVRLIVKSRRKDDRLDARTLARLARIDPELLSQVQHRSAQAQLHLKEIRARAGLVSARTALVNATRGLVKSYGERLRKCGTQQFRRETTSGLSAGLREALEPLLREVESLNERIQEYDRRIETMAKETYPETALLKQVKGVGDLIALTYVLTIEDAHRFRKSRDAGCFIGLQPGRRNSGESEPQMHISKEGTSIYGRCWCRGRTTFWDRSGKIVICGAGDRNSRREEEKTPRNGRWWR

SEQ ID NO: 493063 - protein, 402 aa, unidentified
MTGPANEEAQAAERKFGTVRHELETLRAWLQSEGCTHVVMESTGVYWKPVLNVLEDDPQYSLKIVLANPQQVKAVTGHKTDPHDARWLAHLLRHGMIHPSFIPPRPIRELRDYTRRRKQMIGIAAEERNRVQKVLEDANVKIGDVLSDVFGLSGQLMLEALVNGLGGEVQPSAFDIAQLARGHARKKLEKLRAALEGHHQMRTSHRILIRHAIRHMAFLAEEIEALDQDIADLIVEANLSTAHELLQTIPGIRFQAAATILAESGPDMKQFPMAPNFSSWSGLVPGNNESAGKRKRAPAMKGKPHIKTALVETAWSASRTKHSEFQERYERLKQRIGHKRAIVACAQALVIRIYEVLDSGTPYQSRGPNLNPRSVKRLIRHHTRRLTCLRHWLPKDASAPEL

SEQ ID NO: 493064 - protein, 411 aa, unidentified
MGERVRLFIGDDWAEDHHDVELMDVAGRVLARKRLPEGVAGMTRLHELIGQHLGVADEDAQVVIGIETDRGPWAAALVAAGYAVFAVNPLQASRYRERHGVSGAKSDRGDAHMLTDMVRTDSHQLRAVAGDSPDAGAVKVVARAHKTLIWERTRQVQRLRHQLREYYPAALAAFADLDAPDALELLARAPDPARAAKLTRAQVSAALKRAGRRDIPGKATAIMAALRSGQLGQPPAITAAYAATARSLIAVITTLNEQVKVLQGQVEADFGRHPDAEIYLSQPGLGPVLGARVLGEFGDDPHRYATGKARKNYAATSPITRASGKRKVVAARFIRNDRLTDALMAQAFTALSASPGARALYDAERARGAEHNPALRKVANRLVGILHGCLKTRTRYDEAVAWPHHEIKLAA

SEQ ID NO: 493065 - protein, 321 aa, unidentified
MQTKNVVVYAGVDVAKATLQLHLRGQQSEFSNSPKGLHQLCAQLQKVPTVHVVCEATGGYERALVKTLQQGQIPVSVTNPARVRAAAQAQGQRAKTDQIDAQVLTDYGQRYQPKATPPTSATQDQLVALTQWLKQLIHGRALAKTQAEHHQDPFVHRQHAKLMTHLESQIEVVEKQIEALLEQDAALQQRVNCLDEIQGVGPRTAWMVLAHMPELGRLNRQEVAALAGLAPWTRESGTMKGMRCIGGGRPEVRLALYMAALSAARCNPVLRALYKRLRAKGKLPKVALTAVMRRLLTYMNHCIKALPSEPATAKAEEQKRA

SEQ ID NO: 493066 - protein, 319 aa, unidentified
MAQNDLVVAGIDVAKDKVDVCIRSPSLRRTFASTAEGRRELVSWVHRQKVGKAVLEASGGYEREWAKALRNAKIEVRIVDPKRVRSFAQSAGRLAKNDAIDAEMIAWFAETFDEARGQAWDAAREELVQIVNARQALLEQQTQMQNRSEHAVPIPVRKMHERLLKAITLEVARLEAAIAALIKASPHFAETAEIIESVPGLGEITSAGLIAAMPELGQVSNEAISALLGVAPYDDDSGKRRGERQIKGGRRKVRNLFYMACLGAATRHNPVLKAFYRRLIAKGKKAKVALVACMRKLIVILNIMIARREKWDASRHAVG

SEQ ID NO: 493067 - protein, 397 aa, unidentified
MDAAGRRLAAARLPEGVAGITRLHEMIGAHLGEDAGAGADAGAGEVAIGIETDRGPWVSALVAAGYTVYAVNPLQAARYRERHGVSGAKSDKADAHTLADMVRTDAHQLRPVAADSPQAEAIKVVARAHKTLIWERTRHTLRLRYVLREYFPAALEAFDDLAAPDTLELLAKAPDPASAAKLNRSQIRAALKHARRRDIDMKTTRIQAALRSQQLGRAPVITAAYAATTRSIAAVLATLTEQINTLRGQVETHFGRHPDAEIILSQPGTGVLLGARVLAEFGDAPGRYADAKARKNYAGTSPITRQSGKRKITHARFVHNDRLVDALMSQAQSALLASPGARAYYDKQRARGLDHHAALRQLANRLVGILHGCLKTRTLYDEATAWSHHNQDQRRAA

SEQ ID NO: 493068 - protein, 350 aa, unidentified
MMIIGCDFHTRYQQIAMMDDATGELIERRLEHESGEAHTFYRGLQGAVRVGIEATGPMHWFERLLSELGHELWIGDSAKIRASEVRKQKTDERDAALILDLLLANRFPRIWVPSPAERDLRQLLWHRHKLVRLRTMLGNQLHFLAMGQGLCRKQKLFTKKGRGELEHLSLGPWSSRRRAELLRLLDQLGPSIAELDRAVLEEAQRREDAVRLMTHPGIGPVNALAFVLTIGPVTRFGRSKQVASYLGLNPSEHSSGGKRRLGAISKQGNTMVRWLLIEAAHHTVRFDPELRQDYQRLKFRRGSAVAKVAIARKLAVRMYWMLRSGADYAQLVRTQGSPAATLVSTTTPLG

SEQ ID NO: 493069 - protein, 423 aa, unidentified
MDGDYRLFVGIDWATDAHQVCVMDRDRRVVGERSVEHTGAAVAQFVGWLVQLSQGDPGLVAVAIEIPRGAVVETLLERGFHVYAINPKQLDRFRDRHTVAGAKDDRRDAFVLADSLRTDRPCFRRVRVDDPLVIQLREVSRADEDLRQEMNRLTNRLREQLHRFYPQVLRLSAAADEPWLWALLEVAPSPAAAHQLKRRQVDKVLRANRIRRLTADEVLAELGAPALHVAPGTVEAATGHIALLLPRLRLVHAQRQGCAERMEALLDQLASAEENAEGEKREHRDVEILRSLPGVGRVVAATMLAEASWPLAERDYHALRAHAGIAPVTRQSGRRLVVNMRQGCNTRLRNALYHFARTSTQHDEASRRYYAELRGRGHTHGRALRAVGDRLLRILFAMLRTGTLYDARRARRVPPGAPAPVPA

SEQ ID NO: 493070 - protein, 336 aa, unidentified
MTLYCGIDLHSNNCFVTVINDMDKRLLEKRIDNDPGLIIQALKRYRARLKAVAIESTFNWYWLADALEDAGFKVQLVNTARIIQYEGLKSTDDRFDAFHLAHLMRLGILPTGHICPRADRGLRDLLRKRMFLVQDRSRHLLSLKTQYQRQTGHTLAANSIKSKRFVLPTVGDENVQLAMTSNLAIVRALTLQIRTLERVILRQVQPVPAFELLKSTDGIGDILAQTILLETGDIGRFKGPGNYASYSRCVASRRLSNDKKKGTGNRKNGNKYLAWAFIEAANFAIRNNAQARRFYEQKKARTNNIIALKALAHKLARACYHIMKYEVPFDSNKLFA

SEQ ID NO: 493071 - protein, 342 aa, unidentified
MQISTIGWDLAKHVFQVHGIDANGNVVVREQLRRSQVMTFFEKLAPCLVGIEGCASAHHWARELEKLGHIVRLMPASDVKAYVKRNKNDAADAAAICEAVRRPTVRSVAVKTPQQQARLMQHRARELLIRQRTQLINAMRLHVGELGFAVAQGREGLKELLAIVRDGTDYRLPDDARASLSVLAAQLMACTAQIAHLEKRIHAQHRANEASRRLEAIPGIGVVGATAITATLTDPTAFRTGRDFAAWVGLVPREDSTGGKRRLGPISKKGDRYLRRILIAGALAVLRHARAHPEKHPWLSQLLARKPAKVAAVALANKMARIAWALLAKGETYRAPALAARV

SEQ ID NO: 493072 - protein, 375 aa, unidentified
MGDYSEAFVGLDTSKLTNAVAIADAGRGGEVRFLGEIENTPSATAKLVRKLSTKYKRLTFCYEAGPTGYGLHRQIKDLGFECVVVAPSLIPKRPGDKVKTNRRDALSLAKLLRADELTAVWVPDGRHEAMRDLTRARETAMLDLRTKRQHVSAFLLRLGRPYPESRKTWTKAHMSWIASQTLEHPQQRLVLEEMMLAIRQAQERLQRLEQAIAAAVGEWSLAPVVTALMAMRGMDLISAATLLAEIGDLSRFQTPHELMAYLGLVPSEQSTGEDVRRGPITKAGNRRARRMLVECSWSYQHPPRVGQAKQPKVDAAPPAVREIAWKAQCRLYRLLRALIRNGKLKTVAIVAIARELAGFIWAVARAVTTARAAVA

SEQ ID NO: 493073 - protein, 352 aa, unidentified
MQTPQLFIGIDVHKKNWSVSIRTDLFDHKTFNMTSDPGILIDYVNQNFQGYPVECCYEASCCGFFPYRQLSQAGWHVKVLNPSDIPQSAKNKDQKSDRLDCRHLAKQLHSGHLTGIYVPDEQQEQLRSLFRQKDNLTKVIRKLKSQIKAELLYYGIKIPLQYDTPRWTMELTAWLNRLEWKHSSGHSSMQSKLRHLDFVRQEWLALNTELRKYACTNYAEDYQLLMTIPGIGPTIAIGILAELGNIRRFKKFDQLASYVGLIPSIYSSGETVQVRGLTYRSKSLLRSYLVESAWVSVRQDPTMQNYYRSHKGKQPNKIIIKVAHKLLRRVWHVIKTGEGYKIGLKENSAEAS

SEQ ID NO: 493074 - protein, 356 aa, unidentified
MQTQVTKKIDFTGKNLFIGLDVHKKSWSVTIIIDGIEHRTFTQPPDPESLSNYLHRMFPGASYYSAYEAGFCGYGIHRELNSLGIKNIVINAADIPTTQKDKLQKRDPVDSRKIARSLEKGSLHAIHVFDRELEELRTLNRTRFYLMRDLRRSKNRIKSFLHYFGEPIPLEFDNNQWTLKFVSWLKQVKMQTTSGQDSFSHLIESYEHHRRQLLDLSRLVRQRIREYDNELYSLLKSISGIGPLTSSALITELGDINRFNNIDQLGSYVGLIPRIRESGEITHTGGITFRCNSFLRTLLIESSWQAIRNDPAMMQYYHKHLVNSKGHKVVIKVARKLLNRIRYVMKNRQPYRTGVA

SEQ ID NO: 493075 - protein, 458 aa, unidentified
MRKKSKRIKGMEEARPFEGMSKVNQNAAGVDIGATEIVACVSRGEDVQLVKAFGNYTVDLQSIAKWFHEHKIKTVAMESTGVYWIPLFEELERQGFECLLISSRSLRRVAGQKTDVEDAQWIQTLHSYGLLKGSFRPQGDLVALRTLLRHRSQLVEHRSPHIQHMQKALLQMNIQLSQAVTDVTGMTGQKIIRAIVAGIRDPEQLATLRDPGCKHSAEEIEKALTGTWRAEHLYILKQSLELYDFYTEKVEACDKEISRRYGMTRPDWASRELPAIPDKKRNSHSKNAPKEAKEIREHLYRINGVDLSLVDGMGVSLAQTVTMEVGSNVGEKFPTEKHFCAWLGLAPKHDITGGKVLSNRTLKTKNRAGQAFRLAANSVKKADCPFGMMYRRLRSRLGPAQATVATAHAIARVVYKMLKYQVEYDPLSVNEYQKQYEEQQVKYMRKRAAKFGYQLVPA

SEQ ID NO: 493076 - protein, 358 aa, unidentified
MTQVKKLDFSGTTIYCGVDVHKKSWRVNIQDSEFELEDFTQNPDAVLLHKHLTRRYPGASYKIGYEAGFSGFSMQRSLSGSGCQCWVVNAADIPSSDKDKKQKQDKADARKLCAYLQSKKLKGIHIPDAAWEHARTLVRTRERIVNNQTRCKNRIWQLLHFSGLPVPAQQQEGKYWSKRFIDGLQKMDCGGSVHLQQSLQLYIKDYLQTRLLLLEATRAIRSLCREEKYAGNIKLLQSIPGIGEINAAVMLFELQDVTRFKRFDYLCSYVGLVPDTSDSGDTKRTKGITHRHNYYLRTALVESSWSVVRKDPALLMKYKEYCKRMERNKAIIRIAKHLLSRINFVLRNKKEYVTGVVA

SEQ ID NO: 493077 - protein, 456 aa, unidentified
MKNEKTAKLQIANLNAAGIDVGAKSYMVAIDQEKLNVREFGVYTKDHERLIHHLKCHGIKTVAMESTGSYWQTLFASLQAAGLDVLLVNGSQTKNVKGRKTDVIDCMWIQKLHALGLLSGSFLLSNVLQELRTYYFHRQHLIEQTVMYANKMEKSLRLMNIRLDIVLRDVTGKSGLNIIEAILSGDRDPKKLASLADVRVKKSQEEIANALQGSWRQELLFELQASLQFYKLYEVALIECDNLIEMKLTEYVPKENVFTGNDIQGKVNYKKTRKHSPAFNVSKISYDYFGTDLFSIPGVSHTTVLCLLTNIGNDIHKFPTGKSFASWLRLIPNNKISGGRIISSRSPSGKNYLAIALRQAANSIGNQKEHPLTPFFKRIAFRKGRISAITATARKLAVIIWNMLTKVQPYNKENKQTNNERHKHLQLRNIERRIGSLQLNQDELKKLFTRTSLLVT

SEQ ID NO: 493078 - protein, 341 aa, unidentified
MSIVGGLDIHRSQVTFDYLDTETGEVRCGQVCPADREHLRGWLARFAGRDGDFVMEGCTGWRYVAEEVAAAGLRPHVADPAELAAQRGRKRHAKTDRADARFAREQLQAGRLPECWVPPPRILEYRALLEAYRDLRAEHTAWVQRIQAVLFHQGAPRLGAVSTAGGTARLRALAGQLSPAGQAQVAAALAMAGACEQQMGQLRPQLAAAARHLAGARELQQRIYGVGPGTALALTCWLGGAGRFSSSRKAVRFAGLDVTVYSSAGKRSPGHLSRQGPPVLRWFLYEAGKAHARAGAPGHAYYTQVKDRIDGKRAALSQARKITRQAMHILAELGDDALAPC

SEQ ID NO: 493079 - protein, 373 aa, unidentified
MPKYSTAFGMDVHLRSTTVCALDADTGEAVTRRFRGNPWGEVAEWMSGFPGPSLAAYESGYLGFAPQRELAGLGVECVVAAVSKIPRSAADSASKNDRNDAARMAKAILAHDISPVWVPSPEVEGIRDLAGAYDGATARLATAKQRLLAFLARRGFVYGGTTPAGNPRKYWTYDFLRWLDKARPEDDGGVRALAALRNEVEAAAEARADLLSEYRAAVDASPIAAEVAALQSIKGCAFALAAAFSAEVGDFTRFRSGRQVTAYFGLAPSQRSSGDSVRLGGISGAGNALVRKLAVEGSWCYAAARHQPKLMPRDTGVPLEIRMHGRKGSERLLRRREEMLARGMPAAKANAATAAELVRWLWALGMMCREGAE

SEQ ID NO: 493080 - protein, 362 aa, unidentified
MRIIGCDLHARQQVVAMLDTTTGEVVSMTLKHEGNNVREFYAKLPRPVRVGIEATGSMQWFVNLLEELRIECLVGHPAEIRAAEPRKQKHDRRDADLILKLLVENRFPAIWLPSKELQDLRALLRHRHQWVRMRTRIQNALQSIALANGLRRGTSLWSHDGQNTIASLPLAPHTAYRRNELQALYAKFEAEIEKLNQRVEEQACKRAGARLLMTHPGVGPVTALATDVFLGDPARFADSKALASYVGMIPREYSSGGRQRLGGLTKQGNPLLRFLWGEAGAHAVRRDPELQRFYRRKLIQKGFGKASVAVARKLGIRLWIMLRDQIEYHEFCRRGQKQQKSSDACAGMPETRNGANSHRPVD

SEQ ID NO: 493081 - protein, 353 aa, unidentified
MIIIGVDFHPEFQQIALVDTDTGEFQEKRLAHREDAERFYRALAGQEVRVGMEASGHARWFERLLAELQFEVWIGDAAEIQSKRVRKQKTDRQDAQLILKLMLKDDFPQIWVPSWENRDVRQLLWRRHQMVQMRTRIMNQLQALALNEGLRCRKRLWREQGRQQLELFRLAPWASRRRHDLLELLDRLNPTIAGLSQAIEQEAEKHPEAQRLMTHPGVGPLTALAFVLIIGKAERFQCGKQIASYLGLVPLEKSSGNRRRLGHITKQGNSMVRFLLVEAAQVTVRSLPEWRSRYVHLMMRRGRKIAKVAMARRLAVALYWMWRKGWNYEQSKNSVRTRASSDQAMVCSTTPSN

SEQ ID NO: 493082 - protein, 411 aa, unidentified
MEAAVITAVGIDVSKSKSTVAVRRPGGEIVLRPFEVHHTNSDLKKLASTLKKLGGDIRIVMEHTSTYWRPIALTLKEADFFVSVVNAMLIHDFSDNTIRKLKTDRADALKIANYALTFWDILPPFNNEEETRLLLKMQSRANERITATATALRNGLIALADQTFSGVNIAFAPNTKNANGHEKWVDFFLRYWHKDCVCQYSMEAFTESYRGWCKRKNYKFRTDTAHKIYLLAQESVATLPKCESTKMLITQACKSLNAVCEAKQSTQLEMQRLAAMLPEYEVVMQMEGAGPVTGPALMAEIGDVRRFKNKKALVAFAGIDAPPFQSGAFESKSRHVSKRGSPHLRRTIFIISNIILTRSNPENAVYCFMDKKRSEGKHYYVYTVAGSAKFLRVYYARVTEFLRSQPSYDAY

SEQ ID NO: 493083 - protein, 338 aa, unidentified
MLYSGIDLHKRTAVIATVDETGKVICEASLPTSRFAVARYFAELPDSTRATVEATSSWYWLRDLLHQEGVPLTLAHAKFVKAIAYAKVKTDAVDALTLAQLHRVDLIPRAHMVSPELRPLRDLLRTRLQLVEKRVSAKNSVHRLLEKFNVPDPASLPDEAALSASLYEEQIELLDSQIRRIEQQLQPRLIPEPDIQRLLWIPGIGKITAFTLYLEIDGIDRFPSVRQFFSYCRVVPGAHNSGGKNRHGRRKDGNRYLKLALSHAAVRAIQYYPEIKRFYQRKARQKNPAIARTLVQKELARSVYIVLAEGVEFNHTFKGQPLERRKQSKWPRQASPDV

SEQ ID NO: 493084 - protein, 360 aa, unidentified
MTDGSKQRPLMTAGLDIGDKYSYLCLIDSEDGQMIEEGRLRTTPEALRRRFASERPLRIAIEAGTHSPWVSRLLEECGHEVLVANARKLRLIYANKRKTDQIDAENLARLARLDPRLLYPLKRRGEDAQAHMALIRSRQALVDCRTQFVNHVRGAVKSFGHRLPKCPARSFHKRASEHIPEALWPALGPILEQIGSLTERIRQYDRKLETISKERYPETELLRQVEGIGPLTALTFGLTLEDPYRFEKSRSVGAYLGLVPATERSGDSDPQKRISKEGDQMLRKLLVGSAHYILGPFGSDSDLRRHGEKIASRGGKNSKKRAAVAVARKLAVLLHSLWISGEAYESLRNAHRCGGREKAA

SEQ ID NO: 493085 - protein, 343 aa, unidentified
MVHYVGLDVSLKQTSICVVSDTGSVVREGVVDSDPAAIAAFVRSKAPDTVRVGLESGPTSTWLWIELKRLGLPVICIDARHAKAVLKMQINKSDRNDAVGIARIMQTGWFKEVRVKDADCHAVKALLSSRALLVKIKRDLENQIRGLLKNLGRVIGRAKFNGFTTRAVELIEGRPELVAVVAPLLKVRAVIEKQIDDLDRKVLKLARHDAQIRRFMTVPGVGPITALCFKATIDDPARFKRSRSVGAYIGLTTRRHASGEMDWSGRISKCGDAMLRSYLFEAAGVLLTRVPKWSVLKAWGMRLAKRNGLRKAKVAVARKLAVIMHRMWVDGNEFAWSKNEIAA

SEQ ID NO: 493086 - protein, 480 aa, unidentified
MKAKQGSVFSRSSHKGPIRPAASMPVVNPHAAGVDVGSKEHWVCVPEDSVPNGQPNVRSYSGFSADLDKLVEWLLACGVKTVALESTGVYWIPVAQKVEEAQIEVILVDARHLRYVPGRKSDVKDCQWLQQLHSYGLLNGAFRPAQDICALRSFLRHRQNLVESAGREVQHMQKALQLMNVHLHHAVSDLVGATGLRILDAILSGERNPKVLVQLRDDKLCKKTTKEELEKALEGDWRDEHLFALRQGLETYRHLLKQVTECDAQIEKMVTQLETPEHPVPEGPVPPNPKATETPRKKKRFHRTKTGPSLKLDLTQELTRLCGVDLTQIIGLNVLSVLIIISEIGLDMNRWRNVKAFCAWLGLCPRNKISGGRVLDSRTAHVVNRVSILLRIVAPTIGKTDTWLGDFHRRMRGRLGPAGANTATARKLACLIYHLLKYKEDYIEVDRLVFQEKVRQQRMNRLRKQAKELGMELTEISRPA

SEQ ID NO: 493087 - protein, 385 aa, unidentified
MSAHPTQIQAAAQLQANTLFASLELSKARWLVTVSAPGSDKLSRHQVPGGDGQALLELLWRLQAAAARRTGAPVMIIVIQEAGLDGFWIHRLLVQNGITSHVVDPASIAVNRRHRRAKTDKIDGVKLLRTLMAWMRGERQVCTMVQPPSPEDEDRRRLARERARLLKERIQHTNRIKGLLSGQGIPDYDPLHRDRRRCLAALTTGDGRPLPERLKAEIGRELDRLEMVVSQLTVVERERDALVARTAEADACAAPAALARLRGGGPELAALLWLEALFRRFDNRRQIAAYAGLTPSPWQSGGIDREQGIAKSGNPRLRRAMIELAWFWVRHQPGSALSRWFVERVGTARGRVRRIAIVALARKLLVALWRYVTQGVVPQGAVLKA

SEQ ID NO: 493088 - protein, 426 aa, unidentified
MNATANFAATIGLDWADQKHDLWIHPADGSKAQHVRLEQTPEALHGWVAKLRERFGNCRVAIGIETSRGPVISALMAYDFIVLFPVNPKALKDYRAAFSVSGAKDDRTDAQLLEEFIRLHRDKLKALEPDTELTRTLAGLVENRRHLVDERTRIVNQLHGTLKTYYPLAQTLVGEEMNLPLAADFLACWPDLETLQRAEVKTLRVFFYKHNSRSADKMEERLAAVQKAKALTTDLAIIVPARLLVVALAGMLKPLHRSIARLEKQIKQAMDQHPDAAIFRSFPGAGPALAPRLLVAFGTNRDRFESAQEVAQFYGLAPVVIQSGNSKATLMRHRCPKFGRQTFHENAGCASKGESWARCYYEQQRRRHDDKHHQACRALAYKLIRIYFACWKTRRPYDADRYTQALEKHGSPLHKALENEAKTRCE

SEQ ID NO: 493089 - protein, 321 aa, unidentified
MSVQNFVGIDVSKDDFYACFDEGEAAQQYPNTKGGISRLLLVLQQKQYHPADTKIGIESTGAYYYRLSFDCTNKGYTVNIINPLITAGQNKATVRKTKNDKKDAALIRYVLTQGHGYPFVETKATLILKNLVRTRSYLSDLKRNIQRRAADVSYKEAIIKEPITMLNQEVFAMLAQKIKQLDQELRQHDKPTQTLLQTIPGLGPTTSAALIAELTDITRFPSSKQLTAFLGLDPRTYESGTSIHGKGYITKRGNTLLRTLIYNCTAVAIQRPNIFRTYYTAKVSAGKPKMIALVATMHKLVRVIYAVWSKGAPYCEKEAGS

SEQ ID NO: 493090 - protein, 423 aa, unidentified
MEVMHKRVAGLDVHKETVVACARLMTGRKMTRECRTFATTTDGLLGLLTWLTECRCTHVAMEATGVYWTPVWKILSDGDFALIVANAAHIKNVPGRKTDLNDAMWIADLLACGLIKASFVPEEDIQELRALMRTRKQLVREATRHVQRIQKMLEEANIKLDSVISDIPGASGRRMIEAMIAGESDPGRLAALAGRGIKASHQELHDALHGRLRAHHRFLLRLHLGQWDTADAAIQDIDREVDARIEHMDAEINDGKAPFRALIVRLSAIPGVSALSAITILPEIGRDMSRFPTAGHLVAWAGLCPGQNESAGKQKSSRLRKGAHWLKTMLVQCAWAAKRKKDSYYIAQFYRLQSRRGPQKAICAVAASILTAIYHMLKTGAPHRDLGANYFDRCSPDAKAKRLVTQLSRLGFEVTIQPAANAA

SEQ ID NO: 493091 - protein, 387 aa, unidentified
MEVRMVSTPSAATDNEPVHCYVAIELSKSSWVVGFQTPLTNKTSQYQVKACDARALLELIERIRKRVARELRRPVEVMSCYEAGYDGFWLHRVLKAHGIHNYVLDPASLQVNRRARRAKTDQIDADRMVRALIRYLRGEPEACSVVRVPSVEQEDAKRLHRERRRLIAERVQHVNRIKGLCATQGIYHYAPLRKDRLARLDDLRTGDGRALPTRLKAEIARELKRLEVLLEMIATVETERDVILTSAASTHLNAGKIKMLAKLKAIGPEFATTLVGEVFYREFANRRKLGSYVGLGSSPFCSGPVDRDQGISKAGNPTARSMMIELAWTWLRYQPGSALSVWFRERVGNLKGRPRRIAIVAMARKLLVALWRYLETGLVPTGTALKA

SEQ ID NO: 493092 - protein, 484 aa, unidentified
MSKKKQRYIRGKKEERFKRKIRGIEKEKILGISIDTSKDYHKALIFDFEGRILDGPFEFDIFKEGYENFKKRMRKAIEQTKAKRIFLGLEPTGSYHENLARHLKEDFKEVEFINPSATYANRAQDMLRGLKTDDIDLGAIGDLLMRGKGYEYNLEEEGVYLNLKEQTFWREKKLKMQTRLKNQIKARLNKIYPGMMSKYNDNKPLFSDIWKSRVARGLIRSKLTPAQIKIMKVEELKRKFKKVSCPLSSKWAEKIVEYTKRMLCPKDEILKIEMDLVNRDLNLLEALEREITFVERRMVEEVKKTDSSFLLGKIKGLSDIMIASFAGAVGRISNYNFGKQIFSKSGLSSKVNQSGKRNIKGLSIRRVGSKTLRCILFKMGDSVKKHNPYFALYYSYLTEKKGKPWKKAHIAVTNKLVRVMFAMLRDRADFNPPTAKIDYLEMLFNQRRRKRRQEKKKEKENHSPGPFFGHKDIRTLERAPSPMR

SEQ ID NO: 493093 - protein, 319 aa, unidentified
MEKKNYVGVDVSKNTLDVAVNDDNRHWSFRNSPSGIEKAIETIKKFKPELVVLEATGSYEIPFAAAAGIAGMPVVVANPRQIRDFAKSTGILAKTDEIDAKVMARFGEAIKPTPRVMPDEMTREFGELVARRRQIIGMITAEKNRLEHAIKAVRQNIQSHIEYLENDLADIDKDLKQKVQDSPLWREKDKLLQSVPGVGPNLSATIIAELPELGCMNRKQIAALVGVAPLNRDSGTLHGRRTSWGGRRQVRNVFYMATLAASRHNPIIKAFYIRLLSSGKAKKVALTACMRKLLTILNAMLKYNISWRCKTYQLIGPYL

SEQ ID NO: 493094 - protein, 409 aa, unidentified
MNVVHASCAGIDIGKRSVTICAITTGPRGDPVKETRTFGTVTRDLLALADWLDGIGVRAVAMEATGSYWKPIHNLLEDRFELLVANAAHLKAVPGRKTDVRDAEWIADLFRHGLIRASFIPSRQERELRELVRYRTSLIRERASELNRIAKVLEGANIKLSSVSTNIGGVSGRAILAALVADTTDPEVLAELARGRLRNKHDALVAALTGRVGTHQRFLLAAQLRHLADLDELIEGLDAEIMERLTPAEPAIELLATIPGVGRRTAEVLLAEIGQDMGRFGSSRQLASWAGMCPGNHESAGTHHGGKTRRGSPWLRSALVSSARSASRTRTYLGAQYRRLAARRGAKRAFVAVGHTILGIAYAVLTRGEPFHDLGATYFDRRDADHVKRRLTRRLEQVGYTVTLQPQVV

SEQ ID NO: 493095 - protein, 472 aa, unidentified
MKKHKRAKTKSKASKPIHDPQPDSAGVDIGANEIWVAVPAERTEKSLRRFDAFTQDLKALVKWLLDCGVRSVAMESTGVYWIPLFQLLEDAGLKVCLVNARHVKNVPGRKSDVRDCQWLQYLHSVGLLLGSFRPHQAICAARSIYRYRQNLLSMAAQHIQHMQAALDQMNIKLHHVIDDLTGLTGRTIIEAILSGQRDPVQLAKLRDKRIQAAESTIVKALEGDWRKEHLFVLAAAWDNWKQVQQQIQKCDQQLWQYTRELEAATTIAKPTKTMRLKPPWIGSSPVIGPQPAPRVRKKTSKNQPEAPWREELSRFFGVDLTAIPGISVLTGLTLMTELGNDLSAFKSQHHFASWLCLCPDNETSASKVLRRATRRSQNRVRQALRMAASSLHHDKSYLGHKYRRLRAKLGAPKAVTAMAHQLARIIWTLIARRVPFDLSIFALQEQANEQRRLNRLAASARQMGYQLTPIAA

SEQ ID NO: 493096 - protein, 360 aa, unidentified
MNNLWEGITMNYTGLDVHKEFIYASTVDEEGNKVSEKKFLNSIHALDYFLEKQEKETSFVLEACGMYEPIYDRLEEQGYGVTLAHPLKTKAIASAKIKTDAIDAETLAQLLRANLIPKSHVPDKTTRELRSLVRRRASLVRQRSHLKHQVHSILLKHGLKAPVTDIFGKRGKDWLTKLALPHAERFALDSILSIINAFDEQLHLSETTIDAVAGKIKPVKLLTTIPGIGNYSALLAYADIDDIKRFPTAKKLASYAGMVPSTYQSGSTNRNGPITKNGSKLLRWVLNQAAHKAVETDPWLNRFYTHLVRKKGSQKAITAVARKILTYMYIMLTEGIEYDELYVHRRGKRTTFHCASELGN

SEQ ID NO: 493097 - protein, 317 aa, unidentified
MSATPCYLGIDVSKDFLDLHTRPTGQTLRVANDPDGVASITTRAAALCPALVVIEATGGYEHPLAAALATAGVPLAVVNPRQVRDFAKAIGRRAKTDAIDAAVLAQFAESIRPEPRPLPDADTRRLAELVDRRRQLLGMRTMESNRLAQVTDRTVRRDIEAHLRWLGGRIETADAELAAAVEASPVWRANDELLQSIKGIGPVVSRTLLAEFPELGRLTRQQVGALAGVAPLNRDSGRRRGRRFIAGGRAGVRTALFQAALSARRFNPALRAFAERLAAKGKAAKVVLIAVARKLLVIANAVLRDRKPWVEITPVAA

SEQ ID NO: 493098 - protein, 354 aa, unidentified
MMIIGCDYHPGFQQIAFVDTETGELQERRLEHREEAEKFYRDLAAQGMKVRVGMEASGHARWFERLLSELQCELWIGDAAEISARRVRKQKTDRQDAQLILRLMLKDDFPQIWVPSWENRDLRQLLWHRHRMVQARTRMMNQLQAVALNEGLRCKKRLWREAGREQLEAFKLAPWASQRRGDLLELLDQLNPTIAKLTQAIDREVEKCPAARRLQTHPGVGPLTALAFVLIIGKADRFQCGKQIASYLGLVPLEKSSGNQRRLGHITKQGNSLLRFLLVEAAQVTVRSDQEWRNKYFHLALRRGRKIAKVAMARRLAVRMYWMWRKGWNYEQLKKFGSHAGEPGNRDGVMSNTE

SEQ ID NO: 493099 - protein, 407 aa, unidentified
MDLLKTVFGIDVSSRKSNVCIMVNGQKVNDYAISNDMVGFNRLLGDLKQVTKPQIIFEATGVYSRRLQAFLDMHELRYVMMNPLEAKRKTKDDLHKNKTDKLDALYLAKLQSEYPQRLAYVQSKEYQELMANNRIYEQASHDLISNKNRLHKAVQLTFPEIEHLLANPRGKNYWSIALRFPHPDIVLEAKEADIIDFLKGLSGIGKKRANDITQSLIRLAKVACPAVKKNSAHVRGLKMAINNILSAEEECQTALQEMAKLAPKRDLEILTSIPGIGENTALRIISELGDIRRFNNPSQLNAFVGVDPQVYESGNLTAHLSISKRGTAIGRKVLYLAINQIQSAKKAGNPCHIADYYEKRKRSSETASHKKAAIASIHKLLRTIFALIKNDQLYSYDVAKHNQRLLS

SEQ ID NO: 493100 - protein, 387 aa, unidentified
MIYIGIDIAKKTHFASAVNSDGEVLLKPFSFENSKSGFDLFISKIKIFQKSNCLIGLESTGHYGDNLICFLFQLNYQIGLINPIQTDSLRNSNIRKTKNDKIDTFLISKCIQLGNYSLVKEKDINIIKLRTLCRFRMEVIEHQTILKTQLTCCLDLVFPELANFFKGNLHLKTSYALLEKYSSAKIIACTRIDTLTNILTYASKGRYSYDEAVKLKQLAQNSIGIENQAIDFQIKCIIQQLKLLKEQICNIDKNIKEIMDLLNSKILSIPGIGYTLGAMIISEIADIHRFSNPTKLLAYAGLDPSVRQSGNFNAKTTRISKRGSSHLRYAIHRAAFLIIYNNNTFYEYYTTKRSQGKSHNNALGHVCTKLVRIIFKILTEDIEFNLS

SEQ ID NO: 493101 - protein, 331 aa, unidentified
MEKKEYVGIDVSKSKLDIWLYYAKKHKKFDNNEEGFKRLFYWFEEITGFKHSEVSFCFEHTGLYSLPLSLYLHKKQSCFFMVSGLLVKRSLGLKRGKNDKVDAYHLSHFAYLYRQELKPYQMPSETVIKLKQLQSFRARLVKQCSGYKAHLRELKEVLKPDKEDPVVSTSTELVKVLGEKIKVIEREIISLIKTDEKLSDTYRNVTSIKGVGLVITVAMIASTNNFQSFDNHRQFACYSGIAPFEHQSGISYKGKSRISNLGNRAMKTLLSNAAASAIQYSPEMRLYYQRRLKEGKSKMSTINIIRNKIVSRIFAVARRQTPYVDYCKYAI

SEQ ID NO: 493102 - protein, 386 aa, unidentified
MQKLNDLSRSLIALEPAGTLIAVIEMSLSSWLVAGIVPGVERQPLKKLAVDESALLKLLHRWREEAEKAGRRIERIVVAFEAGRDGFWLARWLKAHSIEAHVIHAASVAVSREHRRAKTDRLDTELLKRAFLGWLRGERDHCKVVAIPTLKDEDAKRPNRERESLVGEQSRIVNRMKAALIRLGIRGFNPKLKRAAGRLDSLRTPEGEPIPPNTLAELRRDMERRRLVSNQIRQIEKARLERFEQAPNDGPHAMVRLLARVVGVGIETADMLVHEVVSRNMRDRRAIARYAGLTGSPDESGRKRREKGLARSGNGRVRRGMVQLAWRFLTYQKESALAQWFRARTENALGARKPMIVALARKLLIALWRLVWQGVVPDGVVLRPAQ

SEQ ID NO: 493103 - protein, 327 aa, unidentified
MFQSVLGIDVSKETLDVMLLKDNRSAFGNFSNNEEGFSKLRRWLVSQGVESVHACLEATGRYGDGVAEDLYQAGYVVSVVNPARIKRYGESKLHRNKTDKADAALIAEFCRKEKPGEWKPLPASIQELRQLVRRLDDLQDNYQQERNRLSSGITSSWVLKDLNDHLAELSRRIQELKKAIYRIIEHVPELKEQCDLMVTIKGIGKLTAARLLAEIGDVTSFEDAPQLAAFAGLNPKGSRSGKSVYKKTRISKEGRACLRHYLFMPAIVARKHNPIIREFCDRLEKGKLPKKAIIAAAMRKLLHIVYGDLKHKQPFDPNYLQKLAIPS

SEQ ID NO: 493104 - protein, 375 aa, unidentified
MSKHSEAFVALDTSKLRNAVAIADGGRAGEVRFLGEIENSTAATAKLIRKLEAKYERITFCYEAGPTGYELHRQIKALGHECVVVAPSLIPKKRGDRVKTNRRDAVNLAKLLRAGELTAVWVPDRRHEAMRDLTRARETAVIDLRSKRQQVSAFLLRQGRWYPAGKKTWTNAHMNWLASQKFEQPERRIVFEEMMFAIRQAQERVERLEPAIRAAVPDWSLAKVVTALMAFRGIDLISATGLLAELGDLSRFQTAPELMGYLGMGSSESSTGDTIKRGPITKSGNRRARRTLVECAWSYQHPPRVGIAKQQKVAAAPPKVREIAWKAQCRLNRRYRALIRRGKLKTVAITAVARELAGFVWAIAREAGSAEPAAK

SEQ ID NO: 493105 - protein, 392 aa, unidentified
MYIVGIDIGKNHHEASIVSPEGKQIGRSLRFATTHKGADSLMSFIFKNIGNSPCVFGMEATGHYWYPIYSFLKAKGYTIYVINPIQSDSLRKMYIRQTKNDSIDSFLIAEVIRFGQFGTTSMADENILAMRQLCRYRDSVISSRTEIKLRIGTIMEQIFPEYEKQFSSLWVSTSMGILEKYLTPENIENAPIDELFEIIKDKSHNRLTRAKAISIKEAAADTFGIKIAQDAFSFQLKQLIDRMNFLDKQIEALDCQILEYYEKFDCYLHTIPGIGMIGAATILAEIGDISRFKNSSSLIAFAGIDPTVRQSGEFNSTHNHMSKRGSPYLRHAIFLAATTCSFHNSPLNAYYKKKRDQGKHHLTATGAVARKLTTVIYAVLRDSKPYEPKKFC

SEQ ID NO: 493106 - protein, 414 aa, unidentified
MEVLYPRCCGLDVHKSSIAACALLREQGRIRTERRRFTTMTQDLENLAAWLRQLQVTHVAIESTGVYWKPVWNVLEGHFTIVLANAQHVKNVPGRKTDAKDSEWIAELLQHGLLRSSYVPPEIIRDLRDLTRGRATLSQEASRLASRIQKVLEDANIKLSSVASNTLGKSGRAMLDALVAGQINPEQLADLALGHLRAKIPQLRLALEGKIREHHRFLLKRLLHQLRFIESEIDLLDQRLEELGQQDPALAAAVARWTTVPGVDRVAAWSLAAEIGIAMEQFPTAAHLASWAGLCPGNCESAGKRLSGKTRKGSPWLGRMTCQCAWAGARTKNTYLSAQFRRLAAKRGRKRAIIAVAHSILAIAYYLQKKQCDYRDLGSDYFDRLNADGLKRYLIRRLEALGHKVTIEAAGNAA

SEQ ID NO: 493107 - protein, 415 aa, unidentified
MQHVSKFKKLTIKTLIAAVDFSKSKHSGYFTTYTGEEIAPFEFSNTLKGFEKFWDKLQKFKRKCELEDVVVSFESTGSYGLPFIHYIKNKGVRMLQVNPKHTKRAKEITDNSPNKNDQKDPRVIANLILFKNGLTVNIPKGQISELRNLVNCRETLLVEQNKLNNQLESTLAIYFPELLTFFKSLLTKTGLYVLKHYPTPYDIQKANPDKLHRELKKVSKGRVAEGRTNKLINMAYQSIGIKEGKESYKTIIKYYLQQIELINEQKKQVEKQIENLLESIPQGKLLLSVKGLGRISAAAILSEVIDFNSFRTIREINKYTGYNLYEISSGKYFGKRRIAKRGRALLRKTLFFASLNMIKEGGIFHEQYQRHIEKGMPKMKALVAISRKLLRIIFAMFRDNKEFEIQKIKTIKTAA

SEQ ID NO: 493108 - protein, 460 aa, unidentified
MNRNRSKSRVDRTMPMVHPNAAAIDIGATMHMAAVRADRAPEPVRSFGTFTADLHRLVDWFTECGVETVVMESTSVYWIPIFELLDARGFAVFLVNARDAKHVPGRKTDVSDAQWLQRLHSFGLLRASFRPKGQIAELRAYVRQRERLLEYAASHIQHMQKALTEMNLQLHHVVADITGATGLRIIRAILAGERDPEALAGLRHYSCHSSAETIAKALTGSYRTEHLFALEQALSLYDAYHEKASACDVRIESVLKELIIHRGHDHGSAPPVSRRRNRTDQANALAFDVRAALFGLLGKDVTTIDGLGPYLSLKLIAECGDDLTSWPSAKHFTSWLGLAPSNKVSGGKMLSSRTRRSGGRAAGLLRLAAVTVGRTDTALGAFYRRLSSRIGKAKAVTATARKIAVLFYNAVRHGMDYVDPGASSYETRYRTRVINNLHRRAKTFGFVLQPLEPKAGAAVS

SEQ ID NO: 493109 - protein, 437 aa, unidentified
MIGSLQRGEDTLDSVVIGADPHKHSVTIEIVDDRERILDKGRYGTDTDGYRQMLAAAKRYPQRRWAVEGCNGIGRHVAQRLVADGETVVDVPAKLAARARVFDTGNGRKTDPADAHSVAVVALRTRNLTEVRIDDELVALRVLVDRRDELGRTRTQTINRLHRLLLELLPGGAKRFLSAAQAQALLDSVAPTDVAGRVRHQLATELLAEIVVLDAKMKASDKTLRKAVAATGTGLLDLYGIGPASAARILGDVADVARFATRDRFASWNGTAPLDASSGEQQRQRLSRAGNRRINRALHIMAIVQIRHDTEGRAYFRRRVAAGKTKMEALRALKRRLSDVVYRQLVAGMKKASPGGHTEATVVSSAVDPTPTVDSSDQSQPGPDHKPTHPDTDAVDSTPRPVAPAQSLRTRDQRPPAQPDKLDDLAPLFGTSKRDLT

SEQ ID NO: 493110 - protein, 456 aa, unidentified
MGKKKISLEVVNPNAAGIDIGSKSHWAAVGQNAQDVKEFGVYSDDNLELCLWLQEHGVETVAMESTGTYWQNLFSSLTALGFEVILVNGRQTKNIKGKKTDIKDCQWIQKLHTLGLLTGSFLPDGTTDIIRTYSRHRQGILEQSARTVLKVQKHLRLMNMRLDVVVKDITGLTGTKIITDLINGQTSGKELARHRHYNCRKPESEIAKALQYNGRDDHFFALRQEWATYLHLQGQITQIDEHIKKHLEDVINNNGNKKQYIPSAKPYKRKNKNTIRGLDMNQISYQYFEGVDLMAIEGVNDATIMAIISEIGLEGIKKFGSAKQFTSWLRLAPNNRISGGKVLGHHLPKGSSRLKIAFRLSANSIGNLKEGHLSDFFKKINYKKGRATAVSATARKLAVITWNMLVKGIPYNPPTEYLFLDQKRKLKLVSRIKKNIAKFEIKLEDIGFGNTLNISN

SEQ ID NO: 493111 - protein, 284 aa, unidentified
MKNKVRFLGLDVHAETIAVAVAEPDGSVRSLGTTANRAESIRKLVKKLGPVEQLKACYEAGPTGYVLYWQLAELGVQCDVIAPTLMPVKAGDRVKTDRRDAERLARSFRSGDLTAVWVPDAGSEALRDLVRAREAAKQDQLRARHRLSKFLLRSGQRPAAGLKAWTQLYMAWVRQLRFEQVAQESTRLDYLHEVEHMAERVVRLEKDIAEAVKLASPEIQEVVKDLQALRGIAQISAVTIAAELGNITRFESARQLMGYSGAVPREDSSGKRTQRGSITQRPPP

SEQ ID NO: 493112 - protein, 350 aa, unidentified
MTHPRPVVFMGVDTHLDIHHLAVVDQLGAPLGDTQVPATPAGSAAAVVFAAGHGEVAAAGVEGTGSYGAGLTRFLTDAGIVVVEVNRPNRAERRLAGKSDPIDAYAAARAAASGRARTVPKDRTGTVEAIRAIHTSRRGAVKARTQAMNQLRALLVTAPAGLREHLRALPTHELVDACARLRPGHDLADPTAATKTALRRLARRIQQLSEEITDADIDLDTLTRQAAPTLRAQPGVGPDAAAKLLITAGDNPHRIGSDAAFAHLCGVAPIPASSGHTTRHRLNRGGDRQANNALHTITLTRQRHDPRTRAYTQRRTTEGLTPRDIRRCLKRYIARELHPILTADLAALTT

SEQ ID NO: 493113 - protein, 334 aa, unidentified
MYSIGLDISKSTVNVHIPLTSLDIEIENTLVSFKALYGKLKKLYKKEIDKLVFVFEPTGNYSSLLYRFCAEKEIPIFLINPKQSSNFSKAIAQRNKSDKVDARVLSKALVLAREGEVAIPSINPLVEDIKELMVYYKLKVKQRIQLSNHLESLQAKQTNSTLLKRLQKEIKALKETEKSVMDEIYERIIEDEELKSKYDSILSIDGLGKVSTIALLHMFIRYPNANQRQIVSLAGLDPIIRESGSSIRGRSRISKAGSRMYRGSLFMATMVATRFNPQMKVFYERLKDNGKHTTVAQIAVMRKLFVIAHSLYNTGETYDSKKFLIHTGVQNMNN

SEQ ID NO: 493114 - protein, 343 aa, unidentified
MQEGPMSMYAGLDVSDKTTHICVVDADGKVLRRDVVVSDPDVLAKWLNRHCAELGRVVLETGTLSTFLYHGLVERDIPVECICARHAKGVLSARVNKSDVHDAEGLAQLARTGWYKRVHMKASATHIDRAALRIRAQLITARTSMANQLRGLLKLFGLRMGTARTPGRRAERLAAFYAQRPDLKALFAPLIAAMEAIEEQLRASNRLLNDRAKADEVCARLMSVPGVGPITALTFTATIEDPHRFARSEDVGAYAGLVPRRSQSGERDVSGHISKAGDPMLRKALYEAANVALSQVKRPFALQAWGRKIAEAKGPRRARTAVARKLAALLHSLWLNETEFRWA

SEQ ID NO: 493115 - protein, 351 aa, unidentified
MDRYIGLDVHRDSCTLAVIGASGKRLKSLVVETNGKAMVEVIRSIPGHRHICLEEGTQSAWLHELLSPYAVEVVVVVPDKRRGSKSDKRDAWTRAEELRTGAITTRVYKGATHLSALKNAVRGHLMVVRDVVRVKNRLKAIWRSRGIGTTDAVYDPELRSRWVKRLPSSYRSLAQRLGQQLDVLEPLREEAEHSLLKEAKSHPIIRTLSTAPGMGRIRSAQVVAVVASPHRFRTRQQFWSYCGLAVVTRSSAEWTYVDGRRERRPFQQTRGLSRKRNGLLKQVFKGAATTVVTQLTDHPLHGDYQRMVDSGIKPNLARITLARRISAMVLSMWKHQEVYDQSRHRAVDDQQ

SEQ ID NO: 493116 - protein, 450 aa, unidentified
MSRPQVIDDEEHERVHDRVAAIDVAKDTGMVCTRTPHPSRPGAQRASVWTVRARMNAIRVLGRQLRKDGIEIVTLESTSDYWRIWFFVLEACGLAVQLVSAAQAKNLPGRPKTDKLDAMWLARLTEMGLLRASFVPPKAIRDLRDYTRARTRLIHERSRCWQRLEKLLEGALVKLSSVASKLTTLSAQDMIKAMIAGQRDPEILAGLARRTMKAKHDALVEALDGMFDDHHGELAQLLLDQIAALDAKVAQLGARAAELAAAIPEGWGIDPDGTTGPGAGTGPDAPVLNAVARLAEIPGLSPDLARTIIAETGLDMTRFPDAAHLVSWAGLCPSARQSGPRTRAGKKGQGDTWLRGALGQAATSASHTDTFPGERYHRIARRRGKARAQVAVARSILVIIWHLLADPAARYTDLGPGYYQARTGKDKKVKNHIRQIEALLGHPITITEAA

SEQ ID NO: 493117 - protein, 387 aa, unidentified
MLFIGIDIAKNKHDMAVIDSNGNLILKHLKFTNNKQGFDKMHSKIMELVHTHETDVYIAFEDTGHYGFNLQAFLRKYYVNIYSYNPLLIKKFVEAQTLRKTKTDKKDALVIARKLLSDFAQLEQPVVTDTLMTELKFATRNRSRLTQTRSDAKTQYTRILDIIFPELASITNKHNQSTYEILKKYHNAESIANARPSSLAKIKYLSSDTASKIKKAAKTSIGTSWKALELELLLTIENIEHMDKQIQIVDNHIEALMTEIDSPIVTVTGIGERLGAVILAEIRDINNFNSPSQLQAFAGLDPKVNQSGQSDKTGKMVKRGSPHLRWALIQAARSASNWSPALTAYLQKKLAEGKHYNCAISHVAKKLIRIIFYMLKNNREFDERLVA

SEQ ID NO: 493118 - protein, 349 aa, unidentified
MVIIGVDSHKRTHTVVAVDSSGRKLAERTVSTASTGHLELLRWARRWRDRTWALEDCRHLTRRLERDLLAAGETVLRVPPKLMAGTRRSNREPGKSDPIDALSVARAALREPGLPMARLDGQERELRLLVDHREDLVVDRTGHQERLRWFLVELGITEPPARSLDRAIVLDRLERELADRHEPVARFARDLLTRIRDLTQAVDALEREIRALAEQVAPSLLALVGCGHLTAAKLVGQTAGIGRFRSRAAFARHNGTAPVPVWSGNTIRHRLSRGGDRQLNVALHRIAITQLQREGPGRAYLAKRMAAGDTKTEAIRALRRRLSDEVFRRLMTDETERTRAVTALTAAAA

SEQ ID NO: 493119 - protein, 370 aa, unidentified
MDERIKFFVGLDAHKDSIAIAACEAGREPARFVGTMGPDVHGLLKLLAKAGDPAQVSVVYEAGPTGYGLHRELCRRGYRSQIAAPSLIPRRPGVRIKNDRRDCVRLAELSRAGELKAIWVPDEAHEAMRNLWRAREDAVGMRLKTRQQLQAFLLRHGRRYPGKTHWTRSHERWIAEQQFEHAGDRIALAEYQLAVQGAEQRVQRLTTALVEAAQGWRFEPVVSALRALRGIDTVCAIGLVTEIGDIGRFATARQLMAYLGLVPSEHSSGNSIRRGSITKTGNAHARRLLTEAAWSYRFPARMSQHLRQRSQSLPEPLRNHAWKAQQRLCARFARLSSRGVQVNKVCVAVARELAGFVWAIAHQAARTQVH

SEQ ID NO: 493120 - protein, 350 aa, unidentified
MSKHQHTDYHYIGLDVHKKTVVYCIKKADGKIIDEGRIYARLGDLTRWASGIDRPWKGCMEATMFSGWVYDVLKPYSDELKVGDPQKMEAIASAKKKSDRIDASTLADLLRVNLVPEVYMAPENYREMKSLMRYRNLLVRESTRFKNRLACRLMESGVEYNTGRLHNKGYFADLMKELTDISDEVKMILQLSRSEIEFLKTAQATIEKKLLQDEEIRRRCDYLMTIPGVGINMALTWVCETGEIKRFTRRKELISYCGLCNSLHESAGIVKRTPISKNRNKYLQSMLIEIAKLAPRFNADLAKVYDQALEKGCNRNEATLSVARKLVGYMFAVDREQREFIVEKKSVESV

SEQ ID NO: 493121 - protein, 347 aa, unidentified
MSAQSPMSSKLSSMSGMLGIDVSKGSLSCAFLEAATQEFVWEATISNTPQQIAALIERTPPESAWILEPTGRYGLNVVQLARQAGRTVLLAPPRKAKSFMASLPRRAKNDRLDSQGLALMGLSLSHKLAPYPLKSELVDEIDQLLSARKGLSRSVATLTLQARELPYAREALKQAKADLKARMKALDKRLASLVAGSPELKVVATLKKVEGIGPVTATAVAACLTNKQFSHPDKFVAFIGLDVEVRDSGTRKGTRRLTHQGNAELRRLLYLAAQASLRTKEGPFKAQYEREREKGLPSTAALCAVARKMAKLCWSLHKHGTDYDSARVYQQPKKKTEQKTEANAKNP

SEQ ID NO: 493122 - protein, 342 aa, unidentified
MDDFAGLDVSVEETSICIVDDTGRIVREVKVASEPKALLQVLTNPTYHFKRIGLEAGPLSQWLFSALAEAGLPAICVETRHMRAVLKAQINKTDRNDARGMAQMMRAGLYRSVHVKTLRSQKLRMLLTHRKLLQSKAIAIDNELRGTLRNFGLKVGMVGTVKFEARVRELVENIPDLAALVEPLLIVRRVLREQIVILHRRLLAIVRDDEVCQRLMTVPGVGPVVSLTYRATVDVPARFHKSKSVGAVFGLTCAKYQSGEVEWSGRISRCGDEMMRVMLYEAAQSMLRSKKWSWLKAWAMQIARRRGMKKAIVALARRLAVIMHRIWVDGTEFRWTREAAVA

SEQ ID NO: 493123 - protein, 367 aa, unidentified
MKKVAYVGVDYHMNSLSIAVVVEGEKRIHQMIRLANDDKVIAKYFKKLSAEFEIRACYEASCSGYAFQRKMKNWGYACEVIAPALIPRKAGNRRKNDFRDARDLAQNYAAGLLSVVHPPTEKEEAVRSLIRCRISLKDSAKNAKYQINSLLLSQGIRWGRSKWTFAHRKWLAELQLPDAIMQKVLMEHIEHLYYLETRIAHLDHDIEEMARSEIYAPSVKKLRAFKGIGTLAAMVLIAEITDFRRFGSAGALMAFLGLTPSENSSGDKQISGAITKTGNRRCRTQLVEAVQHYVRSPHISLKMKADLEHVDASTANTAIKCLKRLNKRFWALTARGKTRHVAITAIAREFAGFIWAVMQSEPVAKAA

SEQ ID NO: 493124 - protein, 387 aa, unidentified
MEVSNSRIVGLDVHPDSFAGAILDGMDPWKARVVRTSTRVALPLLEKWALRHTRESDVLVLEASGNAFAVAERLREVKRKVLILDSHRAGKVGKTYCATDRIDAIKIARIYLSALSPLAWQPDQKTRERREVFSAYQGVVKEGMRLKQQIKSMLNEHCLRLEKGFRLSHKSALNRLLKLRSWTEAQKMLLQQLHAGLVGARARRQQLRHYMASEILADKELLRLTRLCGINLITLYGLIAAIGDIRRFTSARKLSAYFGLNPTVEESGNYQGPSALKRHGRGAIRALLVQSAKKLLQVNNPLQKWGLAIATRRGRNKAAVAVARKLCVAVWHVMQGHVIGAIERMDTLHTKLHKLATDLGLSAIKQLGYDTKEAFVQKKLYLLRSYP

SEQ ID NO: 493125 - protein, 345 aa, unidentified
MKDIKVLGIDLAKNVFQLHGTDTSGKVVLRKRLSRTKLIEFMSNLAPCLVGIEACGSAHYWARTFKSMGHSAKMMAPQFVKPYIKSNKNDMRDAEGINEAVTRPTMRFVPIKTIEQQDILLLHRARELAVKQRTAQANQIRGLLAEYGVIIAKGLSHLQELPALLEFSVKEQKISDKGKNIFLNLYDQLKAYEEQVNYYEKEIEQNAKEDSRCVEIQKIDGIGPISASAVVATIGDPNVFKNGREVAAWLGLVPKQHSSGNKVVLGSISKRGDRYVRKLLVHGGRAAVKTCENKTDKRNLWLADKKHRIGFNKAAVALANKNARTIWAILKTGECYRQPEQVQGI

SEQ ID NO: 493126 - protein, 301 aa, unidentified
MKNKSFIGIDISKNVIDVSIFCEGTPIKDFPHDVFNNSHKGFGEMCTWLKKNHVVLSNCLFGMEFTGSYSMELEKFLNARKYQFCMLSTHVVKHHPMGPKDKSDKIDSAKIADFLYRYDGTECVKPYKMPDKTMQRLKALMNERKFLVEQRTCFMNRRQLCTTKEDAQLYDGYIKQLNHDIENIELKVQKLLETDDSLSTTYKNLLTIPGIGFVNAMNVIVITRNFTAFDTARQYASYIGVAPHFHTSGTSVKWRPRPSARCDGQAKADLSMAASVAVQCDAELQSFYTSVRDNKLCLKAL

SEQ ID NO: 493127 - protein, 367 aa, unidentified
MKDSITVVGLDVHKNSIEIVTADTDGAMEVRRFGRIGGTMDALDRAVRKLVSGGSALRFVYEAGPCGYEIYRHLTGKGFSCKVVAPSKTPKKSGDRIKNDRRDAETLARLERAGELTDIYVPREEDEAMRDLTRAREDAVKALKTARHQLNAFLLRYGKRYPGKGSWTPGHMRWLSDIALPHPSQQIVLQEYITTVRVCAERTARLTDQIMKLLPEWRWNPVVKALQALRGVAPIVAATTIAEIGDLSRFQNPRQLMAYLGLVPSEESSGESTHRGSITKTGNGHVRRALIEAAHAYGFPARVSRHLLKRQEGLPEPVLAIAWKAQVRLCGKFRRLMARGKLRNKIVTAIARELSGFMWAIAREVKV

SEQ ID NO: 493128 - protein, 439 aa, unidentified
MQIQYSRCCGIDVHLKSVTVCVLVYRDSTEPEIRKKEFATHYKALLNVKMWLLAQKVTHVAMESTGVYWKPVWKALEGNFELILANPYQVKNIPGRKTDAKDSQWLAELLAHGLIRPSFIPPAETRELRDLTRYRVKLTEERTRVHNRIHKVLEDACIKLDAVASDILGKSGRAIIKAIINGQEDPDWLADKARGTLRGKRPELRLVLRGRITDHHRLMLRELMEDLEYVEHKIERLEKATAPLPNIDLVARLCTIPGVDMITAWTILAELGSDMSVFKSSKHVASWAGLCPGNHESAGKRLSNRTRKGNRWLRRALCQSAWAATRKNNCYLSAFFYRKAGKHGIRKAIVALAHRILVIAFCILRDGTEYKEVGGDYFDKINPERTRSRLVRRLQRLGHNVVLTPADNAAPVPEPIHPPRKRGRPCKCCERAIPCKHTA

SEQ ID NO: 493129 - protein, 341 aa, unidentified
MNDTTSIVGVDIAKQVFQIHTVDLASGEIVRVQFKRAKFLAWFVNRPPCVIGMEACGGAHHWARELIALGHTVKLLPAQKVRPFAVGNKNDMADAQAIWMAMQQPGVKTVAVKTQAQQAVLAMHRMRTQLVKFRTAQSNALRGLLTEYGEVMPKGRGALNRAIPEVLGRLADQLPTVLIETLREQFARLGEIDTHVLDIERRLLAWLKEERACQTLADIPGVGLLTATAVVATMGDPHAFKSGREFAAWLGLVPRQVGTGGRVKLLGISKRGDTYVRMLLIHGARSVLTHSKAPPAWATPLLQRRPLNVVVVALANKMARTMWALLAHQRTYQPGHVSTPV

SEQ ID NO: 493130 - protein, 400 aa, unidentified
MRAVFGIDVSKTSSEVAILVNGEKVHGYTILNDAIGFNRLLGDLKTVHNPEIIFEATGVYSRRLQAFLEEYGYAYTRLNPLKAKKQLDSLRVRKTDKIDAEKLAKSQLVHNRKPTYVQEEVYQHLRDLSRFYQNLTEDLVRAKNRLHKVLQITFPELENLLSTPTGEQYWNLVMAFPCKEFVLRLSQSDLCEIIRQSTSKRISEKRIAYLTDKLIKLAKQSFCVVKKTSPMLEEVRYYAQELLRLSDRRQVVLNDMVALAQPLPEYDILRSIPGIAETIATSIIGELGNFRRFHSTNQINAFIGIDLRHYESGNFLAKEHITKRGNPYARKILFKCIHNIASASHTNPCHIADFYEKRKRQSTIASTKPHTIASIHRLIRTMYYLITHNKLYDYSLTQNR

SEQ ID NO: 493131 - protein, 338 aa, unidentified
MNSNVVGLDIAKNVFHLYSQSAGGNVLKKKLKRNELLAFFANLPTSLIGIEACGGSHYWAREFTKLGHEVVLLNARFVKAFVVGNKNDFNDAEAIFTAVTRPNKRTVAVKNQAQQDIQMLHRLRQQRVAERTGLINQIRGFLSERGITLPQGVNQVRRHLPLILEDAENTLSALSRELFAEQYEQLKLLDDDIKSQDSRINRLCQQHTLSRRFLEVPGIGPLTATIMASEIGEGKGYAKSRDYAASLGLVPRQHSSGDKQVLLGISKRGNRYLRTLLIHGARAVVKCCGSKSDPLSRWLQALVERRGFNKAAVALANKNARTLWAMAYQNRAYEAVTS

SEQ ID NO: 493132 - protein, 355 aa, unidentified
MRPYTLGIDLHKRSSVWVLLDGDGNEFWKDSVPCHPDHITRTLKRMPAPGPDIQAAVEPTCGWRWVAALLEEAGIEVHPANVNKVRLIAESTQKNDLSDARVLANLLRLGYLPESYRVPDSIYGLRLVLRHRAYLVRLRISVKNRLHGIATIQGLHHIARGNPLSKAGKAGIMAGDDTSLKELHTLIEELDRRIEECDVRCAEIAKTEPLVPILTSMPGVGIVSALTVIAEIGDFTRFPSAKNVSSFAGLVPRQRSSGETVRFGGITNQGSAALRMIMVEAAFRIRPTNAPELYAFAARLAPVCGKKRARIALARKMLCILWHMARTKAPYDKRKIVVPSLRIANVNHIEHTVAL

SEQ ID NO: 493133 - protein, 354 aa, unidentified
MSSMTVSTPNRQPMFAGIDTHKATHHVAVVDADGAVLADQEFPADADRSVLAWLSRWPIARVGVEQTGTYGAGVTRALTGAGFAVIDVNTPDRTVRATAGKSDPIDAVMAAHAVRTRRARVIPKNRDGVIEAIRLLQTARHSAVKARAAALTQLQDLAVIVPSDVRRRVGTTGRSTAAAALAMRADRTRLHTPTQAAKLALRSVATRIRVLDAEIRDLDAALTEQVTATAPRLLALPQVGIHAAAQLLVTFGQAPDRISSDAKFARLIGVAPIPASSGKTNRMRLHTGGDRQANKVVHLIAIGRLRSHQPAIDYLTRRQREGLSKKDAIRAMKRLITRELYGALKADLTALDEL

SEQ ID NO: 493134 - protein, 381 aa, unidentified
MSEDTTRFVGMDVHKETIVVAVARQGTEPPESWGTFANTEAGVRKLVARFGSTDWVFCTYEAGPTGYALLRQLQGLGVSCSVTAPSLIPIKAGDRVKTDRRDAIKLARLLRAGELTSVWVPDTATEALRDLTRARAAAQKNVVEAKNQLGKFLLRLAVAPPAGVRPWSAGYRTWLRQLVLSQPLQQLVLDEAHTAVVETEARVTRLEGALATAPLSPRQVAAIKALQTLRGVGLVTATALVAEIGDFTRFERPRQLMAYAGVVPSESSSGSRVRRGSITKSGNAQLRAVVVESAQHYRHKPHVGWQLKARQRGEAAPVLGIAAKAQQRLYRRYWRLVSRNGKSSQQAVVAVGRELLGFIWAVGREVAERTAPSGSTTTTAA

SEQ ID NO: 493135 - protein, 343 aa, unidentified
MQIVRIGLDLAKYVFEVHGVDQHGKIAVRKRLRRDAVSRFFANLAPSLVGMEASNGAHFWARVLTGLGHEVRLISPQFVTPYVKSNKNDRNDAEAICEAVGRPTMRFVPPKSADQLAVQAVHRIRRRLVTDRVKLANQIRGLLSEHGVVIARDITRLRRSLAVIVGSSDDGLSDLVRALISELQVELTELDRRIASYDRRIRDLFRNSDVCQRLGKIEGIGPVTATALIVAVGDPKCFKNGRQFAAWVGLVPKQRSSGGRARLSGISKRGDRYLRTLLIHGARAALVRAGGKQDPRSLWLSKLRERRHPNVAAVALANKNARIVWAMLSRDKSYEPALSMKVA

SEQ ID NO: 493136 - protein, 285 aa, unidentified
MNVKTIGIDLAKNVFQIHGVDEHGKRLFNKQLRRAQMASFFANIPPCLIGMEACASAHFWANKLISMGHNVKLMAPQFVKPYVKTNKHDAADAEAICEAVTRPNMRFVPVKTAEQQAVLALHRSRQSFIKQRTAQANQIRGLLAEFGIVVPRGIQQLQRRLPELVEDADNPLPVLFRTQLSLLQHHMAYLFDVIATLDKQIEQCYRQNALCQRIGKIPGIGPVTASALIATIGKANNFENGRQLAAWLGLVPRQHSSGGKQVLLGISKRGDTYLRTLLIHGARAV

SEQ ID NO: 493137 - protein, 346 aa, unidentified
MMIIGCDFHPSWQQVSWLDTETGECGERKLAHASGEAKLFYQQLAAPVLIGMEATGNSQWFIELVEDLGHEIWIGDAAQIRASYVRKQKTDKRDAAHILKLVVEGRFPKLWSPDREQRDLRQLVLHRHKLVEIRSRVKNELQHLSLNKGMQRKAKLWSQAGQKMLRELPLKPWAACRREDLLGLLAMLNQQIGKLDDAVQQAAEENPQAKLLMTQPGVGPNTALAYVLTIGDVSRFARGKQVASYLGLIPREESSGGRQKLGAISKQGNRLLRSLLVEAAQVAVRFDPGFRKQYLHRCHQKPKGVAKMAAARKLAVRLYWMLRTNVAYPEIVRIESSPRVPLVGAS

SEQ ID NO: 493138 - protein, 322 aa, unidentified
MEMLSFGGIDVSKDRLDITVLPDEQCSSVSNDAAGWAELIEQLRGSLITAIGVEASGGYERGVVRALLAAGMSVRQINPYKLRQFAKASGILAKNDRLDARMIASFVAIMPTRPAQRQTPMIEQLAAMLTVRRQLSDHKVATENASRLLEDAMLQRLSRRRVARLTADIDLLDQRLVEIVTADPALAHRFRLLTSMPGVGAVLACTLIALLPELGQMSRKQVAALVGLAPYDFDSGKLKGRRCIWGGRARVRHVLYMAALSASNWNPALKAFHDRLAATGKKPKVVIVAVMRKMITTLNAMLRDGTTWVDRYSGRRSASTAR

SEQ ID NO: 493139 - protein, 365 aa, unidentified
MKKGSTAAATSKRNFDQKLTIGLDLGDRSSWYCVLDEAGEVIHEQKLGTTPKGMKEVFAAMPRSRIALETGIHSPWVSRLLSQLGHEVIVAHARNVRLIGESRRKDDRFDAMTLARLARIDPQLLSPVKHRSAQAQAELTVIRARASLVRARTALVNAARGLTKSYGERLRGCNPRNLDVEKAQALSPELQAALGPLLQALESLSEHIAEYNQQIEAIAQNSYPQTALLKQVKGVGTLIALTYMLTLEDPHRFRKSRDAGCYVGLQPGRRNSGQSEPQMHISKEGDPYLRTLLVQGAHHILGPFGADSDLRRWGLKLAERGGKAGKKRAIIATARKLAVLLHRLWVSGEVYEPLRNTKRTMPAAA

SEQ ID NO: 493140 - protein, 379 aa, unidentified
MIVIGADTHKGSHALAAVDAGTGRMRGQREIKADEPGHLAAVRWARNLDEERVWALEDCRAVSRRLEQALLAAGERVLRVAPHRMGQSRKGERRPGKSDQIDALAIARAVVGDGIERFPAAHLDEQAMEIRLLCDHRGDLVADRTRTVNRLRWHLLQLCPELERSLKPGAFNQARVLDRVERRLRKLPAGARVRVARDQMAHIRRLNRHIEQHKRELVELVRAHRPQLLAETGCGPLVAATLIGRTAGAQRFRSDASFALQSGTAPIPCSSGQHTQHRLNRGGDRQLNHALHIVAITRANHDPATKAYLERKEAEGKTNKGALRRLKRHLARRFHHLLSLPAESAHPDRRNRPAIHTTPPPRAESIIASAAPTPMPRLK

SEQ ID NO: 493141 - protein, 340 aa, unidentified
MVHVGVDLDKRSSQIAVLSEDGDIVQHRLANDAARLQQFFADLPPHTPIAIEASGTWWWLVDLLEQLGHHPVLSHPKQTKAIAAARLKNDRVDAERLALLLRGDLLPKVWIPPTALREARELIRHRIQLVWLRGVIRNRLQAMLARRNLQPTSGKSWLTQRGQRELQRLPLSETPSRIREDCGALLPTLDAQIRRLDADLVARWGQDPRVQRLTTIPGIGPFIAIVLVLELGDIQRFASAKRVASYVGLTPRVRGSAGRVRAGHITKEGNRLLRWVLVLAATQAVRKPGPLRTWFHAVKKRRGKKVARVALARRLAEIVFHVWKQECDYFTVVRHGVVRG

SEQ ID NO: 493142 - protein, 387 aa, unidentified
MYFVGIDISKFKHDCAIVDELGDVITPSWSFQNDREGFSLLKELLDALDGEKKIGLEATGHYGQNLKLFLENNDFSFMEFNQLLINRFVRSKSLRKTKTDSIDALMIAQYLMTVEYKPYPPSFYTLEKLKSLTRFRDSLIRQRSKQLVELTNILDKVFPEFKPFFKGRFSATALYILSHYASPEKISNMNSKSYEPLRCLSRGRFSMVDFVELKTLARNTVGSTCDYLLQEMEITIDIYNQLQSKVEEIELQIHDCVLGLAPPMLTIPGIGVASAAVILSEFGDLSKFNSPSKLLSFAGMEPGYFQSGTSESTGKMVKHGSSHLRYAMMNCAQTVINNEPTFAAYYAKKRAEGKEHRVALTHVAKKLLRVIYTLQTKELSYNPDLVR

SEQ ID NO: 493143 - protein, 347 aa, unidentified
MKFYTKQHAYYCGIDLHAKTMYACVLNSNGKIVAQMNLKSTPTSFLEFIAPYRNDVVVAVECIFTWYWLADLCSEEDIPFVLGHALYMKAIHGGKAKNDKIDAHKIATLLRGGMLPQAYVYPPAMRSTRDLLRRRLHFVRTRAQLMAHIQNTNHQCNLEPFGVRLNRKGGRPELMERFRDPSVRKSMDANLELIDHYDKLIAGLELYIIRQAKEHDADLFHRLRSIQGIGKILALTILYEVQDISRFPRVQDFASYSRLVKCSKESAGKRYGTSGKKIGNVHLKWAFSEAAVLFLRGNPEGQKYLQRMSRKHGKGKALSILAHKLGRAAYFVMNRRRNFDMRKFLAA

SEQ ID NO: 493144 - protein, 344 aa, unidentified
MRYFAGLDVSLEETAICVVNDDGEIVCESIAASEPDSLIRWFVATGLTFDRLGLEAGPLSPWLHAGLRAAGFPAICIETRRMKGATNAMAVKTDRNDARAIAHAMRVGWFTMVHVKSAESQELRLLLNNRRTLQEKRVAIDNEIRGTLKAFGVKIGVVTIAGFRAKVIELLADKPRLVAMVQPMLDARDALRQHTASLHKMVLKVVRASAVCRRLLSVPGVGPIVALTYATGIDDPTRFAHSRDVGPHLGLTPRKYASGEIDRNGAITKAGDGAVREALVHAGRTLLTRGRRWCALKAWGVSVAKRRGLQRAVVAVARKLAIILHRIWVDGTTFNWSHEAASAA

SEQ ID NO: 493145 - protein, 298 aa, unidentified
MNRNTGMSAGQIIGTMNGQQVVGLDIAKHVFQLHTVNMGTGEIVNVQIKRAKVLEHFANRQSCLIAIEACGGAHHWARELTAQGHRVRLLHAKAVRPFVSGNKTDATDARAIWLAVQQPGVKFVGIKTAAQQATLTLHRQRELMMKMRNMQTNALRGLLYEFGATFAKGRKALFKDVEQALEELSAQLPQMVRDSLREQVARIKVMSEDILAIEKRLGLQLKVDPQMQRIAQIPGVGLLTATAAIATMREASAFKSGREFCAWLGLVPTQTGSGGKVRLGGISKRGDTYLRTLLIHGA

SEQ ID NO: 493146 - protein, 346 aa, unidentified
MDYIGIDVHASESQICTLTEQGEIVECRVRTRPDRFAEMLGERSRARILIEASTESEWVARCLETLGHEVIVADPNFAPMYATRSRRVKTDRRDAQALMDACRLGAYRPAHRTSDARREVRADLAVRDALVRTRARFISLIRALLRREGLRVASGMARNFSRRLEKLTLPDALSATIAPLRAVMEALNHQIAAADARLAARAAADPVVQRLETVPNIGPVTALSFVATLDQVERFRGPHPAAAYLGLVPGERSSGEQQHRGPITKRGNGRTRWLLVEAAWGVIRHADPDTAELRVWAARIAARRGRRIAAVALARRLAGILYAMWRDETDYQPKVARTTQETAMAS

SEQ ID NO: 493147 - protein, 398 aa, unidentified
MINGHDEIAVFLGLDVGKSGHHAVAQDRSGKKLLDRALPNDEAKLRELYGRMKAHGPVLLVVDQQATIGALPVAVALDEGVTVAYLPGLAMRRIADLHPGSAKTDARDARVIADAARTMPHTLRALKVDDETIAELTVLSGFDDDLAGQITATSNRIRGLLTQIHPALERVLGPHMDHPAVLNLIETWPTPAALTTAGKTRVRTRLLKKAPRLGGRLTEEIFTALAAQTVVVTGTNAAGIVLPRLATQLAALRQQRAEVAEQVEELVAAHPLSKVLTTMPGVGVRTCARILTEVVGKDFPTAGHLASYAGLAPVTRRSGTSIRGEHPPRGGNKILKRALFLSAFAALSDPVSRAYYDRKRTQQKKHNAALIALARRRTDVLYAMLRDNKPYAQPAAAA

SEQ ID NO: 493148 - protein, 277 aa, unidentified
MLRFVGCDVHKRTAVFTILLPDGTRLATYTVPVTREALTAFAELRLTSEDRLAMEATTNTWAVAGVLRPFLKEIVIGNPLKIRAIAEAKIKTDKVDSRVLAELLRCDYLPTVWQPDMQTQRMRRLTHRRAALVSDRTRLKNRLHSILHHTLVPLPDFDLFSKKGVAWLRQVPLAEEEALARESDLRLLEQTELEILQLDELLVREAWQDEKVRLVMSIPGIDYTVAQTCLAAIGDVSRFPNAKKLSAYLGLNPSTRHSSLAPTYAALRRIWIFRCRS

SEQ ID NO: 493149 - protein, 387 aa, unidentified
MVMDAVDQPAAPAPRRPWGVAGIDPHKRTFTVAVLDERGGLHGVASFDTSEQGLAVALAWLGEVGFDLDRVGVEGSAWLGNQVAASLAAAGYDVREVQASRTAERRRRRRRAKTDAEDAQAIARETLAHPDLPPAGKQHTPDPDWEELVALRNQRRSLIAQRRRLLNEAESVLVGLPLAVRAVLPATSQVRPRLRALTQGAADQLEPTGADRVHLAWLAASAADIARLDQRIRQLDQRIPAVLARHCCTLTEEVGIAAVGAMELLVEVGDPTRFTTEARFARWCGAAPVAVSSGEGDGEPERHRLDLGGNRRVNSVLHTMHITQARCHQPAKDYLGGKRAEHKTAREARRAHKRLLANVIIRRMWADHQRRRSPTLNLSNPTTPKAA

SEQ ID NO: 493150 - protein, 346 aa, unidentified
MDKTICGIDVSKDRLDVAVRPSGERFVVARTGAGLDELVARLKVLKPNLVVLEATGGFETVVVAALAGAGLPVAVANPAQIRAFAKAIGQRAKTDPIDAEVIAHFGEATGVAPRPLPDQATQQLADLVARRRQIVDMIGAEGQREKRANSRIRKSIGRLLKALERELSSVDSEIDDAVRGSPAWREKEDLLSSVPSIGPVISRTLIAELPELGSLGRKQIAALVGLAPFTRQSGQWRGKSFIGGGRTSVRKALFMGAMVARRHNPVLKAFFERLVAAGKPKKVAIIAVARKLLTILNAIVRDGIPWKGALGAGLVAILAEPQLGRPSNEVGATETGAVRMAAPSSW

SEQ ID NO: 493151 - protein, 320 aa, unidentified
MTYIGIDVSKDSFVAAYPAKSGYTTTTFPNTTSGVRRFIQSLPEDCHCVMEATGNYSMLLLYLLQESDIAVSMENPQKIKHFARAMLSTTKTDDIDAKLIAKYGEKMEPQPYKIPSESIILLKQKRTVLRQLKKQLTMMINLQHSLSVLPKQDPTAKVATEQTIKFLRKQISKMEEEITKLSNKEFKHQMELLTSIKGVGEHIAAAIITATGGFTYFSSAKQISRYLGLCPTYEQSGTSIHFKGHINRNGDTHLRSQLYVVAFASIRFNTACRETYERLRSRGKSGKAAIIAIANKLIRQMFAVVMNDRPYIDGYISSLA

SEQ ID NO: 493152 - protein, 346 aa, unidentified
MEQVIRIGMDTSKHFFQLHGVDAAERPVLRRKLRRNDVLAFFAKLPPTMIGMEACGASHFWARELRKQGHEVKLIAPQHVKAYVKRNKNDGRDAEALCEAMSRPTMQFVAVKSEEQQAALMLLGLRAQLIARRTQLSNAIRGYAAEFGLTTARGLDKIEPLLSRIAQDETVPALARELFVLQGKEYVRLQEELKAIDAKLLVWHRADACSRRLAQIPGVGPIGATALVMKAPDPRAFASGRDFAAWLGLTPKDHSTAGKTRLGKITRAGDEALRSILVAGATAVIQQARRGRGSSSSWLTALLARKPPKLAAVALANKTARIAWKLMVSGDSYNGARMPATSASAA

SEQ ID NO: 493153 - protein, 340 aa, unidentified
MAIVAGFDVHRAQITFDALDQRTGEVERGRIRATPEAVRRWAARFAGKEVHVAVEACTGWLFVCEALVEAGAIPHLAEPVETSALRGRKRRAKTDREDARWLRTLLCEGRLPEAWIPPAHVREWRTRARLRKTLVDERTTWLQRVQATLFHHGVSGAPDKLLSAQGREFLDALELPDSALERVGVSLSMIEALDRQLAPLERQLRQLARRQTGCRALMAHYGIGELTAPTILCELGDVTRLSASRKAVRCAGLDIGVHRSDRRSRVGKLTRQGSPQLRWALYESAQAACRPTSPDRGEYLALKARGLSHTRASLTIARKLARRCYHTLRELGPDALQPVT

SEQ ID NO: 493154 - protein, 413 aa, unidentified
MRVHHTVCCGIDVHKKSVTACLMWGPADQEPQCEIRRFGTMTSQLKALGEWLKQAHCEMAAMESRGAYWKPVWNVLEGEVPLILANAKHVRALPGEKSDNKDGKRLASFVRHGLIRASFVPPRDVRELRDLTRYRTKLLANGSAERNRIQKVLEDANIKLGSVLSDVFGVSGQKMLHALVDKPALNVEEVAALAHWRLQPKIEQLKLALEGRITAHHRFMVDLSMGHMQYIEQQILRLDEEIARHIAPYQQQFELLQTIPGIGETASASILSEIGPDMSPFDDDGKLASWSGICPGNNESAGKKFNTNTRKGNRHFVSTMVECAWASTRKKGSHFKARYYRVRARRGSQRAILAVGHGLVRTVFVVLKTGKPYQEPIRPLLTEKQRHRKAERLSRELGQLGFAVTLKPKTAQP

SEQ ID NO: 493155 - protein, 400 aa, unidentified
MEQETLWVGVDVGRYFHAWCALDAAGQVLWQRKRVVNTTRAMQAALAQLQRVARGRKVIFATEEAGGNASALMRLLVEREEAVFLAQPLRVHRFHLALGQPHKSDPYDAQVIAEFARQNQARLPRVRPGSPQLHALRVLSRRLEAVSKDLRRCLNRLRATLAEYAPEWLICTVFSDWSTEAALGTLERYGRLRKLQRTPLSRLSQALSRWTRGRFGEDHARRLRDALAELSLPPVLEEAYACALDSLVRQVRSLLAEKEQLLQLIAAHGAALPSFATLQQEYGYGPETAAIIVSESGDMADFPTEPKFATYCGVTPLKRKSGISQGSSRLSRFTNKRLLRAIFQSTVAAVRRDPRSQAYYQKKLAGRTDPRAKTCALLALARHRTRRLYTLLSQPHGRAA

SEQ ID NO: 493156 - protein, 403 aa, unidentified
MRRKRDPYGSVAYGGMDVHYKFSNVTWRDAAGRIVGREKLRHEDRVAVREQIGRWPRGTPVVLEASFGWGWLSDELAAAGLEPRLSNCYKVEQMRKARGQAKTNTKDADLLSLLPAEAEPWWQVWPAPPEVRDQREWLRYRMGLVAMQTQTKNRIHAHFHRHGIYHGFSDLFGGQGRRFLLALCATGRHAGGELPPGALASLSGQVRLLFGLRAELASVAVQLRQSLERSPLVRRLKTIPGVGVILSHVIAAEVGRIERFAGHKALASYAGLAPQSRDTGEADPSRAPLGRRLGVRCNRTLRWAFVEAAHAAVRHGGRWRALFDRVTSGGTRDRQRGVIKVARELVKVVFVVWSRNVAYQEMPPSRPGDDASRSRRVGQDSRSGTGQPFHPRVPAACGREASL

SEQ ID NO: 493157 - protein, 358 aa, unidentified
MQTQRKELNFEGQNIFVGLDVHLKGWNTSIFTDSLHHKTFNGPPNPEALLDYLTCNFPNGNYFSAYEAGFSGLWAHYRLEELGIHNIVINPADVPTTQKEQMHKSDPVDSRKIGRSLRANELTGIYIPRAQTLEERTLIRVRSSIVKDLTRIKQRIKSMLYFYGIEFPKEFENGNGHWSKRFINWLKSIELKYATGTDSLQLWIKQAEQQRVTLLEATKKIKVLSTTERYSKNIELIRSIPGIGLITGMIFLTEIEDIARFENSDKLAGFIGFVPTCHSSGERESKGEITPRRHKSMRKTLVESSWIAARRDPALGLSFSTLCKRMESNDAITRIARKLVNRIFYVLTNQKKYEFKIV

SEQ ID NO: 493158 - protein, 343 aa, unidentified
MKLHALGIDLGKTVFHLVGLDSTGKVVIRKRCSRRQLLVFTANVQVDLIGMESCSGSHFLGRALREQGHQVRLMPAQYVKPYVQTNKSDYIDAEAIAEAVQRPRMRFVPIKTEEQLDWQALHRVRERWVMRRTAVVNQIRSLLLERGLTLPKGRRYVDEALPRILEDAELPLSGSFRLLLAQLKLELEQLSARIDQLDAVILGRAKEDEACQRLTAIPGVGLVTATALIAAVGNGSAFQRGRDLAAWIGMVPSEHSSGGKQTLLGISKRGNSYLRRLFVQGARSVLQQRHRQAPGLSCWLSQLLSRKHQNVVVVALANKVVRMAWAVLHKGERYRAPVLAMST

SEQ ID NO: 493159 - protein, 409 aa, unidentified
MDILYERCCGLDVHKKTVVACVLVPGSGRQPTKEIRTFGTMTADLLELGDWLAEKGVTHVALESTGVYWHPVWNLLEGNVELLLVNAQHIKQVPGRKTDVRDCEWIANLLRHGLLRASFVPERPQRELRELTRYRTSLIRERAAEINRIQKTLEGANIKLGDVASDILGVSARRMLEALIGGTTDPAELADLAKDKLRKKLPQLERALKGQFRAHHRFLLAQQLAHLDGLDELIDSLGSEIAERVRPVEQVVERVDGIPGFGRRTAEIVVAEIGTDLSRFPSYKQLASWVGLCPGNNESAGKRMSGKTRKGDVWLRSALIEAAHAASRTKDTYLAAYYHRVAARRGKKKAIVALAHTLLTIIYYLLTRDCDYEDLGPEYLNEHDREQTERRLIRRLQGFGYTVTRETAA

SEQ ID NO: 493160 - protein, 333 aa, unidentified
MVEGTEGSHHKEGSKKMSKDSMVCAGIDTGKHKLDIAVESSAERLQIDNSAESHPALSAWLRRCGVERIGIEASGGYEQAVVSTLRAAGFHVIVFQPVQVRAYAKFVLQHAKNDGIDAALIARCTAAATDIHEPTDVRLAPLAQHLTMIEQLTADVAQLKTRREACRNQRIQAFWKQEIDRLKRLLQAELKQLVLAIREHRDLADRLDLIASVDGVGLRTAVAILVRMPEIGRVSREQAAALAGLAPYDDDSGLRRGPRHIKGGRQRLRQSLYAATLPAVFYWNAQLKAVYKRLIAAGKTHKLALVACARKLLIFVNTVVARGTPWTSPPATT

SEQ ID NO: 493161 - protein, 448 aa, unidentified
MLPPSPILSDALQVCHPHAAGIDIGEAEHWVAVPPGSDPQPVRRFGPFTADLDALADWLIDCGVTTVAMESTGVYWIPLFELLEARGVQVLLIDPRQAKRAPGRPKTDRLDCKWLQRLHAYGLLAGAFRPADQVCVLRGYLRHRQMLLTYAAHHIQHRHKALEQMNLKLTQVVSDITGVTGMAILKAIIAGERDPVTLAKLRNPHGQHSEDEIAKALQGTWRAEHLFALQQAVELYQFYHQQLTTCDQRITAHLETFADQSAGQPLPPKARRHKKTNEPRFDARTPLSRLAGLDLTTIEGIENTALILLSEIGTDMHRWPSVKHFCRWLGLCPQHQSSGGKVLSRRVRPGAHRVTVALRLAARSLHHSQSALGAFFRRMKARLGTPKAITATAHKLARLVSHLLKHGSAYVQQGLENYEAQYHERKVKTMAKQAKALGYTLVPLAAQG

SEQ ID NO: 493162 - protein, 351 aa, unidentified
MTMVGGFDVHRKQITFDYVDDDGLVRFGEIRPATRKTLRGWLSEHCPEGDAEFALEGCTGWRYVVDELAAAGVAAHLGDPAEIAVARGPKKRAKTDRADARLLRTLLLQGRFPESWIPPAHVLEVRVLGRLYCTLMDERRAWQQRIHAQLFHQGCPPIRALLTEAGREALARVELSAAGRQYVDSALRRIDELSAEIGPLRTQLVNFAKHQAGCRALQVHYGIGWLCAAIMWAEIGDARRFASSDQLVRFAGLDVTVYSSDRKCAPGHLSRQGSPELRWAAFEAAKCAARRGSPDYGYYHKLAAKHDGHNGKNPTLAVERKILRRCYHTLRELGDAALGLPDTQPHQEVAA

SEQ ID NO: 493163 - protein, 408 aa, unidentified
MNKLFVGIDVGSRDNEVYIMLPDGEKHSSFSVQNNLGGAQTISNRVVSALTGLNLSYVIIGIEATSVYGDNLMCFLREDGALGQFERKFHILNPKQVKKFKEVHPDLPKNDPVDAFVIADNLRFGRITNAVYMDDYRYKSLQNLTRARFYAVQNLTREKQRFMNYLFMKCSGLAQDKIFSDNYGAAALAVFEEFDSPDDIVNMDVEELAAFISVKGKNRSPRPDEIAKAVQSAARGSYRLPKTVNDSVNQVLSISISSMRALQSQIKSLDKEIERQFENIPNTLISVPGIGKVFSAGIIAEVGDINRFVKGQSGLAKYAGLVWNENKSGLFQGQNTRLIKSGNRFLKYYLCEAAFSLVRCDTEFKRYYDLKFKEVNKYQHKRALALTARKLVRLVFRLLKDYRLYIPV

SEQ ID NO: 493164 - protein, 428 aa, unidentified
MRSIGLDVHQGFCEVAIREAGKTRSAGRVATGRDTLELFAESLAPADEVVLEATGPAMEIARIIRPHVARVVVANAQEVRAISHARVKSDRFDARTLAELLSAGMLESVWVPDAETSGLRRRVARRAALVRQRTRAKNEIHATLARCLLGRCPFSDLFGKKGRAWLAAQELDGEEAETVAGCLRQIDFLDGEIAAIDQRLSGWASGSEEARRLMSIPGVGAGVAVTLMAAIGDISRFASPRQLVAYLGLDPKVRQSGDEPARHGRISKRGNAHARSVLVEAAWIAMRQPGPLHAFAERVRARKGAQVAAVAVARKLACLCWQLLTTGEDYAYARPSLLRAKLRRAQLDAGAAPLSTRHSGRRISATASEREAERELVRHAEAAYRRLIADWKATGPAKKGAGATHGRAPSTPSKRQAARQAQAQTPAL

SEQ ID NO: 493165 - protein, 349 aa, unidentified
MSAKFNSEIAVIGIDIGKNSFHVVGLDQRGAIVLRQKWSRGQVEVRFSNLPPCLIGMEACVGAHHLSRKLTSLGHDARLMPAKYVRPYSRGQKDDFRDAEAIAEAVQRPTMKFVATKTAEQLDLQALHRVRERLVSQRTGIINQIRAFLLERGVAVRQGLRFLRAELPRILARPCDALSPRMLRVIEDLAGDWRRLDERIEGLSNEIEVLARQDAGCERLMSVPGIGPIISSAIVAAIGGGDVFSKGRDFAAWLGLVPKQISTGDRTILGKISKRGNRYLRVLFVQAAWAVLIKPKSWARHGLKPWLEAAKKRLHHNVLAVALANKLARIAWSVLAHGRVFEATKIQAA

SEQ ID NO: 493166 - protein, 356 aa, unidentified
MNVTTIGLDIAKNVFQVHGVDRNGKAVLRKKVSRGKVIEFFAKLPACLVGMEACAGAHHWARELIKLGHSVKLMPAQYVKAYLKGQKTDGNDAEAICEAVSRPRMRFVAMNTEAQQDLQMLHRIRHRLVEERTALINQIRGLLGEYGIVFAQGPGQVRRGLVRILGDNEAGLSGFALELLSDLHQQLRELDERIAGYDARVQRACAADEQSRKLDALPGLGALTATAMVAAVGDARHYANGRSMAASLGLTPREHSSGGKQRLLGISKRGDTYLRTLLIHGARTVLRHAKNKTDRLSRWALALEARRGKTSPPRHWPTNSLASPGWCWPAIGYTGRIGWCNRSAATGKLLSRGVLG

SEQ ID NO: 493167 - protein, 347 aa, unidentified
MMIAVLGIDLGKNSCSVAGLDETGRVILRRRLTRDGVVRLAGKLPACVMAMEACCGAHHLGRVLREQGHEVRLMSPEYVQPYVKAQKNDERDAEAIAEAATRPTMRFVELKSEAQLDAQILHRARSRLVGQRTALINQLRAVLLERGIVVAKGRRRLETFLTETLDPEAEPPSTLSARTRLLIEDMRLEWGDLDRRIAALTAEFVARAREDQAARRLVSIPGFGALNATALVAAIGTGETFRSARDLAAWLGLVPRQATTGGKPRLLGITKRGNTYLRTLLIHGARAALPSLSAGPTAMGDWLRGLLGRAHKNKVVVALAGKLARIAWAVLRSGESYAARTGQPATA

SEQ ID NO: 493168 - protein, 346 aa, unidentified
MNQIIRIGMDTSKHIFQLHGVDAAEQPVLRKRLRRKEVVTFFAGLAPTVIGIEACGASHYWARELEQLGHEVKLIAPQLVKPYVTRNKNDGRDAEALCEAMSRPRMRFVPVKTAEQQTALMLAGMRERLIARRTQLSNAIRGYAAEFGLAAARGLDKIEPLLARISQDESLPALARELFAIQGRDYAQLQVELKAIEVRLLAWHRADACSRRLAQIPGVGLIGATALVMKTPDPRAFLSGRHFAAWIGLTPKDHSTGGKTRLGKITRAGDEVLRSLLVAGATAVIQQVRRGRGHPSRWLLALLKRKPPKLAAVALANKIARIAWKLMTTGEDYDGARMSGVSAFAA

SEQ ID NO: 493169 - protein, 347 aa, unidentified
MRKVCVIGMDMGDKTHKAVGLSEDGEVADRAEVPCTPQGVRAFLKGHPGALLAIETGTHCRWVSRIGLELGHEVLVGNARKLRMIWDNSRKNDWNDAAMLAKVARTDRSLLAPVRLRGEGDQELMRLVKSRDLLVKSRTGIVNQIRGFCKSEGVRLPKCSAESFVRLEHEVCASVRAVTKPLFAMLRELAKKIGVYDKMIAEGVKRLRGEDAALLDTITGVGPVTSAAFLAAVGDVSTFGSARDAGPYFGLVPRQDQSGETDKQLRISKEGNGIVRRLLVTAANYIMGPFGKDSDLRRHGMRIAERGGKNARKRAKAAVARKLAVVMLAVLKSRTAYRPLTEVEAVA

SEQ ID NO: 493170 - protein, 464 aa, unidentified
MKKFERQKKRFIQAPKLNSLERINANAAGVDVGASELYVCVPEDRDSEPVRIFGTFTCELHNIASWLKQCGVTTVAMESTGIYWVPLYEVLEAAGFEVKLVNAREVKNLPGRKSDILDCQWIQQLHSYGLLKASFRPPEQIAALRSLVRHRDRLIAGRAVHIQHMQKALHLMNLQLDNVLSDITGATGMRILRAIVAGERDLDKLASYRNSSCKNNVTVIRRSLEGNYRSEHLFQLQQSLALYDYHTTLIEQCEREIAKKYQELPAKADPLTPPPTAAKQKKSRKKQSGVDLRTELYKIVGVDLTAIDGCNASTIQTILSEIGTDMRPWPTCGRFASWLGVCPHNDISGGKVLKSRTQKTKNRANAALRLAAQSLSHSNSWLGAFYRRQRARLGPAKAITATAHKIARIIYNMLKYHKEFIDLGADHYEAQYRKRQTQSVIKKAASLGFRLVPVETPEPVVAEA

SEQ ID NO: 493171 - protein, 343 aa, unidentified
MTRFVGLDVSQKVTAICVVDNSGIRLWRGQCPTAPEQIAAMVRRHAGDDARIGVETGAMTPWLVHELRNLGLEVICLDARHARAALKMQINKTDQNDAEGLAQIVRTGWFRSVHVKSFDSHRARALLGARAQLVGMTTRLSNHIRGVLKTFGLLPGAMRGMPFDRKVEALLEDRSDVALIVRPMLVARRQLREQISAFDKAIRVLVRSNSACRLLMSVPGVGVLSALAYVSTVEDPARFSQSRSVGAHLGLTPRQYQSGEVDRSGHISRCGDTLARTLLYEAAVVIMTRVKKASELKDWALVIAKRSGTGKARVALARKLAVILHSVWRSGKPFRWSEHAIAV

SEQ ID NO: 493172 - protein, 461 aa, unidentified
MSRNKPTGPQKGSVQKKVDWRALEIVHPDAAGIDVGGSEHWVAVSPDRDPEPVRRFGCFTADLREMGQWLVQKGVRSVAMQSTGVYWMPVFEVLEQHGLEVYLVNAQHTKNVPGRKSDVQECQWLLKLHAFGLLNNSFQPTDEIRIARTLWRQRGNLVAEASSVIQRMQKVLTEMNVQLSNVLSDLSGVSGMKIIGAILKGERDPWHLAALVEPEVKATREDIAKSLEGNWREELLFVLRQHVELYRAYQDKITDCDLQLRKHLESLGSKLDLKTQPIGPRPKGKKNSRNAPSFDLRSELYRITGIDWTQINGIDVLTAQTVITEAGADLSAFPGEKQFASWLGLCPTNEQSGGKILNRRTRKVVNRATVAFRNAALTLLRSQSYLGAQYRRLRTRLGAPKAITAMARKLACLFYRLIKHGQPYVDKGTEYYEARYREQQIRSLAKRAQKLGLQLVISKTA

SEQ ID NO: 493173 - protein, 448 aa, unidentified
MGKSTKKTDVVKKISQLQIINPAAAGIDVSDSEMMVAFPINSEQIEVRAYECFTRDLHTLAQTLKSFGITSVAMESTGVYWIPLFLLLQDYGFEVYLVNAKHVKNVTGRKDDESDAEWIQKLHRCGLLSASFQPDNMIRTLRSIVRHRKNLVRMSAGYINRMQKALELMNIKLHTIISDIDGKTGRLIIEAILNGERNPEVLADLRDKRIKASREDIIKSLEGNWTSEHLFELKQCYQLYCYHHQMIDECDKEIEKQLIEQLASKNEGLIPDLPKVKRKTVKKNRVDFELTSYLKEIIGVDVTEVVGLSEITVLSIMSEVGPDMSKWKTENHFTSWLGLAPNTKISGGKIISSRIQKKKHHAGQAFRMAANGLHNSKSPLGDFYRRIRSKAGAAKAVVATARKIAIIYYKMVSKKEAYNPKAMEDHQQKYKEKKISQLKRKIEQLEAA

SEQ ID NO: 493174 - protein, 455 aa, unidentified
MAKQKRQTKMKVQVNALEHINPHAAGIDVGAEEVYVAVPPDGDSESVRAFPTFTADLRRLAEWLNACRIETVAMEATGVYWIPLYEILEAEGFEVCLVNARHLKNVSGRKTDVLDCQWIQQLHTYGLLNPSFRPPEQIVAIRSLVRHREMLVRYRSAHIQHMQKALTLMNVRLTNVLSDITGVTGLKIIRAILGGERNPKQLAQLRDERCKKSQAEIAKSLEGHYKREHLFALKQAVELYDFYDQQLKACDAELEAMYQEFDPPEDPGTPPPKPHTQKRRKNQAYFDLAPALYRLSGVDLTQIDGVDELTVQKVLSEIGTDMSKWPTVKHFTSWLRLCPNNKITGGKVIQSGVQPTKNRASVALRIAAASLKTSDSALGAYFRRMRARLGTPAAITATAHKLARIIYFMLKNRLPYHDFGSDYYEQQYRTRMLRNLNRRAAKLGFRLEPAVQGVS

SEQ ID NO: 493175 - protein, 343 aa, unidentified
MNITRVGVDIAKSVFHVHGVDRHDQVHWQGKYSREKWLEALSKRVPIGAEIGMEACASSHHWARELQQCSYRVRLIAAQFVKPYVKSNKNDRVDAEAICEAMSRPSMRFVTVKTATQQDIQAAHRIREELVGQRTAKANQIRGLVGEYGLVAPTGVQRLRCALPRWLEDAENGLSDAFRALLAGLVEDLRYLDDRIAILDERIARSVKDDPVAQRLLALRGIGPLTASALSGALGDGRAFRRGRDFAASLGLTPRQHSTGGRDRLLGISKRGDSYVRKLLVHGARAVLRHAAAKNDALSQWLNALAARKHINVAIVALANKTARVAWAVTRHETTYDPILAAG

SEQ ID NO: 493176 - protein, 344 aa, unidentified
MFYAGIDAHVKSSTICVVDQKGRKVHQGEVFTSGEGFEVGLGKWARRGLTAAVESSGITPWICELLKAMKVKVVVVNANRVRLIAESRKKADRVDAQTLAELLRLGGLPEVHQASAEARRLRTELAVRRQLVGQRTALANQVRGLLRAWGVNLPARFLAQKGSWKQLTGKEIPEYVRALLRTLEGVYAQLTRAMGELKRGLESAAGEDERVERLRSMPGVGLLSALTLVSAVDDVKRFHGAKQLTSYCGIVPTVRSSGEREQQGSITRQGRSEVRAMWIQAAHALAQSRRPAARPLQRWFGRVARRRGFRTAIVALARKMLSLAFYLLRDGTRYEPLRLKQARA

SEQ ID NO: 493177 - protein, 431 aa, unidentified
MDRVMIGVDPHKLSVTFEARDSREVLRAKGQFGTDARSYRQLLAYARQWPERIWAVEGANGIGRPLAQRLLASGERVLDVPAKLAARARVFDTGQGRKTDPADAHAIVMVALRDKRLRELGTDPGLTVLRLLCDRRDELSRSRAQALNRLHRLFLELIPGGAPVKKSTAQYQALLARVRPRDLAGKTRRRMAAEELADLGRLDAKLKAMKAELKAAVLASGSHLMDIHGIGPAAAARILADVGDIARFPNRAHFASWTGTAPIDASSGQHTHHRLSRAGNRRLNHVLYMAGIVQLRNDTPGRAYYRRRVAEGKTSMEAMRCLRRRLSDVVYRQLAADARAPQAGPGGHSGATLLSSAADLPPGIGTSDQPLPGPAPATLPPSLTAPHSPAAQPGASPRRRTRGVNVERPTGRTTLTPTSAGAHSKSPGPPS

SEQ ID NO: 493178 - protein, 441 aa, unidentified
MERFGLLYPRSAGIDVGSMLMVVSYTDRNDMIHVREFNSFTQSLVELSELLQGEGVEQVVMEATGEYWKTLYCILESHGIQVLMANPSHYRNVSAQKTDINDAQWLHQLLAHGLIRSSHIANELYRQLRRYVHERKTCQDLKSDTLNRIQKTLTLMNIKFQHLISDIEGVAGMKILRAIISGVSKPETLLSLVGLNRLKASPEDLMSSLEGDYQEHHIHILASMMKAYDFHKSQMLEYEYYIEATLQKLVPVSDPDKALAVIGDKRVKARKNEYHFNLSDYLESIFGVDLTAVDGLDEIGLLAILSVTGNDMRKWPTASHFASWLNLSPRPKISGGRKIGNEKRSTNNPATQAFRLAANSLWQNKGPIGQQYRKLAATKGAAKAIKAIARKLAIIFYNMVLKKEAFDPKKIQQNLEIREAKRIARLLKDAANMGYIIQKVA

SEQ ID NO: 493179 - protein, 378 aa, unidentified
MVHIIYYELISGIAQNLPLYKEILAMKRIMAIDLGKYKSVVCLYQAPSGQHEFVTIETQPQALHDLLAEHQPDVVVVEVCGLIGWVYDLVRGLGIRIKVANTNDERWRKRTIKRKTDRKDALKLARLEAMSELPTVYIPEPEVREKRALINYRQSLSERVTQIKNRIRSLLERQALSLPAGKNGWSKAALVPLHSWSRPLGQARVKELWRGELAMELSLLETVTEALEEVEEKLDALNAKDKQVQLLQTIPGVGPRLAEAVGAYIDDPHRFANGKQVGCYFGLTPRQYQSGTMDRQGRISKDGNNLVRSLLVEVSWLAKLWNPWVERMYEQLWRGSKTRKKIAIVGVARRLLVRMWAMLRDGTAWQMPALPAVNRKAE

SEQ ID NO: 493180 - protein, 330 aa, unidentified
MRKWNVILGVDVSKLTLDISSYELELHVKIDNCSAGFKVFQKWCKTHHIDLKETLVVMEHTGGYEYRFIQFCEAFSIAYCRVPGLEIKSSMGMTRGKSDQADSFRISKYGEQKIKELEPSKPLDKNILTLKQLLSFRKRLIRESAGLKSTITERKHMYEIKTADTIIHVSKAKIKSNTKHIDQVEKEITAIIKANEAMLLNYRIITSIKGIGKVNAWMTIAYTENFTSFPDGRTYAVYVGVLPFGHTSGTSIKRRTKVSKLANKELKQELNQAGKTAMRHDPEIRAYAERKLENKCFSLVLNNVKFKLILRMFSLVKRQQPYVENYRRAA

SEQ ID NO: 493181 - protein, 331 aa, unidentified
MHKETYTVTCVCNKQIVKTATVQAEPAGLAASLLRWFPVATLRSAYEAGFSAFVLHRALTTAGITNIVVNPASVAVAANDKVKTDRRDAKKLAIDLADGRLRGISVPTEEEELARLLPRTRAQIVEHRATIARQIKAKLHQFGLIAPTSRRLISNRYLREIAAWALPSELRVSLTLLAEQWRFATRQLIEIRRLLREQAAAQAALAQVYRSVPGIGAVVARTLATELGDMTRCANERALFSYTGLPPSEYSSGPSVRRGPMSRQGSSRVRHLLIETAWRALPRAKVLQEIFDRIAATRGKKRAIVAMARRLTGRIRACFRQGTTYAVGTYA

SEQ ID NO: 493182 - protein, 280 aa, unidentified
MSYQFVIGMDMSKHSFDMGFLSTNSPENIVHHAFNNDIKGFNQMMGFINETTADFDIAKALFCMEATGLYCNALLQFFQDHQANVWVENAVQIKRSLGIKRGKTDKADSISIAKYAFKNVELVRLWKPSGAVLEKIKHLATLRERMVITQKRLVTPIEELRDAGQEKMAEYLHKSIKRSITAIDADLQKIESKITECLKEDASLHHLFTLITSVVGIGFVTAVNLIIYTQGFNIMCDSRKLACYCGVAPFPYESGVSTKGRTKVSHLANKKSKQIFTWLH

SEQ ID NO: 493183 - protein, 405 aa, unidentified
MEIFVGIDWAEAHHDICVLDGTGTVLAKRRIAEGLEGVGQLHALLADHATESNEVLIGIETDRGLLVGALLAAGYQVYAINPLAASRYRDRHATSGAKSDPGDAKVLADLVRTDRHNHRTVAGDSELAASLQVLARAHQNLIWSRQRLANQLRNNLREYYPAALAAFGTELAHPVALGVLDAAPTPAIGRTLSRAKLAAILRRAGRERGVEEKAAAIQTQLRAPQLAAPTLVSEAYGKSVASTVRILRDVNAELASLEMELALSFEKHPDAEIYRSLPGLGIVLGARVLSEFGDDRTRFAHPKARKNYAGSSPITKASGTRRVVLARMARNRRLADACHQWAFCALTSSTGAHDYYRALRQRGKTHHQALRALANRLVGILHGCLDHRQTYLEEIAWPRSLTVAA

SEQ ID NO: 493184 - protein, 339 aa, unidentified
MKLYAAIDLHSNNSVLVILDERDRVIYERRLPNELPIILAQLAPHRESIEAIAVESTFNWYWLVDGLMAAGYTVKLVNTAAVKTYEGLKYTGDEHDARHLAHLLRLGVLPTGYIYPREGRAVRDLLRKRAQLVRYRTAQIISIQNLISRNRGEGISTDEIRRLDEPAILEMCAGDVARALAIQSNLTVLRCLDEQTRGLERAVLAQAKLRPEFDKLLTVDGIGKILAMTIMYEAGTMERFEEVGQFASYARCVGSSRWSNDKKKGEGNRKNGNKYLAWAFVEAAHFAVRYNERIRRFHQRKKAKRNTAVAVKAVAHKLARACYHVLKDDVPFDEARAFA

SEQ ID NO: 493185 - protein, 344 aa, unidentified
MTKISTIGLDLAKNVFQVHGVDASGAIVLRRQLRRAAVEKFFAQLPPCLVGMEACGSAHHWARVIGRYGHEVRLMPPAYVKPYVKRNKNDGRDAEGICEAVSRPTMRFVPVKSIEQQATLAVHGTRALLVRQRTMAANALRAALSELGIVAAQGYEGLRELMARLQEPSDEIPEMMRGALLLLAQHWQALDADERVLEQQIAKSARCDGDARRLMEVPGVGPIIASTVLAKVPDAKVFRSGRDFAAWIGLTGRDHGTGGKHRPGRISKQGDRMLRALLISGASAHLRHQKARGVTDPWLRDLLARRPYKVAMVAFAAKTARIIWAMLVKGEHYRDRASAPAAAC

SEQ ID NO: 493186 - protein, 373 aa, unidentified
MKKNSTGHRSRKRSAKIREESLTIGLDLGDKTSRCCVLDGGGEVVAERSVATTKKGMAQMFGAMRRCRIALEVGTHSPWVSRLLSGYGHEAIVANARQVKLISQSSRKDDRLDAQTLARLARVDPRLLRPIRHRSEPAQLHLMTIRARAALVEARTALVNSARGLAKSTGERLSACATSQWDVERIEAAEIPEALRETLRPLIRQVAALTAGIQEYDGKIEQIAREQYPETGLLKQVSGVGTLIALTFVLTVEDRERFAKSRDVGCYVGLRPKRSESGQSQPELRITKEGDIYLRKLLVQGAHHILGWRGPDTDLRRWGLKLAARGGKNQKKRAVVAVARKLAVLLHRLWVTAEVYEPLRNSQVAAGAKKAAA

SEQ ID NO: 493187 - protein, 346 aa, unidentified
MRYSTTVGVDLAKNVIQISVVNGRGKELSNRSLSRKKFSEFLCKQKPSRVAFESCATAHYWARAAERHGHEARIIPAKAVAPFRQGHKTDSNDALAVAEAARRPNIKEAPMKTTEQQGLQAIHRSRELLIQESTALSNHLRGILLEFGVAIPQGFASLLRTLPEVLEDGDNELPDLYRPTLHRMYMRLLELREDIDAMTEEVARLVKEHPVCNKLTALEGIGPIGALLLYATMGSGKAFSGSREFAAYLGLAPRQYSSGGKTNIVGLSKKVGNSRLRSVLILGARAYTYRMKEPKGSKDKWLQAIIERNGVSRAAIALANKNVRTAWAMVTQGTEYQRRPQLEMAA

SEQ ID NO: 493188 - protein, 406 aa, unidentified
MAVMIGVDPHKASHTAVAIDQAEQVLGELRVRSSADQAEKLLTWAAKWPGRTWAVEGAGGLGYLLAQQLVSAGEAVLDVQPKLGSRVRLLATGNTNKNDPNDARSVAIAALRSKDLRPVAAEDHAAVLKLWSKRRRDLGSLRTQVVCRLHSVLCDLVPGGHPKREITAAQAARALAGLGPMGAVQVARYQLALDFLADLRRADAQMKEAKRRLEVAVKASGTTLTELFGVGPYVAGVVIGYVGDVSRFADRDHFASYNGTAPIEVSSGGHKVFRLSRRGNRKLNHALHMAAVSQVSHRHSEGRAYYERKLKEGKTPKEALRCLKRRISDAVFAHLVADAKRKAEAVKAGPGGQRGNGSASSVAGSNPERRPFGQATPGPVPTIRPAATSKVTQAQEPFEKKSRKAS

SEQ ID NO: 493189 - protein, 402 aa, unidentified
MDAIVERCAGLDVHLDTVVACVSYGKLDIKPKKECTHVAMESTGIYWKPVWNILESGAFDLIVANAKKIKNVPGRKTDVKDAEWIASLLRGGLIEKSFVPPERIRDLRDLTRLRKELLGEVNRNKNRIHKVLQDANIKISSVLSDVFGETGKSILNQIIDNQCITEEFIYSLYEGRGKSKLKSTPMEMYEALNGKIRGHHVILLGMHNSNIVFLEKQINELEKEIDILLQKERDSLELLETIPGISKISASSIIAEIGTSMDVFKTEKHISSWAGLCPKNNESAGKKKRSGIKSGNNWLRSMLCECAWSATKKKDSRFKNKYWSMVPRMGRKKALIAIANMMLRLIYHLLKTKSTYKELEIQYFIDKDKRREDRIIKELKSKGYLVEKDSLQMALNVKITLN

SEQ ID NO: 493190 - protein, 357 aa, unidentified
MTQVKKLDFSGTSIFCGIDVHKKNWRVNIQDSEFELEDFSQDASAVLLHKHLTRKYPGAAFKVCYEAGFSGFSAQRWLSDQGIDCRVVNAADVATSDKEKRQKNDKVDARKLCEHLQSKKVKGIYIPAAHWEHGRSLVRARSRIVSNQTRCKNRIWQLLHFSGLSLPKDYEARQYWSNRFVKQLEAINCGSEALKTTLHLYIKDYRQTKTLLLEATRAIRKLCKQTGYQKEIILLRSIPGIGEINAAVMLFELQDVSRFKRFDHLCSYVGLVPNTSDSGGTSRTKGITNRSNYHLRTSLVESSWSVIRKDPALLMKYKDYCRKMEKNKAIIRIAKHLLSRINYVLKNKKEYVAGVVA

SEQ ID NO: 493191 - protein, 401 aa, unidentified
MLPVLARSAIEELIMEANVCNREPSLSNSVEEAAIFVSIELSRARWLVTSLSPNTNKFSRHSVPGSDIAELLRLLGELRAKAEQRIHAGVRIICIQEIGFDGFWIHRVLVSNGIESHVVESASIAVSRRHRRAKTDAIDGELLLRTLMAFKRGEPRVCAMVVVPTPEDEDRRRLSRERKTMVKERIEHINRIKGLMASQGIAGFEPRRAKSRELLDNLRTGDGRPLPERMKAEIKRELERLELLRKQIAEIEAERDALLCPCETTEPSPGAQLLKLRGIGPEFASVLWQEGLYRRFANRRQLAAYAGLAPSPWQSGDMNKEQGIAKSGNPRLRTTMIEAAWLWLRHQPKSALTLWFQNRVKGDRGRHRRIAIVALARKLLIAFWRFATFGEIPEGATLKIA

SEQ ID NO: 493192 - protein, 362 aa, unidentified
MAKAMTFAGLDVHARQTHAAVFVPATGELGVSKLRMAPEQVASFLVGLGPGVRAVYEAGPTGFGLARAAREYGIDVRVAAPGSIPRGSGDRVKTDRRDAVRLVRLLAAGELSFAFVPSVADECFRDLVRCIEDARGDLMRARHRLSKFLLRRGERYPGPGGAWTAKHLRWLRAHELGEACSQATFVDYLAAVELLAGRRGGLLATLERAIPESSQAPVIARLRCFRGIDTLSAAGLCAEIGDFARFPQPSRLAGFLGIVPSERTSDQKRRQGSITKAGPGHARRLLVEAAHHYRYPPRIGETLARRQHGQDARVLEIAWRAQRRLHRRWQHLHQQRRKPSGVVAIACARELAAFLWEAATLD

SEQ ID NO: 493193 - protein, 314 aa, unidentified
MTTECFVGIDVSKASLEVAIHGQEATRSFGNTLEGHAELVAYLQPLNPTRIVLEASGGFEIEPMLALMSQGLPVSVVNPARVRSFAKAHGRMAKTDPIDAHLLAHFAQAVRPRLRSLQSEQETHLKNLVRRRRQVVAMLTAEKNRLHTTSVRLQTGVKKHIQWLQEEENELAQEIAELIQSLPEWREKEQILQSVPGISPVNAATLLAELPELGTTSRQKIAALAGVAPYNRDSGKRRGRRKTGGGRGGVRSAFYMACLSATRHNPVIKRFYERLIAKGKEPKVALTACMRKLLSILNAMLRNKEPWRVVNLHA

SEQ ID NO: 493194 - protein, 343 aa, unidentified
MHVNTIGLDLAKNVFQVHGVDRAGKVVITRQLRRKQVMGFFSKLPACLVGMEACGTAHHWAREISKLGHTVRLMPPSYVKGYVKRSKNDAADAAAICEAVTRPSMRFVPIKSTDQQALLMLHRTRDLLIRQRTQLINALRAHLAEFGLVAETGREGLAQLGAIITDESNREALPSAMKQALQAIVDQLAALELQIGTLDRAIHAHHRANDMSCRLETVPGIGVIGATAIASTVTDPSGFKSGRDFAAWIGLVPRQHSTGGKERLGGISKQGDRYLRRLLVIGATAVVRHARQHPQKHPWIMRLLAKKPAKLVAVAVANKMARIAWAIMAKGGSYRAPELAAAT

SEQ ID NO: 493195 - protein, 343 aa, unidentified
MDQHIGLDVSLKDTSVSVRQDGKRIWRGKCASDPKLLAEVIRKRAPNAKRVVFETGPLSIWFFHALTAEGLPAICIDARHAKAALDMSANKTDANDADGLAHLAEVGFYREVRVKGFDSMLMRTLIAARRQLMKMRVQMSNQIRGLMKTFGLVVPKGTGSVFDRNVISLLEGEDNLACIILPLLKAWGDIRLRVAELTKQLVAMAGADQRCRLLTSVPGVGTVTATAFAAAVEDSINFKNSRAVGAWIGLTPKRYQSGEMDYEGHISRRGDAKLRTLLYEAASVILNRSTETNALRTWALALKERLGFKRAAVALARKLAVIMHTMLKTGELFDPNAGAAVPT

SEQ ID NO: 493196 - protein, 352 aa, unidentified
MTVTNLPRCVTGGVDTHLDVHVAAALDERGALLGVESFATTPHGYKKLLDWLSDFGAVELVGVEGTGSYGAGLTRHLQAERVKVVEVDRPNRQRRRRKGKSDPQDAIAAAHAAQSGDALGEAKTRDGNVESMRVLRVARSSARSGRTRALNQMRSLVSTAPEIIRTELRGLNVYRLLERTSTYRPGAKRDIVSLTKFSLRMLGRRAIELEEEIIEIDAILKSLVKETAPELVSTLGIGTDAASALLVAAGDNPERLRNEAAFAHLCGASPLDASSGKNQRHRLNRSGDRQAHSALWHIVITRMVYDPRTTEYIDRRMSEGKTKKEAVRCLKRYVAREVYGLLPQDKLGLDSP

SEQ ID NO: 493197 - protein, 456 aa, unidentified
MKTSESSRQQLEGLPVLRRNVAGIDLGSEQHWVCAPALDGNGRERASFGATTPELIGMAEWLKARQVESVAMESTGVYWIAPHEVLEAQGLQLLLVDTRQLARVPGRDKKTDPTDCEWIQRLHSCGLLRGSFRPEEAVCMLRTLVRDKANLVAESGDWLRRMQKSLDQMNVRVHRAVSDLDGVTGMAILRAIVGGERDAQKLAKLRDRRCSKTEQEIAEQLSGHWREDHLFSLQQALKMYDAVQERIAAYEKEILRKLGDMEREEQRGQTALPLQNANKTKAIKKRGQEPMRQALYRMSGVDATHIDAIGVETLEVILSEYGPDLSRFPTEKQFVSHVTLAPHVPTSGGKPLRKRKRNSASTRVAAALRMAALSLRHSQTALGAYYRKMAQRLGGDIAVFATARKLATLIYRLLRWGQQYVDEGAKAYETRYRQQRIGRLAATAKELGYELAPVNA

SEQ ID NO: 493198 - protein, 385 aa, unidentified
MTQPSTLSVGLDVHQDAMAVASVVQDHGAEVVSLGTSGTRPCDLDQLIRRLPSKRPHLVVVYEAGPCGAWLSRDLTHQGHVCWVVAPSLIPQKPGDRVTTHRRDAIQLARLMRSGDLTPVDVPTVADDAMRDLGRAREEAIRDLKTAKFRLKAFRLRQDIRDTGRATWGPAHLRWLSEVGGPTPAQPMVFQAYVRAVTAHPARLQRLAQALHEQVNTWRLQPVVEARQSRRGVQCTVAVTLVAALGDLTRVDHPRQLMSALGLIPSASSSGDRRRQGGLTKAGNTHARRALVEGAWASRDPAQVSRPLPWRLETLPTPRQEISWQAHVRLCQRERRLIGRGKHPNHVVVAIARERSALIWAMAREVPLTPETETVERPEAVGPRC

SEQ ID NO: 493199 - protein, 344 aa, unidentified
MRITVLGIDLGKNVCSLVGLDENGAVVMRRRNRRDLLIHYVVKLPPCIIGMEACCGAHHLGRLFASTGHDVRLMSPAYVRPYVKAQKNDDRDAEGIAEAATRPTMRFVEIKTEAQLDMQTLHQSRERLVGERTTLINQLRAVLLERGIIVPQGKRKLEQYLVELLQEPETPRLSVRMRMLVADLQAQWRELDRRIAAFEAEFVAYAKESDDARKLITIPGVGVITATEFIAAIGNAETFTHGRDLAAWLGLVPRQSTTGGKPRLLGISKRGNRNLRKLLIHGARAALPHVAERDTPLGRWIKDLLVRVHPNVAVVALANKLARISWAVLRTGQQLNAKGRDVAA

SEQ ID NO: 493200 - protein, 387 aa, unidentified
MIYVGIDIAKQTHYASIMNSDGEILVDPFAFSNDHNGFQNLLKHLVPFFKEETFIGMESTAHYAENLTSFLFTRGFQVCIINPIQTSSLRKSNIRKTKTDSLDTYLIIKALTLNHYRLFSERDYDSLQLKNLCRFRQKLMKARTKVKIQLVTYVDLLFPELQYFFKSGIHGKTCYALLKEQPNPDRIAKMHLTRLTNLLSKSSHGHFNQSNAVRLKELASQSVGIKNSTLSLQILQSIQQIEMYTEQLAEVESSIQEVMNKMNSVIKTIPGIGSLNGAMIIGEIGDITRFEKPCQLLAYAGLDPSVYQSGNFNAARTRMSKRGSKLLRYALINAAWQATLVNQTFKDYYDLKISQGRRHYNALGHVAHKLVRVIHKMMTDNVSFNLS

SEQ ID NO: 493201 - protein, 344 aa, unidentified
MIYIGMDVSSKSFVIHAIDSRKKVVCRAEIQACKESLLGILQRLGKERKLVVFEAGNQMKWIAQTLMEVEGVEVHVAHPNELKWISQSSGKTDKVDARKMAELARGDLLPRKVHIVEGHVRQLREMLSGRQVLQSKRVALINGIRAMLLQEGVRLPEKFFDRLDWRERLEKAPVSEATRKIISAYMHGILGLHAAEDELTAQILSIKDERLKQLESIPGIGSLSSRVLLGALDDANRFDNKKSAAKYGALTPTVHQSGNVNHHGHICRDGRHEVRKVLLQCAHTIARMKSYDARPLKEFFERIQKRRGKKIAIVALARKLLTIAYGVLKAGTYFDPVKLSLRAA

SEQ ID NO: 493202 - protein, 380 aa, unidentified
MVPLQHHRGTTMDHYAGIDVSLEYSSICVVDATGNIVREDKIASEPEVLIAWFGSLGYALTRIGLEAGPLSQWLYAAMKKAGLAVELLETRHVRDAFKAMPVKSDRNDARGIAQLMRLGWFRPVHCKSIGAQEIRAELTARKLVESKLRDIANSLRGILRGFGLKVGATTERSFPGRVRELVKGHPVLEAIAEALLSVHEVLLREFNGFQKRVQSAACSNVKARLLMTTPGVGPVISLTYAAAVDDAARFKSSKKAGSHFGLTPKKYQSGETDRSGRISKIGDASVRAALYQAAHVILTKPVKGCPELKSWGMRLAKRAGQEKAKVALARKLAVIMHRMLADGIPFNPNAKAERMAATATKAASKVLALPASGTTVAEAV

SEQ ID NO: 493203 - protein, 318 aa, unidentified
MTQPLIFVGIDVSKAQLDVAQRPAGRFMVPNTEAGFTQLIAQLAANPPTLIVLEATGGVELPLTGALAAAGLPVVVVNPRQIRDFAKATGQLAKTDALDAQVLAHFADVVRPTPRPLPDVETQELAALVTRRRQLIEMLTAEKNRMASARAVVRKQLRAHITWLERALDQADTDLAEAIRQSPLWREKEELLRSVPGIGPVLTTTLLANLPELGTLTHKQIAALVGVAPLNRDSGTLRGKRIVWGGRAQVRAALYMAAIVAARFNPVIRVFYQRLCAAGKAKKVAFVACMRKLLTIINAMLKHRTPWRQGTEAVCAGA

SEQ ID NO: 493204 - protein, 355 aa, unidentified
MTITKNYLGIDLHKQFAYWHLTDKNGELLWQGKVPTTKKDTKKRLKKCSVDLSQTISAIESVESYGWYADMLTELGVGEVKLANPWKLRLIAENPLKNDKEDARIIAQYLRSGTLPESYLAPKKTRDLRELVRTREYLVRMRTSAKIRVRSSFAKLGLIGPFKDVDSAKCIEWLSKQEIPKTYENEIDTLLKLIAQLRNDIECYESEMKKLEKEYPITQILKTLPGVGAVRSIIMVAEIVDYSRFSHPDKLASFAGLVPRSYSSGGKERLGRITKRGSSALRAAMVGAAQQARPAWGDLYIFYEKLKKKNGTTGAAKVALARKLLTISWHLVRKNEPFQARSIVEPIGSVNSMNV

SEQ ID NO: 493205 - protein, 334 aa, unidentified
MSDCTVFVGLDYHKDSVQVCVLDSGGRVLGNRCCDNDPQKVVAYVSTHGGVRGAAMESCEGAADFAEGLIAAGDWSVDLAHPGYVHRLRQNPDKTDYSDARLLADLERVGYVPKVWLAPQVIRELRRLVRYRRQLVNERRNVKLRVRALLRAHRRGCSAPRWGVAWLRWMREVDLPEHSRWILDRHLDRLQQLNGELQGVERRLDAVTKDDAVVQKLLTLPGVGSVTAWVLRAEVGRFERFRSGKQLARFCGLTPWNASSGARQADAGLIRACNQDLRSVLIEAGHRLKRWDPRWSALASQLRRAGKPGSVIAAAVANRWVRCLYHEMTTTQAA

SEQ ID NO: 493206 - protein, 369 aa, unidentified
MGWTPPRRPWCARVVVLVTTEQEASVSEASTIGLDLAKRVFQAHGADAAGKVVFRKRLRREQMLAFFAGRPACLVAMEACSSAHYWAREIGALGHTVRLIPPAYVKPFVKRQKNNTADAEAICEAAQRPTMRFVSVKSEAVQANAVVFRARDLLVRQRTQAINALRGHLGEYGVVVAKGPSHVAKLIAHVKDPASALPEAARPVLRVLTASLQFLSEQIGLLDREIARRAREDKEVRRLTTIPGVGPVTATAVAAVAALAPPANAFRRGRDFAAWVGLTPLQHSSGGKQRLGATSKMGERTLRRLLIIGASSVVRKAIKHGTPSGSWLARMLARKPRMLVIVALANKMARTVWALQATGAIYRAPVVAA

SEQ ID NO: 493207 - protein, 387 aa, unidentified
MTAVVIGVDPAKRSNTIEVMDSRETVLVTARFDNTNADYRKIRTLVKRWPDRVWAVEGATGVGLHLAQRLISDGERVVDVPSKLSTRVRAIDSGHGRKNDPTDAHAVAVVGLRTKGLREVAADDQMVALRPLSERRRDLVRSRTQAVNRLHQVLMELIPAGAQRHLTAAKAKELVATVRPRDVAGKARRQLAVDLIDDVGVFDRKITTVDTRIQEAVAASGTHLTDIVGVGPVTAATILGEVGDIARFQTADQFASYTGTAPIEASSGEVVRHRLSRAGNRRLNSALHVVALSNNRYDPHGKAYYERKLAAGKGSKGSMRCLKRRLSDVVFRVLVQDRALVNPGGQMGATLTASAVDQIPKANTSDKPQPGSRTEATPTKRLTEAAS

SEQ ID NO: 493208 - protein, 369 aa, unidentified
MADYREAYVAFDVAKIKHAVAVADSGRAGEVRFLGEIENRPVTIERTIRKLAKRYDRLHVCFEAGPTGYGLYRQVGDLGHDCMVVAPALIPKRSGERIKTNRRDAVTLARLHRAGELSAVWVPDIVHEAVRDLVRARQAGAEDLRRKRQQLLSFLLRHGRIYDAGGHWTLAHRRWLARQAFEHQAAQIVFQETSDAIEDAAQRLHRLDEQLAAIVETWSMKPVVEAYQAMRGASFLVAVIFAAEIGDVRRFETPPQLMAFLGLVPGERSTGDTVRRSGLTLAGNRRARRALVEAAWTYRYPARVSEPLRARLEGLPKAVRDIAWKAQVRLCARYRRLAAAGKKPPVIAAAIAREMAAFLWAIGREVAPS

SEQ ID NO: 493209 - protein, 463 aa, unidentified
MTDPRSTPAAGGQDRQPPVRELARRILHPHAAGIDIGSERHYVAVPPECDPQPVRCFGCLTPDLQALAHWLKACGVDTAALEATGVYWIPVAQVLEENGIDVYLVDARQAKNLPGRKTDVKDCQWLQELHSQGMLARAFRPPDAICVLRSYWRHRKGLVERTAVPIQLMHKSLEQMNLQLHKVLSDVTGVTGLKIIRAILKGERDPVALAQLKHPLVRSSEDTIAQALTGDWRAEHLFTLRQAVELYDVYQQKIEACAQEIEAYRKTLDSRGDPKDLPPAPRGTRRKNPAHFDLRERLYEITGVDLTLLPGIDAMTAQTVVSECGTELSRFATEKHFSSWLGLCPNHEISGGKVLRRRTRRVRTRAARALRVAAQSLHKSKTALGAYYRRMRGRLGPAKAITATAHKLAILIYRMFRYGMEYVEQGQDLYEQQYQERTRRLLAKRVRQMGYGMVDLQTGEVVS

SEQ ID NO: 493210 - protein, 350 aa, unidentified
MRRPKEKLIAGFDLHGNNIMIGVINEDGKRVAHRKLDCDLKQVTEFLKPFKPQLQSMAVESTFNWYWLVDGLRHQGYGIDLANPAKIEQYNGLKHVDDKDDAFHLAELQRLKILPKAHVYDPALRPVRDLLRRRTLLVHQRIALVLSFKSLYTRTTGQALPLNETKQLEPKEAAKLYEHPANQLIAQMQMEHIQALAASASRIEKAVLASAREIPLYDKLLTIPGIGKILGMTITMEVGDIKRFPSDGDFASYCRMVDARRLSNGKCKADNNQKCGNKYLSWAFVEAANFARRHDEACRRWYDRKAAKTSKVLATKALGCKLAKAAWHVMVHQCDFDPKRMFPETAVKKT

SEQ ID NO: 493211 - protein, 357 aa, unidentified
MAALSIADVSANVTVGVDTHKHSHVARAKDGLGRHLGQLEIGTDPGGYADLLAWAQGFGPVVTFGIEGTSSYGAGLTRFLGAQGQAVIEVLRPVRRDRRFGSKSDPIDADAAAGAVLSGKATAVPKAGDAGVEMIRALKIAKQTAIKARTQAVNAVKGLIVMAPDPIREQLRNLKTPALVRTCSAYRVDGASDPTSAIKLSLRSMCRRYVVLDQEVRSLEKELDALTIRLVPQLRQLFGVGQDVAATLVLAAGNSGGRLRSEASFSMLCGASPIPASSGMVQRHRLNRGGDRQANAALHQIVVVRLRYNEATRAYFAKRKADGKSKKEIFRCLKRYVAREVYRTLVDPREEAARSAA

SEQ ID NO: 493212 - protein, 379 aa, unidentified
MEVFIKNCAGLDVHSETIVACVLKGRHENEVYQETETFPTLTKDLFRLLKWLESHEVTHIAMESTGVYWKPVFNILEDFFDITLANAQRIKNVPGRKTDVSDAEWIAKLLRHGLIEKSFVPPVEIRELRDLTRLRKKWIGHLTSEKNRIQKVLESSNVKLSTVISDVFGVSGRKLLNRLIEQGYVDEADVEKNIHGRLAPKKQLITDSLFGTLNEHQIFLIRQSWRHIEYLESLVLEIEERINQLLQNYHEELQLLMTIPGIKKDTAAVIIAEIGVNMNQFPTSQHLASWAGVSPGNHESAGKRKSTRSIKGNPHIKSAMCEAAWAVSRSRNRWLANKYWSLAARRGKKKALVAISHRMLRIIYSMLLNKEPYKEPQFV

SEQ ID NO: 493213 - protein, 414 aa, unidentified
MDVLHSRCCGLDVHKSSISACILLREAGRVQKHQRRFGAMTQELQELAEWLRQFGVSQVAMESSGVYWKPVWNILEGQFTVVLANAQHIKNVPGRKTDQKDGEWIAQLLQYGLLRPSYVPCEIIRDLRDLTRMRASLSQEASRLSSRIQKVLEDANVKLASVATNVLGKSGRAMLEDIISGEDDAEHLASLALGHLRVKIPQLRLALEGKIRPHHRFLLRRLLDQVQFVEHEIALLDQRLEEIAQQRPELSQAVARWDTIPGIDRVAAWALLAEIGDNMAQFPTAEHLASWAALCPGNHESAGKRLRGTTRQGSPWLCRMACQCAWAAARTKNTYLSSQFRRLAARRGKKRAIIAVAHTIIVIGYHLQKNQSNYEDLGGNYFDRIHSDGLKRYLVKRLQQLGHKVTLEPMEAAA

SEQ ID NO: 493214 - protein, 343 aa, unidentified
MKSIHYIGLDVHKKTIAYCIKTVSGETVRQGVVSTERKALRQWLTQLPGPWMGAMEATIFTGWIYDFLKPHAVELKVAHPEMLKAITAAKKKNDRADAEKLADLLRVNLLPECTMMSEELRDLRRILRYRNLVVRTATQMKNKMSGLLMEVGATYDKRRLHGHKYFGELLERVEDVPDSVKDLLRLSRGSLELFSAIQKKLTQTLREQPLIRERVERLMSIAGVGEIMALTWVLEVGDLARFSSARDAISYCGLCSAQRESAGKEHRGPISKKRNKHLQTKLIEAAKLAPHWNPQLAALHEKELARGNRNRATLAVARKLVEYLLAVDRRGTPFVAEAPSRVA

SEQ ID NO: 493215 - protein, 347 aa, unidentified
MRKIIVGIDISKEKLNVCLLEEMNIVHEDEIENTEASLRKWFCRMRKSLKCRMEEVLICAEFTGRYIYPLAVVCHEEEAFLWMEDPSRIKNSFGLVRGKSDSVDARRIAEYAFRHQDKAVAYHMPPKELASIKILMTDRELVLSDRKKYEAQLTDQKRFMDKEDYAMQSKMWKSIVKELQKQLDFIDEKIDKLVSDSESLSHQVELLKSVDGIGQRIAVAMVVVTDAFTRFDNARQFNCYAGLAPFTYTSGKSIYSKAKVSQRANKQIKALLHMAAVCAATHMKSGDYKEYYDRRIAEGKHPLCVLNVIRAKLVGRMFAVIKRDELYIKNYDRSSSEKKLSTPVQIS

SEQ ID NO: 493216 - protein, 348 aa, unidentified
MQVTTLGIDLAKNVFCVHGCDANGKPVLRKQLSRRQLLSLVANLPQCLVAMEACASAHYWAREIEKLGHQVRLIAPRFVRPFVKANKNDASDAEAICEAASRPSMRFVAVKSTAQQDVQAVHRVRQQLIKTRTALVNQARGLLAEYGIVVAQGVSRLRRALPAILEDRDNGLSGVMRELLAEIAERLRFIDDRLRKYDLTIHRLFRQDERCQRVAAVEGVGPLSATALVAAVGNATDFKSGRELAAYLGLVPRHRASGGRTVLLGISKRGDRYLRTLLVHGARSALYRIERQRGARAIWAARLKLRRGANVAAVALANKNARVLWALLSRGQSYQPAPFPARVPQAGG

SEQ ID NO: 493217 - protein, 412 aa, unidentified
MKLFVGIDVSLKDFKARMFDPEGEEIATRFHAKNDNPGAEALVKYLVEICSTNDVDSLRIGLESTSVYSWHLQMYLAGEHLLVPFHPQVYVFNPKVVANFKRQYVDIQKDDWFDCLVIADRLRFGRLPESCQVDFRYLPLQRLTRFRHHLIQTITREKNYFLTNLFLKFNTFCQDKVLSNTFGAASEAILTEFLSPEEIAARPLDELIDILMEKGKSHFSNPEATAKALKKAAHNAYRLQGSLLEPVNLILATSLQTIRALEKQVKGIDKAIEKELSHFRTTLQSMPGIGPVCAAGLIAEIGEIHRFDHEKALAKYAGLTWRKHQSGEFEADDTPLTKTGNSYLRNYFVLAANSVRIHDPKFAEYYHRKFKESTTHHHRRALVLTARKLVRVVDALLRSNQLYVPQGQRRVI

SEQ ID NO: 493218 - protein, 338 aa, unidentified
MKNSSVVGIDLGKNVIHVHGADSNGKPLFQKALKRNRFERFMANLGPCTVGMESCSGAQHWARVLTRQGHEVRLLPARYVRAYVKTNKNDWRDAEAIVEAMSRPTMRYAAQKSAEAQSVQMLHRVRNRVVKQRSALANQLRGFLAEFGIVVAIGLSSLRRRVPEVVEDAENELPARARSLFWGLYEELRGLDARIDELDMQLEAHCKSDPLCQKLRAIPGIGVVNASALVATVGDGRQFASGRDLAAWLGLVPRQHSTGGRIQLGGISKRGDRYVRTLLIHGARAALARAASSTDPRVRWADQLRRRRGHNIAVVALANKMARLAWVVLSRDEDYRAV

SEQ ID NO: 493219 - protein, 406 aa, unidentified
MKKNSKVAVGRKQETDGNNNKKLLRGNVEILVHKLNASESRAAAEAEARTNKAVAFFIGIDLGDRKSRYCFLEGQGERVIEGSLATTAETLQAYFSRVPRSRIALEVGTHSPWVSALLEGLGHEVYVANPRKMESIHKNKRKNDRIDAWLLARYVRADVQLLHPIRHRGVEVRQDMVLLRARDVMVAVRTKLINSVRGLVKSVGGRLPACSARSFHKTDVERIPEDIRGALLPILQEIGSLTKAIDEYDKRVREMGEKRYPETELLRQVKGVGELTALAYVLTLEAPERFPKSRDVGCYLGMVPKQDDSGDSSPQLRITKTGDRMLRRLLVGSAQYILGPFGEDCDLRRHGLKLAERGGKNAKKRAVVAIGRKLAVLLHSLWRNGEVYEALRQAAIEEAVAATTNA

SEQ ID NO: 493220 - protein, 342 aa, unidentified
MDHYAGIDVSLECSSVCVVDASGKIARESKVASEPEALIAYFGSLRLSVVRIGLEAGPLSQWLYAAMKEAGLAVELLETRHVRTALETMPVKSDRNDARGIAQLIRLGWFRPVHCKSIGAQETRAVLTARKLVQSKLLDVENSVRGILRGFGLKVGHTTNRSFAGRVEDLVVNHASLHMIAAALLSVHAVLLRELKAFDKRVRSMARVDVKAKLLMSAPAVGPIVALTYASAIDDPGRFTSSRRVGAHFGLTPKKYQSGETDYTGRISKIGDATVRTALYEAAHIMLIKPIKGCAPLKSWAMRIARRSGMKKAKVALARKLAVILHRMLANATPFNAAKAAA

SEQ ID NO: 493221 - protein, 319 aa, unidentified
MAQDDLVVAGIDVAKDKVDVCIRSLSLKRAFASTAEGRRELAAWLRRNKAGKAVMEASGGYEREWAKALRVAKIEVRIVDPKRVRSFARSAGRLAKNDTIDAEMIAWFAETFDQAPGQAYDAAREQLHQMVYARQALKDMESKLTSQGEHAVPAAVQRIHARISKTIAVELVKIEAEITALIQATPRFAELAEIIESVPGIGRTTAAALIADMPELGQANNKIVASLLGVAPYDDDSGRRRGERHIKGGRRRTRNIFYMATLGAATLHNPVLKAFYGRLVAKGKLKKVALTACMRKLISILNIMIERRQKWDAKRYALS

SEQ ID NO: 493222 - protein, 339 aa, unidentified
MTASQSKDIAVYVGADISKDSIDISYHFENKIHIDKISNEKKAISTFIRAMKVEKGAVLHFILEATGYYSQILYKTLRDMKIRFTQVNPYFTRRFAQCSGILEKNDRIDARVLENYGQRMTPEPTIPDEDIQMEMKKLYKLRNELTEDRRKWNQRKHQHRLNPAKSIIDRMSKNIEKEIVSLDEKIEKLVTSQALYKKIHEELIKIVGIGSNTACAILCLLPEIGTLNANKISKLAGLAPIVHQSGTSINKTAHIKGGRPDVRTALFMPCRTACCFNSIIRAHYQRIISSKGGVNIKGAKAIAHTACMRKLLKHINSVAKKVREEMQRNVAVEGYGEAT

SEQ ID NO: 493223 - protein, 333 aa, unidentified
MQNFYFIGIDVSKKKLDICVMSNSKVLKEEQVSNHPQAIATVIAGIKEELSMSNDSLIICAEHTGQYTYPLICACKSVGSKLWLENASQIKYCSGVTRGKNDKVDARRIAVYAMRFFDKAKPYQRPTEELMRLKQLEAERSLYLTDLAKYKAQLSDQEGFMEDKIFKRKAKRLKEMIKSLEKTLKEIAQEMADVIYSSGELSRQMRLLKSVEGVGPVVAMNMIIATEAFTRFDNPRQFNCYVGVAPFAYTSGSSQHSRNRVSQRAVKYIKCLLHMAAVAIAHKKTGDLKTYFERKVAEGKNKMTVLNAVRAKLVARMFAVIRNNRVYQPILSV

SEQ ID NO: 493224 - protein, 443 aa, unidentified
MSKFKKTFELTYPNAAGIDIGASSHFVAVPTDRDDQPVREFASFTEDLHAIADWLTVCGIDTVAMESTGVYWIPLFELLESRGFTVFLVNSRHVKNVPGRKSDVLDCQWLQQLMSFGLLSGAFRPQGDYAALRVVARLREMLLRYQATHIQHIQKALLLMNILLTEVLSDVMGETGQKIIRAILAGERDGGTLARYRNGHVKASEEEITKALQGSWRDEHLFSLKVAVELYDFYAEQLLACDQQIEQLMKDLARYDLKPEKHKRRGGKPKNAPKFDARLLLMQMCGVDLTRIDGIDVTTAFKVLSEIGADMSKFKSAKHFASWLGLCPGTRISGGKVLSAATKRTANKAAQALKMAAMNLRNSQSALGAYYRRLCGRMDKGKAVTACAHKLARLIYAMLTKGEEYVDQGQTYYEEKYRERVIKNLTKRAEAMGFQLTPASEMP

SEQ ID NO: 493225 - protein, 310 aa, unidentified
MIIAPGFIGIDIAKNHLEIFDAAVGHVVVAANTPAAIAELIQGWRQQDVFALFEATGCYDRELRQALSAANIRFARVNPARARDFARAAGFLAKTDAVDARMLAAMAQCLRPVPDDSRPQEREQLALLNKRRDQLVAIRQQERTRRREASDPVSRDSLADHLAWLDAAIEALQAQIAALIEAIPELSRDRRLLVSAPGVGPVTVATLLALLPELGNRSPKQLAALAGLAPFNNDSGARRGQRSIRGGRKRVRDALYIAAFTAARHAPRFITFYKRLIDAGKPPKLAIIAVARKLLTILNALVRDQQPFRP

SEQ ID NO: 493226 - protein, 391 aa, unidentified
MNQLIKYVIGIDVSKDKLDACLISVDVQLNYKVKATHKFNNALSGFKELLQWFSKFCKEKVPVQTLMEASGVYHEKLAIWLTEREMEVFVVLPNKARKYMQALGLKTKNDKIDAQGLALMCAQHKFDKWQPVVKFYYELRLLTRHYQSTQELKTSLMNQLHALEYSGYPSKQVSKQLEKTIAFFKKQIKESKQQIAEHINRNDEVKRKVTQICKIKGVDTLTVATILAETNGFELFKNQSQLISYAGYDVIENQSGNHIGKTRISKKGNSRIRRILHMPAFSVVTHKEPIFLNLYERIYSKTKLKMKAYVAVQSKLLVIIYSLWKKDEEYNKDYHPKTTSGNDESRGLFRLSAEINDENLIKKVVLPESSTTRDELQYNESPEVLFRLVQT

SEQ ID NO: 493227 - protein, 488 aa, unidentified
MKGRLDFIMVKKNHSEFLVCDSETGEVLETGTEIQYTKDYGVGIDCHSKFLQISVLVKNEPSVFEYRNQFDTDWQSVVNAKEWVVSVIENNSSPSVHITDDLHYCIESTSVYHVVVLKAWKGIPSVINPSIAGATKKKTDVLDAKMLAVQDLTGIWPSSFIPSSEVDQLRLLLAERDNFNRLATRTNNRINNSLMKFGYTVGRDGSVTKSAKVREMIEDQISDDPSDHYNVCPEGIPDNVKCVFIEEYRQYDKYRELVRDYDSRIRSMVCSINWETADSEIPGRQMLKILCTAPGIGEQTAILWLSKIVTPRRFRNEKALAAYCSLDPSLKVSAGKVTSTVKRGGCKDLHSALCMAAFKLVSKHNEPFGRWGYNIAVNSGRWKKGISAVARKLAVALYFMSLRGEEFSYEKYRMMTEPDVIDISIEELANKDPAFRRYVRILISGNIHTTKQMVHSYYLCDLTNIKGLGKKFYGLLKEFIGNQEKYRS

SEQ ID NO: 493228 - protein, 341 aa, unidentified
MSELAMVGIDLGKHSFHLHGQDKTGREVFRKKLSRQQMMQFFSNLPVCTVVMEACAGAHFVARQLMVMGHETKLISPQFVRPYVKGNKNDFVDAEAICEAASRPSMRFVSPKTEAQQTLSVLHRLRESLVRDRTKTVNQMHGFLLEFGISLPRGLAIMKRLPVILTQHELPIRLMTLLDRLREHFNYLDGQIRDLDKELARQLADDDLGSRLLSIPCVGPITASLLAVEMGDGKQYACSRDFAASIGLVPRQYSTGGKATLLGISKRGDKNLRRLLVQCARVYLQQLKIQHGALADWVRSLLIRRHSNVVACALANKLARIAWAISAGHGVFNAGPDAVAI

SEQ ID NO: 493229 - protein, 351 aa, unidentified
MVIIGVDYHPSFQQIAFFVEETGEYGEQRLNHEGGEAERFYRDLQQRGIGVRVGMEATGYSRWFERLLAELDFELWIGDPAEIKARRVKKQKTDRKDAEFLLKLMREDRFPRVWVPSPENRDLRQLLWHRHRLVQMRTRIMNQLQALAMNEGRRLKSKLWSKQGRAELEKLALAPWATRRRNELLELLDRLNPSIEELTTAVEKEARKRPETLRLMTHPGVGPITALAFVLIIGTPARFARGKKIGTYVGMIPSEDSSGDKQRLGHISKQGNSLLRYLLVEAAQAAARFNSHWRRRYTHLTMRRHRSIAKVAMGRRMAIRLYWMWRNGCEYSPSFEFGSYAGQLATGHGVK

SEQ ID NO: 493230 - protein, 344 aa, unidentified
MDHFAGLDVSVKETSICIVDDAGKIVREVKVASEPEALLAVLKNPAYHFKRIGLEAGPLSQWLFSALAEAELPVVCVETRHMQAVLKAQINKTDRNDARGIAQMMRVGLYRPVHVKTLRSQKLRMLLTHRKLLQSKAIAIDNDLRGTLRNFGLKVGIVGTMKFEARIKELVENQPDLAGLVEPLLVVRRVLREQFVILHRRLLAIVRDDEVCRRLITTPGVGPVVALTYRATVDVPARFRKSKSVGAVFGLTCSKYQSGEIDRNGRISRCGDEMMRVMLYEAAQSMLWSKKWSWLKAWAMQIARRRGMKRAIVALARRLAVIMHRIWVDGTEFRWTREQTAAAA

SEQ ID NO: 493231 - protein, 385 aa, unidentified
MEIETFIARDYDVFGGLDVDKKSISVTFTDHQGSVKSMRMPYNVEYLVNHVRKHYGDKKVAFAYEAGPTGYGLYDGLVAQQYPCLIASPSMIPKAPGQRVKTNRLDSLGLAENLRGGQLKSIHIPTTLYRELRHLTQLRDALVSEMVAMKQRIKSLLLMEGLEFPPAPPGSQWSFLVKAKLRKLPCSSVVRFKLDQLLDNLEFGEKQVLKVTREIRRFCQNDPELSQCIDYLKSLPGIGWIVASQMMARIGDWRQIKNIREVPAFLGLVPTESSTGERTTRGSITHSGDPRLRSKLIQASWSAIRQDGELLKFFRTVAKKHPRHLGPRVAIVAVAHKLCMRAAVVLMKQRPYEIREKVQSAPLTQEETVPQGTTRRRRVPGEKIS

SEQ ID NO: 493232 - protein, 382 aa, unidentified
MQASRKSTPTADHCGTIFVAIELSQKTWLITVHSPDRDQFSRHRLEGGDHAGLLALIEKVRARATQQLGSTPRVVSCYEAGYDGFWLHRLLEAAGISSLVFDAASIAVEQRSRRAKTDRIDGELLLRTLMAHLRGEPRVVRIVRVPSVEEEDARRASRERDRLITEQTAHSNRIKSLLRLLGMAVGNPRRRDWLAWLKRQRDWQGRPLPPHLLAEAQREHARLMLVREQLAALEQVQAAQASPVPAPMAERRDLLQRLKALGPAFTATLVNELFYKDFRNRREVASYCGLAPSPWQSGGIDREQGISKAGNRRARHKAIELAWLWLRHQPNSALSHWFRTRTANAGRRAKRIAIVALARKLIVALWRYLTAGLVPEGATMKA

SEQ ID NO: 493233 - protein, 337 aa, unidentified
MDYFAGLDISMDETHVCILDREGVVVRESKTSSTADAIAGELAKAPSCRRIVFETGRMAPILFHGLSQLGLPVICIESRQAYQALKSLATHKTDRNDARGLAHLARTGFFKSVHVKSLQAHALRSLIIARKKLVGQRVTLENQIRGLAVVFGIRLPRALTAAFVNQALKASEGIAGLSAAMGGLIAARTAVMTAVAAIDADMRRMTRASAACRRLMTIPGVGQLTALAFVAAIDDPSRIRRSRDVGAYLGLVPRRHQSGEVDYTGGISKCGDRRVRTLLYEAANVMLTRYKGQLKLKDWAFAIAKRSTMRKARVALARRLAIIMHAMLRDGTEFEFA

SEQ ID NO: 493234 - protein, 334 aa, unidentified
MENIALIGIDLGKNSFHIHCQDRRGKAVYRKKFTRPKLIEFLATCPATTIAMEACGGSHFMARKLEELGHSPKLISPQFVRPFVKSNKNDFVDAEAICEAASRPSMRFVQPRTESQQAMRALHRVRESLVQDKVKTTNQMHAFLLEFGISVPRGAAVISRLSTILEDNSLPLFLSQLLLKLQQHYHYLVEQIKDLESQLKRKLDEDEVGQRLLSIPCVGTLTASTISTEIGDGKQYASSRDFAAATGLVPRQYSTGGRTTLLGISKRGNKKIRTLLVQCARVFIQKLEHQSGKLADWVRDLLCRKSNFVVTCALANKLARIAWALTARQQTYVA

SEQ ID NO: 493235 - protein, 462 aa, unidentified
MKLYLGGDVSKGYADWVILSEKKQTVLGNFQLDDTYAGHCKLYSMIEAYVEKHPGSELYAAVESTGGYENNWLNTLKSYQKVFNLKVARINPAGVTFNRKAGMKRNVTDAISALSIAEFMIDHPENITYDQDDKWKSLCRHWNFVEMQKQQRVQTINQLETILYSANPTLMRFKKDNLPNWLLELIIQCPTAETLAKVRPEKLAKIPYLSLARAKTLVAEAKQSIASATDKNAEILVSQIARQIKSFDLNIKSQMQLIERDLTCPEIEILKTFKGIDTISAIGLLLEIETIERFPTVKGFSCYFGLHPKFKQSGDKVIGVRMSKQGSKNMRKILFNIAKGAITYNPLIMAVYEKKLSHGMKKMAAIGVCMHKILRIIYGMLKHKQEYNPLIDKLNCEKSKDKQQEKQQQENANIEKSRRYQEFDVKAPISRKQTKKRRKHDLSQCEITSQSTGSTCSSETKL

SEQ ID NO: 493236 - protein, 391 aa, unidentified
MVCVGIDVAKDKHDCCILDSDGTVRADCFTIPNNSDGFKRLLQTIQDCTQKSDKIKVGLEATGHYSYNILGFLLDNGLPTYVINPLHTNLYRKSLSLRKTKTDRVDARTIATMLLSDVDLKSYTDTAYHNEELKSLTRYRFEKVQERAKLKQSVSRLVTILFPELEQLVPTLHIASIYSLLGEYPGAKQVSEVHLTKLTNLLVTASKGRYGKDKAIQIRDTAKTSIGSVMPAKSLELKHTIKLIRELTSEIDEIEDSIQQIMDELHPPLLSIPGMGIHSAAMILGEIGDFSNFESPDKILAYAGCSPSTYQSGKLTNCYAHMEKRGSRYLRYALYNATKYVCYWNPVFAKYLAKKRAEGKHYNVALSHAMKKLVRLIYALQKSGKAYLTAA

SEQ ID NO: 493237 - protein, 363 aa, unidentified
MNKCHLNTELSSLEETRDQFNGHAGAIKLGIDVHQEFYVVVMQVGGSNPKPPQRFRKEAFLQWAAKLREKTEQVHAVYEACGFGFGLQRDLTALGIKCHVVCPQKLDEGNKRVKTDGLDAKALCLKLDRFVEGNRDALALVRVPSEKEERSRAIHRQREQLVKARKQLEAQGRSLMVNHGVEPVQQWWKQRAFAKLEVPEWMKELLANSQPVLCALQEKITALTLQVQSAATLNQPRGLGAMTSVFIDREIGDWHRFNNRRQIASYTGLCPGEYSSGNTRLQSCVTKHGNPRLRAALVELAWRLVRFQPSYKAVRKWRAILSKGALATGAARKKAIVAVARQLAIDLWRIKTGRLTSEQLGLN

SEQ ID NO: 493238 - protein, 455 aa, unidentified
MAKKGKKNNPTPENMPIIHPHAAGIDVGAEEHWVCVPADRDAQPVQKFSAFTCDLHRLADWLTACRVTTVAMESTGVYWISLFQILEARGFAVALVNARHVKNVPGRPKTDRFDCQWLQRLHSYGLLAASFRPSEDICQLRSLLRHRDNLIQMTVKHIQHMQKALDQMNLHLHHVISDVTGVTGMRIIRAIVAGERDPKLLATYRDYRIKSSQDTIAKALEGDYRAEHLFTLKQSLALYDFTQQQIAACDEEIERVLATFESLIDPATHPLPPPTTAHRQPQRNEPAFDLRTHLYRITGVDLTQVPGLQAPTIHIVLAEVGLNMHKWPTDKHFASWLGLCPDNQISGGKVLSTGSRRVQNRASRALRMAAQSLRTSPSYLGAFFRRMRSKLGPAKATTATAHKLAKIIYHMLKEQTPYRERGAEEYIHKDHERQLRQLRKQAKHLGFALVPQTST

SEQ ID NO: 493239 - protein, 356 aa, unidentified
MTSSSKYIGMDVHKESISIAVRNSAGKIVMESVIQTKASMILQFIDGLRGEVHVTFEEGTWSAWLYDLLKPHVSKLIVCDPRRNALLKEGNQNDRVDARKLAELLQNNQLRTVYHGDHGLRAVKELVRSYLTITKDVSRAMTRVKAIYRSWGIPCSGTQVYSARHRAAWLEKIREPGVRRRAEHYYQELDGLRSLRRVVRKDLLVESKKHQVWKRLCGIPAIGPIRAAVLLGIVQTAHRFRTKRQLWTYSGFGVEGHSSADHQVVNGQLQRKKKPIEIRGLNKNCNHHLKNMFKSAAINASTKPGPFQDFYAALVAKGMRPEMARLTLARKIATIVLIVWKRGVCFDANHLKPQTA

SEQ ID NO: 493240 - protein, 412 aa, unidentified
MEAEYILAGIDVHKKMLAVVVANAGDLELKFECRRFGTTVSELRHLAAWLQERAVREIVMESTAQSWRPVWLALEGQCRLHLAQARSNRGPRGRKTDFRDAQRAVSRLLSGDLVLSYVPDAEQRCWRTLTRTKYQLTRDKVRLQSQLESLLEECQVKLSSVVSDLLGASGQRILRAMAQGETDPARLAQLGDKRLRASDAELMDALSGQPEGIHRKLLALYLTRLDLIESQMASLDKLIAEAMKAHQDAIVRLAELPGLGIDSAQQIIAEIGPQAAAFPSAAQLASWVGVCPGVQESAGVSSSDRSAKGNRSMRRLLNQLAHAAVRKEDCQLQIVFRRLSARLGYAKAVWAIAHRLCRLIWKVLHEGVSYVEFGPVPPPITLKRRRQRLVTQLKNLGYDVQLTPRISDASTV

SEQ ID NO: 493241 - protein, 364 aa, unidentified
MNSVYHIELSSLEGTRCQFNGGRCAIKMGIDVHQDFYVVVMQEGGGNPKPPQRFAKEAFLRWAAKLKEKSAAEIYAVYEACGFGFSLQRRLSALAIHCYVVCPQKLDERNKRVKTDGLDAKALCLRLDRFVQGNRDALAMVRVLSEEEERSRAIHRQREQLVKVRKQLEAQGRSLMVNHGLEPVQQWWKNRVFAALRVPQWMRALLQNSQPILIALQAKIESLSVQLQSAATAEQPRGLGKMTSVVIDREIGNWHRFNNRRQIASYTGLCPGEYSSGNTRLQNCVTKHGNPRLRAALVELAWRMVRFQPNYRATRKWKARLRKGQLTTGAARKKAIVALARQLAVDLWRVRTGRLSAEALGLKI

SEQ ID NO: 493242 - protein, 423 aa, unidentified
MKKTDYLSTLFVGIDVSSKSNTVCAIDFEQNQHLACTVTNNQPGSDALAESLAKVLAEGRFKYVMIALEATSSYSTHIATYLSDSAKLKPFGVLVYCLNPKTTANYRKSFIGLPKTDAKDAYIIADFARVGRISQAPWRGSQFLALQRLTRHRLHITECITREKTYMVSNMFLKFSELAVSDNSPFSNNHGATAEAILTEFLSPDEIQAMPLADLVDYICQKGHGRFTNPEQTAQLLQKAARDSFRLDKCLSEPLTISIASSFNCISAFEKERKVIEKAIANAIKGLYGNEYQCLTSIPGIGPVFAAGILAEIGNIADFKSNDSLAKYAGLFWKQHQSGDYEAADTKLSKEGNSYLRYYLVEAANSVKNHNSLYNDFYLKKHGEVTKHQHKRALALTARKLIRLIFVLLDENRLFSDKSVNSN

SEQ ID NO: 493243 - protein, 386 aa, unidentified
METPVGKLAERSVARFPTAAGDRSFNPRSNKTGEKLDRRRFHEISPNSRKSRRGAGRRASSHSQGRDIVMDVAFTSFVGIDIAKRTLDVHVLPERRSLPHSNDSKGRRQLREQLPPPGLCLIVVEATGGYERALVAELIDAGYHVAVVNPRQARDFAKACGHLAKTDRIDATVLARFGEAVELRIQAKIPEKQLELQDLVARRRQLVELRTGEMNRKEKASSKLVRKSLQETIDLLTKQIRRFEKQIAALVQSDDEWKQKTQIVQSVPGVGSQVSACLLADVPELGQLNRQQIAALVGIAPFNCDSGQFRGRRTIRGGRISVRCALYMAALTARRANPVIRAFADRLAALGKKPKVILTACMRKLLVILNTMVKNKTFWNPEISIT

SEQ ID NO: 493244 - protein, 458 aa, unidentified
MDETRIQQDETEGFPVLRTNVAGIDLGSESHWVCAPTVDGQGREVREFGATTPELEKMAAWLKERKVVSVAMESTGVYWIPPQEVLERHGLEVVLVDARELARVPGRRKTDRLDCKWIQRLHSCGLLRGSFRPQEQINMWRTLVRDKGTLVAERADWIRRMQKSLDQMNVRVHRAVADIEGKTGMSIIRAIIAGERDAGALAKFRDPRCRQSVEQIAEQLSGHWREDHLFSLGQALKMHDAIAERIQAYEKEILRKLAEMEREDCRQQEAPKLRNRNKAKLIQPRGEEAMRQALYRMSGVDLTGIDAIGVGAVQAVLTEYGPDLSCFPDEGQFVSHLTLAPKKAITGGKPVKKKRKRGSASTRVAEALRMAATSMRHSQTALGAYYRQIARRIGADVAVFATARKLATLIYRMLRWGQPYVDEGAQAYEKRYREARLRRLTASAAELGYELILKPANA

SEQ ID NO: 493245 - protein, 416 aa, unidentified
MDTMYERCCGLDIHKKTIEACFRSGKKKTHMSFGTTSAELRKLTMWLVENDCQSVAMESTGSYWKPIFNILELSGTDMKIIVVNARHMKNVPGRKTDVNDAEWIAELLQYGLLRPSFIPDREQRELRELSRYRKSLVGERAREINRLQKMLEGGNIKLTSVVSEVTGYSSRRLLDRLLRNDEPMTEDVISGLVHTSLAGKSKELETALDGLLSELQKELLIKVLDHIDDMSRRIADLDDFCRKQMDRYEDALDKLDEIPGIARRTAETILIETGLDMSRFPTAKHFARWAGLAPGNNESAGKRSSGRTTKGNPTLKSTLIQSAKVAARKKDSFFKARYQKIAARRGANRASVAVAHSMLIAIYHILKSGERFKDLGEDYYNQFNREKKKNYYLKKLTKLGVNLKEATLSISIQAAT

SEQ ID NO: 493246 - protein, 415 aa, unidentified
MEPVLDSCAGMDVHEKKVDVCIAHGPLEKSPKFEIRTFSTMTSDLEDLKSWLKKYKVTTIGMESTGVYWKPIFNIMEGEFTIVLANAQRLKAIPRKKTDIMDCKRIAKLLRYGLLPNSFIPPREIRELRDLNRTRRKQVGMMTSEKNRLTKVLESSNIKLSSVVSKISGVSSMAMIRSLLEKDKLSKEEISQLAKGSLKKKVDLLEKALDGKITDHHRFLLKMHMENLDHLARQIEKIDEQIERKMIPFQKETNLIQSIPGISKVSASAILAEIGTDMSQFPDEAHLSSWAGVCPGNNESAGKKKSGKTQKGNSFLKGTLAEAAWAASKVKRSNYSAFYHNIVRRRGKKRGLVALAHRMLMDIYYVLKTGMPYQDTGAEEANERASMKKERSMIRLLEKAGYSVVRACTSEIAVA

SEQ ID NO: 493247 - protein, 406 aa, unidentified
MIQQRFPGAAQHEVMRVFLTVPDCMLIASFDRRKRRRDLEVPEGLDDRADLEARRLLRSGTRTVDRATPAYNRVLGPDPTNMMEVGMESKRVVGVDIGKRWVDVAREGTARVGRHRNEAVDIAVLVATFDASRDLVVFERCGGYERHFEAALGAAGIPWAVVHSAAVKAFRQVQGIKAKTDAIDARLLRDFGRDRLDAGKLRLGRTEDVVLDALVARHRQLKAALHAEQCRRETAAIAAAQASIERMIAHLQAELVTVGVELSLHESSDPQIVFKEAVMCQRKGVAQAPARALLAELPELGRVECKQITALGGLAPRIHQSGRTHPRRGLVPGRASVKAILFNPARSAMRWDPEIRTFCNRLRARGKPGKVIMVAVMRKLLVRLNAAVRDALNQPEVLSPATRMAV

SEQ ID NO: 493248 - protein, 335 aa, unidentified
MKEITTVGVDLAKSVFTVHGVDGMGRPVLRKTVRREKLMELVAGLPPCLIGMEACGGAHEWARRFEGCGHRVGIMMARFVAPYRKSSKNDGNDAEAICEAVARPNMRFVAVKSAEQQAVLSLHRVRQGFIEQRTATLNRIRGLLAEFGIVLPQRADQVRRAAMIAAEELPVLARAAVADLRGHLAYLDDWIGRYEQQLVALAKQHQPARRIQQVSGVGPLTASAITASIASGHEFANGRQFAAWLGLVPRQYSTGGKARLGRITKRGDAYLRTLLMLGARAVLQSAAQKTDRLSRWAQALRARRGYHRAILAIAAKNARIIWALLANNREFALPV

SEQ ID NO: 493249 - protein, 412 aa, unidentified
METIYRSCCGLDVHSKSISACVRRVDERGQVRQDVRSFGTVTRDLLALRDWLEQERVTHVAMESTGVFWKPVFNILESGFTVLLVNARDVKHVPGRKTDVKDCQWLAQLLQCGLLKASFVPPAPQRDLRDLTRHRAQLVGEHSRVANRVHKTLEDANVQLGDVASDILGVSGLAMLRALAAGETDPQRLAELAQGRLREKIPELCLAMEGRMREHHRFMLQSLLDHLKYLEEQTARFDGRIEELMHPSEKELRLLKGLPGFGDRTAQNVLAEIGVNMGQFPSHDHLSSWAGMCPGNNESAGKRKSGRTTKGSRWLRQTLVQAAWAASRKKKSYFHVLYRRLVGRRGKKRALVAVGHSLLVVIYHVLKTGTPYVELGADYFNTLDSKRLTRYHVKRLQSLGYQVTLAEAEAAA

SEQ ID NO: 493250 - protein, 326 aa, unidentified
MSRIQEKKTITTATSPFIVMGIDVSKDQLDVYVSPAGNHHSFKNDAGGVAELVNVCRDHDADLVVLEATGRYHRMAHKTLHEAGVRTAVANPARSRNFARSVGRLAKTDRIDAQVLAEYGERVRPPASTPPSKQQAKIAEITVARRQIVDEMKILKQQQTQTLDDLVIAQIAARISLCQCHCKDLEQLLAELIEEDDGIRRKHEILTSIPGIGLTTAATLISELNELGGANAKQIASLSGVAPMNRDSGSFRGKRKIGGGRKPVRDVMYMAAVVAIRWNKDMAAFYQRLKKAGKPFKVAITAVMRKLLILANTLLSENRLWSETQP

SEQ ID NO: 493251 - protein, 370 aa, unidentified
MPKSTTLFVGLDVHKDSISVAYAPGSSREEPTFLGPIGTRQADIDKLLRRLHSKASRLLFAYEAGPCGYVLYRYLSRKSLECLVVAPSLIPKKAGDRVKTDRRDAVQLARLLRSGDLTPVYVPAIEDEAIRDLSRAREDALIDLKSAKHRLKSFLLRLGLHYVGRADWNDAHRRYLSRVVCPTPAQQIVFQEYLRAVDEHAERIKRIHEQLREFLPSWRLRPLVEGFQALRGVQEITALTVVAELGDLTRFDSPRQLAAFIGVNPSEYSSGDSRRQGGITKAGNAHARRALVEGSWAYRFPAKVSPHIHKRLEKLPKPIQDIAWKAQVRLCKRFRRLISRGKHPNIVVTAIARELAAFMWAIAREVPIAA

SEQ ID NO: 493252 - protein, 428 aa, unidentified
MNTNQPPVGTADQYAAFIAIDWADQQHVFSLQVAGQTKKETGTLEQKPEVIGPWIAQLRARFGGRAIAIGVEQSRGALLHALLGYDFLVLYPIHSTTVAKFREAFKSSGAKSDPLDTDQILLILTKHLALLKPLRPDTVATRLLARLTQDRRKVVDLRTTHIQALLAGLKEYFPQAIELFNGNVTSRLAADFLKKWPDLPAFQAAKPAVLKKFYYGHNVRTPEVIEKMLQLAATAQPLTTDPAIVESGRQLSRLHSQVIQTLNASIAEYDERIAAVFASHPEAKIFTGLPGAGAALAPRLLAFFGTDRTRFATASNVQCFSGIAPVTKSSGRSKVVHFRLACPKFARQTFHEFARLSVAQCQWAANFVEYHTGRGKKYQAVIRALAFKWIRILTQCWKNRTPYDEQKYLADLKKRGSIFATLHLEKKS

SEQ ID NO: 493253 - protein, 328 aa, unidentified
MFYLGMDVAKAKLDCCLLLDEVSSKRKTKVVSNNKSGIADLLTWVARQKVSLEDLHVVMEATGVYHEQAAIALADANVVVSIVNPAQVKDFGRGLAVRTKTDGVDSFVLARYGALLKPVAWTPPAPEARMLQALLARRDAIAQDLQRERNRQEKADATDTPRLIRESLEESIEFLVMQLAKLQQDIDSHIDKHSSLKKDLALLQSIPAVGPQVGSNMLSVLRSHNFGSAEQLAAYLGLVPIERQSGSSVLGRARLSKAGPARIRAVLYMAAVVATRYNPHVKAVYERLLARGKSKMSALGAAMRKLVHLCFGVIKTQKPYKHDYPKIA

SEQ ID NO: 493254 - protein, 370 aa, unidentified
MKTKLSDYELATIAYHRDTLGVNPVAVDVASRVMQVCYYDSDKKLLKNFQLTRSKFFEFVEKAPEPLLFGIEACGSCNYLSRYFESKGHQCRIIPASKVKAFLKLDKNDKIDASGIFKAMLSSVESIPAKSLENQLIMNLFTIRDQLIKQHTQCINAAHGILYEHGIVAGGAGVETSAKITLGFTDAQESFEHDPMASAHFSVIKNAVFNILDNLKEQIDTINQYIQKYGSSNKTCLNLTTIPGIGLQTAVALNTALGDPERFHSARAFSAYVGVAPIITGTGGKITVMGIRKSGIRSIKKSLYMGAMVYLTYAVKNGTQSSWVKDRLKTKKKKVIICAIMNRLARIAYAMVKNGEVFDETKCNMIKNLR

SEQ ID NO: 493255 - protein, 338 aa, unidentified
MALYCGIDLHSNNCWVSVLEEGRKVVRETKVGNDLGAILGLLEPHQAELEGIAVESTFNWYWLVDGLMDAGYRVHLTNTWAAKQYEGLKYTDDRHDAKWLAHLLWLGILPEGYIYPKEERGVRDLLRRRSFLVHKRTSFLLAMRGAFECRTGMRTKSDDIKKWTAEDVESHIDDPLASLGITCLLGPMAALNEQVLLLEKAALKRGKLRQEFVDLKSVWGIGKILGLTIMYEVGEIERFAKVGNFASYCRCVKSDWLSNGKRKGSGNSKNGNPYLSWAFSEAAHFAVMHHERAKKYVQRKRAKTNGIVAIRALAHKLARASYYVMKDQVEFDPDKIFR

SEQ ID NO: 493256 - protein, 425 aa, unidentified
MVLVGRQPQVVRDEEHEMLIERVCAIDVGKKSGMVCVRVPDESRPGGRVNRVWEVPAITRAILELGDHLRCEQVQRVTVESTSDYWRIWYYLLEARGLDVQLVNSRDIKNVPGRPKTDKLDAVWQAKVTEKGLLRPSFVPPKEIRQLRDYTRLRVDLTRERTRHWARLEKLLEDALIKLSAVVSTLDLVSVRAMLEALIAGERNPLAQIEMLDFRIDQLIAAIPAARAPALDNATGQDRTGNDQTGNDQTGHEETGQGNAGQALSAVERLDEVTGIGRHAAQVIIAEVGLDMSRFPSPGHLAGWVKLCPRTIQSGAKHHTGKPGKGNPYLKGVLGDAAASVARTNTFLGERYRRIVKRRGKTKALVAVARSILVIVWHLLADPTARYHDLGADHHANRTSQNRQVRNHIRQLEALGYTVTLTEAG

SEQ ID NO: 493257 - protein, 437 aa, unidentified
MTSTELATAAGTPEVFAGVDWGGAFHQLCLVDSTGATLLQKRFPHTVEGLAGLCAALAAVAGVVRVAIERAEGLLVERLLELAVEVYCISPKVSARSRERYRMAAKKSDAFDAFVLADSLRHEHTHWRPIRPASQTLMRLRAVIRDRERLVWRQRDLENQLRAVMESYNPAVLHLFSSLDRDISLQFIRRYPQPAQAARVGIKRMDAFITAHGYSGRTSAETLVERLRPHLLAAGEGTSAGRAFTAVRMAEELSLLNGHLREYDTEIQALLAAHPDTRIFTAFPGVGPVTAATLLAGMGEDRDRHPSAASLLAETGLAPVTRASGRTRQVRFRYAANKRMRHAIDWWAFVAVREDPHFTGEHYRRARAAGQGHHRALRGVAARWVRILWRCWHDRTEYDPALHPLRRQALEAADHAQDTGPIPQRTAEEHLALPAAS

SEQ ID NO: 493258 - protein, 347 aa, unidentified
MKHYAGIDVSLNSSSVCVVDESGKVVREVKVPSEPVALISCIKSLGVRVERIGLEAGPLSQWLYGALRESGLPVELLETRHVKAALSAMPVKTDRYDARGLAQLMRLGWFRPVHCKSMAAQEVRALLTARKLVQSKLYDIEMSLRGILRGFGLKVGPTTSRSFAARINHLAAGHPSLELVAEALLSTHAAALCAFKNLEKNVRQISRADSRVRLLMSTPGVGPVVALTYVSAIDDPKRFTSSKRVGAHFGLTPKKYQSGETDISGRISKVGDSSVRAVLYEAAHIILTRPIHGGALKGWAMRLAKRAGMKKAKVALARKLAVVLHRMWVSASTFDFEKANGCTRAAA

SEQ ID NO: 493259 - protein, 388 aa, unidentified
MTQTSVSLPHPVALDHNETLVLAIELSNKSWVLAAQVPGLTRVKAKQTIEPTAEALLAALQGYRERAKVAGRQVERVVAIYEAGWSGFWLARLLTTHGIETHVVQPSSVLVDRRARRAKSDGIDAEQLLRTLLAWLRGEPRVCSMVPIPAEGDEDARRCVRERTELIAERIGLVNRIGAVLASMGCGDYDPLLRNRRQRLDELRTALGTSLPPHAHAKISRMLDRLDLVRKQIAELEQDRDAVLEEEVPDKAGEMIQQLTKLRGIGVQSATVLVREAFVREFANGKALGSYAGLCATPYNSGGTDREQGIGKAGNRRLRTVMIELAWLWQRYQPGSAVVNWFRARVSGTGARMRKVMVVALARKLLIALWRFATQGVIPEGAVMKPAP

SEQ ID NO: 493260 - protein, 360 aa, unidentified
MAKARSLVGLDVHATKVVAAVLDAETGQLQCFTLGGETEKTVAFCEQLPGPVRVAYEAGPTGYALARELVKRGMECVVAAPSKIPRGSGDRVKTDRRDAEHLVRLLMAGRLHPVRVPGPEEEALRDLVRAREAVRMDLMRARHRLSKLLLRHGHRFEDGNAWTDRHRLWLRSIDLGWPAAQTTLLDCRGAIDALCLRRDTLEREIVAILPSSPWTVQTGRLRCLRGVDTLTAVGLCAEIGDFERFARAEQLMSYIGVVPSEASTGQQRRLASITKTGSAHARRLLTEAAWHYRPRPNLSKALTERQQDQPPAAVAIAWKAQLRLHRTWTRLEARNKRRTLIAVAAARELAGFCWAITQTE

SEQ ID NO: 493261 - protein, 336 aa, unidentified
MSAYYCGIDLANKTSSICVLGPGHELLRACEVPTSFEGFQEGLQGLTQLRCIVEASPLAEWACGMLRRLGQEAVIIDAKKAKGVIAAKKKTDAIDAEKLARLALTGWYNPVHEKSAQGRWLRSLLQARNGLVSGATAANNRIRGLLRAHGIQVGIAQGDAFGPRVQELLQDEAKELTPVILPLLVVWQVQRNEVAKLTGCLEEMAKRDATAKRLMTAPGVGPLVALSFMATVDDPHRFTKGDQLAAYLGLVPAVYQSGERCVYGRITHEGDKMLRWLLAESAHIVLHRLKRSCELADWGRALAERKGPSKAKAAVARKLAKILLSLWKEQRNFAWT

SEQ ID NO: 493262 - protein, 475 aa, unidentified
MVDRATPSQPPPVLPDESLYVGIDVGKRQHVAGFISASLLARHGRFEACPALVFDQSREGFRRLVDRIRAYVPLEQGFVLLEQTGHYHKALEQYLLELDLAVYRIHVQRRPAGLVKTDKRDALGLTNQLYNQLEKGVQVGDSARVVRRAAPPTETAALLAALVRHRYELSHERTQRKNKLVALCDELFPEFAQICKDPTLPSALALREHFPTPHALATASPAALRAARVSRHPSDRQLLRLQELAGASIGTTDPGRQRGLVFEQAQLIRELRLLEEHLRQLEAEIAAVVPQSREGQILLSVPGIGALHAATLLAGVGNIANFPSAAALKSYCGWAPRVIQSGRSVDRTGLTHGGRRMLKQALYLIVWNAIRLDSEWAAIYAALVPRKCAYDERTRAYRGKGKVIGRIAGQIVALVYALLKTDQELRQRTPPGIPLPPPQLYDAAVHRAHRQGQYRPLKPRPQTMAIIELPRGAGR

SEQ ID NO: 493263 - protein, 326 aa, unidentified
MEHELHYIGIDTAKEKLDVDVLRPDGRHRTKKFANTTKGHDELVSWLKGHKIDHAHICIEATGTYMEPVAECLYDAGYIVSVINPALGKAFAQSEGLRNKTDTVDARMLAEFCRQKRPAAWEAPHPLERALRALVVRHQALTDMHTQELNRTETAREVQRPSIDAHLLWLEAELKRLEKQIKDLTDDDPDMKHRRKLLESIPGIGEKTSAVLLAYLGLKDRFAHARQFAAFAGLTPRRYESGSSVRGASRMSKAGHVSLRRALYMPAMVATSKTEWGRAFRDRLAANGKKGKVILGAMMRKLAQVAYGVLKSGVPFDASRHNPVAA

SEQ ID NO: 493264 - protein, 367 aa, unidentified
MTKKIVAQNTEVVIGADVHTRSHVVTAKVGKEIVDQRRIGTDRGAWEHYLDRFPGCNIAAVYESGPHGYNLFDMLKAMSGENGQTISPCVAPAANVPKAAGKKRKKTDRRDSVDLVHAYDSGSFEPVVVPDAACRAERELLRTKETLAGDATMYKNRIHGRLKNHGIEYPEEKLFSPEGQREALKRARALYDPTGEIHVTLRLLFKMLRHVEDALASIKKRIRNLFKNGSRSELAKKLEKNIPGIGVESAMVIVTEVADFFAFRNSDAFASYTGLVAGAHNSGDSERSGAITREGNRRLRRILVECAWTHIRYDEEAAKKYARLKYRRGARRAIVAIARWLAVKIYHIVVHGGYRGPASPVIACSGK

SEQ ID NO: 493265 - protein, 356 aa, unidentified
MNKISRLNFEGQQIYVGMDVHKKSWSISILTNEFEHKTFSQPPEVGTLVNYLKRNFPGASYKSVYEAGYCGFWIHDRLQEQGVQCLVVNPADVPTTDKERTKKNDRVDCRKLARSLRSGEIEGIYVPSRPKVEDRSLIRTRQSMVKKQTRCKNQIKSILHFYGIQIPEELANGSWSKRFINWIEDIRMERASGNFALKVHLEELNNIRKIISDITRGIRTLAKSEEYRQNVRLLKTVPGISTLTAMILLTELYDISRFKNFDKLCSYIGLIPDTDSSGETDFKKGITSRRNAQLRGILIECCWVAVRKDPALLMSFNELSKKMPKNNAIIRIAKKLLNRIRYVLKNQQEYVSAVVQ

SEQ ID NO: 493266 - protein, 349 aa, unidentified
MTLTVYYAGLDVHKATISFCVKNEDGKLIKRGKMAANKKSIDEFIKAMPSPLVVAMEATMFSGWIHDFLSGKVAQVDVGHPLKLRAIATAKKKNDAIDAETLADLRRCDYFPTCYMPPREIRDLREALRFRNLAVRTMVKMKNKTAGLLMSEGIEYSKRRLHGKRYFAKLMESLKDMPDSYRRLLGMSRQSVEFFNGIQNSLRAGLAGHPALAGRIELLKSIPAVGDITALTWALEIGEPSRFRTIRQAVSYCGLCSALDSSAGKTKRGPLSKQRNKYLQSTIIEAAKIAPIHNPQLREIRDRAIERGANANEATIAVARKLVAYLLAVDKLGEPFQPRCISASEEKSR

SEQ ID NO: 493267 - protein, 345 aa, unidentified
MIIGCDFHPSWQQVSWLDTETGETGERKLVQSSGDAERFYRQLPVPSLIGMEATGNCHWLVDLLAEIGHELWVGDAAQIRASCVRQQKTDQRDAEHILKLLVEGRFPRIWMPSSEVRDLRQLLLHRHKLVTIRTRVKNELQHLCLNQGVQRKYKLWSKAGLQVLRELPLKPWATRRREDLLGLLAMLDQQIEPLDRAVKEEAQRDKMALLLQTQPGVGAVTALAYVLTMGDVSRFARGKQVASYLGLIPREHSSGGRQKLGAITKQGNRMLRMLLVEAAQMAVRCDPGLRKEYLHRCHQKPKAVAKVAAARKLAVRLYWMLRTQKPYPEVVRIESSPAQALVGAS

SEQ ID NO: 493268 - protein, 368 aa, unidentified
MKDVTTYVGIDAHKKDLFIAMLVGTQATPLTWTVANEPNAIRRLVRKLEREAPGPVRSCYEAGPCGYALQRRMTTTRVVCQVIAPALIPRKPGERIKTNPRDARKLAELLRAGLLTEVQPPTPEEEAVRDLCRARDDAREDLQRSHHCLGKLLLRRGLHYSGRNWTRAHRQWIDSLEWAHAAERVVVDDYLLAIDHLEARLIELDARLTAIAATEPYREPVAWLRCFRGIDTLTAILILAELHDFRRFQSPRALMAYVGLVPGEDSSGEKHRRGRITRTGNALVRRLLVETAWHYQHRPSVGVALTRRRKGQPTRVIAIADKAQQRLCRRFRRLAEHHKPAPKIAVAIARELAGFLWAVLQPASVSAS

SEQ ID NO: 493269 - protein, 363 aa, unidentified
MFTERTSVGLDVHARSVAAAAIDGVTGEVWQTRLTPSHEHIRSWMADLPGPVAVAYEAGPTGFGLYRALSEAGIRCEVVAPSKLQRPSGDRVKTDARDALHLSRLLRLNEVTSVSIPSVSQEAARDLVRAREDCRGDLMRARHRLSKLLLRHGIVYYGGKAWTGAHDRWLRTEAAPRLRMPATRMTFDADYDHVLTMQARRERLDAAIADIAKDSEFTPIVRRVSCLRGVSTLTGLALAVEIGDWNRFTGNTIGSFVGLTPSEHSSGSSRVQGAITKTGNTHVRRLLVEAAWHHRPRYCVGAVMRARWDQAPAAARARGDEGNRRLHGRWVGFLARRKRSTVANVAIARELAGWCWSLAVMED

SEQ ID NO: 493270 - protein, 329 aa, unidentified
MMERGSLMSAPILGIDIAKQRMEVALLIDGKLKNKSFKNTLEGFEALALWLRKLGISKVQACLEATGNYGEDLAIYLHEAGHFVSIVNPARIKGFAQSELIRTKTDRIDAGIIARFCLAMKPEAWIPPSPEIRVLRALVRRADSLIDMLTQEKNRLGTAHESVIPLIKEHMDYLNKEIKRVRDQIADLIDQNPNLRQKKELLSSIPGIGKATIAVILAELDNLEKFNHVRELVAFIGLAPKETLSGSSIKGKPRLCKVGHARFRKALYMPALVSIQCNPVMIAFYNRLKEKGKNGKVIVCAIMRKLVHIIFGILKSGKKFDPNYKPIFT

SEQ ID NO: 493271 - protein, 350 aa, unidentified
MVTLGGDSHKQTHTLVAVDDNGRQLAQKTSPATKTGHLEVLQWARRWPERRWALEDCRHVSRRFEADLLVAGEVVVRVPSKLTGGARKVARTSGKSDPIDALAVARAALREPDLPVAKLEGPGRDVRLLLDHREDLVGERTHIQNRLRWHLHELEPEAAIPARMLSRYHSLAEIEQRLGRHRGVVAEIALELVVRVRDLTRRINELEADIEHRVCGLAPTLMNLSGCGALCAAKVVGEAAGVSRFRSRAAFAMNNGTAPVQASSGNQKRHRLNRGGNRQLNVAMHRIAITQLSRPGPGKDYVAKRLAAGNTKTEAIRALKRRISDEVYRRLLQDERASLTNNVSSSVAAA

SEQ ID NO: 493272 - protein, 411 aa, unidentified
MQRVIGMDIHRTFAEVVFWEAGRLRPAGRIDMTRSGLEGFGRSLSKEDEVVVEATGNTMAVVRVLSRYVARVIVANPLQVKAIAHAHVKTDKIDAGVLASLRAAGFLPEVWLPDAETELRRRLVARRNQVVRHRTQIKNGVHSILQAHLIPPCPHADLFGRLGRNWLGRQELPADERAAIDRHLRELDRLGEDLAVLDREISERMIEDPSVKRLLTITGVNIHVAAGLVAAIGDVRRFSSPQKLVSYVGLNPRVRQSGLGLAQHGRISKRGRSHARAMLVEAAWAAAKAPGPLRSFFLRIRTRRGHQIAAVAVARKLAVLCWHLLSKDADYQWARPALVASKIRAMQLQAGQPARKGNKRGAAYAYNVKELRDREIDVARHAEYAYEQFVSRWQPRRPEKRRTGAANEERR

SEQ ID NO: 493273 - protein, 426 aa, unidentified
MEKVNSVMDNRSEEPQFAAFVGIDWADQEHVWCLQACDSEKREMGRVRNRSEEMEAWIGQLCQRFRNQPIAVAIEKCRGTLILLLSRYEQLHLYPIAPQAAANFRKALHPSGATDDGRDAAALLEMVRQHRNHWQRWSPDTEQTRLIQNLVEERRRLVDQRTQLLNRLTAKLKIYFPQMLEWFDRLDTKLVAALLQRWPTLPQLQKAGTTRLRNFFRKHHCRQVELLERRLQSIRQAVPALEDQAVLQAQVPTVQLITRMLEILNEGIEGLQRRIEQAVTVHQDFPIFDSFPGAGAVLAPRLLAAFGSQRERYRTAAELQNLSGIAPVREQSGRTACIHFRRGCPKFLRQTFHEWAGHSIAFSSWARAYYELQRARGKDHHAAVRALAFKWIRIVFRCWQDRVLYDEQRYAASLVKRNSPLRPLSL

SEQ ID NO: 493274 - protein, 354 aa, unidentified
MSQKLNAAIAVIGIDIGKNSFHIVGHDHRGAIVLRQKWSRGQVEARLANLPPCLIGMEACVGAHHLSRKLQMLGHDARLMPAKYVRPYSKGQKNDFRDAEAIAEAVQRPTMKFVATKTADQLDLQALHRVRDRLVGQRTGVINQIRAFLLERGIAVRQGLHSLRSELPGILATRTDVLSPRMLRIIEDLAGDWRRLDERIEGLSSEIETLARQDKACERLMTVPGIGPIISSAMVAAIGTGDVFSKGRDFGAWLGLVPKQISTGDRTILGKISRRGNRYLRSLFVQAAWVVLVKVKCWERHGLKSWIEAAKKRLHHNVLAIALANKLARIAWAVLNKGRAFECVKTEETASRPA

SEQ ID NO: 493275 - protein, 342 aa, unidentified
MQHVAIDLGGKESQVCVRAADGQILHESKIATLRLPQFLRRQAPSRVILESCAEAFRIADAATECQHEVRVVPATLVRSLGVGARRIKTDRRDAQVLSEVSCRIDLPSVHVPTDLARERRSMCGVREELIACRTALINCVRGWARTQLIKLSSGDASTFPARVRKTTLQRPDGLAEYVERALKTIDTLNEQILAADKELERLAEQDPVCQRLMSVPGVGPVTSLRFVAAIDDVARFSTSHAVQSYLGLTPGERSSSERQQRTGITKAGPAPVRRMLVQAAWNLRRFRPADPISLWAAQIEQRRGKFVATVAVARKLAGVLFAIWRDGSRYEPGHLHRSQTTS

SEQ ID NO: 493276 - protein, 370 aa, unidentified
MTEYSEVFVAFDTSKTKHAVAVAESGRDGGIRYLGEIESGPEAVERLVRKLAGRYGKVHFCYEAGPTGYGLYRQLHDLGHVCDVVAPSLIPQRPGDRVKTNRRDAVTLARLLRAGELTAVWVPDAVHEAVRDLTRAREAAMKDLRQKRQQLLSFLLRHGRVFTGHRHWSRAHSRWLAGQAFEHPAQQIVFQDHRDLIADAEARLTRLDRHLAETVPGWSMAPVVEAYQAMRGVSFLAAVTFVAEIGDVRRFDSPRQLMAFLGLVPSERSTGDTVTRGGLTLSGNRRARRVLVEGAWSYRFPARVSPLIQPRLEGLPKAVRDIAWKAQTRLCGRYRRLSAAGKKLPVTIAAIAREMAAFLWAIGQQVEPAT

SEQ ID NO: 493277 - protein, 349 aa, unidentified
MGEVSTIGVDIAKSVFQIHGIDADGTVVVRKRVGRAKFLEFFTDLPPCLVGMEACATAHQWARELKKLGHDTRLMPPTYVKAYVKRGKNDAADAAAICEAVTRPSMRFVPIKSVEQQSALMLHRTRDLLIRQRTQLINALRAHLAELGLVAAKGHEGLHQLVTAVTESSDERLPNNARFACQALVAQLHAVQTQINGLDKRITQAHRANADSKRLEAIPGFGVILSTAVVATMTDPKAFKTGREFAAWIGLVPRQNSSGGKERLGSISKQGDRYLRRLLVLGAISIVGSARMRPDKYPWVTELLGRRPAKVVAVALANKMARTAWAVLARGESYRAPTRSSNAAIAAAA

SEQ ID NO: 493278 - protein, 370 aa, unidentified
MAKRSMFVGMDVHKESIDISLAEEGRDGEVRHYGGITGDLEALAKVVKALRAPTRRLRFVYEAGPCGFGIHRYLTAQGEECVVVNPSSMPKRSGDRIKTDRRDGDALARLHRAGELTAIYIPTADDEARRDLVRAREDAVGLSTQAKHRVKAFLLRQGRRYPGRAGWTLPYRRWLADRSFPLAPHHVALQEYRDTIDEPERRVERLTDQLRTHTPGWRWAPVVDALQALRGVSFVTAVGLVAEVGDIRRFDHPRQLMAFLGLVPSEYSSGPSVRRGGITKAGNPHARRLLAAAAWAYQGLPRIGRQMLYRQQGLPKSICDIAWKAQLRLTSRFRKLVARGKAKPKVATAIARELTGFIWAIAREVPAPLA

SEQ ID NO: 493279 - protein, 316 aa, unidentified
MNVIGFDISKDTIDVTLLRNSDQVDYIKIANACEGFEKLNDWIRSKRIRKISISMEATGIYYEEAADYFSAIYQVFVINPLKIKEYSKSQFSHTKTDKADSRLIAEYTKRHLDKLTPFKPSENPTLYKLINLLQQLKQQQNESQNRLHAAKDTFIRATHEEIILLLAKQIDQTAKRIDLMIQQQDSLNTHYKNLQTIPGIGKDTAAILLHHLTDKQFKTANQFVSFAGLSPRIDQSGTSVNKKGRLSRYGHRRLKRALFMPALVAYRIKAFPKLVKNLSKKPKMVVIVALMRKLAKIAYYIHKTQKPFEKMRYQTA

SEQ ID NO: 493280 - protein, 360 aa, unidentified
MERNRTFVGLDVHAWSVTGHGLDAVTGEVWQRRLTPDPADILGWVAGLPGPVKVTYEAGPTGFGLARHLIDHGVPCVVAAPSKLHRPSGDRVKTDARDAELLARLLRLDEIVEVTVPSVEQEAARDLVRAREDVRGDLMRARHRVSKLLLRQGIVWTGGQAWTGRHDVWLRSQRFAQPGRQLAFESAYETMLLTGQRRDRLDQAITAMAETSSYTAVVHRLGCLRGISTLTGFGLAVEIGDWTRFTGSTIGAFLGLVPTEYSSGQSRSQGSITKTGNSHARRLLVEAAWHHRKTYRNPGQVMRTRWEHASAAARARGHEGNRRLHHRWEIFTARRKRPVIANVAVARELAGWAWSLAVLE

SEQ ID NO: 493281 - protein, 343 aa, unidentified
MQSITTIGLDIAKSVFQVHGVDTEGNVVLRRQLKRRFVLAFFERMPPCLVGIEACASSHHWSRELKALGHTVRLMPPAYVKPYVKRQKNDATDAGAICEAVGRPNMRFVATKTPEQQSGLMLHRTRHLFIRQQTAVINAIRAHLAEFGIVAPVGRSGVEQLLGVVADSNDKRLPEVARACVAALGAQLRMLKTQILEFDRRIMAWHRSNETSQRLDKIPGVGPALATALVASVADPKAFRSGRDFSAWIGLVPKQHSSGGKDKLGSISKQGDRYLRSLFTAGALAVIRYAKIHGTKHRPWLTSLLARRPTKVAAIALANKIARMAWAMMAKGERYKEPATLAA

SEQ ID NO: 493282 - protein, 320 aa, unidentified
MQTPSVVLNIGADVAKDAIVVACAEGTFPVREIANQRAAVLAFFKDLPAGTRIGVESTGSYHELFAGAAHQLGFLVFLLNPKDTRHYAKAVGVRGKTDRVDAELIARMIAHEHTKLHAWIPPTPQQREIDRLLKRRATLVSLREAVAMSLRELGGFAAELTALRTRFNQLIARIDLRVKNLVEASPERKQNFTRLCTITGVGPVVGTALVNTLERVPVKSADAFVAFTGLDPRPDDSGQHRGKRRLSKRGPAELRRLLYLAALSAAKTKTWRPLYEHYRAKGLSSTATIVILARRIARTAWSIYTYKTEFDSARLTKPLT

SEQ ID NO: 493283 - protein, 355 aa, unidentified
MIVIGVDPHKQTHTAAAVEAARGELVAERTVQARRGGHQQLLGWARSFGAERVWALEDCRHVSIGLERFLLASGERVVRVPPKLMAGARRSARQRGKSDTIDALAVARASLPERSLPVARLAGQEREIRLLLDHREDLVGERTRIQQRLRWHLHELEPELELPFGCLDRRVWLERLARRLARGEQTVQVRICRELVGRCRELSRRAGELERELRLLVRAQAAALLDLPRCGVLTAAKLIGETAGAERFTSDARLAMHAGAAPLPASSGNSQRHRLNRSGNRQLNCALHRIAISQGQHHPPARAYLTRKQAEGKSRKEALRCLKRHLARTVYRLLITAKQPLEPPTRSRSPTPSLT

SEQ ID NO: 493284 - protein, 464 aa, unidentified
MNPVFGEKRGFILGIKKHPLRCDIEKLAITKLYTHKGGRMKKVANFSKKVKGQMRETVLDKASWVIGIDIGKEKLSCALMGINKTLICRFEVEGSLAGYNDLLNRVKREIKGNGKAVFALEPTGHYWMVLGQFFEDHNQSYVLIHPLVVARSREVNRLNKGKTDPLDARLIGELACDGSITRTQIPADYWATIRVYAREYMDREKDIVREKNRIGSYLETTLLEFVDIFPNPLCMTGRACIRALAHFREASKRDWGHFEKHVRSQFSGKRLVTSRIRRLHEMLQRGDAPGLRAGRQAMCHRVINCLDRLEIYERQQETAKQALVDSYEKSEYKQYLDSIWGTNATANALVLGFMGDAAVYDSPASLVKLAGSDPIPDESGKFKGKTSISHRGRSLLRKAGDRVSFMLEKRNSVFRAFVNHLMSRQKNRLTKRQARIACINKYFRIVWVLCNHRVPFNPALAQTI

SEQ ID NO: 493285 - protein, 462 aa, unidentified
MKNSIAKKRKQVPAGYLVVGVDPHKKKHAAIFMTQDFMTHSKLKFDNSREGFETVLERARTEMLKTECRGVIFAIETGAHHWRNLAYFLDEKGIPLRLINQFTLKRRREGKDLNHRKNDYRDSEVAAQLLCTGEFNAARLSQGVYAELRAAYGSYRRLVKEKTRIVNLVKSLLDGLFPEFTQVFKNPCGQTAASILCTCAVPQAIAVMTESEFAGAIKAACQGRRIMKGKLRVLHHVAMTSIGIGAGAQSVSSEIAFLIEKLRLIEQQLRQINEALTRLVHETVEGKYLLSIIGLSYVSVAGIIAELGSFSSYQNAKQLIKMAGSNPTESESGGKRHSHTPISKQGRPVLRHCAWTAVIPMLRFNPDFRDWAKKLRERPAGANPLSGREVMVAAANKLLRLAFALVKNQTLYQIPESQPVEITIQEVSNTSGGQGNTAGSFGSSYEPTRQKTWCPALLAKPV

SEQ ID NO: 493286 - protein, 431 aa, unidentified
MDDIARFKMFCQLRSQIRGSGDHLIVGIDIAKDKHHAFFGTATGQALWRRLIFTNDQTGFNRLIEQIDTLKAQNDLDKVVFGMEPTGNYHKPLIHWLTEKGYLVVFVAGKAVKDNRELLDGRWDKNDTKDSANVADLISQGKCLFYENPEADILALRNLLSVRRHLKKEIHRLRMRIRNGLLAKYFPEMDRHWGSCVAENLAIVRWYLDPRKIAATDFDIFVRHVTTTDRGVRQLHRLRKIHNAAACSIGVPTDVAAVHEAGVLVERFKTVEAELAEVMEQIDAICRGMPSYRLLLTIPGFGPYIAPLVLSALANPMRFKSRKQVIRLAGLDLNASRSGRKSQQQVPVISKKGDAELRYGLYQAALIASYRNDAFRRLYNRMLEGRQKERGIKTKARIKIAAKILVIAWTMLKKGEPFNPNYLLAEPVHPR

SEQ ID NO: 493287 - protein, 348 aa, unidentified
MVVGIDVHKRAHVAALLDERGGELGTFGFANSPEGMRRLCAWLVAHDASEAVVGVESPAGYGRLLVASLEAAGHEVLNVPAWRTHRERRRHGPGKTDPGDAIAVAQVVLRKRAELGPALESELVRALALLELQRRRLVRDRTQAIQRLRADWNQVDPVGEARVVNLTRQRELRRLKRISFGEGLVEQVATGCIRDLARDIEDLNQRIAALDKQIAQLLTEHGNPVGDLHGAGTQIAAALIAHAGDVRRFRDAAAFARFCGAAPIPCGSGQTAGRHRLHRGGNRQLNAALYRIAIVQARHHPPARTYLARKIAEGKTPREARRALKRHLANVIYRRLYAWAEATPALNT

SEQ ID NO: 493288 - protein, 358 aa, unidentified
MQRNKISFKGQKIFIGIDVHKKNWDVAIAPEVGNVKRHTQKASAKELFDFLKKHYPDGDYLAVYESGFSGFSTYYALKDVGIECKVIHAADVPTTQYEEVMKTDRVDSIKLVRSLKAGLLNGIYIREKENIDDRSVVRIRKTIQKQLSGYKARVKHMLHCNGVSFPERFEKPGSHWSKAFLKWLKEDVTLLSSTRNSLDLLIRQVETIRLTLLEATKMMRSLSQTERYKHKFDLLMTVPGIGFIVSMCILTEIYDVKRFHNEKEFAAYLGLIPTSHSSGDKVVHGEMTFRGNKQLGPMIIETAWISICKDAGLGSLYLRYKERMKPQEAIVRIARKLSNIIFAVLKNETQYIPYNMYK

SEQ ID NO: 493289 - protein, 320 aa, unidentified
MMTQNDLVVVGIDVAKDKVDACIRRFKLRQTFPNNPQGRRKLIAWLRKYQVGKAVMEASGGYEREWRNVLHNAGIEVRIVDPRRVRNFALSAGRLAKNDPIDAEMIAWFAETFSQAPGQIPDAAREELAGLAKARKALMDVKIRLQAQNEHAAPEPARKAHARILKSLDAEIDKLEVAISAKVKATPEFAERAEIIQSVPGLAQTTSAILIAGMPELGQVSDQVAAALVGLAPYDDDSGKRRGERHIKGGRRWVRNAIYMPCLGAATQNNPVLRVFYQRLIAKGKEPKVALVACMRKLIIILNTMLAHRQKWHPGAHAIA

SEQ ID NO: 493290 - protein, 348 aa, unidentified
MKNKSFVGIDISKNVIDVSIFREDTNIKMFPHEVFNNTRKGFGDMCSWLKKSRVVLSQALFGMEFTGCYSLDLEKFLTSKNYSFCMLSTRIVKHHPMGTIDKRDKNDSAKIADFLYRYDGTECAKPYKLPSKAMQQLKQLVNERKFLVEQRTNFMNRMQMFETKEDSAMYESYIKKLNHDIEKIDQEECELMSKEEDVFDTFQNLLTIPGIGFVNATNIIAITRNFTAFDTARQYARYVGVAPCSHTSGTSVKWRARPSAHCNGQVKADLSMAALRAVEYDVEMQMFYNRKLEGRKDSDTKRKALNAVKFKLIRRMFAIGKQKRKWEVLNTSDDGKNLHIEKSKASEL

SEQ ID NO: 493291 - protein, 353 aa, unidentified
MAHQERPRVTVGVDTHLDLHVAHAKDQLGRCLETVSIPTTPAGYQHLLAWARGLGEVEAFGIEGTGCYGAALARFLAAQGQLVLEVNRPDRQARRRRGKSDPLDAEAAARTVQAGEATTLPKAGTATVEMIRSLRVARATAIKARTQAINALKALLVTAPAELREQLRGRSAARLVRQAAGLQPGPLETPTAAAKLALRCLAERYQVLSAEVATLDSELDRLTAKAAPGLVALFGVGPDSAGALLVAAGDNPDRLRSDAAFSMLCGASPIEASSGKTIRHRLNRGGDRQANAALHRIVVVRLRWHQPTKDYMARRLTEGKSKQEIIRCLKRYVAREVFAVLNQTGQDTSTAAA

SEQ ID NO: 493292 - protein, 392 aa, unidentified
MQPVVGIDVAKGCSVIQAFKKRNEPYGRMETLQHSEEGFERLGEVLSILKETSGVEPVVVFEATGHYHRGLAGYLKRSGWIHYIINPLQAKRSKGTQLRKVKTDAADAWHLAEMYYRGDVKAHREWEESYSELQHLTRQHEFVTAMYVQAKLNSRALLEQVFPNFIGVFSNLYATTSLKVLQRCLENNTENVEGLIQECVGRSHSKRWIAEKTERLRELMEGWNRQSRSQSQTVALASMVVLLLEFDKQLSHLEKQMEALAMELPEVGLIKSIPGIGGKLAAAIVAELGNASQFQDAKQLVAYAGLDPGIYSSGKFTATSSRITKRGSKRLRRALYLAVQCGIRKADNRRLKEYYDKKRKEGKPYKVVVIACANKLLHHVYAILKKGEPYTH

SEQ ID NO: 493293 - protein, 387 aa, unidentified
MFYCGIDIAKHKHAVSLMNDRGQTMKAVFSIANTRPGFDQLLAELHALQGSVAVGLEATGHYWLALYDELTRTGYPVIVLNPLQVAAYRKSGIRKIKSDATDAVWIADYIRIANLPPSEQNLPVMLQLRELSRFRFRLTEQMGDIKRKLLTILDRVFPEYEHLFSSVFLKASRAILKEAVSAQEFADFDLQELSDLLAQASRGRFGQDKAETIQQQARQSVGVAFLTDAVHLEMYCLLAQLDLLEEQRSQVDRTIADLMQQIPQFITSIPGIGPVTGAAILAEIGDIQRFETVDKLVAFAGIDATVYQTGQFAAPETHMSKRGSPYLRHALWCAATAAILHDPTLQQYYQKKRNEGKHHGTALGAVCHKLLARIFVILKEQRAYVIR

SEQ ID NO: 493294 - protein, 387 aa, unidentified
MPQPNDLSRSLVALDQDSTIIAVVELSQSSWLVAGVLPGIERQPRKKLEPSAERLLGLLHRWRDEAVRAGKKITRIALAFEAGRDGFWLARWLNARGVEAHVIHPSSVAVSREHRRAKTDRLDTELLKRAFLGWLRGERGHCGMARVPTIAEEDAKRPNRERECLVGERTRIVNRMKATLARLGVRNFKPTLRKAAERLATVHTPEGTPLPRNVLAELQRDMARLGFVVGQIREIEQARQKRFEQETETGPHAMVRQVARVIGIGIETADMLVHEVLSRPMRDRKAVARYAGLTGSPDESGARRREQGLARAGNARVRRGMIQLAWRFLRFQKQSALAQWYRARTADSRLGTRKTMIVALARKLLIALWRFVTTGETLEGVILRPAG

SEQ ID NO: 493295 - protein, 355 aa, unidentified
MRVVAGVDCHKKTHSLVFIDAVGTVLSKLTIQVNDEGYAQAIEHGNRYGEVEWGLEGTGLYGHGFAEALLKTGALVYEVPGAFTKRHRKHASRLGKSDVLDAQAIAEAVLREYERLPKYQQFDEQEAMRLMYDRRDRLVRQRTETINRVRAIAIRLALGHLPARLNSDLAAARVLSRVKALRGSSHTVDALVDEIEEALSDVQRLNATVSRLERQLRPFVGRLAPELCAVRGVSTIVAAGLIGHSGNLLTCRNAAAFAMRAGAAPVPCSSGRNFDTVRLNLGGDRQLNRALHVVALTQIRTVDHAGRNYYERKRGEGKTHRAAVRALKRQLATVVFCRLRLAGARFESKTGLKAA

SEQ ID NO: 493296 - protein, 380 aa, unidentified
MNRIIKIGLDVHTTNYTICIEEPLIGGEKNVYVQTQIKPELRLLINVIDTFKAKFKDDNLDITLGYEAGCLGYSLYKDLKAKGYNCIILAPTTMRTLKGGKKIKNDYRDAKEIADCLCDGGYSSVYVPSIEDNAVKEYIRMRDDVKQNLKSIKQQIIALCTRNGFNYGGNSYWTNKHISFLSKIEFEDELLKETLDEYMAEYNHLTDRISAFDRRIEELANKEIYVERVNKLKCFSGIKTHTALSLIVETSDFKRFAKGSDYGAWLGMIPIQDASSNKDNRFGITKSGNSHLRRLLTEASQSFTKGTVGHKSRDLKSRQAKCSSEVVNYADKANIRLKKKYYRMIQRGKKANVAKVAVARELACFVWGMMTDNIEVNIAK

SEQ ID NO: 493297 - protein, 321 aa, unidentified
MHKFDLGIDVAKAKLDCALRLPDGKFKSKVVENNPKGFQALIEWLGKQGTTTPHVCMEATGVYWEAVAEYLATQGMTVSVVNPAQIKAFGASQMVRTKTDKVDARLIAGFCFERAPAPWQAPTPSEQTLRAMVLRLEALQTMRTQESNRIEVARDAVKPGIASHIEWLDKEADTLIEMISDHIDNDPSLKNQHALLDSIPCVGERTNATLLAFYANFERFGNARQAVAYAGLDPRQHESGSSVKGKPRLSKIGHAFLRKALYMPAMVALYKTDWGKRFRERLEAAGKPAKLIIGAMMRKLVQVAFGVLKSGKPFDPALHGG

SEQ ID NO: 493298 - protein, 347 aa, unidentified
MKQSNTISIDLAKSVFQVAILNHNGKVLSNKKLQRAQLIPFITKQPASLIVMESCGGSNHWGRCFQALGHTPKLIAAQHVKPFVKTNKNDANDAVAIAEASHRPNMKFVAIKNVEQQDIQSIHRARQRLVDNRTGLVNHARGLLAEYGIVCGKGVSRFRKALAHLVNTPEYTGEMTAYLKELCGEWYRELLIVDKTIDKQDKKIKIIAKSSDQANRLMQIEGIGPVTATAFVATLGTQAKAFKNGREMAAYLGLTPKQHSSGGKARLMGISKRGDSHLRTLLMNGATSVINVVGKKNDPKSQWVNNLLCRMHQNKAKVALANKMVRIAWVILAKGETYKPELASARV

SEQ ID NO: 493299 - protein, 349 aa, unidentified
MEQNEVILGVDTHLDTHVGAVINDIGRLLGTRSVSTDMAGYLDLLTWASSFGPLRRAGVEGTGTYGAGLARVLRDHEIEVLEVNRPDRAMRRSKGKSDPTDAENAARAVLSGRATAIPKEQSGAAEAMRAVSVARRSAVKAKTQAINQLRALLVSAPQEIRDRLLKVKTAECIKGCIRLRSLGKTPMLQTLTTTLRLLAKRWLTLAEELKSLDTMLDDLTSQHAKRLRERFGVGPQTAAVLVAVAGDNPERLKSEAALAALCGTSPLQASSGKTVRHRLNRGGDRSANNALWTIAMVRMRSDPRTRAYVDRRTKEGMSNKEIHRCLKRYIVRELYPLILADLADSTRVI

SEQ ID NO: 493300 - protein, 416 aa, unidentified
MSRVVDIVRPVCCGIDVHKSFLVACIATTDERNHTTHQIRRFSTFKGDLKRLADWLLVNNCKDICMESTGKYWIPIFNVLEKTCNVCLTHPKYVKAIKGKKTDKKDAKWISELFKCDLVRSSFIPPPLTRHLRELCRYYAKLTYMNSSEKNRGQNCLTVCNIKLDDVFSDVYGTSATRILDKLIELGHSDFDVAPLLHKRCKATPEQVKEAIDGELSPAQSHKLKLVRQHMQHLENLQGNLESFVTALASPYQPQINLLMTVPGIGCQFTVIRILAEIGIDMSVFETAKQLTSWAGLTPQNNESANKKKTTRIARAGAFLKPLLVQCTLAAVSSSKYPWLKEKYQSLKKRRGHKKAVIAIARKLLAAVWNMLAKRESYNHELHQKSNPTPINRLLTAEQGLALLRKHGFQIIETLA

SEQ ID NO: 493301 - protein, 340 aa, unidentified
MRQLYAGCDLHGNSNLIGIIDGEGKRVFKKKLSNDFSLVRDTLKPFQEELVGIAVESTYNWYWLVDALMEEGCKVHLANPAAIQQYSGLKHADDKHDAFWLAEMLRLGILPEGYIYPKEERPVRDLLRKRGHLVRLRTSLILSLENIISRNFGSKLPVNYVKGLRKDRVTPLFEGNEDLALAGRVSKETIDFLTHQIRQIEGVVEKRIQLKEAYRYLLTLHGVGKILGLTIMLETGPIGRFETVGDYTSYCRKVPSQWISNGKRKGSGNRKNGNKYLSWAYAEASDFARRLHPESRAYYNRKMQQSNPAVAHSALSHKLARAAYYIMRDQVAFRPEKLFG

SEQ ID NO: 493302 - protein, 332 aa, unidentified
MYLGIDVHKRYAQVAVMDEAGKIVEEVRVENANLDELAQRYAGAQAVLEATSNYYHIHDTLSEYLDVTVAHPKKINQIADTDKKTDRVDAKELARMLRLNSVPESYVPSEEVREARALVRGRQTLVENRTKYANKVHGLLSDHGITEDVKPLSVEGREFLRELSIPMPWDALLDSYLELIESLTEEIQKLEETIEERAGSLKETQLLMSIPGVSYFTALTIYAEVGDISRFNRDKEVVSYVGLNPVIRESGDSRIEGSISKRGSGRVRWLLVQAANTAVHTCNDEYLSRFYDRLASRKNSQKAIVATARKMLVSIYHMLDRGEVYDPPGVSA

SEQ ID NO: 493303 - protein, 402 aa, unidentified
MNCVGIDVSKGKSMIAVMRPFGEVVVSPFEVRHTANELSELAGLLKSLDGETRVVMESTGNYHAPVAWLLHDAGLYVSVVNAMLVHDYGNNSLKRAKTDKKDAVKLANCGLDHWLTLPRYVPEEDTRLMLKTCYRKYQQYSKVQTMLKNNLISLLDIAFPDANRLFTSPPRADGSEKWVDFVATFWHCECVCGLSEKAFTAKYQKWCKKHGYNFSEDKALDIYASACGHFGVMPKTDTTKLLVEQAISQLRATSAALAALKQEMQSLAASLPEYPVVMEMFGVGPALGPQLMAEIGDVRRFHSKKALVAFAGIDAPPYQSGQMDIRSRSISKRGSASLRRTLFLVMGVLLQCAPMDEPVYQFMNKKRSEGKPYRVYMMASANKFLRIYYASVKAYLDSLEHD

SEQ ID NO: 493304 - protein, 370 aa, unidentified
MNQPTTLFVGLDVHKDSIAVAHVVDDRAAEVIYVGAIGTRQSDIDGLVRRLQSKAARLVFAYEAGPCGYVLYRYLTKKGLQCLVVAPSLIPKRPGDRVKTDRRDAVELARLLRSGDLTPVYVPSVEDEAIRDISRAREDAIADVKAAKFRLQAFLLRLGLHYSGRANWNAAHLRYLAKVVCPTPAQQIVFQESVRAVDQQVERVRRLEAELEEQVPSWRLYPLVQALQALRGVQNTVATIMVAEIGDLTRFDNPRQLAAFLGLIPSEYSSGERRRQGSITKAGNGHARRALIEGAWAYRFPAKVSAHIQKRIENLPKPIQDIGWKAQVRLCKRFRRLTSRGKHPNVAVTAVARELAAFMWAIAKEVPIAV

SEQ ID NO: 493305 - protein, 352 aa, unidentified
MRTSQKTAGIIATIGIDIGKNTFHLVGLDQRGVIVLQQKVSRGQLERHLANIPRCLIGMEACSGSHHIGRQLAALGHDARLIPAQYVKPFLKGHKNDYRDAEAVAEAVQRPTMRFVTIKTPEQMDLLALHRVRSRLVGQRTGVINQIRGFLIERGITVRQGAAPLRRVLPDILSSNTGVLSPRMVGLIADLAQDWRRLDERIAAVSAEIEALARQDENCERLITVPGIGPIISSAVVAAIGNGAGFKQGRDFGAWLGLVPKQESTGDRTILGKISKRGNTYLRTLFVQAAHVVLGRRSSAAMRGLWPWIEQASKRLHRNLLAIALANKLARIAWAVLARGHAYQTRIVANAA

SEQ ID NO: 493306 - protein, 410 aa, unidentified
MAGAATGVIIGVDPHKGSHTAVALDGQENVLGQLRVRAAPGQVDQLRRWAAPWPQRTWAVEGARGLGHLLTQQLVGAGESVVDVQPKLAARVRLLDTGQINKNDPNDARSVAVAALRATAPPAVAIEGGTAVLKLWARRYRDLGRLRTQVMCRLHAVLCDLVPGGFSREISAGQAIDVLHRLTVHGPVADARLELAHDLVIDLRRIDAQRREVKRRLTRQVAASTTTVTEIYGVGPIIAATVLGYVGDIARFPSRDHFAAYNGTAPIEASSGNRKIHRLSRRGNRQLNHALHMAAVTQIRNRGTAGRAYYDRKRAEGMTGKCALRALKRKISDAIYHRLVSDTRQQMRSKTKDPGGQPGNDSASSAAGSHPEPPALRKSHSRVAANPTTRRPAPQPAKPARPTKIVPHAS

SEQ ID NO: 493307 - protein, 346 aa, unidentified
MEHYAGIDVSLECSSVCVVDGNGKIVREGKVASEPAALIGWFSSLGLGLTRIGLEAGPLSQWLYAALKQAELAVELLETRHVHDAFKAMPVKSDRNDARGIAQLMRLGWFRPVHCKSINAQEVRAVLTARKLVQNKLLDVENSLRGILRGFGLKVGKTTGTDFAGRINELVKGHPNLEVIAEALLRVRSALLSEFKAFEKRAGKMSRMDAKARLLMSTPAVGPIISLTYAAAIDDPARFTSSKKAGPHFGLTPKKHQSGETDRSGRISKVGDASVREALYQAAHIMLTKPVKGCSQLKSWAMRIAKRAGMSKAKVALARKLAVIMHRMLKDGVPFNPLAKANAATA

SEQ ID NO: 493308 - protein, 344 aa, unidentified
MIIIGCDFHPSWQMISWLDRETGETGERKLMHATGEARQFYEGLAGAVRVGLESTGNSHWFVDLLTELGHEVWIGDAARIRASQVRKQKTDRRDAEHILQLLVKDNFPRIWTPSREERDQRQLLIHRYKLVTLRARVKNELQHLALNQGMQKGRSLWSKDGQKQLLDLPLQFWAGTRRKNLLELLKQMDQQLVVLDQAVKKAAEENEKARLLMTQPGVGPITSLAYVLTLGDVTRFRRGKQVASYLGLIPREYSSAGKQHLGGISKQGNRFMRMLLVEAAQIAVRFDPGFRNEYLHRCHHKPKGVAKVAAARKLAVRLFWMLRTNTPYPEVVRIESSSRVPLAG

SEQ ID NO: 493309 - protein, 383 aa, unidentified
MKSVCGLDVHKDSVYLCILSEFGELIEKVFGVLTYQLEEMRDLMLHHHVVEVSMESTSVYWIPIWRVLSPHFKLNLANPYFIKQLPGRKSDVKDAQWIAECTMKELIRGSFVPPEIIQQLRQYDRRIFDLNEEIVRKLSKLDAVLQRCNIRLSNYVSNVDSKSYKAVVKAISQGITAPEELVRLIHGRIINHHGIDVITASLKGVVSLAEIDMISQLRDELDMAEAHKEKCQARMLEICEREFPEELRRLQTIPGIKERAATSLIAEIGTDMNKFETANHLASWSGLKPRNDESNKKIKSRSITHGNVYLRKTIIECAWAASRTKDCFFSRFSFHQTQVRKKNKMKVMVAVARKMLIAVWHVLHDNTIYIDFTTDRKTSRTKG

SEQ ID NO: 493310 - protein, 353 aa, unidentified
MKKNIILANTIPAITIGLDLSDRTFQFCELNGAGEIVAEGQRKLDRGTLGQYLAGKPGGARVALETGGHSAWVREQIEQAGHQAVVANARELKAVTGRSQRTDHQDARQLARLARVDTALLNPVELRGAAEQADLFVIRARAVLVEARTMFINFARGITKTLGYRLPASASHRFAERVREAVPEALKPALLPLIEALQEITAQIEECDQKIETLARERYPETRWLKQVPGVGELTALTFVLTVGEPARFEHSREVGPFLGLVPRRRQSGECDPHLRISKCGDRYLRKLLVQCAQVLTGRFGGDCALRQWALDHARGSRTAKKRTVVAVARKLAVLLHRLWHRQEVFRPFPAAA

SEQ ID NO: 493311 - protein, 448 aa, unidentified
MAQRSQLKRMEIANPNAAGIDVGSASHFVSVPPDRDDEPVREFRSFTEDLEHLADWLVSCGIDTVAMESTGVYWITLFELLESRGLNVFLVNARHVKNVSGRKSDVLDCQWLQQLMSYGLLSGAFRPKDEICALRSVMRQRAMLLSYQSRHVQHMQKALTLMNVQLANVISDVVGETGQKILRAIIAGERDPLKLADLKNGRIEASKEEIAKSLQGNWREEHLFALTQAVELFDAYSKALQRCDVQLESMLKALSRSEAEPGPSRRRVGKAKNAPKFDARTYLFRICGVDLTAIDGIDITTALKVIAEIGPDLSRFRNAKHFASWLGLSPGTKISGGKRLSGATKGNANRAAQALKLAAAALRPSQSALGAYYRRMCGRLDKGKAVTAVAHKLARLVYAMLTKGTAYVDQGQAYYEERYQQRVIYHLRRKAAAMGLELVPIQAQGQSA

SEQ ID NO: 493312 - protein, 400 aa, unidentified
MLSIGIDVSKGKSTVCGMKPGGEIVYAPFEVQHTREGMSDLVSLLRGSGEEVRAVLESTGSYHCPVVAALLENGIFVSVVNSLRMKRFCSQSIRKVKTDRIDAMQIALYGLAYWQELQPTRLPEDTYRELQLLARQYYQMTSMLIKAKVDFNAICDQVLPGMQELMNDHAGRHKLSDFVLRYRHTTHILEMGETRFRKDYCKWAEKKGYRNCERMAVLIFATAQNGIPVLPNAPSTQIVITEAIRVLHTVEASRDAILTQMQALAKTLPEYSLVREMPCIGDTLAPRLIAEIGDVRRFHSKRALIAYAGIDAPPYQSGKFCANNRHISKRGNRYLRKTGYEVMQSYVMHKPANDPIFTFIEKKRGEGKSGKLAMVAGLNKFLRVYYGKVTELYRSLPAIE

SEQ ID NO: 493313 - protein, 355 aa, unidentified
MIVGAFDVHRRQITFDWVDRVTGEARRGQITPATREVLGGWLGELPAGGGDVAVEGCTGWRFVVEELQAAGLTPHLAEPADTAMLRGRKRRAKTDRADARHLRELLEQQRLPESWVPPAHILDLRELVRLRKTLIDQRTQWNQRIHAVLFHHGLPTPPGALSTQAGRAWFAEVGLPPPSRLLVDVGLSEIEGADARLEPISGWLRAYARRQPGCRALVGQLFGVGSLCAPTILAELGDARRFAGGDAVVRYAGLDITVWSSDTKRSPGHLARQGPEVLRWALFEAAKSSARRTAPDPAYYAQVKDRLTANRATLSTARKLARHARHVLVELGEEALAPVCPELPPLLAVPLGEAA

SEQ ID NO: 493314 - protein, 421 aa, unidentified
MKPQPSEAFAAFVGLDWADAKHDICLQASSSAHREFLRLDHRPEAIDAWVQSLRTRFNGQPIAVCLELNKGPIVSALRQYEFLVLFPVNPLTVAKYREAFTPSRAKDDPTDAELQVELLLKHRDKLTPLVPQSPTMRALAQLVEHRRRLVGDKVRLTNRLTSALKNYFPHVLQWFQEKDTAIFCDFLSRWPTLKAVQLARRATLESFFRAHHVRTADVITTRIEAIKNAVALTTDEGVIAPHTLLVQALVAQLRVTLQAIADFDTAIAQRAQAHPDFPLFDALPGAGAVFAPRLLVAFGEQRERFPSAEELQKYAGIAPVTERSGKKSWVHWRWQCPTFLRQTFVEWAAESLRHSFWAQVYYQQQRDKGKSHQAAVRALAFKWIRILFRCWQDRTPYDESTYLQALHRRGSSLIQNLAKSS

SEQ ID NO: 493315 - protein, 347 aa, unidentified
MTLYIGVDFHPHQQTVSYCNNEEGEVHQTSLVHNVEQVRRFYGQLPKAVVGIEASCTAAWFEQLLSELGHELKVGNPSAIRARARSRHKSDKRDADLILDLLVKDEFPELWRRPLPSQSVLEQLRFRHHLVKHRTQICNRLQALAHAAGLPKKGIQTKRARVALVAANFTETQSFERDQMFELLDDLTERIQQVEKWLAEKAAGDEKVELLLTHKGVGLLNALAVVHTLGDINRFPSSKEAVAYTGLDPLEQSSAGKVRFGSISKAGSSVLRHLLGQAMHVAVRYDGELRSFYKRLANRRSKSIAKVATTRKLLIRLFIMLRDGIDYSEFKRRGSAVGMPVLSHGLQ

SEQ ID NO: 493316 - protein, 389 aa, unidentified
MPSVADRAETPTTIQTDLAAIFISLELSRSIWLVTSVSPGSGEKMSKHSVRAGDVAALLARFSELKHKALIRTGKSFAIVAIQEAGLDGFWLHRALEQEGIESHVVDPASIATSRRRRRAKTDRIDGEALLRALLAYKRGEPRVCSMVRAPTPEDEDRRRLCRERKVLIAERVEHVNRIKGLLFSQGISSYEPLRRDRRQRLEDLRTGDRRSLPTHLKTQISRELDRLELLLDQIKLAEAERDALLAEDQAAAPEQPGRMLLEFKGIGAEFSTTLWLEGLFRHFDNRRQLASYAGLAPTPWQSGSVDREQGVSKAGNPRLRAILIELAWLWLRHQPQSALALWFKERVKRNGGRMKKTIIVALARKLLVALWKYVTAGVVIEGAVMKAA

SEQ ID NO: 493317 - protein, 382 aa, unidentified
MNRIVKIGMDVHSTNYTLCAMEPVLDGEDRVFANIQVTPDYKNVIQFIDQLKEKLGPSDTYSIECGYEAGCLGYSLYHQLTDAGVRCTILAPTTMLTQQGKRIKTDKRDAVMIAQCLSYGGYHAVHVPTDKDSSVKEYLRMRDDHKLALKKIKQQINAFCLRHGYFYDGNKWTIKHLDWLKKLDLSDLHRETLNEYMTSYEEQSAKIERFDKRIEELAADSDYHEKVGKLCCLLGIKTHTALSLVVETGDFNRFRKGSTYAAFLGLAPGESSSGEKINRTGISKAGNSHLRTVLIESARGICKGQIGHKSKDLRSRQTGNSAEVIAYADRGSTRLRSKYYRMIRHGKKRNVAMAAVARELACFVWEIMTDHLEPRKERKKAA

SEQ ID NO: 493318 - protein, 341 aa, unidentified
MVSTRAITGGAGTHADTHVAAALDGIGGLLGVSEFPATPAGYGQLTGWLQGFGTVGLVGIEGTGSYGAGLARHAAAAGIRVAGVDRADRQERRRQGKSDPFDAVSAARAAQSGRAAGLPKGRDGAVEAIRALMVAKRSARHERTQAINQARALLLTGPDDLRARFAGHTAAALAEAIAALRPRPGDAAGYAIRVALRELGRRAGFLDGQIERLDDLIVPLVTATAPGLLSLYGVGPGTAAMLLVAAGDHPGRLRSEAAWAHMCGVAPIPASSGKVRRHRLNPGGNREANHALWRIVITRMSAHPATRAYVERRAREGLPEKEIIRCLKRYVAREVYHHLRG

SEQ ID NO: 493319 - protein, 748 aa, unidentified
MLHRQLVHHPIAHARQGFGVDRPTGCTDGRQCPPSPLLRTTRLLRAQEETRRCTDERRVAGLPCAAPHLTVSQSPWLYPRELSPFPGLLHKPLCDACERAGAPRPRTPPSPPPVLTFTRGRKRTIDTQHHFCPDQDCAYYGWPGRGNIRANGHPGGNPWRQLECVSCHGYFQQTHGTPFYRGFGGCAASHAKGTGPARAFGAILVGRPWVVVTVPALVLCARWLGWSRELATTSLVTGPVLIPFGRLHVFPPLPPPRLSCVCFLLPEATMTPHKDYCLDPGPPAPTPTLPESSILTEALQVCNPHAAGIDIGEAEHWVAVPPGCDPQPVRRFGTFTADLDALADWLIDCGVTTVAMESTGVYWIPLFELLEARGVQVLLIDPRQAKRAPGRPKTDRLDCKWLQRLHAYGLLAGAFRPEDQVCVLRSYLRHRQMLLTSAAHHIQHMPKALQQMNLKLTQVVSDITGVTGMAIIKAIIAGERDPQRLAKLRNPHCHHDADDIAKALQGTWRAEHLFALRQAVELYEVYHQQMAQCDQQIKRHLETFADKSAGQPLPPKARRHKKTNEPRFDARTPLYRMAGVDLTTIEGIEENTALILLSEIGTDMHRWPSVKHFCSWLGLCPQHQISGGKVLSRRVRPGAHRVTVALRLAARSLHHSQSALGAFFRRMKARLGTPKAITATAHKLARLVYSLLQHGSAYVQQGLDAYEAQYRERKVKAMARQAQALGYTLVALAVPEVQEIAAVPAPTP

SEQ ID NO: 493320 - protein, 344 aa, unidentified
MPSNFYLGIDVSKASLSVVLMSSNSKVLWSSKKIANQPSGFKQMVEHASKIASKHADGDDYSIAAGMESTGVYGEQLSYYLADNNMSGRISLYVLNPFAVKSYRKATMHLNKNDAADARLIASYLISMITTGQITPWQAPSLAERLLRELTRRRAELVTLREAEYNRLEKFRAGGSHPHPVIESVQELIAHLEQQIREIDEAIEKHIDDAGLRDTAELLRSIDGIGKVSSASFIGEAGDISRYRSVKQLVSRLGIAPCENQSGTSIHKKPVMSRMGSAVLRHAMYMAALVATRKNKVISAFYNRLLARGKCKKLAVIASMRKLLHIIWGVLTHRVKFDPEYAPA

SEQ ID NO: 493321 - protein, 384 aa, unidentified
MAVGLPLIRLPAPCNFPLPGIGAVLPIAVADERPQHLWDTKPVGEPGSSSAVPSNPNSRQGRSRMRSPLRQGWDRMDVIVGIDVSKDRLDVHVLPAGDSFLVGNDHAGVDGLITRLREAKADVVALEATGGYEMLAAAGLSSAGLAVVVVNPAQVRSYANALGKRAKTDPIDAAVIAAFVAATKPDIRPLRDEESEAFSAIVSRRRQIVQMITAEENRTRMAQTKETEKSIKRLLAALRHELASLDDELDGRIRKSPLWRVREALLTSVPGVGPTTARTLIAEMPELGTLDRRQIASLAGIAPFTRQSGKWRGKSFIGGGRGKVRAVLFMAALVASRHNPVLKAFRDRLVAAGKPKIVAIVATMRKLLTILNAIIRDGKPWKNA

SEQ ID NO: 493322 - protein, 355 aa, unidentified
MNSEKYIGLDVHQATISVAVLDSKGKLVMESILETKAATILEFFAGLRGTLSVTFEEGTWAAWLYDLLKPHVAKLVVCNPRKNALLKQGNKSDKIDARKLADRLRLDDLKPVYHGETGVRTLRELARSYLTIVKDLTRVMNRLKALYRSWAIPCAGRDVYYTRHRDEWLSKIKEAGVRRRAEQLYQQLDMLQHLRQQARRELLAESRKHSITAKLRQIPSLGPIRSALAVALIQTPHRFRSKRQLWAYSGLALETRTSGEYRFVNGQLRRSKKQISIRGLNKDHNHDLKGLFKAAATRASFQPGPFQDFYQRSLAKGIKPTMVRLTLARKIAAITLTLWKKGENFDVEKLKSQAA

SEQ ID NO: 493323 - protein, 387 aa, unidentified
MMVRTVNDLSAATHGETVRCLIAIELSKKSWVVAFNTPLSEKISRRTLTGCKWKKLLELIEDVRARVSRQMGRPVEVMSCYEAGYDGFWLHRQLEVHGVRNYVIDPASLQVDRRARRVKTDRIDTERLLRSLMAYLRGEPKVWSVVRVPSVAEEDARRLHRERDRLVSERVQHVNRIKGLCALHGIYDYDPLRRRAMAQLEQLRMTEGEALPPRLKSEIKRELQRLELVVEMIATLEAERDAIVEDEASPHVNAKKIQNLHKLKAIGPEFAAVLVGEIFHRDFNNRRQLASYVGLAPSPFQSGNVAHDQGISKSGNRKGRTTGIELAWLWLRYQPDSDLSAWFRARVGITKGRIRRIAIVALARKLLVALWRYLETGLVPRGAVFKG

SEQ ID NO: 493324 - protein, 342 aa, unidentified
MFVIGIDSHKDTLAACVVDHLGVPLEYRSIANTAAGHRQLVDWAKARDRARVAVEGSGTFGRSAAVAALGAGLDVREVPPQMTARLRRRGRTQTKSDQVDALVIAQIALRDDTLAAPTWWESTEDLRVLVSYRHELVQDRTAQANRLHADLVKLRPGYQQSIRRLTTRKALDGVMRLLRGDMSPHARVAKGRIRTLRDLDRRIRDLTAQIEGLINQSGTSLRDIYGVGTLVAATILAEVGNPRRYATKARFAMANGTAPLEASSGKVVRHRLNRGGNRRLNQAIHTVALTQISRPNTEGRRYYHKLRQRGKTNREALRILKRRISDRIWTHLQDSSTAPNST

SEQ ID NO: 493325 - protein, 411 aa, unidentified
MEILYKVCCGLDVHAKTVVACLNQQGKKQTRTFSTMTSDLLQLADWLTTHHCEMVAMESTGVYWKPLFNILEASLELILVNTRHIKMVPGRKTDVSDAEWISDCLRVGLLKPSFIPPLEIRELRELTRYRSTLVGEKARLANRIQKLAESGNIKLSQVASDALGDSGKAMLRALAQGETDVVKMSEFARRALRNKKPQLQAALDGRLTRNQRWVLGDLLDRYEALESSIKRVEEQIEEEVKDNHDPFVDEAVELLQSIPGIGKRTAQVIIAEIGVKMEQFPSAHHLSSWAGISPGNNESAGKRKSGKTTKGSKYLREALVQAGWAASHTKQSYLSAHYHKLARRMSKKKALVAVGHSLLVIVYFVLKRRMSYQDLGGDYFDKQNVEQKSKRLIRQLEALGLTVTVEKRAAA

SEQ ID NO: 493326 - protein, 381 aa, unidentified
MDDHIAAFVAFDTSKLRNAVAIAEAGRLGEVRFFGEIDNTAEATAKLVKKLAAKYERVAFCYEAGPTGYGLHRQITDLGHECMVAAPSLIPKKPGNRVKTNRRDALGLAKSLRAGELTAVWVPDSRHEAMRELTRARGAAVQDARQKGQQVSAFLLRQGRHYDAGKKTWTKAHMGWLTSQRFEHPEQRIAFEELLLAVHQARDRVIRLEEAIRTAVPDWSLAEVMQALMAMRGIDMVTATAFLAEIGDLSRFRTPRQLMAYLGLVPSENSTGDTTVRGPITKAGNRRARRLLIESAWSYRHPPRVGKDKQAKVEAAPRAVREIAWKAQHRLYARYRALTRKGKLKTVAITALARELAAFIWAVSREIATTGGAAAHKGIRG

SEQ ID NO: 493327 - protein, 337 aa, unidentified
MKYSGIDLHSNNCVICVADEEDKVVAEKRVPNDLNKILQFMQPWQQELAAVAVESTYNWYWLVDGLQRAGYNVKLANTVAMKKYDGLKHSNDETDAQYLAHMLRLNILPTGTILAPEQRAIRDLARKRLQLVRSRTSHILSIENIAARQQAMKINSNQVKRLQTEDVDKLGFPEDVALAVKSNLAVVHTLNEQIILLEKRLQEEMDQRPEYDLLLSIPGIGRILAVIILLETGPIERFAAVGNFASYARCVDSKHTSNGKKKGEGNTKNGNQYLSWAFVEAANFALRFNTAAKPFDERKKAKTNTSVAIKALAHKLARACYYILKERKPFDETRCFA

SEQ ID NO: 493328 - protein, 395 aa, unidentified
MKTYILRPVKAVHSENDPTPPATGPVLFIGLDVHNDSIAVSIAPSDSTEVRRYGIIGGEHDDVLKLVKKLQAAHPAATLRFCYEAGPRGFALCRCLRAHGLECILVCPSKVPRKPGERVKTDRRDADQLARLFRAGELTCLYVPEPEDEAMRDLIRARFQVGQQQHRARQQLKMYLLRHNLRYGGQSSWTPAHLRYLAQIKMPFPVQQIVFQEMLEVISEATARLERYDREIERAVPGWRWESVVRALMALRGMARLHAATLVAELGDFHRFEHPGQLMNYLGLVPSEHTTGTDRQQGGITKMGNAPARRALVEAAWQYRAPARLSPHLKKRQEGLPKAITDMAWEAQRRLHHRYGHLSRVGKKKSQVAVTAVARELSGFVWAIARQVKPHPAKP

SEQ ID NO: 493329 - protein, 330 aa, unidentified
MKKQKFIIGVDVSRNTLDIYCAEINGHIQIQNGTVGFKEFLKWCKTFKINLTQSVIVMEYTGGYEYKLIQFCENKKILFIRIPGLAVKRSLGIIRGKNDKVDSKRIAQYASEKHASLKASKPLDKRIIRIKELLSFRKRCVRENAGYQATIKERKHIYPDLGEDMIIKELKQKMKFNEKIISKVEAEIMKTIEDNDDFKTNYDLITSIKGIGKVNGWMTIAYTENFTSFLNGRSYAVYVGVIPFDHSSGISIKGRKRVSNLANKELKSELSQAAKSAMQHDKEIRDYAERKLKEKDWGKVVNNVKFKLILRVFAVVKRGSKYVDNYQVAA

SEQ ID NO: 493330 - protein, 391 aa, unidentified
MPTVADQAEAPIAIQTHLACIFTSLELSRSIWLITSLSPGSGEKMSKHSVRAGDVAALLARFSELKRKASGRTGKSFPIVVIQEAGLDGFWLHRVLQSEGIESHVVDPASIATSHRRRRAKTDRIDGEALLRALLAHKRGEPRVCAMVRAPTPEEEDRRRLCRERKVLIAERVEHVNRIKGLLFSQGVFDYEPLRRDRRQRLDELATGDGRPLPTHLKAHIGRELDRLELLLDQLKTAEAERNTLLAEQQAATERPAPVGRMLLDFRGIGAEFAAVLWLEALFRHFDNRRQLASYAGLAPTPWQSGSVDREQGVSKAGNPRLRNTLIQLAWLWLRHQPQSALASWFKERVNRNGGRMKKTSIVALARKLLVALWKYVTAGVVIEGAVTKSH

SEQ ID NO: 493331 - protein, 357 aa, unidentified
METKNNLLDFKNQRFYLGMDVHKKQWTVTIRSNKQELITMSIDPFAETLNRYMQKNYPGGEYDSVYEAGFCGYWIHRELVRYGFKNIVAAPTEIPTSNREKNKKRDPVDSRKLSRELENGSIKGIYVPGQLQQELRSIVRQRVQLVKKQVRLKNQIKGYLHFYGHRLPENYELRHWSKNFIEHLKTLKFSYPIGKEQLDIYLAELEELRKLTVRIIKQIRSFLNENNMMEAVQLLSSVPGIGFTVAITLIAEIMDPGRFADLDYLSSFVGLVPCIVSSSDKEKMLGINKQHNRFLRKLLIESAWVAVRKDPALTLSYGNYIKRMSKQEAIIRIAKKLLSRINYVWKNKKPYVISVVK

SEQ ID NO: 493332 - protein, 344 aa, unidentified
MKITRVGLDLAKRVFQVHGVNEHGAAKLSKKLSRAEVLQFFAQLPPCMVGIEACGGAHYWGRELGKLGHTVRLMAAQFVNPYRKSGKNDANDAEAICEAVGRANMRFVSVKSEEQQAVLMMHRARTLVVSNRTAQVNQIRGLLGEFGLIVPVGIKRLRTQLPQILEDAENGLPLLAREIFANLLHELHYLDERIERYDRQLQQLASQSEPARRLMAVEGIGPITATALVASVGDARVFKNGRQFAAWLGLTPRQYSSGGTTRLGRITKRGDRYLRMLLVHGARAHLRFVDRKNDPKSLWVKVLKARRHINVAAVALAAKHARIIWALLAKGTTYRSPAAATAVT

SEQ ID NO: 493333 - protein, 343 aa, unidentified
MTVDVGMDLHRKRSQIAIVDDLGVPQRNRNLANDPAKLMPVLGALPPGTPVAFAAAYGWGWLVDLLEELELEPHLVHPSRCEAIASARLKNDKVDAATLAQLLRADLLPEAWIAPPQIRDLRALLRHRASLVRLSTFGKNRIHAVLADRGIAQDQNLWTGPGRAWLADLALPSTPRAIIEDCGGLLDTLATPIARLEQEIAGLAKPDPRVQALMVLPGVGRLTAMTLVAEIGDIGRFPTARKLCAWAGLTPQVGNSDRKVRHGHITKQGSPWVRGILQEAAQTAKRHPMFASAYAQLARRRGKQIATTAIARRLLARSFHILSQLEEASASEKAGTGRARVCA

SEQ ID NO: 493334 - protein, 418 aa, unidentified
MQTELSQYKAIIGIDWADKKHDVCVQSAASGRRQSYQVPHKAEKLDEWARSLHRQHGGPIAIALELSKGPIVSVLQKYDFIVIFPIDPTTLANYRRTFTPSGAKDDPTDAEYALNLLLMHTEHFAPLRPQSVEMRTLMTLVEQRRRLMNDRVRITNRLRNALKQYYPQALEWFDRIDTPLFCDFIKRWPSLAQARRARRSTLEKFFREHNMNRKALLERRMTAIRSGLPLTEDEAVIVPYRLQALTLVAQLEVALAAIRHYDDEIAALAPQHPDYGLFDELPGAGPSLAPRLLVAFGEQRERYGKAAELQKYAGIAPVTERSGQSTWIHWRWQCPTFLRQTFVEWAAQTINKSYWAGLYYYQQRAKGCSHQAAVRALAFKWIRILYRCWISRTPYDEAKYLKTLQQRGSPLLKTAEAA

SEQ ID NO: 493335 - protein, 369 aa, unidentified
MNAVGIDVSKGKSMVAALRPMGEVALLPQEFLHTEVGLEQMAYAILALGENTRVIMEATGRYHEPVAAALHAYGIYVCVLNPLFIKQSGGGSIRKVKTDKADAMKIAKYGLDNWVDLREYTPMDTVRQQLKLCSRQYNLYMKTVVSLQNNLISLTDKTFPGVNELFSSPERADGHQKWVDFVITFWHCDCICYVSAKAFTERYQKWCKRKGYHFSAEKALDIHAGSCDHFTTLPKNDNTKLLISTAAQQLLAGKVTLAALRAEMTRLSKQLPEYDTVRAMYGVGETTAAQLVAEIGDVRRFPRRSSIIGFAGVDPGIDESGKHSAKSVPTTKRGSPHLRKTLYQIVCTYLRKAPADGEYEKISVNKILL

SEQ ID NO: 493336 - protein, 397 aa, unidentified
MIAVGIDISKAKSTVAVIDSDGTVLASPFTMAHTQPEMEAFVSYLKGLGEPTTILMEYTGHYHYPVLKKLQDEGFPVCIVNPYQMKKYGDVEIHKAKTDKKDALRIAAYALEKSYKLVPYSSMEQKYEDLKFLSRQYSQRITYVAKLKVQLIALLDQTMPGITKILPLNSRNPEKCALLLFIKRFKSFDEIQRIGKARFLASYDVLAKKASERSASSKGLSIYELAADSITTRGEGPYIWLSQNQCVDLLSATQNAADEIISQMRNIAETIPEYKVLRAMHGVGDRLGPIILAEIGDVHRFHSGKALNSYAGNDAPPYQSGQFESRNRHISKRGSSTLRKACYEVMQALKLTKPQDDPVYLFMLKKEQEGKPFNVAKMAGVNKFLRIYYARAMELYK

SEQ ID NO: 493337 - protein, 826 aa, unidentified
MSSRRVPKGPGRRPMTDKRRQFLELLGQGWSVRGACKELGIGRSSGNNWKNGSMVRQKDGTVKFVPPLEPLAVRMISPRFLSEEERIQIADLASRGMGPTAIGQVMGRAPSTISRELRRNLHPSGQYRPFHAHSAAATRRRRTRPLKLITDPGLRSFVLDRLRERWSPQQIARALRRAHPDDPGERVATETIYQAVYRPGSGIIRKPAPSPLRTGRDHRRGQSRVVRTRRRFAQPMLPVHDRGFEPTDRSIAGHWEGDLIVGPHNRSAIGTLVERQTRYVKLLHLPAHNSTELLAALVSTLNELPPALRQTVTWDQGTEMARHLEITQATGTKIYFCDAASPWQRGSNENTNGLLRQYFRLVLVGTMACRAVVLVAFSSRHRRADSSTSCRLRAGSPSVCRPADAARGLTQQRRDDELPNGNFSKSDCQLRFITIATGKEPISMIILGVDPHKSTHTSTAIDPVTHQAVASIRIRSTLADYRQLLKWARQFDERRWAVENAEGLGRHLSSWLLARGEQVVDVPSTATARVRQLSRGGGRKTDQIDAAAAASVAALQGDGRPLQPEGLADALALLDESRRNLAQSRVRLVNQLHALLRDLIAGGAPRDLTATKAAVALRGVRPVGEAERVRKQIATNLISQIRSVDSLLKSSRQQIKELVTASGSTLTDTVGIGPITAGRLIGRTGSASRFPTSAAFANYAGTAPIEIASADRSRHRLSRGGDRQLNAALHTVAITQIRTTGSRGHTYYAAKLEQGKSPRDARRCLKRRLADHVWRTMLADERASLGGHSGATLESSATGPTPPTGPSDKSLPRPAAHDYTTAPSQG

SEQ ID NO: 493338 - protein, 377 aa, unidentified
MKRILKIGMDVHSTNYTLCAMEPVFGADDRIYATVQITPDYKNILMFIEKVRQKLDPYDTYDIECGYEAGCLGYSLYNQLTAAGVKCVILAPTTMLTQQGKRIKTDARDALMIAQCLSYGGYQPVYIPTEDDDSVKEYLRMRDDHKLALKKVKQQINAFCLRHGYHYPQSKWTRMHLDWLRRIKLPPLYQETLDEYMATYFEMTDKLEKYDTRIMEISAQEKYSDKVKKLGCFVGIQTHIALSLIVETGDFCRFAKGNAYAAYLGLAPGEHSSSDKINRLGITKAGNSHLRMLLIEAAGGICKGNIGYKSKALKKRQQGNSVQVISYADMANTRLRSKYYRLIRHGKKRNVAVAAIARELACFVWGMMTDNIEERVA

SEQ ID NO: 493339 - protein, 340 aa, unidentified
MTIATIGLDLAKSVFQAHGADENGDTVLVKRLHRKQVLPFFSKLSPCLIGMEACGTGHYWARTLAAMGHEVRLIPPSYVKAYVKRGKSDALDAEAICEAVQRRTMRFVPVKTVEQQAILMTHRVRSLLVRQRTMLANAMRAHLAELGFVANPGIANLAKLAEQALADKNALPSYARIALEILIRQIMTISGEIGVLDQQLIVWHAENEASRRLAAIPGLGVITATAVAATVIDPYQFRSGRQFAAWLGLTPQQHSTGGKTRLGGISKQGDRYLRRLLVVGATAVIRHIKDKPTPMADWIRKLMEKKPFRLVSVALANKLARIAWVVLTRKEAYRPYASLA

SEQ ID NO: 493340 - protein, 318 aa, unidentified
MNSHHKTESTEPVRYVPLDVSKHRLDYGLEPGRTAAVANTREGIATLIKRLEACPRARVVCEATGGYERALLAALGQAKIAVSRVHPGRVRAFARAEGLNAKTDKIDVELLRRYAVAMQPRVEVLPSPEVEVLRELLDHRRQLDEQRVLFGNRRESAGPTLLGLIECELAHLEGSLKEIEARIHEHIHGHTALRAKFERLQQLQGCGPVLAATLLAYLPELGILEDKQISGLVGVAPHANDSGETARPRHAHGGRIAVRNVLYMAAVSASHHNPVLAPFYQRLLAEGKPAKVAIVAVMRKMIVVLNKLLKDPNFTLGG

SEQ ID NO: 493341 - protein, 410 aa, unidentified
MEVLHQRCAGLDVHKKTVVAAVRLATQNKLTTEVKTFTTTTAGLLALSDWLAENGCTHAAMEATGVYWRPVWHVLSDGEIELILANAAHVKNVPGRKTDVSDAAWLAELLAHGLIRASFVPDGQTQELRALLRTRKQLVRERTRHTQRIQKTLEDANIKLDAELSDILGKSGRAMLAAMIAGESDPVRLAALAHRNVKASQGELEQALRGRVTRHHRFLLKLHLGQVDALDAAITTLDGEIEANLAPFRTAIELVSTIPGVSTLSAEVIVSEIGLDMSRFPTVGHLVSWAGLSPRNDQSAGKRRSTRLRKGAQWLKTMLVQCAWAAKNKKGSYLQAQFHRLRSRRGPQKAICAVAASILTAVYHMLKDGTAYEDLGPDHFNRRSKVTHSQRLVRRLQQLGYTVEIKPIAA

SEQ ID NO: 493342 - protein, 337 aa, unidentified
MSRARIYKEGNPTVQPNSNAKCWAGIDVSKDWVDVAVLVEEQKVEQFRCVRSVVELEQLAQKLLPYGPQGVVLEATGGLEGSVITALVAAGLKVMRMNPKRVRDFARAQGLLAKTDQLDAHILALFGARMQPPLRAWPEAERQQLAAWIARQQQLTLQRAAERTRLHQATEPQLRKSVERVIAFLGKELARLEKQMGKWMAQSEIWTEQESLLRTAPGVGPKTARLLLAQLPELGHINRREIASLVGLAPLACDSGHWRGKRRIHGGRGAVRAILYLASWSAVRPPGSLREFYRRLVAAGKPRQVALIAVARKLLLALNEMMRLNQPWRSPKESIPA

SEQ ID NO: 493343 - protein, 421 aa, unidentified
MQDTPTEFAAFIGIDRADRKHDFCLHVPGTKKREKGVIEHKPAVLNAWAQRLRERFGGAAIAVAVELSQGPIVSALLEHDIFVLFPVNPSMLAKYREAFTPSRAKDDPTDAEIALELLLRHPEKVPALRRQGPTMRALQRVVEDRRAFVEDRVRLTNRLTNALKAYFPQVVDWFRDKETAIFADFLERWPTLELAQRARNKTLIDFFHAHNVRSQEAVDRRIAAIRTEQPLTSDTAVIGPMRLLVEVFIPQLRAVCQAVRRFDEEIERLCGELADYKLFRALPGAGPVFAARLLVAFGEQRDRFPTASALQRYAGVAPVTERSGNKSWVHWRWACPTFLRQTFVEWVAETIPRSFWARAFYQSRKAQGSSHNAAIRALAFKWIRILFRCWVDRRPYDESRYLSSLQKRNSPVLKFAVQPTP

SEQ ID NO: 493344 - protein, 356 aa, unidentified
MVIVAIESHQGALHMQISTIGLDIAKNVFQVHGIDAAEKVVVRKRLRRRQVLEFFKALPPCLIGMEACATAHYWARELTKLGHEVRLMPAKDVKAYVKRNKNDAADAEAICEAVRRPTMRFVRIKSAEQQGQLMQHRTRDVLIRQRTQIINALRAHLAELGLVVAQGNAGVNELRAIVTDEQDTRLPIDARASVIVLAAQLEALESVIGAIEKRIKMQHRSSEASQRVEAIPGIGVIGATAIVATVADPAIFRSGRDFAAWIGLVPRQDSTGGKQKLGPISKQGDRYLRRILVVGAIAVLRRAQENPGKYPWLTQLLARRPFKVVAVALANKMARMAWALLAHGGTYRAPELAETA

SEQ ID NO: 493345 - protein, 531 aa, unidentified
MSVRKRVFELTHPNAAGIDVGAASHFVAVPPDRDEQAVREYPSFTEDLNRLAEWLRACEVDTVAMESTGVYWIPLFELLESRGFTVYLVNARHVKNVSGRKSDVLDCQWLQQLMSFGLLSGAFRPQGEICALRSVARQRAMLLSYQSRHVQHMQKALTQMNIQLAQVISDVVGETGQRIIRAILAGERNGQVLAKLKHFRIRATEEEIAKSLQGNWREEHLFALKQAVSLYDAYAAELAECDRQLESMLAALARHNREPGKAKRRARAKNAPRFDMRTSLFQLCGADLTQIDGIDVTTAFKVLAEVGADLSRFKTAKHFASWLGLCPGTKISGGKVLSGATKRTANRAAQALKLAAASLRSSRSALGAYYRRLAARMDKPHAVTACAHKLARLIYALLTKGEAYVDQGQAHYEERYRQRVLRHLTKTAQKLGFQLIPNPQSAKKNNDIKSGYSNVFLERVARERGSTVSPEQDGGPRFSYTRRPRSLNSGPCCRSSDALVSAFMHPRHRWRGACAFYLASARDPAGVARVF

SEQ ID NO: 493346 - protein, 385 aa, unidentified
MTTKTRVARRGERSERSRATRPDREIDYPKVLEAVGQLDPGSVRVDQTRTVARASASGKPASARKGHPVSTVSKPTAPCVGVDVSKRSLEVAFGPEGPVCSLAYDAPGLAHLVQELQQQAPSRIIVEATGGYERQLVSELANACLPVIVVNPRQVRDFARAIGRLAKTDAIDATILALFGATLCPAFRSLPDVQAQELRDRLARRRQLVDMHTAESNRLSAAHSTKVRQSIEAVLRLLERQLARVDDDIDECLHASPVWREQEDLLQSVPGVGPQTARCLIAELPELGQCSRQQLAGLVGVAPINRDSGTFRGRRTTWGGRASVRAMLYMAALVASRHNPVIRAFYQGLLERGKTKKLALVACMHKLLTILNALLRKHQPWRATA

SEQ ID NO: 493347 - protein, 346 aa, unidentified
MTIVGGFDVHRQQITFDYVDIDTGVVRSGQIRPATRDVLRRWLGEHCPDGGGEIAVEGCTGWRFVVEELTAAGVVAHLADPAETAGLRGPKKRAKTDRADARLLRTLLWEGRLPDSWIPSPQVVEVRTLGRLYCALMEERRGWQQRVHAQLFHQGAPKIGGLLTEAGREALVTAELSPAGRQYVDTAMRRIDALTEEIDPLRRQLVNFARRQPGCVALQARHYGVGWLCAVIIWAEIGDVRRFRRADQVVRFAGLDITVYSSDGKRSPGHLSRQGSPELRWAAFEAARCAARRGSPDYAYYQKVADVLDGKRPVLAVERKLLRRCYHTLRDLGDAAVVDVPERRAA

SEQ ID NO: 493348 - protein, 367 aa, unidentified
MSEDITAFVGLDVHKESIAIAVAEPGRAAPRFIGTTGPILREVQKALTHWGTPAQLLVVYEAGPCGYGLARQLTSKGYRCEVVAPSKIPRKPGDRIKTDRRDALQLAHFARAGELTPILIPEEPDEAIRDLSRAREDALRARMSARHQLKALLLRHGVRYTGKCSWTKAHERFLAQLSFPHPAQNIAFVEYRTAVKEADERLERITAALRDQVDQWRLRPVVRALMTLRGIEMVAAVTLIAELGDLKRFEHPKRLMSFLGLVPSEYSSGQSRSLGGITKAGNTHARRILIEAAWSYRHPPRIAREKQTRQEDQPRAVREIAWRAQLRLCQRYRRLSARGMHQNKTCVSIARELAGFMWDIARQVAIS

SEQ ID NO: 493349 - protein, 334 aa, unidentified
MNHGVLYVGVDVHERESQLAVLEKEGSLLLEERIPTKDLGRFLSSLPGEKRVAIESVGFIHPIYEKLSSIQDCTVSVANPNKLRLISESGTKNDRNDAKVLGDLLRTNYLPVAHMRDEETREKLFVVNDRVSYGLRRGQLRGTIRWLLKRRGIEVDTPFSDEGRKRLRELRLQEIDIRLDELELIESTIERLDRQIVEIASSDKKAKLLDTIPGVGPYTALFLACILDDIDRFPDSKHACAYLGLVPWLDESADVTHLGHITKKGDKWLRRNLVECARVAVRKDPHLNEFYTRLRHKRGEKKAIIAVARKLVSYAYWVLKRNITYEELSPWTTT

SEQ ID NO: 493350 - protein, 356 aa, unidentified
MSAVAERVLPSQGVVIAVDPHKASWTAVAVTAGLAAAGAVRVEANRAGYRQLRRFAAGWSDVRWAIEGATGLGAPLAGRLGEDGITVVDVPAKLARRVRLLSTGHGRKSDPADALSVGIAAWSAPALRTVEIDQAIAVLRALTEHRDDLVRTRTQLINRLHVLLVKLIPCGLARGLTAESAAEALRRIRPRDSLGRTLRALAVDLVAELRRLDRRIAETTQALSDAVTASGTTLTQLLGIGDVVAAKILARTGPITRFLSTAAFASFCGVAPIEVSSGDVVRHRLSRAGDRQLNYALHVMALAQIRYDGPGRSYYQRKRAAGKSHKEAMRCLKRRLADVVYRTMINDSVSSLTAAA

SEQ ID NO: 493351 - protein, 334 aa, unidentified
MNYKNFIGIDISKNTFDVALLKDGASEKMITAKFPNNYKGIVALEELIHKQKLIKEEILFCMEHTGIYCRILATYLTENMYSVWIEMPVQIIRSLGIQRGKNDKLDAQRIATYAYTFKDNVRLWQPPRQEVQKIRDLLALRDRLIESRKTILVPIEELVDSGLTREADTLRKLCRRSLEALDKEIDQIEKELDKIINNDTDLKNKYKLARSVPGIGKITALSLLYYTNEFSLFTSAKKLACYCGVAPFGRESGTSVNGKPRVSNFANKALKKLLHMAAMAAISSDKEIRAYYQRKVAEGKNKMLVLNAIRNKILQRLVAVLKRGTPFTPNLQLA

SEQ ID NO: 493352 - protein, 373 aa, unidentified
MPRYSTAFGMDVHLRSTTVCALDAETGEAVTRRFRGNPWGEVAEWMSGFPGPSLAAYESGYLGFAPQRELSGLGVDCVVAAVSRVPRSAADLSSKNDRNDAARMAKAILSHDISPVWVPSPEIEGLRDLAGAHDAATARLAAAKQRLLAFLARRGYAYGGTTPAGNPRRYWTYDFLRWLDKVRPADDGGIRALAALRNEVEAAAETRDDLLAEYRAAVAAGPLSAEVEALQSIKGCGFALAAAFASEVGDFSRFRSGRQVTSYFGLAPKQRSSADSVRLGGISGAGNALVRRLAVEGSWSYVQASHQPKLMPKGSGVPLEVRMHGRKGSERLLRRREEMLARGMPQAKANAATAAELVRWLWALGAMCREATE

SEQ ID NO: 493353 - protein, 401 aa, unidentified
MPRQGFIGLDVAKDTFTAAFLIVDALSGQILHEQIATFSYDHPGWQRFLATWEPLHADFWWIGLEASGPYSALLEAHLLRLHRPNVSLHRLSPLQVRDFARARSRRRTKTDRLDACTIALFLRQQLTVQALPAPLQDHTPLRALAHLDQHLAQELTRTQNQVRQLLHFLFPELERAYARFPKALRTLLRHFPSAHAIAQAPLQDLHALLPPRHRLDLEALQALARASFGLHDPIRAQTLQLLLDRWAFLETLRARCFAALQQAVRQHHPQAWRLLRTIPGIGPRLAALFLALTGPLDRFPDRKALIAYAGLDVTLHPSGRFAGRCRLSKRGDPLLRHVLYLIAAALKRYTRRFAQAFAYYRHQGRAVRETLVILSRKALGMLYHLLRHQVPFQDLPQPAPT

SEQ ID NO: 493354 - protein, 343 aa, unidentified
MWIIGCDYHAKFEEIAFVNQATGEFGRKQLQHGNGEAEQFYRSLAGQAVRVGIESTGGTRWLERLLGELGMELWIGDAARIRAAAAHKQKTDRRDAELLLQLLVEERFPRIWRPTPEQQDLRQLLVHRHRLVQMRTRVKNQLQALARNEGIQRQQRLWSEAGQRELLGLSLGPWSNVRRSDLLSLLKELDGRIQPLDQHVKQQAEQRSEVRLLMTHPGVGPVIGMAFVLTLGDAARFASSKQVASYLGLVPLERSSGGRQRLGHITKQGSSLLRGLLVEGARVAARREPEWKRRYIRLALKKNRSIAAVALARRLGVRLWWMWKLGLTYGQIVESHSHAGSPA

SEQ ID NO: 493355 - protein, 347 aa, unidentified
MLVFNPNSRLGIKARICKEGSPTMKDSNTTESRSNGCFWGVDVASDKLDLGCHGQTKVLTFENSAEGLEQLVCSVRKHITALIVVEATGGYEARLVVALAEAGLPVALINPRQLRAFATAVGELAKTDAIDARIIARFAHDVRPEVRPVPGENQRFFADLAARRRQLIALRTAEQNRRRQTDRAQLLASIDAVLTILDEQIATLESQLAQLIATNDQWQQRDQILQSVSGVAAATSHTLIADLPELGQLDHKQISKLVGVAPLNRDSGKLRGRRAIVGGRATVRAALYMAAFNAIRCNPQIRQFYVRLRQAGKCYKVAVTACMRKLLTVLNALVRDNNPWRKPVMNP

SEQ ID NO: 493356 - protein, 339 aa, unidentified
MQISVIGLDIAKQVFQVHAADAAGRTVAQIKLRRAQVLDYFQALPPCFVGLEACATAHYWARELSAVGHTVRLMPPAYVKPYVKRNKTDAADAQAIAEALTRPTMRFVPVKSADQQAMLMLHRVRELLVRQRTMLATALRAHLAEFGIIAPQGIQRVEKLAAQLHDPSVPPLARDALNLLVEQLASTWKQIDTIEMQLIAIHRTQAVSRRLASIPGIGPITAMAIASTVSDPTMFRSGREFAAWLGLTPKSHSSGGKDRLGRISKRGDRYIRHLLYVGAGNVIRFAKARAAAGENWIRGLQQRRPPKVVIIALANKMARIAWALMVREQPFRSPAQSTL

SEQ ID NO: 493357 - protein, 419 aa, unidentified
MKSIQTKKVKVVNEKTLLVTVDVSKEKHTGYTRCPDRTETKPFEFFNNGKGFNEFWNRISMVKKANNLEEVIVGFESTGPYAEPLIQFLKKRDVKLVQVNPMHTKRLKELQGNSPNKTDNKDPKVIADIIELGHALTVVVPEGAAAELRRLTQARERSMQRRTALLNQLQGLIFIIFPEFLQIMKDIKTKSAQYLIKHYCTPHGIEECGVESLTHTLRKISRGKLDKGRAEELFNAAKTSVGITEGQKSIVFEIKEILAHIEACERFIDEVEKEMSQNLGQIPYSCFILSIKGVGEVTAAGIIGEVGDFSKFNTIAEIEKLAGLDLFEISSGKHKGTRRISKRGRSLLRKFMYFAALNVIRKGGILHKEYQAFVDRGKPKLKALIAIARRLLRIIFALVRNHSEFTVNYSKPSQLKMAA

SEQ ID NO: 493358 - protein, 313 aa, unidentified
MNIVGVDVAKDSLVCVVIDRSEKVKETYTVENTSEKIGEFIDLLSRRYKHLTVASEATAEYHLNLVKACLERGITFRLLNPITTKQFTKVTVRKKKTDLTDAHVIARLALRGEGTVVGVLSLGLTKPTTRVATKLAQVKQQLYLMSKRLKNLDFGNELVEKLDSCVLSLDTTVKAFRSKARKDSDTGTLKLLESIPGIGKTLSCDIAAEIETLGKFKDADALIAFAGLDPKVKQSGGSLHHNTKLTKRGSPYLRRALFMAASIGQRNDNELGTYYDKKRAEGKYYREATVAVARKIVSRVFAVLKRQTPYVIK

SEQ ID NO: 493359 - protein, 416 aa, unidentified
MEQGYKSKVFCGYSITIFPSEVFIMVVSVGIDVAKDKHDCFILNSEGEVLADVFTIPNNMDGFNCLLQTIRDCTTPQDIIKVGLEATGHYSYNILGFLLDNGLATYVLNPLRTNLYRKSLSLRKTKTDRVDARTIAAMLLSDIGLKPYTDTAYHNEELKSLTRYRFNKVKERAKLKSSVSRLVCILFPELEKLVPTLHGASIYALLEEFPGAVQAAGAHLTRLKYLLSDASRGRYGRDMAVEIRDAARNSIGSRMPAKSLELQHTIRLIRELDAEIEEIETAIQTIMDEIHSPITTIPGIGYRMGAMILAEVGDFSRFESPDKLLAYAGLSPSTYQSGQLINCYPHMEKRGSRYLRYAIYNAAKYVCLWDPTFAAYLAKKRAEGKHYNVAISHAAKKLVRLIFALEKSRQPYNLAA

SEQ ID NO: 493360 - protein, 337 aa, unidentified
MEQQTQYVGIDLHRRRSVIVRRTGAGETLDTVRIDNDPVALAAELAKAGEHPEVILEACYGWYWAADVIQECGGNLHLAHPAGNNWGSRRVKNDERDATDLVDLLRLGRLAESWIAPPCQRELRELVRYRAKLVHLRTSLKAQVHAVLAKEGVPVPMSDLFGVGGRRLLDQVHLGDAYRLRVNSLRDLMGHIDHEIELVQNQVAPIFAGDLGFHAVQAIPGVGPVLAAVFVAEIGDVSRFTSARHLCSWAGLTPKHKESDVVVRRGHITKQGSRLVRWAAVEAVARQSTDSPIRRHHRRVGERRGTKIGRVAAARKLLILVYYGLRDGEIRCLAQAE

SEQ ID NO: 493361 - protein, 400 aa, unidentified
MKRLSGGIDIGSAFHHITILDEEDHILYNQKVSHNLNEFRKTIKQFKKIEKKEKGEISFALEGKNGYSAPFDRILLDKGFTLYNIDNLKLKRFREAFAGEWRDDGRDALMLSKMLKLKKYINSKREKVFIKIERPSPVTESLKILSRHQQTLIDEKVRLTNRLSKKLLEVCPQVLELGKLKNKRIIAILAKYPDFSKYKRMTLKSLLKIKGIGKRQVPFLLKRLNNIEYVGLTDIYKTIILSYAKRISELQEEIKDIDKKLDKIGEKDKSVKHLKSLPGVAIKLASRFIGEIGDINRFPSEKQLAVYCGIACVNNDSGKVTKAKAVYKANKICKQTLIIMAGCSIRFIPQCKFYYLKKRAEGKSHNHTLRCLARQLIKVIYKMLTEDRDYIVRKVLKKVA

SEQ ID NO: 493362 - protein, 320 aa, unidentified
MRNAVGLDISKTTFDATAIIGGIEKSAKFDNDSKGFEQFKDWLDKLNCPDAHICMEATGNYYEGIADYIGSLYKVSVVNPLKISKYAESRFARTKTDKQDAKLIAEYCQTAKAQDLVIRKPIIDDGYKLKRLSAFYVQLTADSTAQKNRLEAAKDTFVVKICQSNIKHLQRQIKAVKKELEKLTNQPALKAQTDRLATIPAIGRLTAVMLLNYLSGADFQTSNKFAAFAGLTPQIKDSGTSVRGKPSLTKYGNRRLRALLFMPAMVAYRIKAFPAFIARLEAKNKPKKVILSAIMRKLAVIAYHVHKKGENYDPTRYKAA

SEQ ID NO: 493363 - protein, 343 aa, unidentified
MEQYIGLDVSMKETAVSIRQGGKRIWRGKCASDPQLLAAMIRKRAPEAKRVVFETGPLSVWFYHALTAEGMPAICIDARHAKAALDMAANKTDANDADGLAHLAEIGFYREVRVKGFDSMLIRTLVTARRQLLKMRLQMSNQIRGLMKTFGLIVPKGAGSVFDRNVRTLLEGEVGLGRIVLPMLQAWGDIRLRVAELSKHLVAMAGADQRSRLLTSVPGVGTVTATAFAAAVEDPANFKNSRAVGAWVGLTTRRFQSGEVDHDGHISRRGDTKLRSLLYEAAAVILNRSTETSTLRTWALALKERLGFKRAAVALARKLAVIMHAMLKTGELFDPHAGAPAAA

SEQ ID NO: 493364 - protein, 414 aa, unidentified
MLKIVYRNCAGIDVHKKIIVVTIAKTNKQDITEYQTKSFSTFTDDLIKCRDWLLANNTIDVCMESTGKYWIPVFNILEKKCKCIITHPKYVRTILAKKTDKKDSVWIADIFKHGLVEPSFMPPEDIRQLRNLMRYRNKLVYSRTGEKNRFQNSLTVSNVQIANVLTDVFGKTSQSILKLMLEQPNLTLEDITPLLRKNSKSSPEDILKSINGSFDECQSSKMAICLNSINECIDLLEEQILKLAIKYTTEINLLLTMPGIKELSAIFIIAEIGTNMNVFINDKHLVSWAGLSPRCNESAKKKKSVKITKAGVYIKPLLVRCALCAIKDKSCPYIKARYESLKRRRGHKKAIIATARLLLTVIYHILNTGKAFDYKRFNTLLNRNFKTQRKAKNTPEEMISYLTSLGYEVTMQNT

SEQ ID NO: 493365 - protein, 397 aa, unidentified
MGKASIYVTALEMWVMRWTPPSTGSASQCATLVLADHYGLQVTQSSTQEGGVLMKIKLLGIDLAKNVFQLCALNQANKVLFNRTVRRAQLQSTIAKLEPTTIAMEACSSAHYWGRTFEVMGHKVLLVPAQHVTPFVRGGKSDARDALAICEAAQRPGLHPVPIKSIEQQDIQLLHRLRQRQVQHSTALANQIRSLGREYGVIFPAGIKSLIKRLPEALEDGSNELSPVARYALADQLRCLIEVRQAMKAFLLQIEQLAGQHPAYVNLLPLPGIGPMVASAYIAAIGNGNQFRCGRQVSAWLGLVPRQFGTGGQIQLMGISKSGDRYLRTLMIHGARAAITNGLKNNPELAQWVQPIIDRQGFNKAVVAMANKMTRISWVIVTTGDAFDVKQAFKPVA

SEQ ID NO: 493366 - protein, 305 aa, unidentified
MLYLGVDHHKQYSQLVLLNQAGELLAERRVANRLESLEEFLGDWEEPVAAVLEASRSWGNMYDLLEQVGEQVVLAHPWKVRAIPEAQVKTDRVDARVLAHLLRLDWVPGAYIPPRETREKRNLLRQRIFLVRLRTMVKNRIHVLLDRNHVPEEERPQVSDLFGRRGLKFLREVTLSEREGWLLRQELQLLEELNAHIARSDEAVKRLAQEDPRSAWLQSIPGIGPFFALLLLLEIDTIERFANPAKLVAYAGLIPSTSASGGKVYHGRLVYQANRHLRWAFIEIALLAIRSDPDLRADYEGLRRR

SEQ ID NO: 493367 - protein, 429 aa, unidentified
MGRVIGLDLSKHTAEVAILRPGSEAPQRWRFPAEPAAIRAFARQLGPEDQVALESCTNAFAFHRLLSQHGGSVVVSNPLKTRIIAEAKVKTDKIDAEVLARLLAADFLPGVWVPDSRTDHLRHLVFHRHGLVAQRTQVKNRIHSILHRNLIAPVMSDLLSKSGRAFLGKVDLPAPERELLNADLRTFDFLEGEITTAEKSFAHAALDDSEVRRLMTVPGLALASAVGWKAAIGDVRRFKRPANLVSYFGLNPSVYQSGLKAYSGHISRRGRSHARSICVEASHQLVRAPGPFHAFFLRLQRRKGYNVALTAVARKLVVLIWHMLTRGEDYRYAPPFRTREKLSRLRYLATGQRSPRGTKPDPRLDKQAAAKGEAKYLEFMKQRFGVKGPAGVDHPNRKPAPRAAARARSSETGERRSAKEKPTSLPKGS

SEQ ID NO: 493368 - protein, 356 aa, unidentified
METQSNKIDFSNQNIYVGFDVHLKSWKVTVMTEKTTYKTFSQDPRPDLLHQYLKNNFPGGTYHSAYEAGFSGYWIHNKLLSLGIESIVVNPADIPTTNKEKVNKEDKRDSRKIARSLRSGELTPIHVPSLKTLEDRSLLRTRSILVKDLTRYKNRVKSFLYFHGIFIPDSFYNSNCHWSNRFVKWLESIKLKEESGQIALATLIAEIKHLRKSTLDITMQIHALSKTIAYEEDVKLLRSIPGIGILTAMTILTELETVIRFGNLDKLCSYIGLVPSTNSSGEKERTGDITPRGHNALRSALVESAWITVRHDRVLLKCYNEYCKRMEPNKAIIRIAKRLLSRIRFVLINKKPYVCF

SEQ ID NO: 493369 - protein, 373 aa, unidentified
MRLKGGAVEKIYIGVDFHARQQTTCYLKTETGELVISALQHQDKEQVRAFYQQFPSPVIVGLEASGYSPWFEALLEQLGGEVWLGHATEIRRRARWRQKNDRRDAELIWDLMVHDEFPRLHRPAATSREVLRMLRYRQKLIKLRTMAKNSLQAIALQAGLAKGKQLFSRAGEEEFKSAAMSPVLQWQREHWFQLLQPLNAQLLETMVWFKAHSKDDLGIQRLRTHPGIGLLTSLCLLHTLQPVSRFRNTRKVTAYAGFDPVERSSAERQHFLGISKAGSRLLRYLLVEAVQTAVRYDEDLKRFYKRLAERRGRPKAKVAAARKLLIRAYIMLRDEIDYAEFRRRAVAARLARTGQGPINVPEVLIGQPASPDA

SEQ ID NO: 493370 - protein, 315 aa, unidentified
METTTPNPEATYVGLDIAKDRLDYSVDGLRCDHVPNTASGHARLLAALRPLRSVRVICEATGGYERAVVAALLLAKLEVCVVNPGRVRAFAHAEGLLAKTDRLDAQLLRRFGEKVRPRLHAPMDQAAITLRELLDYRRQVSDQLVAVRNRLELAGPVLRARLDAQVAFLQKELVEVDRLIEDHIDHDDTLRRKAARLRELKGAGPVLTATVLAYLPELGVIEDPQISALVGVAPFARDSGHSHRARHVRGGRGVVRHVLYMAAVAATQHNPVLRAFYARLVAAGKPKMVALIAVMRKMLHVLNRLLADPNFVLVR

SEQ ID NO: 493371 - protein, 368 aa, unidentified
MDIIAPGRGDIVVSVDTHKEQHVGVALDGLGARVGEISIPANAAGYAQLLTWNGTLGDVGIFAVKGTGSYGSGLARFLRRNGQRVAEVSRPARKGERRLLGKSDAIDAEHAAREVLTGKKLSTPKWADGIVEAIRLIKIARDSAVRAHSQAMITLKAVLVTADDELRAALEPLSDVRLVLACSELAGEAGTDTPTSASRYGLRALVCRGLALHEEIKSHSAHLRRLMKAAAPDLVAAFGIGPDIAAEMLVTAGDNAERLRSEAALAKLCGACPIPAGSGKTNGRHRLNRGGNRQANAALYRAVIVRMRWHPPTIAYVECHRAPKCGQSWALQNRPVRRGRNGAVSWPLRSSQSAAAGVRACGGSAPAT

SEQ ID NO: 493372 - protein, 396 aa, unidentified
MAIYIGFDVHSQQTTYYAIDQDQTVLRSGQIEMTELAYAAFAREMLMLDPLVEVAMETGTQCRWASQRLRENGLEPHVFHATEVAAYRPKKMQKNDMNDAKDMAHGLRNRLYRSEVYMPTDTENWMRKLCEERIGFVDIGTAEINKAKNILRGKGHPVPARLNTLKVWETLLEQYRGSELYLLLQVHYLTFRHAREMVDLLEEQMEKVRPKRKEEIELLETIPCVGKLTAFALVAAIGDVQRFSDSAKLSSYFGVVPSSYDSGNRRTTGTHITRTGPSYVRRLLCECAHQAMRSANPFSAYYYAVNRRSGNRKKSIVAVMHRVVRVAFQVLKTRQPFDAQKLRIFPELIGDNTRICWRMGVRPSGGEDAIPAPATPEPPERPLKIRKKKASEKGEN

SEQ ID NO: 493373 - protein, 342 aa, unidentified
MKFYCGIDLSARDCQVCVIDEQLKVLVQQKLGNELPKICRLLEPYKANLKIVVESTFNWYWLIDGLQAEGFEVVLAHTLGLYLITGAKVKTDRRDAYSLAKLLLVGAVPTAYIYPVETRPVRDLLRRRMHLVQVRAGEYGSLRRLLLRQGILSSKQQEIKTATEAELEQWFEHPLVRLHASQELRRIELYSQQIAELEKTILALAQTAPSYDRLLKLPGVGQTIALTILYEVGELTRFANPKVFSSYCRVVPGIAQSGSVSGRGRASKQGNHYLKAAFSQAAVHAVRCYPKVRRYYERQLKRHQGRGRRMICYNIIAHKLAQAAFHVLKEQIEYREELLFGP

SEQ ID NO: 493374 - protein, 322 aa, unidentified
MSQPNPLCVGIDVSKATLDIAASSDVAQFTVSNDSDGFNAIITGLRRHSVALVLMEATGGLEVAVACSLQAEGFEVAVVNPRQARDFACAMGYLAKTDRIDARVLTQMAEVINRHPERKRFIRALPDAERQALAAMVVRRRQLIAMLVAERNRLHPFHPQNKKSINTIIKALEDELVRLEKEMDSHIRNHFKEIAERLSSIKGVGTMTVSAMLAEIPELGTLSRREISALIGVAPVNRDSGTMRGRRTIFGGRAGVRSALYMAALVATRFNPVIKTFYVRLLAAGKAKKVALVACMRKLLTILNAMLRKNEEWDESYHHVAP

SEQ ID NO: 493375 - protein, 341 aa, unidentified
MKTPKQFVGIDVASLSFTAAVGKSPWQLVISPVEFANDFDSFPKFLHWLQKHNLQPDNAVLCMEATGVYSEALAYFVHANGYRISVEPPLKVKRAFHTSGHKSDAVDSCQIAEYACRFFDELTFWKPKADILEQIKVLLTTREQFSTQLTAHRNALKTLRRKVVVTPLAEQLHQDSIIQLKNHIKTIEEEIQRLIDRDPDFRQMARLLMSIPGVGLLLASQMLVIVQSSPEPVSAKTLAAYIGICPYEHLSGTSVFKRSSSRHYGPAAVRKLLYLAAMSVRTHHTQFREYFLRKVAEGKPKQLVLNNIANKLLKIMCAVIRTQTPYIPNYHSVNPLLLKKT

SEQ ID NO: 493376 - protein, 350 aa, unidentified
MVVVGADVHKHTHTFVAVDEVGRKLGEKTVKALTSGHAEAVMWARERFGAQVVWAIEDCRHLSARLERDLLTAGQQVVRVPPKLMAQARASARTRGKSDPIDALAVARGFLREPDLPVASHDKVSRELKLLVDRREVLVAQRTAMINRLRWRVHELDPERAPGPASLDRGKHRHLLGAWLATVPGLVAELARDELADITRLTEAINALAKRIGSRVRTVAPALLAMPGCAELTAAKLVGETAGVTRFKSEAAFARHAGVAPVPVWSGNTAGRVRMTRSGNRQLNAALHRIAITQIRLEGLGQTYYRHRLAAGDSNPEALRCLKRRLARIIFGHLHTDHQHRTQPCQTAAA

SEQ ID NO: 493377 - protein, 356 aa, unidentified
MEQIEPARSGHVVIGVDTHKHIHVAAVMDSIGGILASLTISTDTAGFRQLSEWAATFGKIIAFGIEGTGSYGAGLTSFIRRNGHKVIEVSRPDRRLRRLNGKSDTLDAENAARAVLAGFATAVPKTADGVVEMIRQLKVAHDTAVKDRTGAMVTLKAMLVHATEDLRRETAKKTQKMVARHCAALRPRGLATPEDANRHALRSIAKRWIALNDEIKELEAQIEQLVLQRAPHLLEEFGIGVDTAAEILIVAGDNPERIHSEAAFAKLAGISPVPTGSGMTSGKHRINHGGHRQLNAAIYRTVIVRMRFHEPTIAYVARRTAEGKSKRDIIRCLKRYVIREVYHLIKTDPKTGEIMS

SEQ ID NO: 493378 - protein, 353 aa, unidentified
MREAKQIDFNGQNIYTGIDVHKKSWQVSIYTEQFEHKTFTQPPVSKTLVSYLQRTFPGGKYHAAYEAGFSGFWAHDELTGLGVDCIVVHPGDVPTTDKERRHKTDPRDARKLAKQLRSGALEAIHVPSIRLREDRSLIRQRKTLRKEETRVKNRIKQFLHFRGVDIPVHFSNSYWSGSFIKWLEELSLYCGTGTATLSSLLRQLSSRRKELAYLSRDIRALSKTEAYRDRVKYLSSLSGIGALSAMIWLTELGDIHRFRDFDQLCSYVGLVPWEHSSGDHETTGGLDRRGNKVLRTLLIENAWVAVRKDPELMLAYSQYIKRMKGQQAIVRIARKLLRRIRFVLINEQVLEQV

SEQ ID NO: 493379 - protein, 344 aa, unidentified
MHIASVGIDLGKTTFHLVALGARGQVILRKKFSRQQLMVYTANLPHSLIGLEACSGAHFLGAALREQGHDVRLIPAQFVKPFLKSNKNDFLDAEAIAEAVTRENMRFVPIKTDEQLDLQALHRVRDRLVQRRTALVNQIRGFLLERGIVFSQGLVRLRNQMPAILEDAEQNLTPRLRHLLAHLWQEWKQLQAHIEAVSNDIESIAIADASCQRLQQIPGIGPLVATATVGAIGNGAAFHKGREFAAWLGLVPGQHSTGGKARLGGISKRGNSYLRRLFVHGARAVLLRVKYDTGGLGRWIQQLQARRPRNKVIVAIANKLARITWAVLAKAEAYRHPLLCAQAC

SEQ ID NO: 493380 - protein, 353 aa, unidentified
MHTHKKSSDAVATIGIDIGKNTFHLVGLDKRGAIVLRIKVSRNQLERRLANVPRCLVGLEAGCGSHHIARQIRVLGHDVRLIPAQYVKPFLKGHKNDYRDAEAIAEAVQRPTMNFVAIKTPEQSDLLSLHRVRSRLVGRRTAVINQIRGFLIERGITVRQGPGPLRKALPEILSSPTEVLSPRMVRLIADLSEDWRRLDERIDAVSAEIETLAENDGGCQRLMTVPGVGPIISSAMVAAIGNGGGFRQGRDFGAWLGLVPKQESTGDRTKLGKISKRGNRYLRTLFVQAAHVVLIRRPAAAMRGLWPWIERAAKRLAHRNLLAIALANKLARIAWAVLARGRDYEPRITINAA

SEQ ID NO: 493381 - protein, 342 aa, unidentified
MHNPDVCGLDVSAKELVVMVRRDSKGEPHRSFPNTPKGHQELRRYLTRQRERVRVCMESTGLYGLDAALALQADSRIELMVANPRAVKDFSRALLQRSKTDPLDAWVLLEYAARMPFQRWQPPPAQALQVTALARRIHALTQQCTMEKNRLHAVETTATTLRVIVQDLRRSVRSLETAIARLSRAAHKILAATPELERRFLLLQSTPGIGPVSALQLLGELVLIPANCDVRQWVAYAGLDPRHYESGTSVHQKTRISKIGNRHIRRALYMPALTAARFAPPVRAFYLHLQARGKCKMVALVAVMRKLLHAIFGMFKYDAPFDGARFCPALSPVPAPEVACAA

SEQ ID NO: 493382 - protein, 468 aa, unidentified
MRLRLGIDVACKAAHQVSCTDETGKFLFSGRRFRSTVDDLEKLWASLPAADEVLVVLEPTRNAWVPLAAWLRARGAKVALVPPEQSADLRDYYQKHTKNDRLDSRMLARLPLLHPEGLRVLGDHGLGPAEPLRRATRRRRSLVKRRTATYARIDALLELLGPHFADALSGGEYNKTALTLLERTGGDPHAVKRLGRKRLTALLVRASRGQWRDEHADRILHAAEQSLQLWAAGGLDFTELAADLSGEARLALQLSTEIDSLDDRIDVLYDDADPAGLLTSAPGLGVTSAATILAGLGDPDRFTTLAGVRSFTGLVPKLDESGTSSRYGPPTKAGDPALREALFNAADRARKIDPTLAARYHRLVTQAGKHHNSALCTLAAVLVTRLAACWRNRTGYQLHDINGQPITAAEGRTICATRYQVTHTDRAKNRSQRAAQRQKQGTGQRSKESRSAPAAGPSPNNTNHPTAA

SEQ ID NO: 493383 - protein, 375 aa, unidentified
MKDVQKFVGLDVSKDTIAVAIADLGRGEPRFHSTIQNKPETIRKLMKKLGNPGDLLVCYEAGSSGYGIYRLLLSMDIECMVVAPTLIPKRSGDRVKTDKRDSIRLAQLLRAGELTSVWVPDEDHEALRDLIRARHDAREDLQSSRQRLVHFLLRHEIRPSQGVRNWSVKHREWLNRLTFERASQRIVFQEYLHAIREVEDRMKRIEAQIHEEALQSEHAPVIQALQTLRGVAEITAVTLVAEIGQFSRFSSPRQLMSYAGLVPKEYSSGSNRWQGSITKTGNSQIRRSIVEVCWSYRHRPSLKGELLKRQEGQDPEAQRIAWKAQHRLHMKYHRITAKGKGGKLAVVAVARELLGFIWAIGCVIESKQVSESTVA

SEQ ID NO: 493384 - protein, 367 aa, unidentified
MSDLLPVVGIDVSKATLDVHWGSEKGKRFQARFSNDACGLEQLEAWIIQHQVSQVHCSLEATATYSDAVATFCFAQGHRVSVIAPHKLHAFRSSEGILSKTDQIDAWLLSCYGEQKRPAAWHPVSASAQQLKRDLDRLDEVKAMHRQEKNRLENQRLDAQARERIQAHLRWLEEEIVSWNVLLETRFAQAYEQEHHAPPVSVPPQGTPKTPTKQSQNKLMQIPPLDTFMQLVGLGRLSALRMYAVFATVQEVTSCQQMASYFGVVPHQHESGTSVKGKTRRRGGNQQARAWLYMCAISSQRFDPDMKQWAQELQARGLCKKAVIVAVMHKLVRILFGLFTTNAPYDATKAFPAHYLQAAAKEGALAA

SEQ ID NO: 493385 - protein, 342 aa, unidentified
MAKIIGCDFHPRFQQIAFLEQETGEFGERRLSHPEEAERFYRSLAGHAVRIGVEATGNLGWFQRLMQELGHEVLLGDATEIRASNPRKQKTDKRDARHILSLLVQDRFPAIWQPPVENDEMRQLLLHRCRMVRMRTRIKNQLDGMAKNEGWLSPRVWSPRRREQIEGLPLTGWRAERRRDLVALLEDLNRRIGPLDEAVRAAAEANGEARLLMTHPGVGPVVSLAYVLVIGDWRRFARGKQVGSYLGLIPVEESSGSKRRLGQVSKQGNSLVRWLLVEAAATAQRYDASWHRQYVRLSMTKHHGVAKVAIAHKLAVRLYWMLRSGENYEQVVERGSHAGRSE

SEQ ID NO: 493386 - protein, 376 aa, unidentified
MENDSTLYVGLDVHKDSITVAYALGTGEVELLGKIGTTKTDIDRLCKRLQSKARHIVIVYEAGPCGYGLYRQLVQKGFDCMVCAPSLIPKKPGERVKTDRRDAVKLVRSLRAGDLSAVYVPSVEDEAFRDLARAWVSAKDDLKRARQRLKGFLLSHGVRYMGRADWGPAHRRWVSTYAFESSWQQLAFEEYRRTIEDRLAQCDRLEAALRDAVVNWRFYPAVLGLQTMRGVQFTTAVGMLAELGDLSRFAHPRQLMGWLGVTPSEHSSGEKRRQGSITKNGNSYARKLLVEAAWSYQHPARESPGIQRRHDGIPKPIVDRAWDAQLRLCRRFRKLITRGKQKNIAVVAVARELAGFIWDISRLAMSLAIPCEPLTT

SEQ ID NO: 493387 - protein, 366 aa, unidentified
MRKPSTTALRRRGKLQGEQPTIGLDMGDRSSFYCVLNGAGEVILEAKVATNPAAMRKTFEKMPSSRIALETGTHSPWLSRLLTELGHEAIVAHARNVRLIGESRRKDDRLDAQALARLARIDPKLLSPIQHRSAQAQADLSVIRARYALVRARTALVCAARGLTKSFGERIRGRNPKGFSPATSEALSPPLQIALAPLLSALEAITARIRDYDAQIEKLAEETYPETALLKQVKGVGTLIALTYVLTLEDPRRFRKSRDAGCFVGLQPGRRNSGQSEPQMHITREGDSYLRMVLVQGAQHIIGPFGEDSDLRRWGLKLAERGGKRGKRRAIIAVARKLAVLLHHLWISCEAYEPLHNTQKRRLAAA

SEQ ID NO: 493388 - protein, 391 aa, unidentified
MIFVGIDVAKDKHDCFILNSEGTVLADVFTIANNRIGFETLLSRIQSCSQGESKIKVGLEATGHYSYNLLGFLLDSGLATYVINPLHTNLYRKSLSLRRTKTDRIDARTIAMMLMSDVDLKSYSNTAYHNEELKSLTRYRFDKVKERAKLKSSVARLVNILFPELEKLVSSLHIAVVYALLSNYPGASYIANANTEELAETLCTASKGRYTKSKTAEIQVAAGVSIGSKMPAKSMELKHTIALIRELDKEISEVESAIDKITSQMDSPIFTIPGIGRHMGAMILAEVGDFSNFASADKRLAYAGLSPSTYQSGQLQNCYAHMEKRGSRYLRYALFNAAKYVCLWCPTFSAYLEKKRSEGKHYNVAISHAAKKLVRLIFAMQRSGKAFLADY

SEQ ID NO: 493389 - protein, 341 aa, unidentified
MGEVSTVGLDIAKSIFQAHGADASGAVVFRKKLGRGRLLAFFAALPPCVVAMEACGGAHHWGRELTKLGHTVRLIAPAYVKPFVKRQKNDMADAEAICEAAQRPSMRFVPLKDEAQQASGVVFRARDLLVRQRTQTINALRGHLAEYGWVVPKGVPHVERLIARIEDPAEALPAGARPILQVLVATLRGLDQQIAVLDAEIALRARQDPVARRLMTIPGIGPITATAILALAPSPQAFKGGRHFAAWLGLTPRQRSTGGQQKLGSISKMGERTLRRLLTIGASAVVKQAVVRGAPAGSWLAQMLARKPKMLVIVALANKSARVVWALLTSGEDYRTPAAAA

SEQ ID NO: 493390 - protein, 412 aa, unidentified
MQDILTTAMGLDVHRDIIVACLLKGSLDVTPEPEIRTFSTLIPEMQKLRDWVLESGCHNVAMESTGIYWQPIYEMLEPCFDGEINILVVNARHMKNVPGRKTDIRDAEWIATLLRAGLLRGSFIPAKPIRELRHLTRYRKSIVHDITAQKNRIDKFLQSSGFRFTAFLSDAFGASGRNIIRHLIEHGSIDRNGLDKCLKTKTRNRIDEILVALNGSLSAHQRAFLQMIFSHLLTLEAHKTAIEDAIVEEILKHEEALNLLCSIPGIDITAAASIIAEIGTDMSPFQDSQHLCSWAGLSPGNNESAGKRKSVHINKGNPYIKSMLCEVGWIISGKRKLYLSGWYWRVKQRKGAKRATVALARKLLSLIYTMLKTGTPYNENCFEERRKHCERKRAGRMINELEKLGYTVTAPA

SEQ ID NO: 493391 - protein, 481 aa, unidentified
MAKKSGQPVKPAASSAAPVSPSSRTRRVPAPRFSARFPQEDLHVINRHAAGIDLSGRNGHFLAVEVSETELEVLEVGGMTPDLVQWIPYLLDHGVTTAAMEATSIYWMPVADALEHVGIEVNLVNPCHAKNVPGRPKDDKLDARWLQKLHKYGLLTASFRPSEEIRPLQSMWRQRTYLVRRCADAIRHQQKALDQMNLHPHQVLSDLDGVTGQLIVRAILDGERDPARLAAFRDKRCACSEEELQAAMTGFYQDHLVFALKQAYERYQFYHQQIAEIDAQIETLLTTLIPQEPEAIQEAVAHDKHPLPHGKHAPAFNVTALLVMILGVDPTMLPGIAAQIALGLFAELGADLTRWATDRRFGAFLGIAPVKRISGGKVLSSKTRPGIHPAGVLFLQAAAAVAKTDTALGAFYRRLAIRIGKPKALTATAYKIARMYYHLLCDGQEYVELGVQQYEERYQARQLALLRKKAKSMGFELTPAA

SEQ ID NO: 493392 - protein, 354 aa, unidentified
MSQKLNAVIAVIGIDIGKNSFHIVGHDHRGAIVLRQKWSRGQVEARLANLPPCLIGMEACVGAHHLSRKLQMLGHDARLMPAKYVRPYSKGQKNDFRDAEAIAEAVQRPTMKFVATKTADQLDLQALHRVRDRLVGQRTGVINQIRAFLLERGIAVRQGLHSLRSELPGILATRTDVLLPRMLRIIEDLAGDWRRLDARIEGLSSEIETLARQDQACERLMTVPGIGPLISSAMVAAIGTGEVFSKGRDFGAWLGLVPKQISTGDRTILGKISRRGNRYLRALFVQAAWVVLVKVKCWERYGLKSWIEAAKKRLHHNVLAIALANKLARIAWAVLNKGRAFECVKTAETASRPA

SEQ ID NO: 493393 - protein, 411 aa, unidentified
MQRVIGMDIHRTFAEVVFWEAGRLRSGGRVDMTRSGLEGFGRSLSKEDEVVVEATGNAMAVVRVLSPYVARVIIANPLQVKAIAHAHVKTDKIDAGVLASLRAAGFLPEVWVPDADTECLRRLVSRRNQVVRHRTRIKNEVHAILQAHLIPPCPHADLFGRLGRSWLGRQGLPVDERAAIERHLRELDRLGEDLELLDREIAERVIEDPSVKRLLTITGVNIIVAAGLFAAIGDIRRFSSPQKLVSYVGLNPRVRQSGLGLAQHGRISKRGRSHARAMLVEAAWAASKAPGPLRSFFLRIRARRGHQVAAVAVARKLAVLCWHLLTKDADYQWARPALVANKIRAMQLQAGQPARKGNKRGAAYAYNIKELRNREIDVARHAEHAYEQFVRRWQPRGPGKRRTGAANEERR

SEQ ID NO: 493394 - protein, 323 aa, unidentified
MKIVYPICCGVDVHKTFLVATIITSQGITPHYSKKRFSTFNNSILQFKQWLIDNNCLDVCMESTGKYWIPVFNLLEDTIRITVANPKWVKAIKGNKDDTKDSKWIGDLFRLGLVPGSYIPDKPIRILREYTRYRSKLVSCKSSEKNRFQNAFTVCNVALDAVVSDMFGKSASSITDYLISSDSFDPEYCSSLLQKSLKKKADDVIESIEGYQMSKEQKERMVMVRSHLEFVQQSITKLDEKLNKMVVPYDSAIELICTIPGVDRTSAITIISEIGTDMSQFANSKRLCCWAGLTPGNNESAGKKKSVKISRAGVYLKPALVQV

SEQ ID NO: 493395 - protein, 335 aa, unidentified
MKNYELFAGIDVSKLKLDISLIQPSNPNDSNHIVIANTAKGLLELLNRLKKLKIDLNRVLFSFEDTGVYSMPLCYFLSKRELDYWMIPAIEIKRSKGITRGKTDKADSKDIALYALTHQHKLKLGSLPDETLQEIRLLYTEREKLIKAIHLFERTTENIDYLPKKLMADLLKNNASTIRKLKTNLKKLDKKIQELLSQNGDLKEKDRLIQSIPGVGPQTSIYLLLVTRGFNSFENSRQLACYGGVAPFEYSSGSSVRGRTKVSNLADKKLKSLLNMCALNAKAWDHEIKQYYDRKVKEGKPKMLILNNIRNKILGRVFAVINRGTPYVNIRKFAA

SEQ ID NO: 493396 - protein, 426 aa, unidentified
MNCTQNYKIDQVTEQTLVVGIDIAKRTHYACFVDDRGRVLRKSFPIFQSKEGFQQLYKAIQGAMQAFGKSEVIVAVEPTGHYWLNLAYFLEEHGIPLVMVNPAHVCRSKELDDNLPTKHDAKDALVIARLAKDGRFLVPRLLHEIEADLRVGSTLKEKLRKEQTAVKNAIVRWTDRYFPEFWTVFRDLGKTALSVLEWTPLPADMAGRTVEELLEVYRQSEGMKCPQKAKIQALINTAKDSIGVTEGATMARFEIAALVRRYRQLEAEIAALDAELKALVQTTMEYQWLKTVDGLGDATIIDLLAEIGSFAHYRDPRQLVKLAGLTLKENSSGQRKGQKHISKRGRKRLRSVLFRAMIPLIRHNEAFRELHEYYTTRSVNPLTGKQSIVALCRKLLNVLFAICTKKQAFDAERMKQDVLSQVQRAA

SEQ ID NO: 493397 - protein, 374 aa, unidentified
MNEEVYLKVWSLTDFRHHSAQYGMHKAPSDWRLHSMKYTPVGVDIAKHLIQVHFINEHTGEVVDKQLQRQDFLTFFSNRESCLIGMEACGGSQHWARELQKLGHKVRLMQGRFVKAFVMGNKNDVMDARAIWMAVQQPGKAIAVKTEEQQSVLVLHRSRRQLVKFRTAQINALHGTLLEFGETIHKGRSAMDRELPAALERLKTKLPPYLITVLEDQYHRLNELDILIDGFEKQLISVARQNETCKRLMDIPGVGPLIATAAIATMGEASAFKSGREFAAYVGLVPKQTGSGGKVRLLGISKRGDTYLRTLFIHGARAASLRAKEPGPWITELKKRRPAGVAIMAMANKLARTIWAIAAHERQYDKNHVSIRPY

SEQ ID NO: 493398 - protein, 313 aa, unidentified
MDTNYFVGIDVAKDHFDIHILPDNTAFQTGSAAEDIAKLIVKLKKLSVKLIVIEATGGYETQLAAELQANDLSTAVVNPRRTRLFTSATGRLAKTDRIDAKALALFAQKLQPPARPIGDENTLKVKAIVARRRQLIRMRTAELNRMHQAKNKGIRQSIQMILDLIKQQIKDMDDQLGLAIAESSQWTKKAELLKSVPGVGDVICNTLLAELPELGELNRRAIAALVGVAPMNCDSGKFRGYRRIRGGRTPVRNALYMATLVAIRHNPKIRTYYQRLVESGKKKIVALVAAMRKLLIILNIMLQRNQPWQPELC

SEQ ID NO: 493399 - protein, 349 aa, unidentified
MLADEVDYVLGVDTHRDEHVMAVVTAPTGAVVAGAATAANAYGYRELLRVAEQHAPGRRAWAIEGTGSYGAGLSRYLHARGETVLEVSRIPRGERRLRGKDDALDAARTARAALASDTLALPRRGERREALRLLLVARRSAVDVRREALTQLRAVIVTAPERLRQELCRLPEGKLLDRCSRFRRTNSAGADELATRIVLRSLARRVRTATVEADELEREILAHVRALAPTLLDEPGVGPIVAAQLIVAWSHHGRLRSEACFARLAGVAPVPASSGQTTRHRLSRGGDRQLNRALHTIVLHRRHHDPTTRDYIARRIAEGKSRRDATRLLKRYLARHLYRLLQQQEPMMT

SEQ ID NO: 493400 - protein, 333 aa, unidentified
MEHIAIDLGGRKSRICVRDNQGTIVEEHTCLTRQLGRYLEMRPFSRVVLETCSEAFAVADQAIQIGHEVRVVPATLVKSLGVGSRRVKTDKKDAQVLSEVSSRIDLPSVHIPSAQSREWKALCSARDSLVRSRTKLINHTRGWLRTQLAQVRSGGVQSFPERVEEKLLSRPEGMPAYIDRELHSIKTLNEQIAEADNELRQIAAQDARCRNLMTVPGVGPVTSLRFVATIDEVSRFRGAHGLQSYLGLTPGENSSSMRERKISITKAGSPAMRWLLVQAAWCAWRTRPDDPMVRWAKQVGKRRGTQIGVIALSRKLGGILYAILRRWKARGAT

SEQ ID NO: 493401 - protein, 343 aa, unidentified
MYYVGIDFHKKFSYGTVMDKEGQIKQQCQIANHPDSVKNFINSLDDKSTVVLEATRNWTLMYDWLEDVCEEVKLAHPLKVKVIAEAKVKTDKIDSKVLADLLRTNYLPEAYIPSREARDTRAILRQRMFFVRIQTMMKNRIRTILDRYPEIERKTAEVFTGKGIEWLKGIKIKETDRQIINEDISFLEKVRERIKASDKLIEDLFEKDDRCKRLETIPGIGKFISVLLVSEIDKVERFRDEKKLHAYCGLVPSTYQSGERTIHGRITKQGNKYLRWAMIEAVWPAIRSDLELRNYYERLKKEKGPNRAKVATAKRLLTIVYKVLKDNRNYLVRGCPDIIMAVR

SEQ ID NO: 493402 - protein, 391 aa, unidentified
MVCVGIDVAKDKHDCCILDSDGMVRADCFTIPNNMDGFKQLLQTIRNCTKKSDKIKVGLEATGHYSYNILGFLLDKDLAVYVMNPLHTNLYRKSLSLRKTKTDRVDARTIATMLLSDVDLKSYTDIAYHNEELKSLTRYRFDKVQECAKLKQSVSRLATILFPELEGLVSSIHGTSIYALLGEYPGAKQISEVHLTKLTNLLTTASKGRYGKEKAIQIREAARASIGSVMPAKSLELKHTIKLIQELASEINEIEDSIQKIIDELNPPILSIPGMGVNSAAVILAEIGDFSNFSSPDKILAYAGCSPSTYQSGKLTNCYAHMEKRGSRYLRHALYNATKYVCYWNPVFAEYLAKKRAEGKHYNVALSHAMKKLVRLIYALQKSGKAYLAAA

SEQ ID NO: 493403 - protein, 338 aa, unidentified
MKAGDLAGLFDRFAELQRKALARTGKIYPLVVIEEAGLDGFWIHRALEKEGIESHVVDAASIATSRRRRRAKTDRIDGEALLRTLMAFKRGEPRVCAMAKPPSVEDEDRRRLGRERKTLLGERVQHVNRIKGLLFAQGVGEYEPLRRDRRRRLDELRTGFGAPLPVHVKAQIARELDRLELLLDQIKTVEAARDAWLAEGSEEGGAAARLADLRGIGQEFAATLWLEAFFRRFDNRRQVAAYAGLAPTPWRSGKIDREQGTSKAGNARLRTTLIQLAWLWRLHQPRSALTLWFEERVRATGGRTKKTMIVALARKLLVALWKYVTAGVVPEGAAMKAA

SEQ ID NO: 493404 - protein, 365 aa, unidentified
MTTRQHSTSSSTDPPVRREVVLGVDTHGEVHVAAVISPLGKVLGTASFPATAAGYRQLLVWARKRGTVRRAGVEGTGTFGAGLARYLLAQQVEVYEVNRPDRSARRLLGKSDPPDAQAAARAVLSGRARARAKSGDGPVHSARMFKLAKDSAVKARTQAINQLKAVLVIADPALRERLSSLGNRELFRTCARLGPGDGEDGENAVAQATHMTLRMLAERIEQLTGQIDELNQRLTRLVEHHAPQLLVPVGIGPDSAVTLLITMGDNPERLNTEASFAALCGVSPVEYSSGRRITRRLNHGGDRQANAALHRIVFTRLRHDPRTQAYYERRTQEGKTRREIIRCLKRYAAREVFSLVRPVSRTPVL

SEQ ID NO: 493405 - protein, 460 aa, unidentified
MQRKGTQAHDTSSLPIIHTNAAGLDIGSTEIWVAVPADRTPEPVCIFGTFTPDLYALADWLTACHIDTVAMEATGVYWIPIFEILEARGFDVQVINARHVKSVPGRKSDIKDCQWIQRLHSCGLLSGSFRPAAEMRVLRAYLRHRATLLEHRAAHIQHMQKALQQMNLVLTNVLKDITGVTGLAIIRAIVSGEHDPHRLAALRNGNCASSEADIAKALTGNYRKEHLFALKQALALYDFYTTQVSACDSEVEQLFVELTPPTTDDLPPLDQHDKRNTRSKNAPAYDARTLLYRLAGVDLVAISGLNASTVQTIVSEVGLDMDKWRSEKHFCSWLGLAPHNDISGGKVLRSRTLKNRNRAGQAFRMAAQSVGRSPNSAFGAFFRRLRARLGPQKAIVATAHKIARTFYHMLKDRTPFHDLGPQEYEKRAQQRELAYLQKRAAKLGFALTPTPIVPALAASF

SEQ ID NO: 493406 - protein, 373 aa, unidentified
MRDDTSWAGLDVHQEQIVVAVLRGKHREAEEFQVRHDKRGVGKLVRRLRELGGGSLQCAYEAGPCGYQLQRRLRAEGIECAVIAPSLTPVKPGERIKTDRRDARKLAEHLRAGLLTEVAAPSEAEEAARDLCRCREDAREDLMRSRHRLSKMLLRRGLVYREGNNWTHKHRRWLLALAWEHESEGIVFGDYLRAVEHLEERLKGLDAALQQLAEQDPYREPVGWLRCFRGIDTITAMTLVTELFDIARFGSPRQLMSYLGLVPSEHSSGGTRRQGSITKSGNRHVRRALVSAAWHYRHRPAVGIALRKRREGQPAAMVSLADRAQQRLHRRFMRLQLAHNKPSQVAVVAVARELVGFVWAALMYPSQRATMTG

SEQ ID NO: 493407 - protein, 354 aa, unidentified
MTSSALADIAVIGIDIGKNTFHAIGLNQRGAIVLRQKWSRRQLADRLANLPPCLIGMEACVGGHHLARQCVALGHEARLMPAKYVKPYSKGQKNDFRDAEAIAEAVQRPTMRFVAIKSIDQLDLQALHRVRQRLVSQRTCIINQIRAFFLERGIAVRQGAHCLRTELPILLASRQDALSPRMLRMIEDLAADWRGLDARIDAVTEEIAALARQDAGAERLMSLPGIGPIISSAIVAAIGAGEVFSKGRDFAAWLGLVPKQISTGDRTILGSISKRGNRYLRVLFVQAAWVVLVKPQIWERHGLKSWIEAGKKRLHRNVLAIALANKLARIAWAVLAKGRGFAAQRTSDAAAQPA

SEQ ID NO: 493408 - protein, 402 aa, unidentified
MAYDCVIGMDVGKYFHHACVLDPQDRQVLSKRINQHEGSLRKLFGTYLADNASVLVVVDQPNNIGRLTVAVAQAMGADVRYLPGLAMRQLSRIHVGNSKTDVRDAYVIAHAGLNLPDALRSVDRVEEVFLQLKVLNGIDEDLARAYTRLINQMRSALVGTYPAFEHVLHGQMIHRKWILHLLAKYGGPTKIRRIGKARLAAFARGHRARNPEPVIDAMLAAIHSQTVSIAGAEYAELGVAMSAKDALAKLEHRKEIEAQVLELIQDIPQTEILLSMPGIGPRSAAQILMTVGDMSDFPNAAHLASYAGLSPRTNQSGTSIMSNSPNRAGNKKLKNALWQSSFASIRFHERSRQFYERKRKEGKRHNAAVVALARRRLNVLFAMMRSGELYRDISTVQEAAAA

SEQ ID NO: 493409 - protein, 368 aa, unidentified
MLSDTSTPVTASLSNDLSGATEIKNHILDLNHTYHFERIVIGMEATSLYSFHPAMFFHEDSQLKELHVEIMVEQPNKIKKYRDAFEENKNDTIDAFYIADYFRIERFSPSFLKEEKYMALQHLTRTRLQIIEQLTRTKQHFIENIYYKCNTLAYQFKKEELSTNLWSSTMMTLMTDEMTLDELANMPLQELADWLQQNSVNVILGLLAREIRNLEKMIKEIDKAIEDMVETIPEYQCLTSIPGVGKVYAAGIIAEIGQIERFKDHPQVAKFAGLNWREKQSGNSNSQHTSLVNRGNRYLRYYLVEAANSVRRYDDEYKDFYKKKYHEVPKHQHKRAIVLTARKFVRLVVVLLRNHQLYTPPRRLMEDN

SEQ ID NO: 493410 - protein, 374 aa, unidentified
MLAVGIDVSKSKSTVAIIRSDGTVLSKPHDFSHTISDITQLTALIHSYQEETKVALESTGHYHYPILKALLEAGFTVFVINPFLVKKFMDNSIRKGKTDKKDAVRIAHFVLEKSYQLRPYSPTDQKYEDLKFLSRQYSQSVSMKVKARVQLSNLLDEIMPGIQNIIPISSRYLENTLFFDFVEKYQSYEKISQMGEKRFVNSYIAFAQKHRCRGSQKKALAIYQAASDGIITRSPDVTTSLALSQCLLMLKQASSSADLILRQMQSIAYTMPEYSIVRSMYGVGDRLAPILIAEIGDVRRFTSAKALNAYAGNDAPPYQSGQFEGTNRHISKRGSATCVKPAMRSCTHSRYISPRMTLFTSSSSRKNLKVSTRL

SEQ ID NO: 493411 - protein, 440 aa, unidentified
MRVTHPSTAGIDIGKDLMQVSVPEDRSEKSNRSFGSFTKDLKEIISWLRECRIERVVMESTGIYWIPLFLQLQEAGFEAILVNAKEVKNMSGRKTDVNDADWLRFLGSCNLIRPCFQIAAVSRRLREYHRIHASKVRDMARELQHMQKAMGSMNIKLDSVISDIAGKSGMSIMRAMLNGERNPATLASLTDPHCKNDKATIEAALQGTWDIEHMLALRMAMETYDHLQTQIVRIEKEMEIFLDSYELTPVPSVKASDINDNRSGKRKQSKNPIHFDVELYSFLMYGVNLMRIPGVSDSTLITLMCELGPDFTSKFKTPGKFCRWCNLTPVDNVTGGMVTSSKVPKKPNPVGQALRQAASTLRKSDTPLGQYRRRMAARLGPAQAVVATAHKIAEIIYLMVERKVEYDESKTSQSESELTQKRIRFLEKKLSKLKSAQNTL

SEQ ID NO: 493412 - protein, 424 aa, unidentified
MNCTQNERINQVSEQTLVIGVDIASELNYARAFNWRGIEKGKVFKFFNNLEGFQAFNKWAHQVMSANKLTNLIVAAEPTGHYWFGLADYLKDEKLKLVLVNPFHVNRAKELDDNHPSKTDAKDPKTIAKLVIEGRYMEPYIPEGVYADLRIMYNCRQKVTKAMISLENQLKRWFRIYFPEYLSVFGNLSGQGSMAVLEKAVLPEDIISLGVDGINKLWRERKLRAVGMKRAESLYEAAVKSIGRREGSVGGRAEFRMLWEDYCHKMEQMEKLNIELESLLHKVPQAEEVLKMKGIGVVSVAGFFAEVGDLRHFESPKQIQKLAGLAIRENSSGKHKGQTTISKRGRARLRAVLFNAAIALVGRNGAFKSIHEYYIGRKANPLKKKQSIVAVSCKLIRIIYAICRHKEAYDEAKMLRDIRREQLA

SEQ ID NO: 493413 - protein, 325 aa, unidentified
MKKLYAGLDIHKEKLAGCIMDKDGNITREHTFPSSKKAMERFLDGIPSSDITIVIEACGLWRGIHTILTDMGYNVRLANPKKTHDIACKKKTDKVDARILADLLRTNYLPEVWIPDEQTLQFRDLTRHKATLTRLKTQVQGRIRGYLLRKVAKYGKLSKEETLSTLAEQDPDIKNLVQVYHSIKQEEKEVMRRIKRMAQNMKQTTMLMTMPGIAEFSSLMILAEIGDIRRFKSPKELVSYAGLCRGIYQSASTERSVRNTAVNKWLKWILYECSGRAIMLDPRFQKYFYAVQKRKGEKTARRASARKMLTIIWYMLTNKEIYRAS

SEQ ID NO: 493414 - protein, 408 aa, unidentified
MNTLYVGIDVSSKSNVVYLMLPNGDKHSNFSVANSHEGSTQLVKRILSALTSHSLDTVLIGLEATSVYGDNLVYFLREDATLAPFNRKIHVLNPKQVKKFHDAYNDLPKNDYVDSFVIADCLRFGRINKEVYLGDYRYKALQNLTRARFFAVQNLIKEKQRFMNVLFKKYSTMTQEKVFSDTFSTTALAVYDEFDSAEALANMDLHELTDFIIEKGKNRFPDPDAVAKAIQKAARSSYRLPKTVNDSVNQVLSISITSMKALESQIKEFDKAIKAQMELLPNVLISIPGIGPVYSAGIMAEIGDINRFDNQAALAKYAGLAWKQHQSGSFEAEVTRLIPSGNRFLKYYLYEAAFSLVRCDKEYSDFYHLKYKEVNRCQHKRALALTARKFVRLVFRLLKDNRLYVPAK

SEQ ID NO: 493415 - protein, 308 aa, unidentified
MKYSGIDLHSNNAVVAVIDDRDRVLYCKRLANDLQLIVAALEPYRDELQGVVVESTFNWYWLVDGLMADGFAVHLANTAAIKQYEGLKYSGDEHDAVFLAHIFRLGLLPEGYIYPSHERALRDLARKRMQLVQQRTLNILSIKSLLARQLNLRINGEHVQRLDDAAVRALVLPPHVERALMANLAVLHTLCTEIQALEAILHKEVKLRPQFDILRSAPGIGNILAATIMLETGTIARFASVGHFSSYCRCVDSKRISNGKKRAKAMHAMATVTLPGHSSRPPLERCAAVHRPGVSMTAKSQSACPSWL

SEQ ID NO: 493416 - protein, 346 aa, unidentified
MMIIGCDFHPSWQQVSWVDTETGECGERKLVHATGDAKMFYQQLRAPALMGMEATGNSQWFLELVEDLGHEIWIGDAAQIRASYVRKQKTDKRDAAHILKLMVEGRFPRLWTPDREQRDLRQLVLHRHKLVEIRSRVKNELQHLAMNKGMQKKATLWSQAGQKMLRELPLKPWASCRREDLLGLLQMLNQQVGTLDGAVQKAAEQHAQARLLMTQPGVGPNTALAYVLTIGEVTRFRRGKQVASYLGLIPREESSGGRQKLGAISKQGNRLLRSLLVEAAQIAVRFDPGFRKQYLHRCHQKPKGVAKVAAARRLAVRLYWMLRTETAYPEIVRIESSPRVPRVGAS

SEQ ID NO: 493417 - protein, 430 aa, unidentified
MKSNTQNAKIEAITEKTLVLGIDVGSETHYARAFDYRGIEYSKKPFKFSNTEAGFVTFKEWILDIKERHEKDKVVLGMEPTGHYWFNLGKFLQDNEMKPVLVNPHHVKKSKELDDNNPTKNDRKDPKVIAGLVREGRYMIPYLPDGIDADLRTASNIRFQLQAELTRIQNRISRWFNIYFPEYKTVYGKPDAKSGILILKAAPLPEDILTLGIDGVNQIWRDAKLRAVGKARAKTLIEAAEHSVGSKEGAVSARMEIRMLLEDYESRNIRLQEVMALIEGLVKQIPMAEKLLEIKGVGIRTVSGFLAEVGDISRFNNPKELQKLAGLALVENSSGKHKGETTISRRGRKRLRYLLFEVAMSLVAKNPEFRELHNYYTTRRLNPLKKMQSLMAIAAKLIRVFYAMLTKGVDYDPKKMVNDIKRPAVYLQAA

SEQ ID NO: 493418 - protein, 424 aa, unidentified
MLAVGIDWAESFHDVALGRPGAGVIEQFRIDHTAKGVDGLVERCLRLEADPSEVRVVLETRHGLLVEALVDAGFTVLPVNPDLVARRRGPAKKKDDAEDARICCLLALDQFIELRKLIPHGDIAGELRAIARDDERAARDERRLLNRLRADLITCFPAGLALAGEDLGSPIVLKLLARWPSHDQLAAVSGHEIEAFARAAQHGWPAKFAARVTDALAREQLPAKDYLVRAKTTTIALTATQLLALRQARKEWERRMGELLLGSPRYGRAKLPKDPDPGKAIPGGEIYLSFPGLGDRLAARIAGEIGDHIEQFDTPGGLQCYAGTAPVTRRSGRSEFVVARRLAHNRYLGTAVHQWAFCSLKWSGWARQFYDAKIAAKKGHHSALRALANRWLEILWHCLTKNVRYDEKVHLRNRERALNALSAA

SEQ ID NO: 493419 - protein, 413 aa, unidentified
MSSTLIVGIDISSELNAASFIDEAGNRLVKKALFFPNDLDGAQQLIDFTISLAQQFNISSIKFGMEATSHYAWHLHTFLASSPELAPFNPLFYVINPSIIKSFKGAYIHLPKTDSVDATVIAECVRFGQVKPTPLPDLRYAALQRLTRMRYHIVRSLVREKNRALNLISFKFSTYPSECPFSNIFGKASLAIIENFTPDDIASMPLDNLIDFIVKNGNNRLSDPTQIAKTLKAAANRAYRLHPDLAEANDLALSMTLENIRFLESQLKKLDGEISRQLKAFNQTLTTIPGIGDVLAAGIIAEIGDIKRFNNEAALAKYAGLIWNKYQSGNFNAQDTSLVKCGDQYLRYYLVEAANCVRVHTVRFKEYYNKKYREVPKHQHKRALVLTARRLIPLIFAMLSKGQIYQERGAVSI

SEQ ID NO: 493420 - protein, 453 aa, unidentified
MELDIINPNAAGIDVGSRSHYVAVGQSLEDVKEFGVYAEDLTALCLWLLSYGVNSVAMESTGDYWQNLYAELMKHSINVVLCNGKFTKHAKGKKTDVQDCIHIQKLHALGLLTSSFLPDETTEKLRTYCRQRSNLISSAAGTSRKMQKYLKFLNFRLDVVVKDVCGLTGLAIIEDICKGNLDPEALAEHRHYNCRKSKAEIAKALHGNNREDFLFGLKQEYQAYQFFKKQIEVCDREIDKFIKQELKKSPEKTKLKTTDKPYKRQNKNAISIKNFNQIAFQYFGGVDLMAIEGLSHSTILSVMSELGPAGFYKFGTSKQFVSWARLAPNNKISGGKVLSSKIPKGSNRIKIALRQAANAIGNLKDTHLSDFFRRVAFRKGRQAAVSATARKLGVIIWTMVTKQVPYNPPNEYLFLDQKRKQKIVSRIKKNITKFDIKPEDVGFCNSLITSCNF

SEQ ID NO: 493421 - protein, 511 aa, unidentified
MITIPVITERCAGIDVGKRGLAAAVAVGPADKEAEIKTRWFATTMPALHDLRQWLLEEGCTTVAMESTGSWWISIKNELEDDLRITLVCARKHHPKKGDKTDFRDAVDLALHHRHGLLTGSFLPERGIVELRDLTRRRKKLLGNLSSEKNRIQKVLDTAGVKMGNVVSDVFGVSGQEILRALMDNAPLSAGQLADMARKRLRKRIPELTEALRDHHMSDHHRWLIGQSVDHAEFLDQQVEALEKKIELQLAPYRRQYELLQTIPGIKEHVAASILAEIGADMSQFATADKLCKWSRICPGNNRSAGKSRSSHIQRGNKFLLAALVEASWGAIRKQGSAFQRKYRRWLKKGEQKAIIAVCHGLLRVIWSVLRNDRPYVEPDAEVLENLERQKQIRHHACRLREMGADEQTIRTLIDKLLATPPPPKPATKNVSEEASGVHPARCSPLQQPQTLGESAVKRPIARGVLGFRIRTAPKKKYSVEKDRPDRPTGATASVTASHPRKGGRAQKTKT

SEQ ID NO: 493422 - protein, 345 aa, unidentified
MEPSHYVGLDVSQELTSVCVIDEQGAVVWRGKCATDPDAITGTIHRHAPRLVRAGLETGLLSNFLTRALRTRGVPVVCLDARHAKAVLRVQINKTDANDAHGLAQVVRTGWFREITIKSMDAQSLRLLLVARAQLVSQRQATANTLRGLLKAFGHVVRKGAGGLFASRVREVCDDNPALCAIAEPMLAVWQSLREQIRILDGQLLKRAKSDPAARRLMSIPAVGVIVALAYVAVIDNPDRFRQSSTVGAYLGLTPRRYQSGDVDCAGHISKCGDGLLRSYLFQAANATLTRKVTDSTLRSWGRALVARIGLRRSTVAVARKHAIIMHVVWKSDRDFDCAGIPARV

SEQ ID NO: 493423 - protein, 438 aa, unidentified
MSNKVIFNVDELFISVGIDVGADFSWMSIALPNQQFVGKPYKILHNSMDSLTAAVSKIKEAEGLYSLESRIFLESTGIYHYPLFCYLRDKGFNVSVINPIITKNSTNINIRKVHNDRFDSKKAALVGLKPDLKVSLMPSDLALNCRNLCREYYDLMDNRSAYVNKLQGELRMAFPQYLGIFSKVTVNTSLTLLETYTSPAAFIEADRQEIIDAIKSTARFGLTYALNKYNAIIQAANEANEFGYIIDSNIKRIRLYIGFIRKYDEEIKGILGSMHELVDANEATDFVRQIHLTETFKGAGFLSAVSLMGEIGDFSAFSKPKQLFAYFGLDPAVKQSGKFEGTKTQMSKRGSAIARRVVHTLALQSIGTSRTGEAKNPVLRDYYLKKCESKPKLVAMGAVSHKVCNMIFAILRDNKPFEIITPQEHIKKHNAAKCDIAA

SEQ ID NO: 493424 - protein, 389 aa, unidentified
MKIYVGIDIAKLNHFAAAISSDGEIIIEPFKFTNDADGFQLLVSKLESFDKNSLIIGLESTAHYGDNLVRYLVTELYQVCVLNPIKTCQMRKNNVRKTKTDKVDTYVIAKTLMMQDNLRFVSFFDLDMMDLKALGRFRQKTIKQRTRLKIQLTTYVDQVFPEIQYFFKSGLHQHAVYALLKEAPSPKEISSMHMTHLANLLKVNSHGHFTKEQAKELRVLAQKSVGANDSAISIQITQTIQQIELLDSQLEKIEAEMTDIMKFNDSVIMTIPGIGYINGGMILGEIGDIHRFSNPNKLLAFAGLDPSVYQSGNFQAKTTRMSKRGSRVLRYALVNAAWNVVRSNATFKAYYDAKRAEGRSHYNALGHCSGKLVRVIWKMLTDNVEFNLK

SEQ ID NO: 493425 - protein, 337 aa, unidentified
MRIIGCDLHAAKQTIAMLDRDTGEVVEQTLNHDGDAVRAFYAAVPKPAVVGIEATGSMGWFVRLMEELGVTCRVGHPAAIRTAEPRRQKHDRRDAQLLLRLLAEDRFPAIWMPTAEQRDLRALLLHRHQWVRMRTRVQHALQAIALGQGVRRGGSLWSSDGQAVLAALPLLPHATDRRDALQALYRQLHAQVERLDVPVQAIAEQRSGATLLMTHPGVGPVTALATDVFLGDPSRFPNGKALASYVGLIPSEYSSGARQRLGHLSKQGSPFLRFLWGEAVMGAVRRDPELQRFFRRKLPQKGLGKARVAAARKLGIRLWIMLRDQITYDEFCRRSRS

SEQ ID NO: 493426 - protein, 322 aa, unidentified
MSASGIFVGIDVSKAHLDVAVRPTEEEWRSENTETGVNEVIDRLKKLGPDLVVLEATGKLENAVASGLGVEGVPVVVVNPRQVRDFAKSTGQLAKTDALDARVIAHFAEAVRPVPRPLPDEQARQLSSLLSRRRQLSEMLTAERNRLGSSDRKMRRRLKAHIRWLKKELLEVDDDMDSAIRESPLWRAKDDILKSVPGIGTVVSTTLIAEMPELGDLSGKEIAALAGVAPLNRDSGTLAGRRTVWGGRARVRTALYMAALVASRHNPVIKEFYLRLCGAGKPKKVALTACMRKLLLIVNSMIKNKQMWNPAAAEVQRMPISA

SEQ ID NO: 493427 - protein, 372 aa, unidentified
MTQSNILFIGMDVHKESIVISLADDDRSEVRRYGSIGGTMADFKKTLRKFISTGKDLFFCYEAGPCGYELYRYITSQGHQCIVVAPSLIPKKTGDKIKTDKRDADNLTRLLRSGDLTSVFVPNEEDEAMRDLSRAREDVVLVLKCAKQRLKSFLLRHNKQFDGSANWSEKHLRWLAEDVSMPYPEQKVVFQEYVNSVTEANARVKRFDKEIKFYAEKWRLFPVVKSLMAMRGVRMVVAVTMMAELGDLTRFENPKQLMCFLGLTPSEYSSGDKQKKGAITKTGNQHARRVLVEAGWSYRFPAKVSKEMQKRHEDIPLNVRDIAWKAQLRLTKRFRGMANKGKPNNLIVVAMAREIAAFMWSIANEVPILPRD

SEQ ID NO: 493428 - protein, 438 aa, unidentified
MRVIYECVAGIDVHKKTVVACRMRVTEAKRVEWETKTFGTMTADLLGLHDWLNEWEVKQVALESTADYWKPVFNIVEEGFEVILVNAQHVKKVPGRKTDATDAEWLAELMLHGLLRASFIPPKPQRTLRELTRYRTTLVRERGRVVNRVEKLLESTNIKLSSVVTDVMGVSAKAMLTELAAGATDPQALAKLAKGRLRNKMKELEAALTGTVAEHQRFILAQQLGHIDFLDEQIENLSQQISRHLEQMARPLAEDDEDDGAGPTATEPDQPLRWNAAVELLDTIPGVDQRTAEVILAEIGLDMSQFPTADDLASWAGFAPGNHQSGGKRYSGRTTKGNRPIGAALNQAAWAASRTKDTFLEARYHRLAARRGKKRAIVALGRSMLVSIWHMLSRQEPYQDLGADYYDQRRKETKVAYLTKQLTRLGFAVQLDPLPVPA

SEQ ID NO: 493429 - protein, 424 aa, unidentified
MNLTQNDRLKQVTSDTLIVGVDVGSQTHFCRAFDWRGFELSRRVFKFSNTGMGFLTFLRWTEELMNKTEMKNVIVGCEPTGCYWLTFQKFLQDHDVQLVTVNPFTVNRSMELDDNSPEKSDLKDPKTIALLVKDGRFSTSYLPSGVYAEIREASVCRDQIMKQHVRLSNQIQGWIQKFFPEYFECYADWDSTSGLMLLREAPLPQDILKIGAGGINQIWRDAKVRAAGIKRAQTLVEAAQNSVGLEAGEAARLEIWVLVNDYILKAEQLKRLDEYLEEKVKEVPNVEKLLAIKGVGMSTVIGFIAEVGDIGRFTDPKQIQKLAGLEIVKKSSGKKKGQPRISKRGRRKLRRTMYESARALMTWNPAFQDVFLYYRNRTKKPLGGMQAKIAVACKAIRIFYVVLKTGCDFDEEKFRKDIIRPEAA

SEQ ID NO: 493430 - protein, 343 aa, unidentified
MVVLLGIDVHKATHTAVAVDEVGQKIGQCVVAATDGGHRQLLGWALSRWSGDRLRFAVEDCRQVSTRLERTLLGAGQTVVRVPPKLTAGSRSVARTRGKSDPIDALAIARAALREPGLPVATLDGQFREVRLLVDHREDLVAARTQMQNRLRWHLHELEPGREPGLRCLDRYCVLDRLAAWLAGCEPSVLVRLASELVGDIRAHTVRINELKKELSELVTPLAPRLLELPGCGVLTAAKLIGEVGQVSRFRSESCFAMHAGVAPIPASSGKTVRHRLNRGGDRQANSALYRVMVTRIAHDQVTRDYVARRLAEGKTMGEIGRILKRYIAREVYKHLPRSAHSG

SEQ ID NO: 493431 - protein, 341 aa, unidentified
MQITTIGLDIAKNVFQVHGIDRDEKVAVRKQLRRSQVIGFFQNLAPCLVGLEACATSHYWARELTKLGHEVRLMPAKDVKAYIKRNKNDAADAEAICEAVRRPTMRFVQVKSADQQAQLMQHRARDLLMQQRTQLINAMRSHLAELGIIAPQGREGVKDLLAIISNEDNKDLPNDARASLIVLAAQLRALQTTIGMIEKRIVKQHSANKESRRLQTVPGIGVIGASAIAATVTNPRIFRSGRDFAAWIGLVPRQMSTGGKPKLGPISKQGDRYLRRLLVVGAVSVLRQAKLHPGKFPWITQMLARRPFKVVAVALANKMARIAWALMMSGKTCRAAWFAAA

SEQ ID NO: 493432 - protein, 425 aa, unidentified
MNYKQNEKINQVKESTLVVGIDIGSTTQYARAFDWRGIELGKVFTFSNSREGFESFKAWMQHLQDKYRKSDVIVGIEPTGHYWFDLGAYLEDEGILLVMVNPYAVKQTKELDDNSQSKNDRKDPKVIAKLVTQGRYSAPYTPDGVYADLRIMVANRKRLIREMTQIKNRFARWFAIYFPEYTDVFGDYEAQSSMLLLKKVCTPEAIVELGAEKINQIWRDAKLRAVGMKKATTLCETAKRSIGLKKGSSAARYEMKLLLEDYEYKKAQLDAVMEEIEKLCRKIPESEQMLAIKGIGVITVAGFLAEVGDVRRFESPRQIQKLAGLSLRENSSGKHKGQTTISKRGRSKLRAVLFNAAIPLIAKNPEFKSLHEYYTTRANNPLKKKQSVIAISCKLIRVFYAILAKGVTYDAQKMLSDIHRQPQAA

SEQ ID NO: 493433 - protein, 432 aa, unidentified
MPIEFAALVAIDWADQKHAWALQAGTSKVETGAIDHTPEAIDVWAAELRMRFGGGSVAVALEQSRGSLVFMLTKYEHLVIFPVHPTVLVNYRKSFRPSGAKDDPSDARLLLDILTLHRDKLRRFNPDTPQTRTLQFLVEERRKFVQEKTRYSNRLTAHLKMYFPQVLDWFDEIGSSIAAEFLERWPTLEKLQRARPATIERFFIDHNSRNPDRIKERLEQIRKAVPATTDTAVLTSCSAAILGWAALLKQVLAAISVYDEQIDDLAQSHPDYALIKSFPGAGPAMAPRLIAAMGSQRERYPSAAEIQQYSGIAPVVASSGKLRWVHWRWACPKFLRQTFHEWALHSIPYSDWAREYYEQQRANGKRRNTAIRSLAFKWIRILFRCWKTRTPYDEGIYQRALARRDAPQRLPETVHLQWKKVAGFSKIASADA

SEQ ID NO: 493434 - protein, 408 aa, unidentified
MADGIAGIDVHKKVLMVVVLYAHAPEAKPARRRFSTLPSELHRLSMWLQELGVEEAVMESTAQYWRSVWLELDPHMHLHLAQAFSNRAPRGRKHDFKDAERLARRFIAKELILSFVPSGEQRVWRNLTRMKLQLVRDRVRLRGQIECLLEEMRIKLSAIVTDLFGLSGLRILHALAGGETDAKKLASLGDERLKCTEEQLVEAVTGRSHPMHRQMLALQLQRMQLLDEQIANLNSLIAQTMKVHQDTVIRLAEVPGLGIDSAQQIIAEVGVTAGTFPSAAEFTSWVGTCPGTDESAEENHSSRSAKGNKYMRRILNQAAHAAVRCKGTHFQAVFRRLLPRLGYQSAIWAIAHRLCRLVWKILHEGVSYIEQGIEVEPRLLIHRAKVLAKQLRKFGYDIQLTSTNPAFP

SEQ ID NO: 493435 - protein, 416 aa, unidentified
MRVHRNCCGLDVHKQTIAACLISEKEDGTSSQQKRIFGTMTQQLRELAQWLSEAKVTAVAMEATGIYWVPVWNVLEPHGFELLLINPEHYKAVRGKKTDLKDGTRIAELLQDGRLAGSYVPPVAIRVLRDLTRYRTKLVQYQSSIANRIQRLLEQCNIKLASVASDVLGVSGRAMLRALAAGETNPQRMADLAKRQLRKKIPTLQLALEGCLLPHHRFLLSDMLEELDHIGSKIARMEQAIEEQMRPYEKAVDAWMTVPGVKQRLAWNLVAEVGPTVDAFPSAADLVSWAGICPGNNETAGKRKSGTTRNGNRWARKALCEAAWAASKTKATYLQAQFRRLAVIRGSKRAIIAVASTILTISYHMLKEGTTYRELGGNYFNKRNLLRTIRRLVKRLEALGHTVILEPTQSPFQSSD

SEQ ID NO: 493436 - protein, 369 aa, unidentified
MEKDTTYVALDDSKRKIVVGILRSGDTQPELREIANDPRQIRRLFERLKREGPVAACYEAGVSGYDLHRQLIALGVAGAVIAPALTPRRPGQRIKTDRRDAAKLVRLFRAGELTAIHVLDESEEAVRDLVRCRDDIRRDVLRWRHRVLKLLARHGRACLTGKNWSQAHWRWIREQRFHLPPLQRAFEATLFALEQALARQAELDKELEAVAATASYREPVGWLRCFRGIDTLSAIILLAEVVDFQRFRRPRELMAYLGLVPSEYSSGESQRRGALTKAGNSHARRILVEAAWHYRHRPTIGRALASRTHGQPDEVVAQAWRAQQRLHRRYRHLVGHGKRTPVAVAAVARELVGFIWAAMTRHESRRAAA

SEQ ID NO: 493437 - protein, 395 aa, unidentified
MFIVGIDIAKRSHEAIIIAEDGQVVRKAFSFRNNCTGYNLLLEQVRKLTLVKSQIVFAMESTAHYWLALYARLLKDGYAVMVLNPIQSHSLRELYIRKAKTDARDSLIIADLVRFGRCKASNVPQDKILALRELCRSRAYLVDMAADLKRKLIALLDRIFPEYESLFDSVFSKASIAVLRKYSTPQKVKNAHLGKLTYLLMESSNGHFGEWKAHQLKEAACSSFGIDDSDGVYSMLLGMFLEQILSLTAQADSLEKQISVFFQEFNNPLTSIPGVGTVLAATILSEIGDITRFSSAAKLLAYAGLDPSVKQSGEFKSNQNRMSKRGSPYLRRAIWLASTVAVHRDPMFQTYYEKKISEGLHYMNVIGHVSRKMTAVIFAVLRDGQPYQPILQSAG

SEQ ID NO: 493438 - protein, 361 aa, unidentified
MTGTLTWVGMDVHARSTHAAAINLLSGEIERVRFGPGVEAPVAWLSGLAGPVHACYEAGPTGFGLYRAAVAAGVRVDVVAPGKTPRAASDRVKTDRKDAELLARLLVAGQLAPITVPPAAVESARELTRLHDQGRRDLMSARHRISKMLLRHGRVYPKPTTWKADHRRWLASQQFDEPTSELVYLNLLAQVDALTSRKLELAGQIAQLATDERWWPTVARLRCFRALDTLTALSIHLELGADWDRFEKAPRVGAWLGLTPSLNQSGESKAQGSITKTGSTLARRLLIEAAWHYGPRPHVGPALQARQHGQPEHVVQIANKAQHRLHRVYRQMKARAKPHGVVTVAVARELACFLWAAATAD

SEQ ID NO: 493439 - protein, 412 aa, unidentified
MDVIVERPAALDVHKAQVTACTRVPGEHGERVQHLAEFKTTVRGLLALRDWLASHGVTQVAMEATGVYWQPVWHVLEDDFELLLVNARHVKQVPGRKTDVSDAEWLCRLAEAGLLRSSFVPPKPIRELRQLTRYRKAQISERQREANRLHKALEDSGIKLDCVATDILGKSGRAMLDALCSGTTDPAVLAEMAKGRMRTKLPELREALEGRFNELHALLIGSILAHLDFLDGQIEALSQAIEVKLAPFASAVELLRTVPGFETRTAQNVIAEIGVDMSQFPSDAHLASWAGQCPGNHESAGKRKSGKTRKGSKWLNEALKEAGMAAIRTNGSYLQALYRRKKSQLGHARALGAVKHSILCSIWHMLSTGELYNDLGADYHARRNPERQTKHLVSQLEALGHHVTLQAVQVAA

SEQ ID NO: 493440 - protein, 345 aa, unidentified
MNTRLLRCIVSEITQLYLLTHFTMYFIGVDVSKDKLNAACISIQGEVIFETEAINNILGFRKILSLLEKFTGGKPYRIGFESTGIYHLKFLKFCLDNRLNAFIINPVLSAQAVRLSVRPRKTDRIDAVLIAQLVMSGQGRLVASYDLPQGRKAILNAIDQYQQCLQKLKGHLHNMRAEDPVVLSAVQHSMEESVRQMTGEVKALKKMLDSMNAKETELLCSLVGISTFSSHKIIDQIGTVERFVRGEQLVAFAGLEPKPIQSGSSIDYHGKITKRGSRKLRHIIYQCAGVARIHDLELKEFFEKRRSGGLHYTAAVCAVGRKLLLRIYAVLKRGTPYIPQKVLTC

SEQ ID NO: 493441 - protein, 358 aa, unidentified
MATNSLSRVEQFVEGFTDHSFWIGMDVHKRSYHIALLRADGRSLTLVSPASPQNVIQLINRLAIRVAAAAYESGPTGFSLARELEAAGIPVIVAAPSRVPRAVTAGAKTDRLDCLKLASYAAKGLIHSIAIPMPEEEAHRSLLRRRHDVAASVRRCKQHIKSLLLFLGIEEPMAVENWSQDADEVLHALPMETSAKLTLESHLRELMFHRQELKEVDRQLHLFTKQQVHRKTIACLESVPGVGQVLATTFLCELFRPQRFARAEEVGSYLGLAPMVRHSGEKTPSGRLMPVGQTKLRSLLVEAAWMWRARDDYARNLYNQFLSRMGIAQKAITALARKLAIILWRLCIEQRPYRLAST

SEQ ID NO: 493442 - protein, 412 aa, unidentified
MTDEARRWFAGVDWGSERHQVCLLDGAGAVVGERAFAHGGAGLVALCDWLVSLAGDPGSVAVAIEVPHGPVVDVLLDRGFAVHAINPKQLDRLRDRFSVAGAKDDRRDARVAADGLRTDPHLFRQVTAGDPSVVELREWSRLAEELQQERVRLANRIRQQLWRYYPQLLELGEDVTAEWILALWRLAPTPAKAAQLREATVARLLARHRIRRLDAASVLGVLRQPAITVAAGVTEAAVLHLRSLVARLRLANTEFHQAEQKLDELCARLSQDATVAAHGPCDAAILRSLPGVGLVVLATLLTEAGDPLARRDYAALRTLSGVAPVTKRSGKTCLVVMRYAAQDRLRQAMFHWARVAAVHDPKSRSRYEALRARGHSYGRALRGVADRLLGVTCVLLRRQVLFDPDHGKPVAA

SEQ ID NO: 493443 - protein, 432 aa, unidentified
MIAAIIERCAGIDVGKKFIAVCVMTGPADGEARSETRIFGTTVAELKQARSWITEEQCSHVMLESTGSYWRPIFNILEGHVQVALANPQEVKARKGHKTDQKDAWWLAHLLRHGMVTPSFIPPRPQRELRDLTRRRRKLIQTASAEKNRISKVLEDANIKLGNVLSDVFGVSGQLMLEALLQGKTPDATELADFARGSAKKKIPALVAALEEHQMREHHRQMIRFSVEHMRFIEEQLVDLDQLIRAKIEEAGYTKQWELLRTLPAVRENAAVVLAEMGPDPTQFPDEKHLGSWSGLCPGNNRSAGRNKSSHTNKGNRWLREALTESAWAVSMMKTGHLRDKFWRIAAKGPPQRSRPIAVVAIAHDLLKLAYFVMQRGTPYEERRGQPMTEEQKQRLIRHHIRRLGKLGVPVRSSRPSAAPARSKCKTSPLNR

SEQ ID NO: 493444 - protein, 301 aa, unidentified
MNSICLSTDQLTTALPVLGLDVAKKSVQAELRTNGKRVRFGFENNAKGFAQLARMLKEQGAPKVWAGLEATGPYSHALALWLHGQGHRVSLLNPRRVKQYARSAGNRNKTDLLDAAIIADFVCAHLPAAWQPPTLEVAQLQALVRRREELSLMLQAEKNRLEGVASHVRCSLERIIDTLSAEKTRLEKLITQQIRSHQQLSRDHQLLCTIKGIGSLTAAILLAEMARPGQVERARQAAAHAGLAPRREQSGTSVRRNRGLGKEGNRYLRKALYMPALVAIKYNAPVRHFASRLRTAGKPKK

SEQ ID NO: 493445 - protein, 393 aa, unidentified
MFNPLKVRLMRAVCGLDVHKDSVYLCILTGEGELIEKVFGVLTFQLQQMRDLLLAHNVDEVSMESTSVYWIPIWRVLAPHFHMRLVNPYFIKQLPGHKSDVADAQWIAECTLKNLVSGSFVPPEDIQQLRQYDRRIFDLDEEIVRKLSKLDAVMQRCNFRLSNYVSNVDCKSYKDVVRKISEGVTDPESLIGEIHGRIIKHHGRETILASLAGVISQAEIDVLRQLREELALAEEHKREGLERMLEICQEKYPDELRRLQTIPGVKERTATSLIAEIGTDMSKFETANHLSAWSGLRPRNDESNKKFKSRRITHGNIYLRKNIIQCAWAASRTKGCFFSRFSYHQTQVRKKNKMKVIVAVARKLLVAAWHVIHDKTDYADFQKQDRQAPASNG

SEQ ID NO: 493446 - protein, 358 aa, unidentified
MQIIGVDLHARQQTIAMLDTETGEVTEKELKHEGETVREFYAALAGPVQVGIEATGSMYWFLELMDELGIDGRVGHPSEIRKAETRKQKHDRRDAALLLKLQIENRFPSIWMPSTALRDLRTLLMHRHQWVRMRTRVQNALQAMALSRGLRRGKTLWSKQGQHAIESLPLPPNAAYRRAELQGLYRMLQEKIEELDKRVKEQVMQRPGAKLLMTHPGVGPVTALATDVFLGDPARFADGKALVSYVGIIPSEYSSGGQQRLGRLSKQGNPLLRFLWCEAAVHAVRRDPELQRFYRRKLSQKGLGKARVAAARKLGIRLWIMLRDQIDYPEFCRRGQMRQKSGGACAGMPEVGHSPAVQ

SEQ ID NO: 493447 - protein, 313 aa, unidentified
MDTKNEVVFEQVIERGCGIDVHKKVLVATIKGTGIKEETRSFDSFTSSIELMRDWLLENKITHIAMESTGVYWKPVFNVLEENFEIILVNARHIKNVPGHKTDKKDSRWISKLLISGLLKGSFIPPRPIRELRDLTRYRRKIVGQIASEKNRIHKILEDANIKLSSVVSNMSGATSSKIIEQMIAGEEDIEKLIAYHHGKMQASKDDLREALKGFLTDHHRFLLRMVRTSIQSKESLIVQLEKEIDQHLERNKLKVSVELLQSIPGVGKDGATEIIAEIGNDMSQFPNEQHLASWAGMCPGNNESAGKKKVDE

SEQ ID NO: 493448 - protein, 349 aa, unidentified
MSSTIAVDLAKTVFQVAVGNRAGRVVTRHRLSRPQFEQLLRTTPPALVVMEACGTAHFWGRLAQDAGHRVTLLPPRYVRPYVRRDKTDRADTDALLEAVRNPGIAPVPVKTVAQQELVALHRIRDQWMATRTARLNTLRGMLREHGLPVPAGATRALSAIPLLLADATVPLPRCLRHTLLALYEEIRALETRVATLEHDLAALTAPDPVTQRLQTVPGIGLLTATAMRGTVGNIHAFHRARQFASWLGLTTRERSSGARRRLGAITKQGDVYLRYLLTHGARAVLLAAQRRHRAKRPLTRLQQWAVAVAERRGHNRATIAVANKLARVVWAVWVREQPFAARPALPLAA

SEQ ID NO: 493449 - protein, 401 aa, unidentified
MADREVQRVVVGMDPHKRSVTIEVMTGDEVVLGGGRYATDEAGFAALRRYVSQLQPSVGDRIWAIEGCRGIGRHVAQRLVAVGEAVVDVPPKLSAKVRVYATGQGRKTDTTDAHSIALAGTRVTGLRPVVADADLDVLRMLADRRRQLGQEHTRKVSQLHALLLELIPGGAKKDLSAAQAKALLTRVRPRDVAGSTRRRLAAELVGDLERIYARKKAADKELRDLVAATGTGLLDLHGIGPSGAARLLVEVGDITRFPDRNHFASWTGTAPIDASSGDVVRHRLSRGGNRQINRTLHVMATVQLRNPTEGRAYYDRKKSGGKSSMEAMRCLKRRLSDTVYRTMLTDLAHHHTPAQVTGPGGQRGNDSDSSVAGSQPQHRHFGQATPGPVTPQPKPALPKVS

SEQ ID NO: 493450 - protein, 354 aa, unidentified
MNNVKYIGIDVHQATSVFSVMDPKGKLLAEAVLETKPATIIDFLKGQRGTLWVTFEEGTYANWLYDVIEPHVARLIVCDPRKNKLEGNKSDKIDAKRLAELLRLNALTAVYHGKDSTKTLKELARSYVSLQQDSTRVMNRVKAMFRSRGIACRGISVYQPENRKEWIEKLADRGPRHRTERLLKQLDLLQELSFEAQKDLIRESRKHPSHRILKGVPGLGPIRVALILAFVMTPYRFQNKRQFWTYTGFSVVRRGSAEYEINQGAVKRTKKKPLPRGLNRNCNHVLKNVFKGAALTAAYRGPFKKAFDQRVADGTAPNIALLTLARKIASITLALWKKGEPFDIKRHRLSEQTT

SEQ ID NO: 493451 - protein, 356 aa, unidentified
MIAMKYYTSTTQFNCGIDLHAHQMYVCLMDRSGKKLVHTNIRNNDFNYFLKLVAPYRHDLTVVCECMFGWYWLADACSEAGIHFVLAHALYLKAIHGGKNKNDRIDSEKLAHLLRSNLIPPSYAYPAQQRPLRALLRQRLTFVWQRSELLTRIQSHQLAHNRLTSASTNRDRWQEHLLASEPNPVYQLNLQNQLALIRHYDTQLTAVETQLQKLTKTFAYQDYTLLQTVTGIGESLGLTILYEVGDIERFPTVKDFLSYCRLVKGTVASAGKIKGLRGRKLGNPYLRWAFGEAAIIAKRDQSLLGPLYQRLEARMNGNKFKANTVLAIKLARCVYYMLKNKTVFDPQRLVASLSHN

SEQ ID NO: 493452 - protein, 405 aa, unidentified
MRYYLGVDWADQTHAVWVVDESGTKIAARAVSHTAEGLGEWGRELDEWRAQGIDLWAAIERPDGRVVDVLLDHGVVVYPVNPKALDRARDRFRQSGAKSDPFDARVLADFLRTDQAHLRALQPSSEAAQELKLLTEDCQRHIRQQTRLVNQLTATLKAYYPRALEVAEVTSALAREFLPAYPTPEALTALTERQWQRWARAHRLPEARAGELWAVLRQPHLPVPAHVVRAKARLMQALMEQLRPVVAAVAQYRKAIDDFFARMPAAQWARTLPIGKHGITAPTLWARLGDAPGRWESFRHLQAHAGTVPVTKRSGKQQRVVQFRFACDKALRSVVDQVAYLSLLSSAWARPYYDQQRARGHSHRQALRALGAKWLKIIFIMWQRQVPYDEQYHLATMTRQQLGRR

SEQ ID NO: 493453 - protein, 362 aa, unidentified
MSSVFHVGFDVHADTIVAYLLDRETGQFYEDRIPNERAKLQSAVARWSKLGTLKVCYEASSVGFVIKRWMDEWGVDCQVVAPSLIPRSPGRRVKTDRNDARQLSMLYGSGLLTVVNAPSEEEEGVRGLVRSRGQITQDMTRTKNRVLKHLSRLGIRYTEGKKNWTHIHRLWLAKLTLAPTDNVVLQSHLRTLAHLECEREAIDEEIGKIANTPAYANKVAWLTCLKGIAQYGAMVLITEIGDIHRFPTAPQLLSYFGLVPSEHSTGLTRHTGPITKTGNRRARWILGQAAWNQRSVPGGSKTIRQYRRDQPTEVVAIARKAERRLHRQYWKIANRKNPKTAATAVARELAGFVWAILRVNPA

SEQ ID NO: 493454 - protein, 356 aa, unidentified
MSEGSWVGLDVHARSVVAGVIDRQSGEVRSLRVPPGIERTVAWLQTLPAPVQVVYEAGPTGYRLTRACAEAGINCVVAAPSRIRPAADRVKTDRRDAERLARLLRLGEITPIRVPAPEEEAARDLVRAREDARSDLMRSRHRLSKLLLRHGLVYDATAWTRTHDAWLRRQRFQGGPLAIVFDECYGRMIDAKSRRDTLDKAIAELAATPPYLDVVERLVCLRGVSTLTAFALTVELGDWHRFRAASLGPFLGLTPSEHSSGERRRQGAITKAGNSHVRRLLIEAAWHQRRPPRRSVTLERRRTGKPLAVQAQAERSARRLHGRWHALESRGKPRSIVVVAVARELAGHCWALATME

SEQ ID NO: 493455 - protein, 408 aa, unidentified
MNNSVGIDVSKGKSMVVVMRPFGEVVAKPYEVRHTASALAALANDIKSLDGETRVIMEHTGRYYEPVAQALNEAGIFVSAINPLLIKEYGNNSLRKVKTDKADAIKIARYGLENWCELRKHSTVDTVRYQLKNLNRQFDLYNKHKSAFKNNLIALADQAYPGANTFFGSPARGDGHQKWVDFVTTFWHVDCVRSMSITAFTERYQKWCKKQGYQFAKDKAAEIYTASKDMVALIPKNSLSQMLIQEAATQLTSVSRTVELLRTEMNELAKQLPEYCKVMELYGAGESLGPQLMAEIGDIRRFAHKGALTAYAGVDPGANQSGTKENKSNKSSKRGSPQLRKTLFVVMTILLQKAPYDDPVFQFLNKKRAEGKPYYVYMTAGANKFLRIYYGKIKEYLSEVDNKSSIAI

SEQ ID NO: 493456 - protein, 379 aa, unidentified
MLALGIDCAQLTHAFCLIDDSRRVLVEGTFPETQTGLAQLRAQLAAYGEPQAVTMEASGSYWQNLHAALQACGWEVRAVDPVRARRYAQLRHPRHKTDKADARSLAEMGLGEERASFPASEPELLAHRLAQVVETRVRLIGQLHALVVVANPALVACGWELGAARSLTVLLQYPTTLHLRRARSLAQVRYGPRQKVGARDAEQLQEAAREALYGAVLEAHAEAIRFQATQIGGCNREIARLEAALRERLPEAARLEAIKGVGPRTALVVCACVPFAQLASAKQAAAYAGVHPHRFESNGRVWTRLSKQGDAVVRSALYRAAFPASQHNPLLRAFYLRLREKGLTHRQALCAVAHKLLRVCYALMRDQSNFSVDYQPQKA

SEQ ID NO: 493457 - protein, 339 aa, unidentified
MTLYSGIDLHSNNLTLAIMDETGKRVLKKRLINDGEVVLNTLGPHRTELVGIVVESTYNWYWLVDTLMDHEYQVHLANPSAIQQYNGLKYLNDDHDAFWLADLLRLGTLKEGYIYPKAERPLRDLLRKRWHLVKLRTSLVISLKNILARNFGIRLSASRIKDQSLDSMVSPLPQEDNVALVIKTSKASIDFLTVQIAEVESNVLRQVKGRPSYDKLLDLPGVGKILGLTIELETGSVSRFQQVGNYASYCRKVESRWLSNEKAKGRGNAKNGNKYLAWAFSEAAEHARRSDPTSRKFYNRKLNQGNAALAHNALAHKLARAAYYIMRDNVPFEEPKMFA

SEQ ID NO: 493458 - protein, 340 aa, unidentified
MDEYIGLDVSLKETAVSIRRDGKRVWRGKCPSDPQLLAALIRKHAPAPKRVVFETGPLSVWFFHALAAEGVPAICIDARHAKAALDMAANKTDANDADGLAHLAEVGFYKEVRVKSFDSMLTRTLVAARTRLVRIGTELSNQIRGLMKTFGLVVPAVTGSKFEHHVHALLADNTDLGQIIRPLLEAWHAVRLRSTELGRKLLADARRNAACQLLMSIPGVGVVTATSFVSAIEEPANFKHSRSVGAFVGLTTRRYQSGEIDYDGHISRRGDSHLRGLLYEAATVLLTRSRSECDLRKWGLQLRERLGFKRATVAVARKLAVIMHSMLITGEPFREKSAAA

SEQ ID NO: 493459 - protein, 305 aa, unidentified
MITIGCDVGKSNFDVFLGGKHFKFENKKEGIEKFINECRNHEISRIVLEPTGGYERKLLKKLYFCKFPVSVVNPFYVRNFARSKKDLAKTDKIDAKILSEYGEKMEPKFHEQKESYRFDLEELTSRRDNLVCMQKEETQRLEKEPSKIISKSIEQHLKYLEKSTEVIESEISKLVAANAKEIDAVLQSEKGVGAQTSAILIGSLPELGHLDNRQIAKLVGLAPMARDSGSKSGTRSIRGGRHRVRMALYMASISALRSNPKVKDFYKRLRDQGKKPKVAIVAVMRKLIVILNSKMRLFYEGKDYF

SEQ ID NO: 493460 - protein, 346 aa, unidentified
MCSLPVFVGLDYHDSSVRVVVQDTDGSEMGNADRTNHWKAIADFGDRFGRPVRAAIESCCGAADLAEELVSCAGWSVALAHPGYVQRMKQNPDKTDCQDAQLLADLERVGYLPRVWLAPRYIRELRHVVRYRLQLTEQRRATKLRLRALLREQRCHAPEGWNAWTKAWQQWVRQTAELSEQGRWLAKQHLRELARLATRIRQVEKRLERITANDVEVQRLQQQPGIGPVTAWTIRAEIGHFDRFRTGKQLSRFCGLSPRNASSGQRQADAGLIRAANPALRTVLIEAAHRLARCDPSWQKFAQRLRARGKPGSVVAAAVANRWMRRLYHEMKTPSGELAVAVGPAQ

SEQ ID NO: 493461 - protein, 424 aa, unidentified
MKVTYQTCCGVDVHKSFLVATIVKTTGGIEPSYQKKRFSTFNNSILEFKQWLLDNDCHDVCMESTGKYWVPVFNLLEDDINVVIANPKWVKAVKGNKDDTKDSKWIGDLFRLGLVKGSYIPCKKVRILREYTRYRYKLVSCRSSEKNRYQNALTVCNVALDSVVSDIFGKSSTSIIDYLLEQSGSSINHEEIASKLLRSLKSKEDAVIESVEGYQMTDAQKYRMRLVRAHMDYITAEINDVDKMIENMISSNTDFENAVQFLCTIPGVKRDSAITIISEISTDMSQFSSSKRLCCWAGLTPGSNESAGKKKSVRITRAGVYLKPALVQCAHAAVKSDKSPYYKKKYESLVKRRGKKRAIIAIARMIRTAIYQMLSTGEQWNPSDLYKIDMPVALVEKQKAKAIKQAKKLLQREGLLPPDEPLAS

SEQ ID NO: 493462 - protein, 385 aa, unidentified
MRSEATREGETIVGGQVLYMALELSERTWKVLFASPGGRRRERNVVARDVGRLMEEIAAAKRRLGLSAQARVVSCYEAGRDGFWLDRALRANGIDNLVVDSSSIEVARRARRAKTDRVDLVKLMGLLLRWVRGERKVWSVVRVPTAEAEDIRQLSRSIERLKGEHGRHVTRIKALLATQGLKLARIGGRDWGKRVGELRGWDGSALGTWLQRDLVLEGDRLAVVAEQLAALKAERDRLVAEGREAAAVKARELARLGAIASESSFVFATELFGWRTFSNRRQLAGSVGLTGTPYSSGQSAREQGISKAGNKRMRTMLVEIAWCWLRYQPTSALSRWWQERFANTGGRARRIAIVALARKLLVALWRYLEHGIVPQGARLKMRAAA

SEQ ID NO: 493463 - protein, 373 aa, unidentified
MKKGSTDAQSRKKAGQWRRGLKAATIGMDLGDKSSRYCVLDQDGQVVHEGSVGTSQKSLTQVFGALARCRVAVEVGTHSAWVSRLLKSLGHEVIVANARQVKLISASSRKSDQLDAQMLARLARVDPQLLRPIRHRSEKAQEHLMLIRVRAALVETRTRLVNTARGLAKSVGERLPLCDTDQMGVERMEGLPAQLQQALQPLLEEVESLTEKIQASSVSIEQIARTEYPETALLRQVSGVGTLIALTFVLTIEDPERFPKSRDVGCYVGLRPQRSESGESQPQLGITKEGDVYLRKLLVQGAHYILGYRGPDTDLKRWGEGLASRGGKNAKKRAIVAVARKLGILLHRLWVTGEVYEPLRNSQARARAGTVAA

SEQ ID NO: 493464 - protein, 417 aa, unidentified
MLFVGDDWAEDHHDVEIVDGSGKRLGQARLPDGIAGMTRLHEMLAEHLDDTDLDPETGMLAPERVVVGIETDRGPWVAALIAAGYRVFAINPMSVARYRERHTTSGAKSDPGDAHVLAEIVRLDRDHHRPVAGDSGEVEGLKLVARTHQSLIWDRTRHRQRLRQALREYYPGLLDALAAAGLDLGDPEARELLERAPDPERAGQLSRSKIAAVLKRHRRRNVDARAEAIQAALRAAALRQPPAIESAYATIAATQARLLEALAGQIPQLEEVLGQGFGRHPDAEIYTSLPGLGVVLGARVLAEFGDDPHRYRDARAGKNYAGTSPITRASGRKTVVLARYARNRRLGDAMHQWAFCALTSSPGARAYYDTLRGRGIGHHAALRQLGNRLVGILHGCLKTRTHYDESTAWAHHQTVAA

SEQ ID NO: 493465 - protein, 343 aa, unidentified
MTIVSQVFGVDTHAKTHTLVVLDSHGVRQAGDTFPTSPAGLKRAHAWMLRHAPGRILAAMEGTASYGAQFNDLLAREGIAVAETRPPKRGVRRVGKTDQIDAELAARHALALPIERVIAPRTHTGDHAALSVLLAARNAISTARTATINQLTALLRGHWLGVDARRPVTEAQITQIGQWRAHPSDDAGTATIREEATREAQEIIRRDGELKHNEASLRKHVKAVAAWLLDEPGVGPFVAAELIITWSHKGRIHGEAAFARFAGAAPIPASSGNTTRYRLHRGGDRQLNRALWVTAFNRYHNDPETMKYVAKKTKEGKTRNEILRCLKRYISRSLFRKLDAHTA

SEQ ID NO: 493466 - protein, 401 aa, unidentified
MNAVGIDVSKGKSTVAIMRPYGEIVASPFEINHTEDDFKKLVSQIQKLHGESRIIMEYTGRYYEPLANYLYNAGLHVSVVNAILIHDYSNSSIRRVKTDKKDSIKIANYGLDRWLDLPDYMPEDELRQALKVYNRQCSQYAKLKVVLVNNLIALSDQTFPGIDSLFGKTPRQDGHQKWIDFIKSYWHKDCIIKKSFKSFDNSYKKWCSKNGYHYQSNKTIDIYQLAYEAVASMPYNANTELIITETANELISLVDTLERLRIEMNRIASQLPEYPVVLSLHGVGTTLGPQLIAEIEDVRRFHNRKALIAYAGIDSSPYQSGTIDIKSRGISKRGSATLRKTLFTVMDCILRHKHTDEPVYQFLDKKRAEGKHYYVYMIAGCNKFLRIYYARVSEYLNSLEK

SEQ ID NO: 493467 - protein, 370 aa, unidentified
MAQSTPVFVGLDVHKDTISVAYAAGATTAPPHFVGQIGTRQADIDKLIRRLKSRSPKLVFAYEAGPCGYALHRYLTKKGLDCRVVAPSLIPKRPGDRVKTDRRDSVEIARLMRSGDLTSVYVPSVEDEAIRDVCRARDATRVTLKAAKLRLKSFLLRLGLNYVGRADWNEAHRRYLAKVVCPTPAQQIVFQEAVRAVDEQVERLGRLEQELFELAPAWRMYPVVEALQALRGVQWLVALTVVAELGDLTRFDNPRQLAAFVGLTPSEYSSGESRRQAGITKTGNARARRVLIEGAWAYRYPAKISPHIQRRIGRLPKVARDIGWKAQVRLCKRYRRLLARGKHANVVTTAIARELLAFMWAIAKEVPIAS

SEQ ID NO: 493468 - protein, 416 aa, unidentified
MKLFVGLDVSSEKLDACFMTDDSTCSVLKEASYGNSQLGASQIKEYILEFSQKFEIESLVIGMEATSLYSFHPAMFFKEDLELNQLNLMVSVEQPNKIKKYRDIFEENKNDQIDAFYIADYFCIQRQVNSIIKEEEYLALQHLTRTRYQLIKQLVRTKQHFIENIYYKCNTLSKELKAEGGSVLSATLVTLMTEDYTMDQLAELSLEEFANLIQKLGKYRFKNPEGIAKAISKAIRSSYRLGKVHQDSVDIVLGVLAKEIRSLEKLIKDLDKAIDDLVVVLPEYQCLTSIPGIGPVYAAGILAEIGPINRFSDESKLAKYAGLYWRQNQSGNSEYENTPMAKRGNRYLRYYLVEATNSVRRYEPEYHAYYKKKYAETPKHKHKRAIVLTARKFTRLVDTLLRNHQLYMPPRSVIDK

SEQ ID NO: 493469 - protein, 368 aa, unidentified
MTSMLLRRDDVIVGVDTHKDEHAAVLLDGLGGELAELFIPATLEGFAQLLAFCLQHVGPAGCLYGFGVEGTGSYGIGLARFLRRQGHQVHEVHRPPRKGDRRLSGKSDTIDAEHAARQVLAGAKTAVPKTADGAVESLRLLKVARDTAVKARTTAMVALKATLVTAEDQLRAELEPLTDYKLIAACAALESAPSLAAPDAAMAHVLGTLARRWLHLHEEIKVHSRHMKIQTKAVAPQLVEAVGIGPDIAAEMLITAGDNTDRVRSEAALAKMCGACPIPAGSGRTNGRHRLNRGGNRQANAALYRAIIVRMRWHQPTIGYVNRRTAEGLSKREIIRCLKRYLAREIYHLLPEPAALTAPPPNPLKDVA

SEQ ID NO: 493470 - protein, 348 aa, unidentified
MARLARIGIDTSKSLFQLHGVDEKDQVVLRKQLRRRQFLVFFAKLEPTLVGLEACGASHHWARELQKLGHQVVLIPPQYVKPYVGRNKNDKIDAAAVCEAMSRPKVQERFVPIKSVEQSAAQMLLGVRESLVKRRTQLTNTIRGHAAEFGLVAATGLDKIPPLLARIATDDSLPALTKEMFAVLGREYTELGPRIARIDKQMLAFHRSNELTRRLMEVPAIGPIGACLLVTKIVDPHAFRSGRRCAAWIGLTPKDHSTAGRQKLGGITRAGDERLRATLVSGAMACIRHAKNRRSNSSSWLVELLKRKPPKVAAVALANKTARIAWKIMTSGERYDPDRGMARQGFAA

SEQ ID NO: 493471 - protein, 422 aa, unidentified
MLTRTQDNEEIIERVAALDVGKAELMCCVRVPDEDHRGKRLQEVQAYPTMTRSLVRMSDHLACLGVTRVVMEATSDYWKPVFYLLEAAGFETWLVNAKDVKHLPGRPKTDKLDAVWLCKVAERQMLRPSFVPPPPIRRLRDLTRYRADLVAARTAEKQRAEKLLEDAGIKLSAVVADIFGVSGRDMLGALVAGERNPKVLAQLARRTMRAKITVLEEAFTAHFTDHHAFLLGAMLARVDAISADIAVLETRIAAYAVPFADLVARLDEIPGISLASAYVILAEIGTDMTRFPTAGHLVSWARLAPGISESAGKKKGKGSTGHGNAYLAAILGNAAAGAAKTDTFLGERYRRIARRRGSKRAIVAVGRSILVIAWHLLADPEARFYDLGPGYYAARIDPDRRKHNHIRQLEALGYKVTLEPAA

SEQ ID NO: 493472 - protein, 355 aa, unidentified
MNSVRYVGLDVHRDTISVAVLDESGRLIMQSVLATKASAILDFIHGMRSIVHATFEEGTHAAWLYDLLASKVAKLVVCNPRKNALLKLGSKSDAIDALKLAELLRAGMLSPVYHGERSALEVQQLARSYTMLTEDTTRVMNRLKAVFRGQAVGCAGKKLYAKRHRDGYLAELGTGGLRRRAECLYQEFDALQQLRHVTKRELIVECRKHAATKWLQSVPFLGPVRAAVLIGRVQTPHRFRTKRQFWAYCGLALETRDSGEYRMVNGQVARRKKPVLIRGLNWNHNHAMKGVFKGAATSASICDGVFREFYLGLLNKGMLPEMARLTLARKIAAITLKIWKKGEAFDSEKMKIQAA

SEQ ID NO: 493473 - protein, 391 aa, unidentified
MNTQHPQLGIDLGRGSIMIAFPPIHSHVPRKMYPTVKIDTTLPDWWKRLGSLIAPDCVIAAEPTGAHALTPIAAAIHLAQPSARIYSVAHTLSASYRAAHLSDAKNDRLDAIALLLIAQDIAAGDPPRAAKLYEPALQSQVEALRTYVNIHSRLTKETTRAKNRLAALAYSLYPSFSKSETWLRAARTGFISPLAVLELAQRLTAGEPFPLYPDGNAKRYLYAIAADLAPLPANPAIVHAIREIIRHHDSTEAQREHIESIIAHLIEQPPFAVVTRRWKTLPGFNVVWAAALHVAANGRTIELKKDEFVAAVGSNPLTHESGSGEKTKTTRKGYRPARAALYMWTLAALGADFAPVRAAYDKHTSIYPARTKLARVLWGVARDASLDSQGE

SEQ ID NO: 493474 - protein, 353 aa, unidentified
MNNIKYVGMDVHKSITVIVVLNELGQFESRSQIKTKGENICDFFRGISGKVEVVFEEGTHSAWLYKLLKPLVASVTVCDPRHNKLIEDGNKSDDEDAETLAQLLRLGAVKAVYKGDDQHQQLKESCRAYDNLIEDSTRVQNRLKAIYRGRGISCSGHDLYRADQRSDWLAKLGEDAARFRAQSLLEQLESLSQLRKQAKQRLLAQARTHADYRILLKLPGFGPVRVAQLIAVVGTPHRFRTKRQFWPYCGYAVVTRSSADYQIVEGKIVKQRKKVSTRGLNRNHNPQLKQVFKGAALTALRHKAIKAYYERLISTGTRPELARVSVARKLASIALTVWQRREEFDVKKAFAQD

SEQ ID NO: 493475 - protein, 419 aa, unidentified
MTECNITASTPVLVAIDISKGRHEVLIEVPDKKRRRRVSVLNTLDEFERLINLLRSFQRPVRVAFEATGNYHRALAFQLGAAGFNIKLVSSVALARTREALHNSWDKNDPKDAQVILHMMSIGAEQFYHDPLLHGTNDIQELSKTHDMISRTKTELWHRILTHYLPLYFPEADRFHRSSRSDWFFAFLELFPSPHFIAALSKEAFIEAAWNVVGRKVGKERLLSDIYATSIRSIGLPVAPDSDAIVMFRMVLAEGRSLIVQRNLIEARAVEMLKDNSDYKLLTTIPGIGPINALTILAEAGDLRRFNHHRQFLKFCGMDLATIQSGMFRGQTKLSKYGNARLRRTLWMAAQVAILQRPNSFRDKFERYITKDRHNTHLRRKALTAIAAKMARTVHAVVKSGETYRPFYEGAIHSGRTFL

SEQ ID NO: 493476 - protein, 375 aa, unidentified
MSKANTLFIGLDVHKETTDVAWVSDKSAETVHYHGTIPTNLRSFDKLIKNQTAKTSKLCVIYEAGPCGFWLYRHLLRRGIECWVVAPALIPKAPGDQVKTDKRDAMTLARLARSGDLHSIYVPDERDEAIRDLIRCREDAMLDLRQARQRLKSFLLRHGHPCTGRQNWTEAYRRHLADINFPQSATKITFQHYIHIVTERYERLQRLELELQSLAESWRWYPLVQRLTVLRGVRFLSAMTLLAELGDLRRFASPRSLMNFVGLTPSEHSSGQRERRGGITKCGNSHARRILIESAWAYRFPARVSRELESRQQEHSIKLQTRSWEIQQRLCRRFHALKARGKEYNKVVTAVARELTGYIWDLAQGFDADMPQQAY

SEQ ID NO: 493477 - protein, 308 aa, unidentified
MKKLSTVRGRESKIFNEHNLTIGLDLGDRSSYYCVLDEAGKVIQEANVGTNKKAMAMVFGSMGRCRIGMEVGTHSPWVSRLLLALGHEVVVANPRQVKLISTSSRKDDRVDAQTLARLARVDPQLLRPIQHRSAKAQGDLMVIRVRAALVEARTGLINTARGLAKSLGERLPICDSDQMGVEQTESLPTQLQQVLEPLLKEVVSLTEKIKEMDRRVEQIAREDYPETELLQQVKGVGPLIALTFVLTLEDKTRFAKSRDVGCYVGLRPRRGDSGESQPQLRITKEGDAYLRKMLVQGAHYILGYRAGA

SEQ ID NO: 493478 - protein, 420 aa, unidentified
MGRLKIVYPVCCGMDVHRDFLIACIAATNAQGVTEYQSRRFSTYTGSLRELRDWLLANDWKDVCMESTGKYWFPVHNILEESCHVVVSHPKFVKAIKGKKTDKKDAQWIADLFKHDLVRGSFIPPKDIRQLRDLCRYWVKLSSYMTGEKNRAQNCLTVSNFKLDDVFSNVFGKSASAITTQLLEHPGEQFDVAPFVDGRCKTPIAQIQEAVDGIFTYEQAEKLKIIRGHMDSLERHKAELESLILEIAQNYLPQIELLLTVPGIHDAFTAIRILAEIGADMTVFDTSKHLCSWAGLTPQNAESAGKKKTTRIGKSGAYLKPLLIQVALAASRGEKHPEIYGKKQALQKRRGKKKAIVAIARRLLTAIYHILSKNEPYNPAAYIQEDKNPMARQISQEKAFEMLARMGFIVSNPSPLSSSG

SEQ ID NO: 493479 - protein, 341 aa, unidentified
MYNFIGIDVAKATLQVYISIKDENISIGNNKKSINALYSKLKKYYKKEIEKIVFIFEPTGPYSSLLKHFCADKKILAFMVNPRQSANFAKALDNRSKTDIIDAKMLYLFHVMAKVGDIVIPRIDELQETLGEMLSYFKLLIKQRNSFSNHLESLESKGGSSYIVKQLKKEIKQLKLQEENILEEMLKLIKSDTYLYERFENIKSFKGIGDRAGIALIHLFITYPEANRQELTALSGLDAIEITSGSSIQRKSRISKKGSAIYRSMLFMPVLSAIRSNKYMQAVYDRLKENGKHSTVAQIAVMRKMLLIAHSLFKNNSAFDNELYEKRVSWKKPEANSEKVA

SEQ ID NO: 493480 - protein, 348 aa, unidentified
MLIIGCDYHPGFQQIAFVDTETGECGERRLTHREEAEQFYGLLKERSVRVGMEASGHARWFERLLSDLQFELWIGDAAEIRTKRVRKQKTDRQDAQLLLRLMIEDRFPRIWVADAENRDLRQLLWHRHRLVQMRTRVMNQLHVVALNEGLRRKKALWRPAGRSELESLVLAPWASRRRQDLLDLLDQLTPKIQELTRALEDEVEKRPVARRLMTHPGVGPLTALAFELVIGTVERFRCGKQIASYAGLVPTEESSGDRRRLGHISKQGNSLLRYLLVEAAQVTTRSQPQWRSKFFHLAMRRGRKIAKVAMARKLAVYLYWMWRQGWDYEQLQKLGSHAGEPGNRHGVQ

SEQ ID NO: 493481 - protein, 377 aa, unidentified
MGWTGRAPAPNGFQSAPGACQERSTTMPRTTTLHAVTAIGIDMGKNTLHLIGLDARGAIVLREKVARGRIALRLANLPPCLIGIEAGMATHYVARELAALGHDVKQVPATYAKPFRQGHKNDFRDAHAVAEAVQRPTTRFVPAKTNEQLDLQALHRVRSRLVSERTAVINQIRGFLLERGIVVRQGLRFLRQQLPDILAKRTDVLSPRMARIVADLANDWRRLDERIETVTDEIGTLAKSDDSCRRVMTVPGIGPIISSAMVAAIGNGAAFARGRDFSAWLGLVPKQMSTGDRTILGRISKRGNGYLRTLFMQAARVILLRSANWPKHGFGLWLVRAAQRLHPNVLAAALANKLARIAWTVLAQERSYEARVTKAAA

SEQ ID NO: 493482 - protein, 319 aa, unidentified
MAATAQDRKMFVGIDVSKSRLDVHIHPSGEAFTVAQDAEGLEQLVARLKDLDLAVIAIEATGGFEAMAVAALAAAFLPVVVVNPRQVHNFAKALGLNAKTDLLDAFVIARFAEATKPEIRALPDADTLALADLLARRRQIVQMITAEKNRAMRNISNAAVQKSIGRILKALELELARLDDDIDKMVRGSPLWREKEDLLASVPGVGKVIAQTLLAEMPELGTLNNKQVAAPAGLAPWTRQSGQWRGKSMIGGGCSVCRTVLFIAALSATRHNPDLKAFSQRLLNAGKAKMVVLIAVARKLLTILNAIIRQSTPWQPKTV

SEQ ID NO: 493483 - protein, 433 aa, unidentified
MDEVRDEPLHRDRVCGIDIGKASLAATIRVPSDRDPSRRAAETRTFGTTRREVLALADWLRCWQVPAVVMEATGDYWKPVFYRLEAEGLECVLADARQVRNLPGRPKRDPSDSRWLAACFERGAVSSCFVATPEFRLIREHTRYRRDLTGERTREKQRAEKLLESAAVKISSVLTDVHGVTGRDIMGHLIAGERNPRALAELARGAARKKIPQLAEALEGAEFFTPEHGALLRAMLARIDRIDADIAAVTAVTERLLAPYEEQLQQAESMPGWGRRAAQDVIAETGVDMTRFRTPGHLASWAGRTPLDKQSGKRAGPARHKHGNRYIGAVTGETSVAAGKTQTREGARYRRLSRKRGKAKANVALGNTQMRVLHVLLSNPGMRYHDLGPDYYDHDRNTARQVSHHVGKLGALGYEVTLCRRPEPDGTGDTQAA

SEQ ID NO: 493484 - protein, 364 aa, unidentified
MSTIALGVDLAKRVFSVCEVDGSGHVLRRLDLKRDAFAAWLAQVPAGIVVAMEACSGAHHWARRCLEVGLQPRLMAAQLVKPYRLSQRSKNDRNDAEAIATAARQGNMRFVPVKDVDQQARLAWHRVREGYKAESLAIGNRLRGLLAEFGVVVATSDVALRRVLGDLDRAVLPGEFKELLRGLEAHWTEVRKALDACDARIDAHAREDERCVRLHAIIGIGPITADAMVASLGSAKDFRNGRQLAAWLGLVPTQHSSGGHARLGTISCHGEAYMRTLLIQGARSSLQRAPWINMEKSTPEQIWIRPLACRMCFGKVLVAIANKHARQLWAMLAHDQTYDADAWLKHPMVQRPAGKHAATVAAMA

SEQ ID NO: 493485 - protein, 356 aa, unidentified
MNKDEFSRIEQFNQFKVDIRGSSQHLIVGIDVAKDKHHAFMGSARGESLLRRLIFENNISGFGKLLTQSEAIRVKNALQCTVFGLEPTGNYHKPLAEYLIRCMHNVVLVSGVATKRNRELLDGRWDKHDTKCAANIADLISQGKCLFYETPSPQIRQLRELMSLRRRLKKEQHSLKMRIRNNLLAKYFPELDRFYKQCESQSLDIIREFLNPSEIAGMEFDQFYKTLPARKGKIIQLKRLAKIHHLACESVGCEMGEANEFEAHMLVDMLRTVGKRIEETKDLIEEISLDFTEYSLLLTIPGFGPYISALVLATIGNPYRFANRKQVLKMAGYDLNAVRSGKLCCQFSYVMCLIPL

SEQ ID NO: 493486 - protein, 343 aa, unidentified
MGYFAGLDVSLEETAICIVDDTGKIVREARAASEPDALIAFFAECGMKMERVGLEACSLTAWLNTALTEAAIPAICIEARQAKAAMGAMPNKTDRNDARGIAQIMRTGWYRAVHVKSPSCRSWRTLLTARRVVLNKRRDVENTIRALLREVGLKVGTPSRKDFPARVRELTADDPVLASLAESLLTVIEVMTKEAVKLTKRVIDEVRVEPTCRLLMTVPGVGPLTALAFRATIDQPGRFRRSRDVGAHLGLTPQRYQSGETDVQGCISRCGDELARTALYEAAHSLLIRSTKWSALRAWGMNIAKRRGMARARVAVARKLAVILHRMWVDGSEFRWCKQAAAA

SEQ ID NO: 493487 - protein, 355 aa, unidentified
MISTKYIGMDVHKESISIAVRNAAGKIVMECVIETKASIILQFIDGLRGDVQVTFEEDTSAAWLYDLLKPRVTKLVVCGPRKNKSMREGNQSYKIDARRLAELLRLGHLTSGYHGELGLRTMKELVRSYLTITKDLARVMTRVKAIYRSWAIPCTGKEVYAACHRAEWLGRISEPGVRQRAESYYLQLDALRVLRQKARRDLLAESKKHKAWKRLCRIPSIGPIRAAVLLGILQTPHRFRTKRQLWNYGGLAIETHSSADHRSVDGQLERSRKNALVRGLNRNCNHELKNLFKGAAVVASSKRGPFAEFYAALVAKGMRPEMARLTLARKTATIVLLVWKKGVCFDANHLKPQTV

SEQ ID NO: 493488 - protein, 335 aa, unidentified
MECPFCSIGIDVSKRKLDVYVLPQEKYFTVGNNATGIQALLDSCQEWQPQVVVLEATGNYERRVFQALQQAGWPVRRINPRQSRSFAHASGKLMKTDKVDAYCLAYLGQFLSILPENYPIEKPLRLASLVKRRRQLMDMITMEKNHLEHEDVIIETSVAKHLNWLEAEVKRLDREITTFLRQNPEFAEKIQILKSVPGIGQVTLATLLAELPELGHLSNKKLTALVGLAPYSHDSGGHKGKRRIRGGRKFVRDTFYMATLVATRHNQIIRAFYQRLLSLGKPKKVALIACARKLLTIINAMVKNKVVWQPQPAESRSAEVNRAVLPTPIVSGAPL

SEQ ID NO: 493489 - protein, 452 aa, unidentified
MEREEKRLEQFRRLRKEIRGAQEHLVVGLDISKDIHNGLVRTVGGKIHRRLTFHNTREGFENLLLAVEAVKVQHGLSEVVFGMEPTANYHKPLGEFLINRDQQVVLVSPEAAKQNRPLLDGRWNKHDGKDCANVADLICQGKCLYYEYPSVELRDLRSLLSLNRKLKKLEQGLRLRIRNHLVAQYFPEMDQYCHWGATEGLALVRWCLDPAVMAALSDEELTQRLGSLGRTIAQRKRLSALKDQAASSIGCQFGSSAEFEGRSVVELLKEVRQAMLQTQDQIEQVCQKFQEYSCLLSIPGFGPTLSAMVLGAIGNPWRFQNGAQVLKMVGLDLSASQSGKSQGSPIVSKKGKAEIRYALYQAAMVASTRDKHFVAYFTDQLRGREKEKGIKTKKRVKLAAKMLMIAWTLMKKQERFDPKYLCAQTQPIVARKTTTSANGGIPKVQPGADRGL

SEQ ID NO: 493490 - protein, 315 aa, unidentified
MEDSQVFVGIDVSQSCLDVAARPTGEVWQVPNDADGISDLAQRLVGMSPFLVVLEATGGLEWALTAELAAAGLPVAVVNPRHVRDFARAVGILAKTDILDAQVLARFGQAMEPEPRPLPDAEAKDLQAMVSRRRQLVEMITAEKNRPRTVIARIRPQVEEHIRWLEKSLTDLDQDLDGFIRSSPMWRTKERVIRSVPGVGPVLSATLLANLPELGELSRGQIAALAGVAPFNRDSGTLKGKRTVWGGRRRVRAALYMAALVASRYNPVIKDFYQRLCSLGKPKKAALTACMRKLLVILNSMVRHGREWQPNLQAP

SEQ ID NO: 493491 - protein, 320 aa, unidentified
MRNTVGLDISKLTFDASAMVGKTEHSAKFDNDSKGLDQFSDRLKSLGCQNLHICMEATGNYYEEVADYFAQYYSVYVVNPLKISKYAESRFKRTKTGKQDAKLIAQYCRSAQESELVKRQKPTDEQYRLLRMTAAYAQIKSECAAMKNRHHAAKDEEAAKAYAQIIKAMNEQLEVLKEKIKEQTEKPNCKEGVKRLETIPAIGRMTAAVLFHHLTSSKFETSNKFAAFAGLSPQQKESGTSVRGKGKLTKFGNRKLRAVLFMPAMVAYRIRAFPDFIKRLEEKKKPKKVIIAALMRKLAVIAYHVHKKGGDYDPSRYKSA

SEQ ID NO: 493492 - protein, 296 aa, unidentified
MLIIGCDFHPRYQQIAMMDTETGELVERRLEHENGEARAFYASLPKPVLVGMEAPGYAQWFERMLAEFGHELWIGHASEIRAGVVRKQRTDARDAQHLLRLLLEKRFPRIWIPSPAERDARQLLRHRYKLVCFRVSVKNQLHGLAMSQGVCRKKKLFTAQGREELEKLSLGPWGSRRRQELLGMLDQLNPVIDELDRAVRQEAESRADAARLMIHPGVGPVTALAFVLTLGPVARFRRSKQVVSYLGLNPKERSSGDKQHTYAISKQGRRNAVELARGRAVNFSESRREPHKFGQR

SEQ ID NO: 493493 - protein, 310 aa, unidentified
MENIIIGIDVSKDRLDVAVRPSGEVFVIGRNPAGLEQLALRLGALSPNLVALEATGGFETVVAAALAAARLPVVVVNPAQIRAFAKAVGQRAKTDPIDAGIIAHFAEATRPEPRPLPDEATQLLADLVARRRQILEMMVAERQREKRVTIPHLRKSIVRLLKALKRELTSVDTDINDAVRGSPAWREKEDLLASVPGVGPTIARTMIAELPELGQLSRRQVASLAGLAPFTRQSGQWRGRSFIAGGRTTVRTALFMGAMVAKRHNPVLKVFFDRLVAAGKPKMVALIAVARKLLTMLNAILRDRKPWQTA

SEQ ID NO: 493494 - protein, 283 aa, unidentified
MKIVGCDLHARQQTVAMVDTETGEFTEKTLCHEGNAVREFCAAIEGPVVVGIEATGAMQWFLELREGLGMEYRVGDPAKIRAKETRKQKHDRQDAGLLLELRVADRFPEIWMPSSEQRDLRTLPRDRHQWVKMRSRVQHTLQAIALNHALRQGRGLWSAEGQSALQALPLPPYTAQRRNELLSLQGQLQKRIQELDKEVEGQARQRPQSRRLMTHPGVGPVTALATEVFLGDASRFTTGNEVARYIGMIPCERTSGKRQRLGKLTKEGNKLLRYLWTKQRCMR

SEQ ID NO: 493495 - protein, 382 aa, unidentified
MKTEQKPIKYSIGIDCSKDELVAAAVVMTADYRCIHKAGKTFKNTPGGYSLLDGWIRQKVSKDAPVGIAIEATGNYHENVTLFLHQKGHRVSVVLPNKSKRYMQSLGLRSKNDSIDAKGLAQMGAEQHLKQWIPFSKNIYELRSLTRYYEQITQTQTSLNNQLLSLKHNMYQMESIQTQLSELIDTIDRQRSDILRQIEQMIASDPVLSERVSKIIKIRGLGLLSLATIIAETNGFALFENTRQLTSYAGYDVVENQSGKRSGKTKISKMGNSHIRRIMYMPALGVVKYGEESFVRIYNRIYAKTNVKMKAYVAIQRKLLCLIYTLWKNNEEFVPGYDASGNAGVVDPLSVKKEVGEPLARLHKMDLRTTRVAVSPLSVQQR

SEQ ID NO: 493496 - protein, 383 aa, unidentified
MKNAIHYVGLDVHKETIAVALCDEQGRATSLGTIPNRPDAIARLMRKLSSRATLSVCYEAGACGYVLCRQITALGIDCVVVAPTLIPVKAGDRVKTDRRDAVKLARYLRSGELTSVWVPDEAHEALRDLVRLREAAKADQRRARNQLGKFLLRHGWHAPDGVKAWGAAHRQWLQSLWMEQPAQRVVLQENLAELDHQNERIARLDAALHAQIETLPQMCKQLIGALQCMYGVAELSALTVVAETGDLGRFRKAPQLFSYAGMVPSEHSSGGPGHERRGAITKAGNAHLRRIITESAWHYRRPPRVSAELRRRRAGQDAVVIELANKAHRRLHDTYRRLVARGKPTPRAAVAVGRELLGFMWAIAQRVQTHMQQACLNGQAQRA

SEQ ID NO: 493497 - protein, 370 aa, unidentified
MKNDTTLFVGMDTHKDSISVAYAEAGSAAPPVFLGPIGSRQADVDKLVRRLQGKAAKLVFAYEAGPTGYGLYRHLTAKGHECRVVAPSLIPKKPGDKVKTDRRNAVGLTRLLRSGDLTSIWVPGVEDEAIRDLCRARDATLLTLKAAKLRLKSFLLRLGLQYTGRADWNAAHLRYLSRIVCPTPAQQIVFQELLRSVDEQVDRLARIESELAGLVPSWRLYPAVKAFQALRGVQWLVALTVTAELGDITRFDNPRRLSAFVGLIPSEHSSGASRSQGGITKTGNSRARRALVEAAWAYRYPAKVSEHIRKRIEDLPKPIQDIGWKAQVRLCKRFRRLTARGKHHNVTITAIAREILSFMWAIAKEVPIQG

SEQ ID NO: 493498 - protein, 343 aa, unidentified
MSDGIPGGQFVGVDLHGRRSVICRIDAGGRELSCTQIDNDPQVLVREVSRAGCGAPVAIEATYGWYWAVDALQAAGLDVHLAHPYGLKAMRKRRRVKTDAKDSYELANLLRLGSLPEAYIAPTPLRELRELVRHRHQLVKAAGSVKAGIRAVLAKHNVRLPVSDLACGLGATLLDQVSLTVPYRQRLESLRRQMLLLEDEIGAVEVELDRRLKNHPDYRNLQRIRGIGPVIAAVLVAEIGDVHRFASADQLACWAGLTPRHYASDRTIRRGHISKEGSVLVRWAAVEAVQRQCEPAAREVRERILARRGHGARNVAKIAAAHRMLDIVYYTLRDGAARALDAA

SEQ ID NO: 493499 - protein, 401 aa, unidentified
MADVWAGIDAGKREHHCVAIDETGTVLLSKRIENDEDTLLALMSEVSDLAAGGSLTWATDLNAGGAALLLTLLTDHKQQVLYIPGRIIHHAAATYRGDAKTDEKDATIIADQARMRRDLTPIRPNEQLSQDLRLMISHRTDLVHDRVRTINRLRAVLLEYFPALEAAFDYSKSKAALILLQGYQTPKALRTLGEARLTKWLHARGARNSAAIATRAITAAKAQTAVTPAQSYGQKRVVSLAQNLTRIDTELAALERGITQTFMSHNDAQTLLSVPGFGPILAADFIANTGGDMTAFQTADRLASVAGLAPAPRDSGRISGNLHRPKRYNRRLLRTCYLAALSSLKNSPASRVFYDRKRREGKTHTQALIALARRRMNVIWALLRDHTIYQEPLPLGRAQAT

SEQ ID NO: 493500 - protein, 352 aa, unidentified
MRHYIGCDAHKKYSVFGGISEAGEIIPMQRVEHDRETYRSFLKGLPQGSQIAVESVGNWYWLIDEMEKAGHVPALVHPAKAKLMMGQVNKTDKLDARGLAILARNGTLPEVWIPPGVLRDQRELPRMRMAMTQVRTKFKNRIHSAFAKYGITFDEVSDLFTRKGRKLLEESLDKLPPETRLSVQEQLWLLDQAEQSIKKTEKRISAVIKMDPTMQLLQTLPGVGPILAIVIALEVGSIDRFAGAEKLASYAGKVPRVNSSGGKTYYGKVRPDVNRYLKWAFTEAANAIVLQQERRPDSHVVRLYQRVYRHKGHAKAITAVGRHLAEATYWMLKNNEPYREPRSKRLVSYTQR

SEQ ID NO: 493501 - protein, 439 aa, unidentified
MTALPVLDPKAAAIDVGSEQMHLSIAGDAAKVFGSTTTQLHALRDYLVSQGVRSVAMEATGVYWLCPYEVLEKAGLKVVMVNGKYVKNLPGRKTDMKDCQWQATLHAHGLLQGGFVPEEHIRRLQDYQRLRVDHITMAASHEQHMQKALERMNIKFHDVISDLTGVSGLKVIRAILACQRNPVALLALCDPQIQKKKADRVCESLVGTWKEEHLFALRQALAGWEFYQAQIAECDQALEHVLKQITETQPPPPPCLPSWGRRSGANAPQIPELHRLLWRLCGGKDPTAIPGISNYTLLQLVSETGTDLAAHWKSEKQFTAWLGVAPGSRQSGKRRASQKRSRNRAGRLFCVIARSVGRTADKALGGFYRRLRARRGGLVANLALARKLAALYWRVMVHGLAYVEEGLKKYQDRVAQTEQRWLRKLAKKHGMVLQAKAAA

SEQ ID NO: 493502 - protein, 343 aa, unidentified
MKINVYAVDLAKNKFQVHGFDRRGERRLAKTLSRAGMLRFFDAHEVAGVEVVMEACASAHYWGRRLGALGYRVRLIPPQHVRAYVLGNKTDANDADAIYAVSRRKDIREVAVKTVGQQDALLVHSTRERLVQARTALVNQLRGVLAERGVVFGRRIEVLRRELALWLDRPAEGEVTALLQQWVRERQAEWNALEEQIASCDRQMRQWYQATPACARLGEVEGIGVITATAVVASVGDARQFDSGRQFASWLGLTPRECSSGGKRHLGGITKRGDGYLRKLLIHGARAAVLTAKRKQDARSRWIKALVERRGHNRAVVALANKNARILWALLTTGECYRQPLAA

SEQ ID NO: 493503 - protein, 432 aa, unidentified
MSQFLNDFVVGIDVSSEFSIVAMLAPTGELIRKPFRIDHNPLGFHKLLDILKKEEERLKRKPIYFVESTGIFHLPLFFFLKSNDLKGFVLNPLCVHSTKNFDLRKVKNDNKDSEAIARLAKYQDVKVSMMPEPQILVLRMMTREYYAVSDMLTVMKNRLCTDLYLLFPGFLNVFSGPFGKTALAVLKSYPSPRAIRDANTDVLTFLISKASRKSSEWASNKVALLRDCAQLASSMPSEFSLLDTKIKFHIDGIEHMQASLNGIEAQVKTMIKSKEFPANAKRNIELLDEIPGVGFFTAATLIAEIGDFSLFNSPKALTAFFGLDPSVNQSGKFNGDRNKISKRGTRIGRRILFTVAMASIRRTRNGKEINPILRDFYASKCVSKKKKVALVAVMHKLLHYIFAVLRDQKPFEFRKPEDHQSWRNTELQPAAA

SEQ ID NO: 493504 - protein, 375 aa, unidentified
MVTSPPEKRCGRSIHLRSKKAVRERDRRATSSLRSRTVAGVKQARIMQGRDIKKKENMETKSVFAGIDVSKNSLDLANTSSQGTLNVAYDDAGVRKVIRVMKRLSPALVVLEATGKLEARLVAALQAAGLPVVVVNPRQVRDFAKAKGILAKTDAIDAGVLAKFAEVIRPEVRPLPDENTKELNGYLARRHQIVEMIVAEQNRRLTAELKLKPGIDAHIKYLRQTLTDVDSELDYRVKASASWRESDNLLQSVPGVGPILSLTILAELPELGKLNRRKIAALAGVAPFCRDSGKLRGKRTVWGGRASLRSALYMGTLVGSRFNPVIRAHYLHLLKAGKCRKVALVACMRKLLTILNSIMRNRSPWNPTLFVPEGT

SEQ ID NO: 493505 - protein, 339 aa, unidentified
MKNKKYFIGLDVHKKKTTYVVKDRIGNIILEDETATLYSELYERLEPYLKSSIIGLESCTSYYILYQNFLKNGYCIKVANTIQLRQLITKNDKLDAQRLAEMLRLGTFPCSYIPDEKIQRLRSLLQVRHSLMEEKVRCNNRIQAFLDRNGIVMPDQEAFGKKWRQKLLQYIGSAEVSLELRYEYDHFVYLEKKSEHLGQEISGYTMKYWKTEYNLIQSVTGFGPVLACYIIANILPISRFSSNRKLRRYAGVVPAFHESGGKKSKGHIPKTSSRKLLRWALIQAANAAGRTNTKLGYYYRKKKKQKNNAGIAHVAVASSMIDIIYKVLTTKQPYNPKIC

SEQ ID NO: 493506 - protein, 318 aa, unidentified
MGEDVYVGIDVSKTELVVAVRPSGESFTRAYDRAGLKQVVGRLSKLRPKLVVVEATGGLQRQVVAALWTAGVAVAAVNPSWVRGYARGSGLLAKTDRIDAKLLALFAQREQPAPRPPLDAETQALQELATRRDQLLEMRVAEQQRLQRASAQVRKELRQHIAYLEGRIAQIDDDIDKTVRRSEAWRRKSEVLRSFPGVGKVFCTTVLAKLPELGTLSGKAAAALVGIAPFPDDSGGRRGRRIIRGGRYPVRSKLYMCALSAIRWNPVLKQFYERLLARGKLEKVALVAVMRRMIVILNAMLKTNTTWTQPCAAALEKN

SEQ ID NO: 493507 - protein, 462 aa, unidentified
MTIPGGKNRRKNEASWSTSLPAIRPMVAGIDVGSSQHWVCGPAREDGKPNVRVFGTTTDQLNELADWLVEQGVESVAMESTYVYWIPIYELLESRGIEVLLVNARQLHNVPGRKTDFSDCQWLQLLHSCGLLRGSFRPSEAITRLRALQRHLANLVAERTRCVQWMQKALDQMNVQVHRAVTDLTGLTGMAIVRAIIAGERDPGRLAMHRHGRCRKSAQEIAKYLTGTWREEHLFNLASALRLYDALEAEIASYDARLLQELDALHPPERQQESVPPHPNRAKERAIRSRGEQQARTALWRFAGVDLTRIDGISAGATQVVLTEVGPDLAAFPSEDHFVSWLRLCPRTPISGGKPLKKRRNGLGANRIAGVLRMAATSLQRSNTALGAYFRRIARHKGAAVAVFATARKLALLVYRMLRYGHDYVDIGENAYEHQFQLRRLAAITESAKSLGYTLVPRIAAE

SEQ ID NO: 493508 - protein, 410 aa, unidentified
METIVKRAAGLDVHKTQVTACVRVPGRGRERAQEVAEFPTTVRGLLSLRDWLKAHRVTQVAMEATGVYWKPVWAILEDEFDCLLVNARHVKQVPGRKTDVSDAAWLCQLLEAGLLRRSFVPPKPIRALRNVTRYRKAQIGERQREANRLHKILEDTGIKLDCVASDILGASGRAMLDALVQGTTDPQVLAELAKGKLRAKIPALKEALVGRFDRQHALIVSAILAHLDFLDEQIQLLSDEIEEQLSPFAGAVELLCTIPGVQRRTAESVIAEIGTDMSRFPSGRHLASWGGQCPGNDRSAGKRRSGRTRHGSKWLDTALTEAALTATRTNDVYLAARYQRLRPRRGHGRALGAVKHSILCACWHMLTTGELYREAGGDYYTRRDPERATRRLVAQLERLGHHVTLEAAAA

SEQ ID NO: 493509 - protein, 432 aa, unidentified
MTETAASSPTDWSSQFTHFGGFDWAKQQHHFVAVDRSGEVVLSLSFDNNAEGWAQLRREVAAFPKLAVAIETNCGSAVDRLMDLGLAIYPLNPKAAERYRDRKAPSGIKSDELDAWSFGDALRTDGYAWRKLRPQDHLTAELRLLCRDEIALIEQRTALVNQIQQALHEYYPAALDAFDNWISSGAWEFVIAFPTPQALLAAGKRKWEKFLHTHKLYRPETAPKRLEIFAKAAQFANPNPAVTNAKSLLAVTLARQLRVLQTQLDEYRSRITKLFNDHPDKDCFGSLPGAGAKLAPRLLAELGADRSRFKSPIELQCYAGTAPVTRQSGKKSFACVRRACNKCLRATVHLWADLSRQFCAWAESYYQQKKTQGMAHAAALRCLGQRWLKILWRMWQNRTAYDEALHTRNQVAHGSWVIKLMESSATATAAAN

SEQ ID NO: 493510 - protein, 386 aa, unidentified
MHDSTDLPVPERTGIRGDSATLFVSLELSRSTWVATSLAPGSKKMSKHTLVGGDGRKLLDLLARLKTRAEQRIAAPVKVVAIHEVGLDGFWIHRLLEANGVESHVVDPASIAVPRRHRRAKTDAIDGETLLRTLMAWQRGEPRVCAMTVPPSPSEEDCRRVSRERATLLRERIQHTNRIRGLLFGQGITNYNPLHKNRRECLEELRTGDGRSLSTHVKAEILREIDRLELVLRQIGEVEAERDEILRPAEASSPAALLMRLKGIGAEFATVLYFEGLFRHFENRRQLAAYAGLAPSPWKSGSIDHEQGISKAGNPRLRTTMVELAWMWVRYQPDSALSCWFRQRVGSERGRTRRISIVALARKLLIALWRYVTHGEIPAGAVMKPV

SEQ ID NO: 493511 - protein, 344 aa, unidentified
MSELTTIGLDIAKNVFHAHGADERGAMIFSRKLTRSKLLDFFAGQPVCVVALEACGGAHHWARQLQSMGHEVRLIPPAYVKPFVKRNKNDAIDAEAICEAAQRPGMRFVAVKSEEQQAAGLVFRTRDLAVRQRTQLINSIRGHLAEYGWVAPRGTAHMTMLSDLLEDEEMASSLPEAARPIFKLMVDMLGELDRQIAVLDREIARRAKEDEDARRLMTIPGIGPIAATAIIALAPPIETFRKGRDFAAWLGLAPRQHSTGGKQRLGSISKMGERTIRRLLIIGGSSMVRQACRFGAPAGSWLERMLARKPRMLVSVALANKMARMVWALLTRKEDYRAPEAVAA

SEQ ID NO: 493512 - protein, 435 aa, unidentified
MEEVEDEPLFCDRVAGIDIGKATVMVTIRVPSEARAKGRQQETREFGTTRRELLALADWLRGWQVERAGMEATSDYWKPVLFTLEQEGFDCLLYQASQVKALPGRPKTDKLDSVWLARITGQGSLAGSFVPPEEIRRLRTHTRCRRKLVQMRTAQKERCEKLLEDAHLKLSSVISDIHGVSGRDMLRAIAAGERNPKVLAQMARGVMRSKIARLEQALDCSFFTGEHAFILTMMLDSIDSLTAQAGVLDARIADMCQPYQRQLEQLDEIPGFGTTTAQDLIAEIGTDMNVFPTAGHLASYARQAPRVKESAGKRKGKNATGRGNPYIGGALGEASISAGRTQTFIGEKYRRLTRRMPKRKAQVAIMRSQLVIAHALLSDPDARYQDLGPDYYERKADIRRRARNHARALERLGYKVTLEAIDPGTGELHLVATAG

SEQ ID NO: 493513 - protein, 355 aa, unidentified
MDNRKYIGMDVHKEAIAIAVLNAAGKLVMESIIETKANTILEFLKGLRGELHLTFEEGTWASWLYDLLQPHVKRVVVCNPRRNALLKEGSKSDRVDARKLAELLYTKMLRPVYHRDHGMRAVKELARSYVTISKDQARVMTRVKALYRSWGIACSGKQIYTVRQRASWLGKIKEPGVRRRADFYYQQLDGLRSVRRQVRRELLLESGKHKASKLLRQIPSIGPIRAALLLALVQTPHRFRTKRQLWTYSGFGIETHDSAEYRYVAGQLERSKKPQQVRGLNRNYNHDLKNLFKSAATNAIAKSGPLQEFYLALVKRGIRPEMARLTVARKIAAITLAIWKKGVSFDAEHLKQQTA

SEQ ID NO: 493514 - protein, 466 aa, unidentified
MENNYILYVGMDSSKGKADAAILKVSDRRSVKPKFLRKKLSLKFVKSEVTSFLETVRSYSDDNCTSICFALEVTGIYSTNVYNFIKDNLNDNESIKFLNTDFVNQWRNAHNIAKSDPLDAQTISTIIGTDSDVQYVNDNVFKNKNGYQDLKALVHRHYQIKKIYSQEINRLIAQCDCLFPELQYVFEPKSAAFIAVLSSYPTTHDIINASRLEVFNVVYEATKHRCSMDKIDKLFDLCHDTLVPDNISSYGRSIILDLVENIKNIKGQLKMIERYIRDVASLNPAYKLLLTITGCGPLTAATVIAETGDIKRFKNADCFVSYSGTSPRNKRSGTSVETMGKISKRGSRYLRHAIYMIAEFARRHNPVLKHQFERIKNGNKKRHKLANIAIANKIARYIYSIMKNESGFVIFHEHIMRLPEETQNTFFNSISLDFPKNTRKQIYQYSDINGEVHKFVYTKLEETMII

SEQ ID NO: 493515 - protein, 447 aa, unidentified
MAQRKRPATQAAITLTHPNAAGIDIGSAAHFVAVPPERDDEPVREFASFTADLHRLADWLDACGVDTVAMESTGVYWIPLYELLESRGFTVLLVNARHVKNVSGRKSDVLDCQWLQQLMSFGLLRGAFRPADQVCVLRSLSRQRTMLLRSQGRFVQHMQKALTQMNIQLANVISDVAGETGQRILRAIVAGERDGRALAQLRNARIRASEDEIAKSLQGNWRAEHLFALKQALDAFDFCGTQLAECDAQIQAQLQALHVREDAPAQGKKRGRARNAPKFDLRTQLFQMCGVDLTRIDGIDVTTALAVVSEVGADLSKFPSDKHFASWLGLCPGTKITGGKVMSGKTKRCANRAAQALRLAAAALRSSQSALGAYYRRLCARMDKPKAVTAAAHKLARLIYAMLTHGQEYTDRGQDYFEERYRQRVLHNLAQKAKAMGMQLVPSDAPA

SEQ ID NO: 493516 - protein, 405 aa, unidentified
MSFILAFDVSKGESYKVLYQDHHCLTEGKIPHNQEGFCQLLEEIIALPELPEIVFEATGVYSRPLEKFCQDNRLAYCLLNPLEAKKQMEEGSLRSWKTDKIDAHKLAQTHWKNTRLPKTHQAEVFQELRDLARFYQEIEEKISRVRMDLHQALQLTFPELENFFSSRVTPYALSLIEAFPHPTFVLTSTRTKIKNRLVKSTRKHISENRAWQKADQLLAYAQHSYPAVNSSSIHCQKTSYYACLLQDLLEQKEHLMAQMIQSAQALEEFEIYQSIPGIGAPTAALLIGELGDIRRFPTANQLNAFVGIDIRRFQSGNYVGKDRINKRGNPKGRKILYFAIRNMIRQQRAAPNHLVDYYYKLKKQPVPKKEKVATVACMNKLLKCMHAMVRKHTRYAYTYTASNDQ

SEQ ID NO: 493517 - protein, 423 aa, unidentified
MSIDHTRTETAAIKTQINAVFASLELSRSKWVVTSISPGAGEKMSRHVVKGGDLSALCDRLEAVEAKARTRTGSQQPYQIIVMQEAGLDGFWLHRALQAKGYTSHVVDAASIAAPRRKRKKKTDRLDGEALLRALLAWSRGEPRVCSMVRPPSPQEEDVRRACRERKEMVKERIIHVNRIKGLLFAQGIGDYEPLRRDRRRRLEELRTGDGRALEPNLKKQLNRMLDRLELLVDQIAEVETARDERLGVASPRKAAKKAGSTAQPACAASQGATNEGMAAPAAATTRAVEVAQKLIKLGGIGAEFTSVLSTEGLARDFQNRRQAGSFAGLTSTPWISGQLDHEQGVSKSGNPRLRTTMIQLAWLWPTHQPDTKLARWYKDRLANASGRGAKQKLVVALARKLFVALWKYVAFGELIEGAVMKA

SEQ ID NO: 493518 - protein, 406 aa, unidentified
MQGPVITVDVSKGSCHYQPYVSNGHPMRKPKVLHDTVEGFQSLSDLIDTMKDRYECETIPVIFEATGVYHRCLQKYLDDHQIPYYIISPLMSASYRKTTPNSNKTDDLDCSHIAKAYYGECNLFPYDKLSKSFHNLRELNRYYECELNHLRMRKNTFRKYLDIVYPRLDKCFKGHSSLYDEIPMEVIKQYPHPSLLLKHKEETIVKKIEKKTSHNASFIQNIVHEMYECSMHCYSGADVTDVESMILPELVDDLQSQEERCDEILKQLVSEAQKTPYFTSIVSIVGIGDNLAARIIAELGDMSRFSCRRAITAYAGLNPKIRQSGDMDGIHLAISKKGNKHLRCLMYLAVSCNYRLKKGDVLYEFNQKKRQQSFSPLKPKAATIATAHKLLLIIYALCTNGTVYHS

SEQ ID NO: 493519 - protein, 402 aa, unidentified
MNSVGIDVSKGKSMIAVMRPFGEVVCSPFEASHTSSELSKLARLLKSLDGETRVVMEATGNYHLPIAIALHEAGIYVSVVNAMLVHDYGNNTLRRAKTDKKDAIKLANYGLDRWPNLPEFSPEEEIRMQLKTCYRQYQQYSKVQTMLNNNLISLLDTVFPGVNRLFSSPVRADGSEKWVDFVESFWHCECVSGLSQKAFEKKYQKWCQKHGYYFREAKALEIHIAASGCVGVLPKTETTHLLITQAVSQMKATSSALAELKKEMLHLAEQLPEFPVVQKMYGVGPTLGPQLMAEIGDVRRFHSKKALVAFAGIDAPPNDSGQIAGNHKAMSKIGSSSLRRTLFLIMGVYLQKSPVDEPVYQFMDKKRAEGKPYRVYMMASANKFLRIYYASVKAYLDAMEAA

SEQ ID NO: 493520 - protein, 346 aa, unidentified
MTIVGCDFHPSWQQVAVFDSETGEIRELKLENGNGEAERFYRELSSRALIGFEACGNTQWFEDLLDRLGHEVWMGDAAAIRASYVRKQKTDRRDAAHILKLLIENRFPRLWRPSAEERDQRQLLIHRHKLVGIRARAKNGLQHLMLNRGVQMKRKLWSEAGQEALRALPLEGWAAQRRQDLLKLLSVLDPQIHQLDVAIQRAAQENPRARLLMTQPGVGAITALAYVLTMGDVNRFKRGKQVASYLGLIPSECSSSKRRRLGSISKQGNSFMRMLLVESAQTVNRLDEGFRKQYQHRCHRMAKGVAKVAAARRLAVRLFWMLRTNTGYPEIAHIEGSPREGVVGES

SEQ ID NO: 493521 - protein, 368 aa, unidentified
MKQVTTYVGIDAHKKDLFIAMLIGQQKTPVTWQLANEPQAVRRLVRKLEREAPGPVNVFYEAGPCGYALQRQVTTPRVSCDVIAPALIPRKPGERVKTNRRDARKLVELGRAGLLTAVQPPTVEDEAVRDLARARDDAREDLQRCRHRLGKLLLRRGLHCAGRNWTRAHRQWVDSLVWTHAAERAVVDDYLLAIDHTEARLLELDARLAEIAECEPYRERVGWLRCFRGIDTLTAMLILAELHDFRRFASAPALMAYLGLVPGEDSSGEKHRRGRITRTGNALVRRLLVETAWHYQHRPSVGVALTRRRKGQPGRVIAIADKAQQRLCRRFRKLAAEHKPAPKIAVAIARELAGFLWAALQPAPVSVT

SEQ ID NO: 493522 - protein, 421 aa, unidentified
MTQSTPDTFAAFVGIDWADAKHDACLQAAGSAKRECFQLEHTPEAIDAWVTTLRTRFNGQPVAVCLELNKGPLVFALRKYDFLILFPLNPLTLARYREAFTPSRAKDDPTDAELQLELLLTHRDKLRPLNPQSPTMRALAQLVEHRRRVVGDKVRITNRLTSTLKNYFPHALQWFQDKDTLLFCDFLSRWPTLKAAQLARRSTLETFFRDHHVRSSDVIDKRIHAIHAASPLTIDEGVIAPHALLVQALVSQLRVTLQAIETFDNAIAQRAQSHPDFPLFQALPGAGPVFASRLLVAFGEQRDRYASAAELQRYAGIAPVTERSGKKSWVHWRLQCPKFLRQTFVEWAAESTRHSFWAQVYYQQQRDKGKAHQAAVRALAFKWIRILFRCWQERTPYNESAYLQALNSRGSSLIHNLAKEA

SEQ ID NO: 493523 - protein, 429 aa, unidentified
MRTESTPGARGPVFCGVDTHADSHWLCVLDWRGRKVLSRQFPADAAGYEALAGAIAAAGEPACVAMEGTSSYGAGLTRHLASLGMPVREALSPARTQRRRPGQGKCDESDAERAARAAMSGSKLGTPKSQDGWVDGVRYMLAARSGAVKARTSAINTARSLLTTAPEGLRSRFRGMGGPRLMEELPSVRAEGALGAALGALADLWAAARDAALDMERAIEASLEENCPALLAMYGCGPVSAAKLAVAAGDNPGRLRSEASFAAICGACPIPASSGKTVRHRLNRGGDRQANSALHEIARQRVMRDPETAEYAERARGRGKSDREVMRCLKRYVAREAYRALMRPHEVRRPEDASELVAARRAARVSQVRAASILGTSEKYISMLERGQRELKPIRRAYEAWVEAGLPLDWDRQAFEAERKMDSKKHLAK

SEQ ID NO: 493524 - protein, 429 aa, unidentified
MARVRGVDPQRCLVVPVDVGKWSAMTLVADHHGEVVVAPFEFRLEEPGVRQLLSAVAVAMTERDAVVCRVGVESAGHYHRTLVARLRAGGVEVVELNPAAVKQARAQQLLRRLKSDERDLGAMAELLVRGAGRLPQVRDDAMAAQVAWAAHRRRKVAAQVALANQVQGHLDLVFPGLSACFAGILQTKAGKVIVRDLADPDRMRRLGLEGLRRFVARRGVTLQRRKAEQLLEAAHVALRLPATERAPIAALLAADVALLDVIGREIRRAEAALAGVLDATPAGVLVSLPGVGVVRASAYGAAIGDPSRFSNAGAAYRASGLVPAEYSSAGRHRGGQHISREGSVELRSAIIELGRGLASHDDDFAAYRRRLRSTGKRPAVTAVAVGHRAHRLAFAMLRSQEPYDPKRWAAAVADGPVMAKTGGRPTRTT

SEQ ID NO: 493525 - protein, 382 aa, unidentified
MHASNICTPIADYIGTIFVAIELSQKTWLAVVRSPDRDRISGHKLEGGNDAGLLALIESVRARAARALGSAPAVVSCYEAGYDGFWLHRRLVAAGITNFVFDPSSIAVEQRRRRAKTDRLDGELLLRTLMAHCRGEPRVVRIVRVPSREQEDVRRGSRERERLIKEQTGHSNRIKALLRTLGLAAGNPRRGDWLRWLAEQRDWEGRAVPPHYLAELAREHARLMLVVAQLGDLSQAPEATDGPAAARMAKQKTQLRQLKSLGLASAGTLVDEALYKDFDNRRQVGSYIGLAPSPWRSGATSREQGISKAGNRRARRQAIELAWLWLRHQPDSALSRWFQQRTAGASARMKRIAIVALARKLMVALWRYLTTGLVPEGAVVKA

SEQ ID NO: 493526 - protein, 347 aa, unidentified
MTIVEDRPVITGGVDTHADLHVAAALDSIGGLLGVQEFPATAAGYASLLGWLGGFGDIALVGVEGTGSYGAGLTRHLAAAGVRVVEVDRADRQDRHRQGKSDPLDAVSAARAAQSGRASGAPKGRDGAVEAIRALMVAKRSARAERTQAINQARALIVTGPDELRARFAGHRPAQLVEAIAALRPRPGDVPGYATRVALRELGRRAQFLDAQLDRLDELIGPLVTARAPGLLALHGVGPDTAALLLVAAGDHPERLRSESSWAHLCGAAPVPASSGKVSRHRLNRGGDRQANHALWRIVITRLGSRPGHPATRAYVERRTKEGLSKKEIIRCLKRYVAREVYPYLRG

SEQ ID NO: 493527 - protein, 343 aa, unidentified
MQAITTIGLDIAKSVFQVHAVDAKGNVVLRRQIKRRYVLAFFQKLPPCLVGIEASASAHHWSRQLQALGHTVRLMPPAYVTPYVKRHKNDAIDAEAICEAVTRPNMRFVATKTREQQSCLTLQRTRHLLIRQQTSVINAIRAHLAEFGIVAPVGRNGVDQLLGIVADASDKRLPELARACVAALGTQLGTLKAQILQFDRLIMAWHRSSEASRRLDDIPGVGPALATALVATVADPRAFRSGRNFSAWIGLVPKQHSSGGKDRLGSISKRGDRYLRFLFVAGALAVIRYAKIHGTKHRPWLTALLARRHTKVAAIALANKIARMTWAIMAKGEHYKEPVALAA

SEQ ID NO: 493528 - protein, 380 aa, unidentified
MTTATHNGHDTTPERVLFVAFELSEKTWKLGFTTGHGQKPRERSIAACNQARLLQEVAQAKKRFGLSETAAVVSCYEAGREGFWLHRFLQAQGITNHVVDSSSIEVNRRKRRAKSDGLDVRKLLSMLMRFHYGERDVWHGVNVPSIEAEDQRHLHRDLETLKQERASTTTRIKGLLSSQGIRLTSLSQFPEQLDALRLWDGAPIPSGLRQRLLRVYAHHEFLSQQIAAVEAERRALLHSAQDASLAKVRQLMQLKGIGINGAWLLVMEFFSWRTLKNRREVGGLAGLTPTPYQSGASARDQGITKSGNRHVRWMTMELAWSWVRYQPESALSCWFRERFGGGGKRLRRIGIVAVARKLLIALWRFLETGVLPEGAALKEA

SEQ ID NO: 493529 - protein, 449 aa, unidentified
MSRPQVIDDREHERIYDKVAAVDVAKDSGMVCTRTPHPSRPGARRSTIWTVQARKNAIAVLGRKLARDGIEIVTLESTSDYWRIWFFVLEACGLAVQLVSASQARNLPGRPKTDKLDAQWLARLTEMGLLRASFVPPRAIRDLRDYTRARTRLVQERTRCWQRLEKLLEGALIKLSAVASTLATVSAQDMIRAMIAGQRDPRVLAGLARTRMKARHDDLVEALDGMFDDHHGQLAGLLLDRIAFLDAQISQLTTRIGQAAAAIPAAWGISADGSTGPDAGTGPDAAAFPAAARLAEIPGMSEDLARSVIAETGLDMTRFPTAAHLVSWAGLCPAARQSGARIRAGSKGHGNGYLRGYLGQAATGAARTSTFLGERYARIGRRRGKAKAQVAVARSILVIIWHLLADPTARYHDLGPGYHAARLDQDRKIRNHVRQLQALGFDVTITRAA

SEQ ID NO: 493530 - protein, 337 aa, unidentified
MEGIVVVGFDLAKNVFQIHGVAADGGVVVRRQIRRGQVLAFFASLAPCLVGMEACASAHHWARELMALGHQVRLMPPAYVKAYVKRGKTDAADAEAIAEAVTRPTMRFVAVKTKAQQAALMLHKTRDLMVRQRTMLINALRGHLGEYGIVAAKGTAGAQAALRAIHLERDQLPELARAALHGLARQLEALEREIEQLEARIVAWHRNDETSRRLATIPGIGPITASAIAASAPDPSLFRSGRQFAAWLGLTPRAHSSGGKERQVGISKMGDGYLRRLLVVGATAVLRMARQRGGGAWIMGLLERKKPKVAAVALANKTARIAWALMSRKENYTPVTI

SEQ ID NO: 493531 - protein, 371 aa, unidentified
MKSILYVGMDVHKENYTLCSYSFEKDDLQYKQTMAPDYKMVLKYLEQLRIRNSDEIEIVCGYEAGCLGYTLYHQLTDHGVKCVILAPTTMGITNTNGIKTDKRDAGNIARCLAFRTYSEVHVPTLQDESVKEYIRMRDDQKKALKIIKQQILALVLRHGHRFDQGKNYWTKKHINWLKSLDLGGILQESLNEYFITYEYLTDKLERLDKRIEELAGDERYQTNVKKLSCFIGIKTHTALSALVEIGDFNRFAKAEQMAAFLGLVPGEYSSGSKQKHGSITKAGNCHVRRLLVEAAQSYTRGAVGHKSVDLKRRQTGNEPQIIAYADKANERLRRKFYRMTLKNGTKRNVAATAIARELACFIWGMMTDHVA

SEQ ID NO: 493532 - protein, 366 aa, unidentified
MKMSVGVDLHKGQFTVYWRSEDGTIGKFERYATIESFYRLFERNLRHFVDRGWQVRVGVESTGNTRYFKRRVEGVGVPVVVINTLKFKVVNESVKKTDRRDAATIAEFLEKGMLPEARLCSPESEELRRLIRTRTVLVRSAVAVKNQLHGFLLSMGIERSRGSLQSKKERRRVLSVLVEQGLAGYAVEPLVETIDRLEEQVKSVEKVLAEKVAGDRVVELLKTIPGAGLITASTIRAYTDEIGKFVSYKQYAAYAGLVPWVHSSNTTERYGNITKRGPCELRTALVQVVLGMVRNKRITGGYRIMTRYASMKRQKGSGKTIIATARKLSKVVWYMLQKNEPFDPTRMNDPKVRRIALEMRAVEPAA

SEQ ID NO: 493533 - protein, 348 aa, unidentified
MAMTIVEAARSVTGGVDTHLDVHVAAALDPLGGLLGVESFATTPAGYRKLLGWMAGFGPVALVGVEGTGAYGAGLTRFLRRHGVDVVEVDRQNRQARRAQGKSDSADAIEAARAVQSGRAHGAAKTRDGNVEAIRALVVAKRSARDVRIKTLNQIRHLSFTGPDDVRARLKNLTATMLPVEAAALRPRAGSDPVVFATKLAIQTLGRRVLALEEETARLEGVLAELVAATAPSLLALYGVGIDTASALLAAAGDNPERLRSEAAWAHLCGVSPIEASSGKITRHRLNRGGDRHANAALWTIVMVRMVSDPRTREYVERRTKEGRSKREIIRILKRYVAREVYPHLPRA

SEQ ID NO: 493534 - protein, 341 aa, unidentified
MMIIGCDFHPRFQQIAFLDQETGECGERRLNHLEEAEKFYRSLTGCQVRIGAEATGNFRWFRRWMQELGHEFLLGDASAIRAACPRRQKTDKRDARHILTLLVEDRFPVVWQAPAENDDLRQLLMHRCRLVRMRTKVKNQLDSMTKDEGVLSSRVWSAKRRSQIEALPLPGWYGHRRTDLLGLLAELDERIKPLDEAVREAAEDNQEARLLMTHPGVGPIVSLAYVLTIGDWRRFPRGKQVGSYLGLIPAEESSGGKRRLGRISKQGSTLLRWLLVEAAVHAQRHDASWHRQYLRLSMTKHHGVAKVAIAHKLAVRLYWMLRSGDDYSKVMERGSHAGQSV

SEQ ID NO: 493535 - protein, 309 aa, unidentified
MLTAEADKCKTKAVVNTAAGVQALLAWCAKHGAQPAQLHAILEPTGLYHEQAATALPQVRVSLVNPAQARDFAKALALRSKNDALDSYVLARYGQTLSPALWHPAPLHARQLRALLTRREALSKDLLRELNRKEKSQFSPSAPLVDGSIDKAIAFLREQIKQIERAIDQHIDNHPDLKQDCELLNSIPAIGPQAGNAILAVMHNRHIDSAQSLAAYLGVVPVQRQSGSSLNSCAHLSKAGPSQVRATLYMAALVGTRHNPHIRALYQRLLKAGKSKKAALGAAMRKLVHLCFGVLKNRIPYQPNYAMNG

SEQ ID NO: 493536 - protein, 425 aa, unidentified
MSCLLHPTRVIDLPESSRKAVPIMTAPARPAPVVVGGSDTHADTVHVAAISTLGREVADREFPTTAAGYRAAVAFLTSHGPVDQVGIEGTSSYGAGLARAVTNAGLQVIEVNRPSRADRRRQGKSDPLDAYHAARAVLSGQATSDPKDQSTEAIRSLHNTRRSAVKARTAATNQITAMLITAQDGIRSKYRALQGQPLITALAKCRTAVVDPVDAAVLTALKALAHRHQFLTAQAEELSTLIDALVTTANPALRAAFGVGPDTAAQLLITAGANPDRLRSEASFAALCGVSPVPASSGKTTRHRLSRGGDRHANNALYRIALSRMAHEPRTKQYVARHVAAGRSTKEILRMLKRAIAREIHRLLTHKVALPEYADLRPARQAKNITVTAAANAFNIWPTVISRIERGLQRDDDLANRYRTWLQAA

SEQ ID NO: 493537 - protein, 454 aa, unidentified
MRWKKANTKADIDSAFPLLRPNAAGLDVGSREHYVAVPAGRDTRPVRSFGCTTWELKQMAEWLKACGVDTVAIEATGVYWVPIYEVLEDAGIEAFLFDGRQTRHVSGRKTDVLDCQWSQKLHSHGLLTRAFRPDKEIATLRAYWRQRGGIVECCARQIHLMHKALEEMNIQLHKAVTDITGVTGMRILRAIVAGERDVHALAALRRGRIKATTEEIARALEGTYRQEHMFALAQALEAYDFFQRQLADCSQALERHLAQMRSGSDTPPQTPPPKQRKNQPNFDLRNELARIAGVDVCLIEGIDAMTAQTLISECGTDMTAFPTEKKFASWLGICPNNRKTGGRIRSRRSRRVKNRAATALRMAAQTLHKSDSALGSYFRRMKARLGAGKATTATAHKLARLYYRLMKHGEAYLTRSQAEYEALQRQRTLTSLQRRARHLGLQLLDASTGELLGA

SEQ ID NO: 493538 - protein, 319 aa, unidentified
MTQNELVVVGIDVAKDKVDACIRTVTERRTFPTTASGRRSLIAWLRKHQVGKAVMEASGGYERVWAKALRQTALEVRIVDPKRVRSFAESAGRLAKNDKIDAEMIAWFAETFSEAPSQVEDPAHEEIKALVKGRKSLIDLRARLEMQKEHEVPALVGKAHARLLKKLASEIAAIETAIGAKIKATPAFAVRAEIIQSVPGFAEATALTLLAGLPELGQVSNEVAAALVGVAPYDDDSGKRHGQRCIKGGRRWVRNALYMPCVGAATLNNPVFKAFYQRLIARGKKPKAALIACMRKLIVILNTMIARGEKWDPKRYQVA

SEQ ID NO: 493539 - protein, 369 aa, unidentified
MSHVTSIGLDVHARSVAAAAFNPFTGEVVHRDFGTDAAEIAEWALGFEEPRACYESGPTGFHMARELRALGLDCAVAAVSKMQRPAADARRKNDRRDAEFIARMLATHNIVEVPLPDAAVEAARDLDRALDDATAEYRRARQRLNMFLIRLGHVWDERNADGTRKGSWTRAHWRWISGIRLEGPQRDVLEYYVTAARCAESDRRQLEKKVLALARTDRWRPAVEALSCIKGIDTLTAFRLAAEAGSFTRFRTAPAFASWCGLVPSERSSGETERRGGITKTGNRLARTALVESAWHYLTCTPRPKAPAPGADVPAAIRARADACTARLCRRREALAAAGKSSCKANAAVARELACWVWEIGRRAEGTLS

SEQ ID NO: 493540 - protein, 427 aa, unidentified
MRKIINSSNGKKLESAGKNTKAVKAEKTRESDRGSRTAKAVKPHTKGDVNPQQRWGVRNLLQKLETSKQQAREVVETQVEYHIGIDLGDRKSYYCFLDKHANVAADGNLTTTVTEFKMYFKQIPRSRIALEVGTHSPWVNALLEELGHEVYVANPRKMGGGKKKNRRKNDKLDAESLARQLKADPRLLYPIRHRGEKARNALVLLRARHAVVCARTKLICGVRGLVKSSGQRLPGCSADSFHKMPAINVPEALRYTLVPLFEQIGMLTKQIKKYDMDVKRMCKHAYPETEVLQQVNGVGAITSLAFVLTIDTPNRFVKSRDVGPYMGLVPKQYDSGNSSPQLRISKTGDRMMRQLLVQSAQYIVGPFGQDSDLRRHGLKLAERGGKNAKKRAIVAVARKLAVLLHRLWVTGEVYEPLRNSERKQKAA

SEQ ID NO: 493541 - protein, 360 aa, unidentified
MKKIVGCDFHPRWQQIAIFDAATGEISEHKLLHAGGEAERFYRALEGPALVGIESCGNSQWFIELLEGLGHQVWIGDAAQIRASYVRRQKTDRRDAEHILRLLMENRFPRLWVPTAAERDLRQLLIHRHKLVEIRARVKNGLQHLALNRGLQKGFRLWSVRGRADLEKLPLQGWTARRREDLLKLLAELDRHIGQLDEAVSSAAEGHPQARLLMTQPGVGPITSLAFVLTIGDVSRFEHSGQVASYVGLIPREHSSGGKQRLGSISKQGNRFLRQLLVEAAQSTTRLDEGFRKQYQARCHHRPKGVAKVAAARKLAVRLYWMMRQNVGYPEIAHIESSSRVPLIGSAQIEGLVERSRIQH

SEQ ID NO: 493542 - protein, 438 aa, unidentified
MSNKVIFNLDELFISVGIDVGADFSWMSIALPNQQFVGKPYKILHNSIDSLTTAVSKIKEAEELYSLESRIFLESTGIYHYPLFCYLRDKGFNCSVINPIITKNSTNINIRKVHNDRFDSKKAALVGLKPDLKVSLMPSDLALNCRNLCREYYDLMDNRSAYVNKLQGELRMAFPQYLGIFSKVTINTSLTLLETYTSPSAFLEADKQEIIDLIKSTARFGLTYAQNKYNAIIQAATDANQFGYIIESNIKRIRLYISFIRKYDEEINDILESLHKLVDSNEDTKFVKQVHLIETFKGAGFLSAATIMGEIGDFSAFSKPKQLFAYFGLDPAVKQSGKFEGTKVQMSKRGSAIARRVIHTLTLQSISISRNREAKNPVLREYYLKKCDSKPKLIAMGAVSHKVCNMIFAILRDNKPFKIIAPQEHIKQYNSAKCDIAA

SEQ ID NO: 493543 - protein, 385 aa, unidentified
MSKDSKSFVSTAGMATVFGIDSHSRTTTICALSRESGETETRTFRGNDYAAMARWMSGFPAPALGVYEAGCTGFVPARRLSAGSVSVVPIAPSKMPASSDSRTRKNDRNDAARLARLAVAGELKEVWVPPCEIEGMRELAHALDDLKAQRTRAFQHVLALLCRHGVIWDERTPRGALRKPWCAAFWTWLRGIDLGDAAAQAALRSAIRAAESADEQYGALLDEAHRLAGASPLAGIVRALQCLKCVQFVTALTFAAEVGDFSRFRSGRSITSYFGLAPSESSSAAKKRMGAISRCGCALTRSLLVECSWSALRCSPAKGKACPEPVDVRIRERARTLSARLCSHRRSLVARGMPACKANAATAAELARFMLFLGSEQQSLAAEAS

SEQ ID NO: 493544 - protein, 508 aa, unidentified
MEQEEAGQPPARRLVGIDLGIASRHSVRVLEADGRAVCRSSCVPAAESLARLEQAALAGAPEGTRLAVVFEPTGPAWLPIAVFFARRGHDVYRVSSAKAADLRRFLRRHAKSNGIDAETLARIPLADPGGLQPLELPGANAAALDRRVRACARLTQAAAGHKTRIKDLVRQLMPVTPLTGDIGQADLAVLEHYGDPRALLAASLAELAQMNTAASRHQQGHDRARQWRDAAAAAELYDGHPAVPFAELAAEVATEIRLLRAIQAELAAHADAREQHYLQADPAQLARSPPGFAEISAPVLIAAIGRPGRFRDGTKFKSYVGLAPRASETGETDRKGQPMSKAGPSLLRATFFRAAGTARRQDPQLARIYYVQMTERGATHLKACCVVAGHLAERAWAVLHRGTPYVICDNNGNPVTPAEAKKIIAERWTVPEEIRKRRRSRKTAGKAPQAALTRPDKRGDLPRPDRRGHAPRQSTPPPDQRRLLQPAGHRQGARQHAQHQPETTSQKA

SEQ ID NO: 493545 - protein, 426 aa, unidentified
MDVIHARCAGLDVHKQTVVACVRVLLESGQVHAQIQTYGTATRELEGLRDWLRDKHVTHVAMESTGVYWKSIYNILEPHFALLLCNARHVKQVPGRKTDQKDCQWLASLLQYGLLRGSFVPPRFQRDLRDLTRHRAQVSVQHTRVANRIQKVLEDANIKLSSVATDILGASGRDMLRALIAGQDDPAALAELARRQLRGKIPQLRQALHGHVTAHHRFELDLLMDEIQFLEGQMARLDAHIEEIQASPEARAFSEATRTLPFAQAVALLDTVPGIDRVAAQAILAEIGTDMSRFPTPAHLASWAGMCPGNHESAGKRRSGRTTAGNRWLKAKLFQCAWAAARSKHTYLGAAYRRWAPRRGAKRAVVAVGHSMLVSIHRILHDGVAYLDLGPDYFDRLNPQAQVRYHPRRLQDLGYDVKIEPKTDVA

SEQ ID NO: 493546 - protein, 338 aa, unidentified
MKFKRIAIDTSKHVFTLHGVDEQERPVLRRELKRANVESFFAKQDATEVVLEACGGSHHWGRLLNKLGHRVRLIPPQYVKPFVKRAKNDRNDAEAISEAASRPTMRSVVVKTVDQQADGIILKHREMLVSQRTQAINALRGHAAEFGVVAAKGIVKVAALLTQLVADSGIPISARAMFEQMGVHIEALDQQVAALDDQLTTLHKANPVSRLLATIPGVGPLGAITMALTVEPGNFASGRHFAAWLGLTPKEHSTGGKQRLGKISKAGNERLRQLLFVGAMSVIRFARPGSKSASAWLLQLLERKPRKLAAVALANKMARIIWAMMSRGEAYRRQPVTA

SEQ ID NO: 493547 - protein, 353 aa, unidentified
MRTYYVGMDVHQASITIVVINGAGKVNESVVLQMNATSVRSYLKRLRGRVYVTFEEGTQAQWLYDLVQPLVTQVIVCDPRHNRLLKSGNKSDRIDGEKLAQLLRQGALKAVDHGDHGVRALKELVRNYDCLVQDTTRVMTRLKAIYRGRAIPCKGEGVYREATRAQWLKKLKEPGVKTRASYLYKQLAALKPLRQQAKLEMVREARKQAAYQYLLSVPRLGPVSAAQLLAIVGTPHRFRSKRQFWTYVGLGVVTRTTSDHEVVAGVLRRKRRPAATRGLNPNHNHVLKKVFKTAATSACHSQPFAPAYQARINKGMDPALARLTIARQLAAITLSLWKRGELFNAERIKRPTA

SEQ ID NO: 493548 - protein, 321 aa, unidentified
MTKSRNYIGIDISKLTFDVAILNEKEKYNHHKFSNDEDGFEKLIQFLNQESDVCVMEASGPYYLKLATYLSDNKISVSVVNPLVIRRFSQMRMSRTKTDKKDAKIIADYGRAETPDLWEPEEDYILELRQMQAYTEQLNKSRTGFLRQQEAFKQNPINAVAMNESLQNMIDTLERELAIIEFKMTELVSRHHQKLFEQLNSIPGIGRKTAMQLIVISGGFTKFENAKQLCSYIGLSPRIFESGTSVKGKSRICKMGMSRIRAMLYVCSWTAKKSNKACKELYDRLVEKGKSKKLALIAVVNKLLKQAFAIATKNEYYLEIN

SEQ ID NO: 493549 - protein, 429 aa, unidentified
MNDREIIRLEQFRQLKKEIRGSGEHLIIGIDVAKQKHNAFLGTATGKTLLKRLVFENNKEGFEKLLMHVESISASNGHKKVAFGLEPTANYHKPLAEFLINKKHDLVLVSGVAVKRNRELLDGRWDKNDMKDSANVADLISQGKCLFYEYPTHVLRDLRGLLSLKKKFKKIEHGFRVRIRNHLLAQFFPELDRYYGHSESENLAIVRWCLSPSKIAEMKYEDFFQLVTTRDRGFRQHQRLKAIWDSAHCSIGCSTGIAAEFEAEVLVEALKRARETIGSINEKVREICILFPEYKYLLSIPGFGPVVSAIVLAAIGDPFRFESGNQVLKTAGWDLNANRSGKRSDSVTPVISKRGKADLRYGLYQAALVASTKNKHFTSWFIEKLRGREKEKGIKTKMRVKLAAKLLVIAWTLMKKKEPFNPELLKIKK

SEQ ID NO: 493550 - protein, 382 aa, unidentified
MDNSISVSTAGDESASAEQGSKGVLKLGLDMHYRQVTVAMQQEHGPIKAVGKLSHEGFWAWVEKKHKEGWQIYSCYEAGASGYWLHRDLVALGVKNEVVAPKATGQDRRQKTDRRDSAELLDCLDQYLRGKKTALNPVAVPSPELEQNRALVRFHRQLMADRGRYESRGKGLLCAQGIELRGKWWSSEAWKELQTHPRCKDWIEQQLRSWRGKLFALNAQQAQVRQRIEALAPDELPKGLGAYSAVALECEMKGMAHFDNARAVSSYTGLCPGIHSSDGRGKEGSINRCGNAAVRWNLVETMWRFAHWQPNYEPARQLRLALGKSKRAKKRLVVKAARQLAVDLWRLQTGRATAQELGLVMQTNRREPGRPPRSGVQKERPL

SEQ ID NO: 493551 - protein, 387 aa, unidentified
MQASTVDTLTVEHCGTIFVAIELSQRSWLVTLHSPDKAKMSRHKLEGGDHAGLLALIGRVRERAARTQGAVPAVVSCYEAGYDGFWLHRLLMAAGITNYVFDPASIAVDQRARRVKTDRIDGEKLLRTLMAYLRGEPQVVRIVRVPAPEQEDARRASRERGRLVKEQTAHTTRIKALLRLLGMAVGNPRRRDWLSWLSAQRDWQGQAVPRRMLSEIKHEHARLMLVREQLEALAQTSAEADPAPAAAQMAERNELLLRLKCLGPAFAMTLTHEVFYKDFRNRREVASYFGLTPSPWQSGGTDRDQGISKAGNPRARCAAIELAWLWLRHQPESALTRWFRSRTHNNASKRNKRIAIVALARKLMVALWRYLTTGLVPEGAVLKAVKA

SEQ ID NO: 493552 - protein, 438 aa, unidentified
MEEAGDEPLFCERAAGIDIGKQLVVVTIRVPSDTRRGGRQQETREFGTTRRQLLEMADWLRCWQVERAGMEATSDYWKPVYFLLEREGFDCLLYQASQVKALPGRPKTDRLDSAWLARITEQGSLAGSFVPSEDIRRLRTHTRYRRRLIQARTAEKARCEKLLEDGHLKLSSVISDIHGVSGRDMLRAIIAGERDPEVLAQMARTRMRRKIAQLREALDCSFFTPDHAFVLQMMLDNIDHYTAQIAVLDERIAILCEPYQRQVAQLDGIPGFGVTNAQDLIGEIGVDMAVFPTAGHLCSWARLAPGVRESAGRRKGKNATGRGNPYIGGALGEAAAGAGRTQTFLAAKYRRLCTRMPKKKAQGVIMRDQLVIAHALLSDPEAEYRDLGTGYYEQRERTRRRASSHVRSLERLGYKVTIERLAPEADPETGELITRTAV

SEQ ID NO: 493553 - protein, 416 aa, unidentified
MKIVRPICCGMDVHKNIIVATIGITNKKTRITEYIQETFSTLNPDLLNLKQWLINHKCFDACMESTGKYWIPIFNILEDEINIYLTHPKYVKAIKGKKTDKKDSKWICDLFKHDLIKFSFIPPKEIRALREISRYRYKLVGVRSSERNRYQNCMTVSNIGIGSVFSDPFGKSAQAIMKEVLESDIIEDEKILKCVHGSCKNKDKILDSIKHCNIETDQRFKMNESMIHMEELQLHIDNCEIELMKRAAPMFDQFMHITQLPGISTLSAILIISEIGVDMKQFESDKQLACWAGLAPANNESANKKKSVRISKAGQYLKPLLVQCALGAIKDKEGYFGTKYSRIKKRRGHKKAIIAIARMMLVSIYHMILTGETFNPSDYESFRNPKPPIKQQDLTEESAIEFLKKSGFDVSKLTKP

SEQ ID NO: 493554 - protein, 321 aa, unidentified
MTIMAFDVSKRELVGVRADKNGTVKEEFVLPNESDAIALWLRSAQDRYPQLIIGSEATAEYHRELAQRAGDMNIPFRLINPILTKQFTRSTIRKRKTDKTDAAIIAKLIANGEGTLLTPRSLDILKPINRTANSINVLRKTLAATLAHMQQVCPAEARLHEEIRASLGMLQQTVKYMRAQVQKQTDPRLKKLLMTIPGIGETIAATLLAEIETVERFKDANKLVAYAGLDPRVRQSGVSLNRNTKLTKRGSPYLRQAAYIAAYIAARHDPELKEYFEKKMREGKRYKEATVATARKILYRVYAVWKRGTPYEQRGFIQSLS

SEQ ID NO: 493555 - protein, 436 aa, unidentified
MEEVENEPLFADRVAGIDIGKKEIMVTIRVPSDSRRGRRQQETREFRAVRKDLLALADWLRTWGVTRVGMEATGDYWKPVYFLLEREGFDCVLYHASQVKALPGRPKTDKLDSVWLAKITEQGSLAGSFVPPEDIRRLRTHTRYRRHLVQACTAEKGRCEKLLEDAHLKLSSVITDIHGVSGREMLTAIIAGERNPKVLAQMARTRMRAKIRELEEALDCSFFTSQHAFILQMMLANIDHLEDQVKELTAKITELCEPYARQISQLDAIPGFGIITAQDTIGEIGVDMTVFPTAGHLCSWARRAPQVRESAGKRKGKNATGRGNPYLGGALGEAAANAGRTQTFLGAKYRRLVRHMPKKKAQGAIGRTQLVICYELLSDPEAVYEDLGTGYYERRANIRREVRSHARAIERRGYKVILEPLDPGLDPAILPVTKAS

SEQ ID NO: 493556 - protein, 328 aa, unidentified
MQTSSVALNIGADVGKDEVAMACAEGSFATRKIRNQRAVLLAFLKDLPAGSRIGMESTGIYHELLAELAHRRGFVVYVLNPKDTCHYAKAMGLRGKTDRVDAELIARMIAHEHEKLHPWIPPTAEQRQIDRLLKRRAKVSRIRVSLIQSFNGVNGFAAEIKALRERLDKLLARLDARVKTLIEASTERKQNYARLRKIVGVGAVVGSSVLNTLERVPFSRADSFVAFTGLDPRPDESGHHRGRRRLSKRGPSELRRLLYLAAMAAAKTKTWRPLYQHYRARGLSTTAALVVLARRIARTAWSMYTHKTTFDAQRITKQPKRSTAPMPT

SEQ ID NO: 493557 - protein, 354 aa, unidentified
MNNIKYIGIDVHQATSVFAVRNDQGKLIAEAIVETQPTPIIDFLKGQRGTVWVTFEEGTYANWLYDVLQPQVGKVVVCDPRKNKLDGNKSDKIDAKRLSELLRLNALTAVYHGQNSTRTLKELARSYVSLQQDSTRVMNRIKAMFRSRGIACRGTSVYQPKHRKEWLEKLNGQGPRHRAERLLKQLDLLRELCLEAQKDLVRESRKHKSYEILREVPGLGPIRVALILAFVVTPHRFRNKRQFWTYTGFSVVRRASAEYEISQGELRRTKKKPLPRGLNNNYNHVLKNVFKGAALTAAYRGPFKELFDQRVAAGTAPNIVLLTLARKIASITLALWKKGESFDIERHRVSEPTT

SEQ ID NO: 493558 - protein, 376 aa, unidentified
MSTIRFVGLDVHADTIAVAVAEPDGEVRSLGVIPNRLESIRKLIRKIGPAERLRTCYEAGPTGYVLYWQLTQLSVACEVVAPSLVPTKPGDRVKTDRRDAEKLARNLRSGELTPVWVPDAAHEALRDLVRARESGKKDQLKARHRLGKFLLRHGRRPQGITPWTKKYIEFIKTHVHFEQPALEATLADYLHEVEHVAERILRLERAIDEAVKAAPAATRAVIEALQALRGVAQTTAATIVSELGRLSRFTSPSKLMGYSGLVPSEYTTGNRVKHGGITKTGNAHLRRVVVEAAWAYQHRPNVTGYLLRRQKSLQLSEEVKQIAWKAQHRLHKRYKVLAERGKNKNEIVTAVGRELLGFIWAIATHTEKQQHNFKMS

SEQ ID NO: 493559 - protein, 363 aa, unidentified
MELSKESWLVAGIIPGVERQPLKKLEPDENDLIKLLERWRGEAEKAGHKINRIAVAFEAGRDGFWLARWLRARGIEAHVIHPASVAVSREHRRAKTDRLDTEQLKRAFLGWLRSEPVHCKMCAIPTFAEEDAKRPHRERETLVGEHTTIINRIKATLARLGIRNLNPKLKKAAELLERARTPEGETIPPNTLAELRRDMARKQFVAEQIRQIEKARLEQLEQAPKAGPNLMVLLLVRVIGIGIETADMLVKEILSRNLRDRRAVARYAGLTGSPDESGSRRREKGLARSGNARVRRGMIQLAWRFLEFQKGSALAKWFEARTENARGLRKKMIVALARKLLIALWHFVRDGVIPDGVVLRPAR

SEQ ID NO: 493560 - protein, 325 aa, unidentified
MVNTEGGELEQRRLEHPQEAEQFYRGLRGQKVRVGMEASGHARWFERLLAELGFELWIGHPGAVRAAAPRKQKTDARDAEHLLQLLLSGQLAKMRVWVPTAEQRDLRQLVLHRHRLVQMRTRVKNQLRSVALNEGMGRKPGLWSRKGQEQFRGLVLPAWTERRRQDNLELLGELEQRTLPLDQAVGEQAGQRPEVARLMSHPGVGPVTALAFVLTIGDPTRFACGKQVASYLGLIPSEYSSGGRQRLGHISKQGNALLRSLLVEAAHVAARVEPDLGRYYRRLAMKKHRSLAAVAVARKLALRLWWMWRRECNYAQWRASGSHAG

SEQ ID NO: 493561 - protein, 342 aa, unidentified
MYYIGLDVHKKTISYCVKDASGQAHQEGKVGATRCELDAWIRTLPRPWTVAMEATTFTGWIYDHLLPHATQVKVAHPLMLRAIAAAKKKNDRIDAGKIADRLRCDFLPECHMASTQIRDRRRTLRYRHLLVRQMVQMKNRISGLLMETGVSHNKKRLHKVGYFRELLSANEEVQESIRPLLRLSRDTIVRMQKAEYALVSSLQRDPLLAERIKRLRTVPGVGPITALTWALEMGDVSRFRSSRQAISYCGLCGDEKSSAEKVTRTPLSKQRNKHIQRVLVEAAKLAPRQDHTLALVYEREKQKGNANRATLAVARKMVAYLLAVDRGQRDFVPFADPRSVAA

SEQ ID NO: 493562 - protein, 290 aa, unidentified
METQTEFVVAERRCIGLDVHREFAQVAVWQGGLVWQAGRFATTPEGVRGFAEQLGPADEVALEATGNTWAIATVLASRAGRVVVSNPAKTRAIAEAKVKTDKVDAEILAQLLAADYLPAVWRPDPATAALRRQVLRRAHIVRQRTRLKNQVHAILHRNLIPRCPAADLFGHKGRRWLAEQSLPPDERGAAIALLRQLDFHAQELREIDTDLGKVALDRPEVLRLMTVPGIDATVALSIVAAVGDFTRFRTPDKLVAYLGLNPRVRQSGGQPASHGRITKAGSAHARGMRV

SEQ ID NO: 493563 - protein, 451 aa, unidentified
MQKQDSYDYYVGIDCAQNKHDFAMKNNQDKFLIKKGHFSNTLQGYEKFLNTVLSKCLDKDKILFGMEVTGIYGTNLYERLKSDGYHVVMIFPDSVKNYRDYKRLNKTDKIDSACIAELLLNGDAQIVHAEKNGYTDLKAYIRRRNALKVTCTQETNRFLAKVCLYFPDLLKVFPSGRATLKAIFSIYPTPYSIIEADFNELVSVLQKASKNKFGVDKANELIHAARNSIVVRKSISDGELYNIHSLIDSIDSLESEIRNLEKIIDSKAEEFPAYHVLLTLTGCGKITAATIVAEIGDISRFHKASQIVSLAGLYGDNSKSGSSVNKRGKISKKGSRYLRHAIYMVAEFARRNNPIFKAYFTKKKNGDRTKHILAVNAVANKLCKVIYSLMKNQSTYIIQYRDLAKLSESTQNEFFQNAETDFSAKTRRKKYLYEDEYGELHEFVFKSIRHI

SEQ ID NO: 493564 - protein, 332 aa, unidentified
MTTYERVIGIDVASKKLDISDSKGNLPAVIANTVKAVGSLIKRIEEPEKTLVICESSGGYEDIMVDLLHEAKVNVAVVNPRQTHYYGKAHGYLEKTDKIDARVIRLFGEQVEVHLTKPRTEREKQLRSLSRRRVQVLTMINQEKNRLRFEDDAVKQFVEDSLESLKKQLKAINDELKKYAQELSQETPNVEIISSVPGIGPVTTATLCAELPELGKISRNQIAKLVGVAPLAHQSGQSDGKRRPRGGRSTVRRTLYMAALVATKKNPVIRKFYLRLLGRGKPKKLALIACMRKLLLIINDMVRNQTQWDPEKKARDQAVSSPATSATCSAGH

SEQ ID NO: 493565 - protein, 315 aa, unidentified
MAMRVTLEKPIIGVDVAKNELVIYHDQYDRLEAIPNTKVAITQWLKALASSCAIAIEATNVYHVLFADAAHEAGCDVYMVDGYQLSHYRKGVNIRAKTDAQDARLLARYLKNELDELRPWIPASPLYRQLLSLFRRRAVLVQARTGLVQSWTNEPFLRTAFANQVNSMKRFEALVEKKIRDVLQEAGLMRQVNRCMKVEGIGFLTAARLVTSFQRGEFSAANAFIAFLGLDLRVSKSGQSDGPRRLTKRGDPEARRLLHNAAMSGSRTPAWKPFYEEQRKRGFSTTQALVMLSRKLARVVFALLKNQSEYQTKVA

SEQ ID NO: 493566 - protein, 340 aa, unidentified
MNHYAGIDVSLEASSVCVMDGTGKIVREGKVASEPQALIAWFGSLGLSLTRIGLEAGPLSQWLYAAMRTAGLAVELLETRHVHNAFKTMPVKTDRKDARGIAELMRLGWFRPVHCKSIEAQETRAMLTARKLVQKGLHEVESSLRGILRGFGLKVGKTTAVQFEGRIRELVAGHPNLEAMAASMLAVRAALRREFNGFERRLRAMARSDARAQLLMSAPGVGTIVSLTFACAIDDPARFKSSKMVGAHFGMTPTKYQSGEIDRSGRISKIGDASVRAALYEAAHVILTRPVKGCTALKSWAMRIAKRAGMKKAKVALARKLAVIMHRMLADGTPFATQKA

SEQ ID NO: 493567 - protein, 333 aa, unidentified
MLYVGVDAHKATSQITVVNETGSILKRAKIASTSSAFQQALSEYDEPLTAVLEASYCWGPIYDWLDELTEEVVLAHPSKVRAIAEARIKTDKIDSAILAHLLRADLIPKAYAPSKETRALKRVLRQRLFLVQLSTMVKNRIRALLSQHEVQTPQVSDLFGKVGMTWLETVTLTQPDGALLHEDRELLVFLKARVNATEKLIQELAKNDVAVPWLKSLPGIGTFLSVLIRWEVDDISRFPTAKQFASYTGLVPSTYASSKRVVHGGLTKQGNKWLRWAFIEAITPAVRSSPTLACFYQKLKQRRGVKDARAATARKLAELTWTIWNEQRCYIER

SEQ ID NO: 493568 - protein, 350 aa, unidentified
MRFYHIQPEQQYFCGIDLHTKAMYLCVLDQAGKILLHKNIRTRPQAFLKAIAPYRQGLVVAAECIFCWYWLADLCQSQSIDFVLGHALYMRAIHGGKTKNDKLDAEKIALLLRGGMLPQAYVYPQEKRATRDLIRRRSYLVRMRADLLAHVQLTRHQYNVPAFHKRITYKTNRDGITERFSDDVVQANVAVDLEMIGALEAQIRPLELYLVSQAKVHDQQAFYLLRSVPGIGKVLALTILYEVDDIRRFKRVQQFCSYARLVKGQKSSAGKHLGTMGSKMGNRHLKWAFSEATVLFLRESERAKAYVARLESKHGKGKALSILSAKLGRAVYFMLLRKEPFDQERFFAQA

SEQ ID NO: 493569 - protein, 397 aa, unidentified
MSMLFVGIDVSKDYSSAQGLDREGKKLFYLEFGMNGEGFFRLLNLLKTHCKDLSEVTVGMESTGCYHINLFAFLCSEGIACVVINPLLISNFARLSLRKTKTDKKDALTIAQFLLAHRSKLSQVSYSQNSQDLKDLARERESLAVMMAGLKNDVRRLLQMTFPELGHRCKLFTETMLRFLIKLPSARAIRTAKPKEISKALIHAEGKRKRVFISAEEIIKLAKTSVGTDSVAKELILSEKIGTLLYLEGKQERITEALVEACRSTRVDELDIITSVDGISAITGSTFLAELGDIHLFSSSKHLIAFAGLDPSIHQSGQYEGISRISKRGNRHLRRVVFLMTLCAVRSQNAFREYFLRRKEQGLPPKKAILATAHKLLRVLFAMLSSKSYFRKEVVEV

SEQ ID NO: 493570 - protein, 339 aa, unidentified
MDKLSIIGLDIAKQVFQVHGVDSAGEVVVRRALRRSQLLKWFAQLPACLIGMEACATAHYWARELSKLGHTVRLIPPAYAKAYVRRNKNDPADAAAICEAVSRPSMRFVAVKSEAQQAAGGLHKVRQMLVKQRSMLTNQLRGLMAEFGIVVGEGPQHVGKLLAILAEPADERLPPLLRAALQAIAESLRGLAQRIAALELQILDWGRANQTYQHLITIPGYGPILASALPAMTVDPAAFRSGRGFAASLGVVPRQDGTGGKVKLGPISKRGNGYLRRLLVNGAMSVLGSKRAKQDPWLVKLLASKPRKLVAVALANKMARIGWAIMMRQEDFRPLPAAA

SEQ ID NO: 493571 - protein, 391 aa, unidentified
MSMYFVGIDISKYKHDCCIISAADQQIVSKFTVKNDKDGFEHLLTTLNSLSNPEDIKIGFESTAHYALNLELFLENAHHSFMEVNPVLIKEYKKSTTLRRTKTDSVDCESIARWLITVEYKPHSKGFYHAYSLKSLTRLRDRLIRQRSFYLVKITNVLDHTFPEFKPFFNERLSKTALYLLENYGSAEKMARMNSASYDKLRCISRGKFSIQQFLRLKELAANTVGVNNSIFDLELNTLLTLYKSLSDEINTLETEIIKLIEEVHPHYMSIPGIGPISSAVIYAEYGDISNFSNPGQMLAFAGIEPGINDSGTESHGGRMVKHGSSQLRYVLLNACLPLIRFDLTFATYYEKKRAEGKKHRVAITHVAKKLIRVIYALERQDVDFNAQKLR

SEQ ID NO: 493572 - protein, 355 aa, unidentified
MSSEKYIGLDVHQATISVAVVDSQGKVVMESILETKASTILEFFAGLRGSLFVTFEEGTWAAWLYDLLKPHVTEVLVCNPRKIPLLKQGNKSDQIDARKLAERLRLHDLKPVYHGETGVRMLRELARSYLTVVKDLSRVMNRLKALYRSWAIPCAGRDVYYRRHRSQWLEKIPEAGTRRRAEQLYEQLDMLQHLRQRARRELLAESRKHTITAKLRQIPALGPIRSALAVALIQTPHRFRSKRQLWTYSGLGLETRDSGEYHYVGGQVRRRKKQATIRGLNKDYNHDLKGLFKGAATRASVQPGPFQEFYQRSLAKGIKPTMVRLTLARKIAAITLTLWKKGEDFDIDKLNSQAT

SEQ ID NO: 493573 - protein, 395 aa, unidentified
MNKMIHYLGLDVHKETIAVSIAPAQSTEVRRYGLINGSLDAVDKLVKKLATPGVELRVVYEAGPCGFVICRHLRAKGIACEVVAPSLIPKKASDKVKTDRRDADQLARLFRAGELTPIHVPDQEDEAVRDLIRARHAAMDDLRKARHRLKGFLLRLGFRYTGKSSWTDAHKRYLARLIMPQPPQQIAFQEYIHAIDAAGARLDRLNQAVLDALPGWKWAPVVRALMCLRGVQELTGMTLVAEVGDFSRFEEPRSLMHFLGLTPSEHSSGGSRTQGGITRCGNAHARRVLTEAAWQYRLQPKVSAAMQQRQQGQRKEVRLIAWKAQQRLHKRFRQLGAKKKRVIAATAVARELAGFVWAIACQVKPAAQAAAPEVIRTCRGKVYSLDANKKFPKAQ

SEQ ID NO: 493574 - protein, 352 aa, unidentified
MIWVGLDLHKRYITACAMDDAGAVLAEQRRLPAEAELLVAWLKELGGPMTVAMEATLYWAWLHDRLSEAGIAAVAAHPYHVKLIWQARCKTDPIDARKLADLARTNLLPAVWVATPAVRAQRTLLRGRAYLVRMRTGVKNRIHGLLTAENHCLAVSDLYGRAGRAWLHTVPLSPMARVQVDLLLDMVDVLDERVVRLDKRVQRVVKDEPAAQLLQTWPGIGAFGAALLLAEIGTIDRFTTSHELASYAGLIPSTQSSGGKTTHGGVGRAGSPWLKWILIEIVQSLKLAPGPIGRHYQKLLRAKGKAKATVAAARKLCCYLYWCLKEGWSYEQWLQQHESREVRPSQALGTAA

SEQ ID NO: 493575 - protein, 431 aa, unidentified
MELIVERAAALDVGKDEVVACIRVPDPAGGGRGRRRRRQEVRTYPTFTASLEALADWLQAEGVTQVVMEATGQYWKPCWYVLAERGLELLLVNARHVKILPGRKTDVGDAAWLCELLECGLLRGSFVPPPQIRELRDLVRYRKRLIQAHGAECQRIQKTLEDAGIKLDSVAADVLGVSGRAMLKALVAGERDPQVLAELAKGKLRKQLPQLRQALRGRFGEHHALLVGLALGHLEHLEAAIARLDARVDEVIAPFAAARDRLDTITGVGKRAAECIIAEIGVDMSVFPTAGHLASWAGRCPGNNVTGGKRRSGRPTKGQPLAGRCPDRVRLGRRPQPRHLPGRPVLAAGPPHRQEEGGDGRGPLDPGHRLAPAHRGLRLPRSWRRLLHPPRHRPRPPPSRRPAPGPRLPRHPPTRRLTPGDSRFRRARHQR

SEQ ID NO: 493576 - protein, 327 aa, unidentified
MSTIEQVRSGHVVIGVDTHKYVHVAAAMDTVGGIVGTLTIPTDTGGFQQLLDWAGTFGQVLAFGIEGTGSYGATLTSFLRRSGHKVVEAGRPDRRLRRMNGKSDTPDAQNAARAVLAGLATATPKSAEGEAEMIRQLKIAHDQAVEQRSSAMVTMKAMLVHAPDDLRRQTARKSQSALAKQLASLRPRDLTDPNDALRHALRALARRWQYLDAEAKDLTALIATLVRRAAPQLLEPFGIGVDTAAEILIVAGDNPERIHSEAALAKLAGISPVPTGSGLTSGRHRINHGGHRQLNAAIYRTVIVRMRFHQPTIDYVARRTAEGKTKR

SEQ ID NO: 493577 - protein, 325 aa, unidentified
MEVKKLCCGIDVSHATLDVCYQNNLGELFHLRVGNNNKGFAIILEHTGADYHFVMEATGVYYIRLAFYLHEQDCKLSVVNALSIKRYIQMHLERNKTDKKDAAWICRYAIEQCPVYWEMPDSAYFESKQLYNTIREYTEQIKRFNNQLHSLGLLPVPSKDTIKSLEKMKKHLEKEIGVLELKLEAMLEQWQPAQLKSVRSVKGIGKRATAMLIVFTQGFKNTHSHRQLISFAGLSPTEYSSGSSIQGKPRIYKRGGKNLRDVLYMCSMNAIKTNPACKALYERLRANGKTGKQGLIAVCNKLLKQVFAVVKNNSLYQPNYCSAKP

SEQ ID NO: 493578 - protein, 409 aa, unidentified
MRYYLGVDWADQEHAVWTLDEGGRKISARTVAHTATGLSEWGRELDEWRAQGIELWAAIERPEGRVVDFLLDHGVVVYPLNPKALDRARDRFRQSGAKSDPFDARVAAEFLRTDHGHLTALQPSSAAAQELKYLTEDCQRLIRQQTRLLNQLTATLKAYYPRALEVAELSTALARAFLTAYPTPDALSRLTERQWQRWARAQHLSASRTAELWSTLLAPQLPVPAHVVRAKARLMQTLLAALDPVLAGVAGYRQTIDDFFAGMPAAPTARTLPVGERGLLVPTLWARLGDAPDRWRSFRHLQAQAGTVPVTERSGKQRSIHFRYACDKTLRYVVDHLAFRSLQRSDWARAYYDQQRARGHGHRQALRALGAKWLKIIFVMWRDGVAYREEHHLANIARQQLRCSARKTA

SEQ ID NO: 493579 - protein, 342 aa, unidentified
MDYFAGLDVSVKETSVCIVDDTGKIVREVKVASEPEALLQVLTNPAYRFKRIGLEAGPLSQWLFSALAEAGLPVICVETRHMQAVLKAQINKTDRNDARGIAQMMRVGLYRPVHVKTLRSQKLRMLLIHRKLLQSKAIAIENDLRATLRNFGLKVGMVGKVRFEARIKELVENLPELAVLVEPLLIVRRVLREQIVVLHRRLLAIVRDDEVCRRLMTTPGVGPVVALTYRATVDVPARFRKSKGVGAVFGLTCSKYQSGEIDRSGRISRCGDEMMRVMLYEAAQSMLRSKKWSWLKAWAMQIARRRGMKKAIVALARRLAVVMHRIWVDGTEFRWTREVVAA

SEQ ID NO: 493580 - protein, 413 aa, unidentified
MNAVGIDVSKKKSTVTIRQPGDLVLLPPRDYRHTQSSINELIATIKGLDGETKVCMEHTGRYYEPMASWLTNAGIFVSAVNPKLIKDFGDESLRAPKTDKADSKKIARFALDRWTKLRQYSPMDETRNQLKTMNRQFSFYTDQKTAMKNNLIALLDQTFPGANGFFDSPARSDGSQKWVDFVYTYWHVDCVRSKSLSAFTEHYKSWCKRKGYNFSAGKAEEIYRVAIDLIAVFPKNDNTRMLIRQAVTLLNTTSQMVESLRIQMDQVASTLPEYSVVMAMNGVGPTLGPQLMAEIGDPTRFTHREALTAFAGVDPGADQSGDHNRKSNRTSKKGSPYLRRTLFLIMDGLIQRSPADSPVYAFMDKKRTQGKPYLVYMTAGANKFLRIYYGTVRDALKQKGLWPDPESDEVNPV

SEQ ID NO: 493581 - protein, 363 aa, unidentified
MGQSSWLVAGMVPGIKRQPLKKLDPDENQLLKLLNRWRHEALQAGHAIERVVVAYEAGRDGFWLARWLRERGVEAYVMHPSSVAVSREHRRAKTDRLDTELLMRAFLGWLRGERRHCSMAAIPTIEEEDAKRPNREHEKLVGDRTRIVNRMKSTLARLGIRWFKPTLRKAEEKLGELRTAEGTLLPENTRGELRRDMARLRVVREQIKEIEQQRLRKLEAAAAAEKGPHAIVRLIARVVGIGVETADMLVNEILSRHLRDSKAVARYAGLTGSPDESSNRRREKGLARAGNARVRRGMIQLAWRFLRFQKDSELAQWFRARAANGRRGTRKTMIVALARKLLIALWRMTTTGEIPEGVVLRPA

SEQ ID NO: 493582 - protein, 344 aa, unidentified
MVDPAPAVTGGVDTHLELNVAAAVDRIGGLVGIAEFPTTSSGHKELLAWLRGFGRVAKVGIEGTSSYGAGLARSLRRAGTEVVEVDRPNRQSRRRSGKSDPADAVEAARAALSGRAQGAGKAKDGNVEAIRALVVAKRSARDTKIKTMDQIRHLGFTAPDELRERLAGVSRKDLAATAAALRPRDGGDQVAFATKTALALLGRRVLALDAEKEHLGDLLSKLVEKTAPELLALYGVGVGTAAALLVTAGDNPERVRSEAAWAHLCGAAPIEASSGKVTRWRLDRGGDRQANAALYVIVITRMSADKRTRAYVERRLAEGRSKPDIIRILKRYVAREVYHYLPRA

SEQ ID NO: 493583 - protein, 337 aa, unidentified
MKITLIGIDLAKSIFQVCGVNRAGKPVFNRQIRRNRLLAFLAQYPEVSIAMEACSGSNYWGRTLEEMGYAVLLIPPQYVKPFVKGNKNDRNDAFAICEAARRPNMRLVKPRTLAQTDILMLHKILERRVRGRNALICQIRGLLGEYGIVVAAGKERLKAQLPCLLEDGENGLTWSARELLSLQLDEWCQLDRAVAELERRIRHQVSGSDQARRLIQIKGVGQKIASAGCALLGDGSAFRNGRQFAANLGLTPKEHSSGGKQRLGRISKRGNAYFRRLLIQGAWSVIRYCDRGDDRLSRWARKMVARRGKHKAAIAVANKLARIIWAISYHQTEYRPS

SEQ ID NO: 493584 - protein, 355 aa, unidentified
MLADRIDFVLGVDTHKHTHTAAAVTPAGGLVAHLTVAADAAGYRRLLAFADERAPGRRIWAIEGTGSFGAGLTSHLLEHGEWVVEIDHPKRPARRNGAKTDELDAVRAAREALAREHLAQPRRRGAREALRVLLTTRENAMRARTKAICQLKDLVVSAPESLRRPLHALPSAALVAHCARVRTNTAHSVEQRYTILALRTTARRALALEAEAAELEAQLEPLVKQAAPTLLDEPGVGPVSAAQLLCSWSHAGRLRSEAAFAALAGVAPIPASSGQVTRHRLNRSGDRQLNRALHTIIVSRQVHHPETQAYVARRTVEGKSPREIKRCLKRHLARRLFKLLEGPHECPLQDRQLAA

SEQ ID NO: 493585 - protein, 391 aa, unidentified
MAQVNDLSRSLTAFDPISTLVVVVEMSKASWLVSGVVPGVERQPLKKLEPDATALLRLIERWRNEAVRAGRPISRIALAYEAGRDGFWLARWLIARGIEAHVIHSASVAVSRERKRAKTDRLDAAMLMRVFLGWLRGERGHCGMVAIPTMEEEDARRPSRERESLVDERSRITNRMKSALARLGIRGFKPHLRKAPGRLAGLRTAEGTGLPANIIEEFRRDMARLALVREQISSIEKTRAERLERAPDTGPHAMVRLLARVIGIGIETADMLVREILSRKLRDRRAVARYAGLTGSPDESGLKRREKGLAKAGNARVRRGLIQLAWRFLMFQKDSALAQWYRTRTEGPSGARKTTMIVALARKLLIALWRLVTTGEVPDGVELRPAARATL

SEQ ID NO: 493586 - protein, 319 aa, unidentified
MTPSPVFIGLDVATVTLDVALRPSGEQWSVPNDEAGVAALVDRLRPLHPALVVCEATGGFERAAIAMLAAAGLPVVVANPRQIRDFARATGQLAKTDAIDAAILALFAERVRPTPRALPSDAAQLLDALLTRRRQLLEMLVAEKNRLGFAPRPLHKGIQQHIRWLERQLDDVTKDLADQIERSPVWRAKDDLLQSVPGVGPIVSAVLLAELPELGTLSHKQIATLAGVAPLARDSGTLRGKRMVWGGRAGVRTALYLAALCGRRWNPQLRVFYERLLAAGKPKKVAIIACARKLLTILNAMLRDTARWRAPELAIQYSC

SEQ ID NO: 493587 - protein, 419 aa, unidentified
MSFKILKFNCCGLDVHKTWIYACIGITDSNNRTEYKQARFSSFTKGLNELCDWLAKYNCNDVCMESTGKYWIPVFNVLEQHGLWVTLSHPKYTKPMKGNKTDRKDAKWICDLYMCGMVKPSFIPPADIRGLRDLVRYRYKLTCMITGEKNRAQNCLTVSNLKLDDVFSDVFGKSARSITEQILQHPGEKFDVTPFVDSRCKTPIEEIQAAIDGAISKEQAVKLRQCLDHIDELRKHISEVEQEILRLSDKYEAALNLIRTVPGFDKNPMTAIQVLSEIGGDMSVFPTAKNLVSWAGCCPRNDKSDRKIKSTRISRAGSYFKPVLVQVANALIKSKKNSEFSNRYKRIKARRGHKKAIIAICRMLLTAIWHILTDLKPYTPDGFLESCPVSKEKVLTTSQALNLLKQRGYLIKDDPLSTS

SEQ ID NO: 493588 - protein, 412 aa, unidentified
MRRVIGIDIHRTFGEVVIWERGVLRHAGRVDMTRTGLEGLGKALLTTDEVVIEATGNCMAVSRVLSPFVARVVIANPLQVKAIAHAHVKTDKVDAGTLASLYAAGFLPEIWTPDPQTERLRRLTARRYQVVRHRTRIKNEVHAILHAHLIPRCPHADLFNGRGRAWLSRQPVPEDERAAIERHVRELDRLQEDLKDLDREIASGSLEDPAVRRLLTITGVNVAVATGLVAAIGDIGRFKNPQKLVSYFGLNPRVRQSGLGAAHHGRISKAGRSHARAMLVEAAWAAAKAPGPLHAFFVRIRAKRGHQIAAVALARKLTVLCWHLLTKDEDYRWARPALVASKTRAMELQAGLPQKKGNRRGPAYAYNVKDLRDQERQLAQQAERDYERFVERWRTRGPTSGVRGRLKPAGLE

SEQ ID NO: 493589 - protein, 358 aa, unidentified
MAKVSKMSTWCKMNPLTDRDALYVGLDVHKKSIHAAWWLNGQLARTWVMPARVSKVLTMLEKVRVALKHVVYEAGPTGFGLARALQGAGLPVGVVAPGQTPRPAAADNKSDRLDSRKLAEYAAKGMLKFIGLPTEQEEADRQVLRTRDQLSSKRRRVQQQIKSFLLQHGLEEPAGLCRWSREAIAGLKAMTLGPELRGCLDLLLEELEHLTILQGKLKPALDRLAKSDRHQAAVAILTSHPGVGPVTALAFRMELYQPKRFDHSAQVAKLVGLAPRVRQSGDKRWEGPLLKMGRPELRRLLVEAAWAWVRSDPGGRTIYGRLLANTGRAQKAIVGVARRLAIHLWRMLVTGELYRPAT

SEQ ID NO: 493590 - protein, 319 aa, unidentified
MPQPIPPANAGLRILGADVAKGSIVFHDDQTGRSWSAANTPESLGAALAPYAGYDWLICETTGGYERALLETAAAVGLPAARVDAAQAKAFIASHGGRAKTDRIDAAWLSRYGRERAATLTPWQVPSREREAFAARLRHRQDLLAQRTQAKNRRGAPGAEPLHQLLDRQIHFLTSQIAEIDRLMAEQLDADPDLARHEQILRAIPGIGPVAARTLIALLPELGRLGPKQAASLAGLAPHPRDSGSARKYRRMTGGRAALRPVLFMAALSAARAHPALSAVYQRLTAAGKPKRLAIAAVARKLVVIANATLRDAQIPQPN

SEQ ID NO: 493591 - protein, 397 aa, unidentified
MLFCGIDIAKRQHAVALLDEKGQLSQSAFSIPNDRAGFDQLMQSLPASDSVIIGLEATGHYWLALFDALTQQGFAVVVLNPLQVAAYRRSGVRKVKSDRSDAVWIADFVRIANPAPTRQDIPVLLQLRELSRFRFRLTEQIGDIKRKLLTILDRVFPEYEQLFSSPFLQASRALLEQAVSAQEIAEMNLQELETLLHDASRGRFGREKAQQIHAQARVSVGVGFLVDAAQMEMRCLLAQIELLEQQRDQIDAALARLMSQIPQHITSIPGIGPATGAAIVAEIGDVNRFGSPEKLTAYAGIDPSVYQTGQFQASEAHMSKRGSPYLRHALWMAASVAIRYDPQLQAYYQRKREEGKAHGAALGAVCRKLIARIYVVLKEQRPYVVRPTSNLSPFDSR

SEQ ID NO: 493592 - protein, 466 aa, unidentified
MFGKVEEQMQEGGGENSTKKEIEGLPIVRRNVAGIDLGSERHWVCAAAAGGNGREVADFGATTPELIRMAKWLQARGVESVAMESTGVYWIAPHEVLEATGLEILLVDTRQLARVPGRNKKSDPTDCEWIQRLHSCGLLRGSFRPVEEVCMLRTLVRDKANLVAESGDWLRRMPKSLDQMNVRVHRAVSDIDGVTGMAILRAIADGERDARKLAKLRNKSCRKSEKEIAEQLSGHWREDHLFSLRQSLKMYDSIQQRLADYDLEILARLAAIQREELRQQPPPPVKNPQKAKNIKKRGEEPMREALFRMSGVDLTGIDAIGVETVQVVLSEYGPDLSRFPTEKEFVSHVTLAPHRPMSGGKPVKKKKRNSASTRVAAALRMAALSIRNSATALGAYYRKMSHRKGGDIAVFATARKLATLIYRLLRWGQPYVDEGAEAFEKRYQEIRLKNLKAKAKELGYELVAQN

SEQ ID NO: 493593 - protein, 338 aa, unidentified
MKTYFGVDYHKKYSHGTIMNEKGIILKQGKFSNNKQCIEKFLGDFMGNGCCSVLEATRNWTVVHDILEELTEDVTLAHPLKVRAIAEAKIKTDKIDSTILAHLLRCDLVPSAHVSSPKARITKNLLRHRMFLVRLQTMVKNRIHVLLDRHPRLRPQKSANRFFSQIGIAELKKIRLPKHDRCILYSEISLLEHLQAQIKQANRWLIGVGEKDKRVKRLLTIPGIGRTIALLLVSEIDDIERFHSDRKLHAYAGLVPSTHSSAGRTFHGRIIKTGNKYIRWAMIEAVCPAIRCDTGLNNYFQRLSYRKGVNQAKVCTARRLLTIVYKVLKEKREYRYMA

SEQ ID NO: 493594 - protein, 384 aa, unidentified
MNQPLLWSLVPSPFLDSSSYLNPDLYNNLNRNLLRFLGYVQAPLPINQRKYMNNFYFIGVDVSKKKLDVCLMCNNQVLHEEIIPNNSTAIISQFRAIQQEYEIDGGHLIICAEYTGQYTYPLTCSCSALGIKLWLENPSSIKYSSGSIQRGKDDKTDAKRIAIYAMRFHDKARYYKHPTKEIERLKRLEAERSLYVKDLNKYQAQLNDQAEYMDAKLFKEKSKRLKKLIRVFEERIEELNTEMNQVIHSCEVLYHQYCLLQSVEGVGAVVATNMIVVTDGFTRFDNARQFNCYAGLAPFQYTSGSSQHSKARVSHRANKEMKALLHLAAMAVIRKKTSELKDYYLRKTEEGKSKMSVINAVRAKIVARMFAVIKKNDFYQPTLA

SEQ ID NO: 493595 - protein, 352 aa, unidentified
MIHFAGLDVSKAKTNICIVDAEGFVVVEAVAPTDPAAIADVLRRAERPIKRIGLEICGQSSWLCTGLTAAGLPAVCIDPRRAHGVLKAQRNKTDQNDARGIAELMRIGAYSAVHVKSAESIRTRALLRTRAVLQAKAKDIANAVRGVLLALGLKLSRQRLGGFERCVRAQAEKEPFALQAVGPLLSAISVLIREKKAAEARLVAMARQDPICRRLMTAPGVGPLTALTYKAAVDDPARFSNSRVVGAHFGLTPRTVQSGPTVRRGGITGWGDKTVRHLLYLGAQSLFRGGVRSSWLSRWGAQVKARQGHKRAVVAVARRLAVVLHRMWRTQTDFSWEAPRGQSPAVAPPSAV

SEQ ID NO: 493596 - protein, 338 aa, unidentified
MKLYGAIDLHSNNNVTVLIDERDKVVYQKRLANDLPLIVEQLSPYASSIEGIVVESTYNWYWLVDGLREKDHRVHLANTAAIQQYEGLKYTDDDSDARWLAHLFRLGVLPEGYIYPKEERPVRDLLRKRSQLVHHKTAHLLSIQNLYSRNTGSSISANRIKQLSSEKVDALFTNSDLALAVKANLTVMRSLETEIAILERIVKERVKLKPAYRYLLTVSGIGQILALTIMLESGDIRRFPKVGNFASYCRCVKSEKLSNGKRKGSGNTKNGNKYLSWAFVEAANFAIRFEPLIARFYQRKKAKTHRVVAIKAVAHKLARACYYIMRDEVPFDVDRAFA

SEQ ID NO: 493597 - protein, 377 aa, unidentified
MRTIGAEIPETTEGVVILGVDTHLDFHVAVAIDHVGRRLGESSVPTTAKGYQMLLRWAEGFGPVRCAGIEGTSSYGAGLTRHLRARGIEVLEVERPKHRRRSPRGNLEKSDPSDAERAARAVLAGEASSVPKSGDGTVEMIRALRAARRSAIKARTQAANQLQSLRVTAPEELRHRLRGLHTKELVSVAARFRLGDAPRDVPTATRFALRSVARRYEALSEEITELEAHLERLVAQAAPELLSLPGIGTDNAATLLVVAGDNPRRLGSEASFASLCGVAPIEASSGKVVRHRLNRGGNREANRALYMTCLSRMRRDLRTQQYVARRTAEGKSKREIIRCLKRYVARQVYRVLIPCDALSLPTSPKEEAQIGAGNNAA

SEQ ID NO: 493598 - protein, 334 aa, unidentified
MENIALIGIDLGKNSFHIHCQDRRGKAVYRKKFTRPKLIEFLATCPATTIAMEACGGSHFMARKLEELGHFPKLISPQFVRPFVKSNKNDFVDAEAICEAASRPSMRFVQPRTESQQAMRALHRVRESLVQDKVKTTNQMHAFLLEFGISVPRGAAVISRLSTLLEDNSLPLYLSQLLLKLQQHYHYLVEQIKDLESQLKRKLDEDEIGQRLLSIPCVGTLTASTISTEIGDGKQYASSRDFAAATGLVPRQYSTGGRTTLLGISKRGNKKIRTLLVQCARVFIQKLEHQSGKLADWVRDLLRRKSNFVVTCALANKLARIAWALTARQQTYVA

SEQ ID NO: 493599 - protein, 317 aa, unidentified
MTTPNDAYVGIDVGKTWLDVALWGNNAVWRVSNDDEGVAEIMARVTALGLQLIAVEATGGYEQLVVQTMLLNSLPVAVVNPTQVRALSKATGKLAKTDVIDARLIAEYAFKIQPEALAPKEAQEIRLNALVTRREQLVEMRTAEQNRLGTVHNSMQVDIREHIEWMNARIQELEVEINGLVDNLPKWRKQAERLDSIPGVGKITAVTVLAEMPELGQLNRQKIAALAGLAPFNRDSGQKRGKRRIFGGRKGIRRVLYMACLSATKYNPVIRSLYLRLTKKGKLFKVAITACMRKMLTIMNAMTRDQVNWRPPEPIPN

SEQ ID NO: 493600 - protein, 407 aa, unidentified
MNITCGIDWAEAHHDVAVMDQDGHVLGRLKIDTGVGGFGQLMALLAEHSDDPVSVPVAIETDKNLIVVALQAAGLTVHAINPRAVARYRERHGQAGKKSDPGDAAMLADVLRTDRHQHRALPEISHSGQAVKVLARQHQEAVWALHQTTSRLRSVLLEFYPQALQAFPNLKHRAALTVLAAASTPELGTKMTSRRLVALLHRCGRRNDASLVTQILSDLKTPTLRQPAQVEVALGHTVVTLLGIIAAMHAAVEQLETALGAEFDPHPMASILRSAPGLGAVLGARVLAEVGDDRARFATASGLRAFAGTAPVTRASGRSRYVKARKVRNKRLADACHWWAFAALTKSPGAREHYDRRRAAGDHHNAALRNLANKLLGRLWWCLQNNQPWDEEAAWPRISTQTEAAAA

SEQ ID NO: 493601 - protein, 347 aa, unidentified
MAMTTIEAVRAVTGGVDTHGEVHVAAALDPVGGVLGTAAFDTTPAGYRQLLEWLRGFGPVSTVGVEGTGAYGCGLSRFLCRQGVVVVEVDRPNRQVRRKQGKSDPLDAVEAARAALFGRAGVAKTKDGAVEAIRVLVVTRRSATQARVKALVQMRHLIYTAPDQLRERLKGLSTPRLVVEAASLRAGRAPDPVTAATKTALHSLASRVRTFDKEIQAIDSLLGPLVATTAGELVALTGVGTVVAATLLVAAGDNPERLSSEAAWARLCGVAPLPASSGKVTRHRLDRGGNRQANSALWRIVMVRLTCDPNTQAYVERRLKEGRTKREVIRILKRYVAREVYRHLPRR

SEQ ID NO: 493602 - protein, 359 aa, unidentified
MEAQVKKIDFTGQNIYAGFDVHKKSWKVTIMAENTFYKTFTQPPNPEVLHNYLKSNFPGGNYHSAYEAGFCGFWIHDKLTSFGINSIVVNPADIPTTDKERVQKEDKRDSRKIARSLSSGTLVPIYTPTIQTQRDRSLLRTRAMLVKDMARYKNRIKSFLFFYGINIDDSFTESKKHWSKRFMIWLESLELDGETGKVALQLLISELTNLRTSILKVTQQIRALSQTSTYKERTTLLKSVPGIGLLTAMTFLTELETIDRFRNLDKMCGYIGLVPSTKSSGEKEKNGDITSRGHGVLRTAIIESSWVAIKNDPSLMKSYLTYLQRMDSNMAIIKIAKKLLSRIRFVLANKIPYQCLIEK

SEQ ID NO: 493603 - protein, 398 aa, unidentified
MTRKNTLKSLPTDTEFRVVGLDLAKSDVSVAAIPVDDNTPSLVDRMTYADLLDWAGKISPTLFAMEPCNGYSLLCLQLENLGHEIKVISGSTVSMWINTHLSGQKTDLNDAIALARLAVSDAELTPIRHKSITEIRIQTVQAVRQQLMSQRSKSIVSFKALAQQWGIPCAAGHRNLKKLRESIEAKVDLITRPVANAMLFLLDAVKSLDRQIGQLNQTLQELVMSDERGRLLQSVLGVGTQISARVLTVVGNIERFNSPRSLVAYVGVAPRNFITGHKNLTKKKHGNCPDLSHKGQGKISRRGDKLLRSLFIQGAACLYMQFCKDQLPECQLKRWILKQLAIQKPYGKLIVSWAAKLIRIVWAVLTYREKFNIQKAGMTRSMWSEMALETPLNKEVPA

SEQ ID NO: 493604 - protein, 329 aa, unidentified
MDHFAGLDVSVKETSVCIVDDAGRIVREVRVASEPEALLQVLANNTYRFKRIGLEAGPLSQWLFSALAEAGLPVICVETRHMRAVLKAQINKTDRNDARGIAQMMPVGLYRPVHVKTLRSQKLRMLLTHRKLLQSKAIAVENDLRASLRNFGLKVGMIGTLKFEARIRELVENLPDLAVLVEPLLIVRRVLREQLGILHRRVLAVVRDDDVCRRLMTIPGVGPVVALTYRVTVDVPARFRNSKAVGAVFGLTPAKYQSGENDRTGAISRCGDEMMRMMLYEAAQSMLVRSTKWSWLKAWAMKVARHRGMKKGDRGAGASVGRDHAPRVG

SEQ ID NO: 493605 - protein, 344 aa, unidentified
MNTIKVVGIDLAKSVFQLCVWMNDGTVAWNRKVSRSKLLDTVRQFPPDTLIAMEACATSHYWGRTFQSMGYAIRLIPTQHVKALTRHQKNDANDALAICETAFRPGIHFVAVKTVEQQDIKALRCARQLMVEQRTAAANQIRALAAEQGFGFPVGIHTLQQRLPDLIEDAEKPVSPVLRHLLSTLLENIHTLNEYIRSTEYEIAALCQQQPRYRALMTIPGVGPLIAAAFLSEVDAEQFANGRQLSAWCGLVPRQHSSGGKHILTSMTKNGNCDLRTLIIHGARAVIRCVQKRDDRLGRWLNHVTERRGKMKATVALANKLTRVVWRLLSEPVDFNMDKAFAMK

SEQ ID NO: 493606 - protein, 347 aa, unidentified
MRFYTNQHKFFCGVDLHAKSMYLCILNAEGEIVLHRNIKTDSHVFLKTIAPYREDIVVAVECIFTWYWIADLCAHENIPFVLGHALYMKAIHGGKAKNDKIDAHKIAVLLRGGMIPMAYVYPSEMRSTRDLLRRRMHLVHKRAELLAHVQNTNYQYNLPEIGKRIDRKSNREGVAERFTDMSVQKSIELDLMLLDHYDQLLPRLEHEISLIAKTHDADSYFRIRSIPGIGRILGLVILYEIHDINRFPRVQDFVSYCRLVKSAKESAGKRMGTSGKKIGNVHLKWAFSEAAVLFLRRNPDARRYRDKLIRKHGKAKSLTILAHKLARAVYYILKRKEVFHPKVFFAK

SEQ ID NO: 493607 - protein, 442 aa, unidentified
MRIVYQRCCGMDVHKNSVTACVLLIDEDGELRMEKRNFRTMTRDLKEMSTWLASLRVEGIAMEATGVYWKPVWNILEAEEKFRLLLVNAHHIKHVPGRKTDQKDSEWIAELLQHGLLKASFVPPRAIRRLRDLTRMRVKIRQTLASFANRIQKVLEDANIKLGSVASDVLGVSGRHMLQALVEGQQDPQQLAGLAQGRLREKREELQLALEGHITDHHRFQLKFLLDFVEFGERQMSQLEAEIQRLLHEVEPGPIAPESAETEAPATRLKSPLETVVELWDTIPGIDKLAASTLVAEMGADMNQFPSAGHAAKWTGICPGNKESAGKRLSGKTPKGNVWLRRALCQAAWAASRTKNTYLAAQYHHLIVRKGKKKTIVAVAHTMLIIAYYMAQRQCTYQELGGDYFHRLNADSVKHRMVQKLRSLGYEVTLTPVSPEPSAQAV

SEQ ID NO: 493608 - protein, 369 aa, unidentified
MDHHSVAYVGFDTSKTKHAVAVAEGGREGEVRYLGEIEAAPAAVERLLRKLACKYKILHVCYEAGPTGYGLYRHIRALGHVCDVIAPSLVPTRPGDRVKTNRRDAVTLARLLRAGELTPVWVPDAVHEAVRDLVRAREAAARDLRRKRQQVLSFLLRHGRIFTGHRHWSRAHLRWLAGQAFDHPAQQIVFQDQVDAVADAQARLERLDRQLAELVPPWSMAPVVAACQAMRGVSFLVAVTFVAEIGDVRRFESPRQLMAFLGLVPCERSTGDTVRRGGLTLAGNRRVRRALVEGAWSYRHPARITETIRGRLEGLPKVVREIAWKAQVRLCSRYRRLMAAGKRAPVAVAAIAREMAAFLWAIGRVVEPT

SEQ ID NO: 493609 - protein, 413 aa, unidentified
MTMEAVFRCVAGLDVHAKTVAVCLRRVDENGKGHKEIRTFETMTRNLLALTDWLIAEAVTHVAMESTGVFWKPIYNILEGQFEIVLVNARHIKNVPGRKTDVKDCDWLAQLLQCGLLRGSFIPPRPQRELRDLTRMRTQLTREMVSVGNRIQKVLEDANIKLAVVASEVLGVSGRRMISALVEGETDAAKLADLACRRMREKIPLLEKALEGKVTDHHRFMLKALMNHVTYLEEQIERFSQRIEETSGPFQEAITLLITMPGFDRVSAQNVIAEIGPDMAPFPTPAHLSSWSKICPGNNESAGKHKSGAIGHGNIWLKASLTQVSWAASHKKGSYYQAQYHRLAARRGKKRALVAVAHSILVAAYCILKRKMSYCELGNNYFDLINHDRICKYHVKRLQALGYKVDLTQKQVA

SEQ ID NO: 493610 - protein, 449 aa, unidentified
MPHRPKKKVQTQPVVFQPDSAGIDVGALELFVAVPGDRDTESVRSFGSFTEDLIALANWLEQCTIKTVAMESTGVYWIPLYQILQSRGIEVCLVNARHVKNVPGRKTDVLDCQWLQYLHSVGLLRASFRPSDQICVLRSYLRHRDTLVKIAASHIQHLQKALNQMNVHLHHVVSDITGVTGLAIIDAILAGERNPCTLASLRDRRIKATEATIAKALAGDYRTEHLFTLKQALEAYRFYQTQIQQADQQIESHLSSLQTKTHQPTPPPRRKHSPERNQPHFDLRGHLHRILGLDLTAIPGFSSLNVHTLFSEIGPDLSKFPSAKHFCSWLGLSPDNRISGGKILSAHTRNVKSRAASALRMAAYSAGKSYSAIGDYFRRLRARLGAPKAITATAHKLARIIFHLLTTHSPYNESVFQQNEHRYLINAKRNLAKKARELGFSIHSIQEVS

SEQ ID NO: 493611 - protein, 351 aa, unidentified
MTFVGCDLHSRSQQVAVLNTETGEVQERRLAHDDQAVEQFYRALPRPVTVGVESTGYAQWFHALMQRQGHTLLVGDAARIRAMVVRKTKTDRRDAAHLVQLLAQDRFPLIWVPDPRVRDVRALVAHRMRLVRMRTMVKNGLHAIALNARLAAGSALFTRRGRAQLQALALPPHTTERRDQSLELLAWLDLHIHPLDAQIAEAAAADVQARRLMTHPGVGPLTALATVLILGPVARFPTSKHVVSYIGLAPAVAASAEKCRLGHVTKQGNALLRYVLGQAGQVASRSDADLRRLYSAVLHRHGHAKAKVAVARKLLVRLYIMVRDQIDYGEFCERGRPRHLAHPRAEVTVRT

SEQ ID NO: 493612 - protein, 344 aa, unidentified
MDHFAGLDVSVKETSICIVDDAGKIVREVKVASEPEALLAVLKNPAYHFKRIGLEAGPLSQWLFSALAEAGLPVICVETRHMQAVLKAQINKTDRNDARGIAQMMRAGLYRPVHVKTIRSQKLRMLLTHRKLLQSKAIAIENDLRGTLRNFGLKVGMVGKVKFEARISELVENLPDLAALVEPMLIVRRTLREQIVILHRRLLAIVRDDEVCRRLMTTPGVGPVVALTYRATVDVPARFRKSKAVGAVFGLTCAKYQSGEVDRNGRISRCGDEMMRVMLYEAAQSMLRSKKWSWLKAWAMQIARRRGMKKAIVALARRLAVIMHRIWVDGTAFRWTREQAAAEA

SEQ ID NO: 493613 - protein, 428 aa, unidentified
MKRKAAVCLPFILTRGLLWFLPEQSRTNGRDTRVPEALQCKQFELANTPMKTELYVGLDVDKEWIVTAVAEWGRNGPVHDLGAISNDLHALEKLLARLRKRYGPDVRICACYEAGPWGFGIARRLHQLGVECTVVAPSLTPTRSGDRLKTDKRDARKLARLLRAGELTEIYIPEPTDEALRDLCRARSDAVDDRRRSRHRLKAFLLRHGYRYQGKSAWSAAHERYLRELVLPHPAMKVILEEYLISVQLASERIARTEAAMSDLLGKWRLEPAVRALMAMKGFQTVAAMIVVSELGALDRFTHPRQVMAYLGLVPSEKSSSDRRRQGSITKCGNAHARWLLVECAQHYAAPPKVSKELSRCQQNQSRAVRLISWKAQNRLHQRYVRLMARRLQRNKVIVAVARELCGFIWELLRSQECYHAPCPSGMN

SEQ ID NO: 493614 - protein, 343 aa, unidentified
MQTVTTIGLDIAKSVFQVHGVDSTGHVVIRRQLKRRAVLAFFQKLLPCLVGIEACASSHHWSRELQALGRTVRLMPPAYVKPYGKRQKNDMADAEAICEAVTRANMRFVPTKTPEQQSCLMLHRTRHLFIRQQTAVINSIRAHLAEYGIVAPVGRKGVTELLHVVADPSDKRVPEVARACLAALGNQLLTLKEQIMEFDRMIMVWHRSNETSKRLHYIPGVGPMLATALVASVADARTFRSGRNFSAWIGLVPKQHSSGGKDRLGSISKQGDRYLRSLLVAGALAVIRYAKIHGTKHRPWLTALLARRPTKVAAIALANKIARMAWAMMAKGERYKQPVALAA

SEQ ID NO: 493615 - protein, 460 aa, unidentified
MPEKLQTRKRKKKKGMCLADRPVVEARAAGIDIGAREIYVAVPPDLDPEPVRMFATFTEELNRLADWLVSIGIRTEAMESTGVYWIPLYEILEARGLKPFLANARHMKNVPGRRTDWHDCQWIQYLHSVGLLRGAFRPADEICAVRAVMRHRQELVQMAAQHVHHMQKAMTQMNLQLPHVINDITGLTGLAIVDAILGGERDASKLAELRHFRIQADAETIRKSLVGNWRGEHLFTLRQSREMYGTYQRQIEQCDDKIAELLKDIPPKVDPEQRPLPPDQKKRRSRNGRNPNDQGFNMRTEVYKRWGVDVLQIPGLEHTALALLTEIGPDLSRFPTAAHFVSWLGLCPENDMSGGRWWRGARKVKSRAGQLFRQAACALHRSQTELGHFLRRLKAKLGPLGATMATARKIAVIFYTMVKNQIEYDHSIWAEQEADRQRRHETRLKQQAARLGFVLVPKNA

SEQ ID NO: 493616 - protein, 356 aa, unidentified
MTIVAQSRSYVIGVDCHARTHTYAIIDPRTGELLGCEQFPTTPSGISRATSWAARRTGGDASTLWAIEGVAMYGAQLARAVAETGFDVVEAPRTSAKARHGIGKSDPIDARMIAAATLGLDDTQLRRPRQDTGGRAALRTLVAARDMMAGERTMNIIALTALLRVNDLGVDARKSLTRTQIATVSKWRERTETLEVQIARAEAVRLARRIRELNDQLAVNKADLVLLIKNSPAAPVLEEPGVGPITAAMVLTAWSHRGRIRSEAAFAALAGVSPIPASSGNTSRHRLNRGGDRRLNQALHMAVVNRIQYDPDTRAYVTRRMAQGHSKREILRILKRYLARQLFRTLNALHDVPATA

SEQ ID NO: 493617 - protein, 336 aa, unidentified
MTLYCGIDLHSNNHVLCVIDDKDRRLLETKLNNKVQLTIAALAPYRHRLQAAAIESTFNWYWLADGLMEAGFQVELVNTAKVVQYSGLKRTNDRYDAFHLAHLMRLDILPTGYIYPKAERGLRDLLRKRIQLVQDRTRHLLRFQSQVQMHTGTTLPAYRIKTQKFQLPAIGDANVQLALQSQLVLIRALSAQIKQLEKSILSQVEPVASFDWLKTVPGIGDILAEAILLETGDITRFKGPGNFASYCRCVDSRRESNGKKKGENNRKNGNRYLAWAFIEAANFAVRYSDKAKRFYLKKEKATNSIIARKALAHKLARSCYWVMRNQEAFNQDRVFH

SEQ ID NO: 493618 - protein, 419 aa, unidentified
MLNPDAAGIDVGAKQHLVAVPADRDPRPVRTFQAFTPQLHELAAWLKRCGIRTVALESTGIYWLSLYEVLEQDGLEVRVVNARHVKHVPGRSKTDVLDCQWIQKLHSFGLLNGSFRPDPPIRKLRTYLRLRDNLVVNNTQAIHHLQKALFEMNVQLSNVISDVSGETGLRIIEAIIAGERNPEQLAALCSSRIKASRETVAKSLHGNWDSALLHCLKTALETYHFTHCQIQECDLCIQRQLAELDARAPLPDSAASLKEQLHRVCGVDLTKIPGIKEQAAQIIISEVGLDMTKWNTEKQFSAFLGLSPDNRISGGKVLSRSTRKVYNRAADTLRLSAQSLTHSKSALGAKYRRLKARLGAPKAIVAMAHHLARLVYRMLRYGQNYVEKGIEHYERKFRLQRIKWLKKEARALNLQLVAA

SEQ ID NO: 493619 - protein, 356 aa, unidentified
MKKLTAIAIDLAKNVFQVAGENARCEIILSERLKSRQAMHKFIQTLEPPLTVAIETGPGAQAWAREIAARGIEVRILPAQHTAAHRSGNKNDANDALSILRALHDVSVHPVPIKTQDQLAMQALHRARRGWRRRMTAITNQVRGVLLEQGVVIARGDAALVRKIDRTLEDATVPIPDRLRALVADLMGEWRGLGERMAAIDGELAVLSRADPIAKHLCQTRGIGPIISTAMACKSLNPDRFANSRQFAAYFGITPSQHSSGATVRLGHMSRRGDTYLRSNLIEGAHSVIRQIRRDATDPYSRRIQRWVQRCGPKGAAVRLANHNLRVVWLLLKHPDMVFSNNPGHRSADVREAAMH

SEQ ID NO: 493620 - protein, 420 aa, unidentified
MKAWNEIKHYAGFDWAKDHHDVIVLDAGGKTVVEFRFDHTAGGWDEFSKKLAAFPDVAVAVETNHGGVLERLLERECCVFPVHTRSAKGYRQRKVPSGNKTDKIDAWSLADALRLDGAHWKQLSAQDPLTKELRLLCRDEVALIRDRSALITQLRQTLYDYYPAALEAFDDWTMPAAWSFVVSFSTPEVLVKAGKRKREKFLHIHKLARPATYQRRLEIFARAHQFAGSAATIRAKSKLAVARARQLQLLETQIAEYRQEIRRLFAQHPDAKLFGSLPGAGDKIAPRLLVEIGDDRALFSDAQGLQCLAGTAPVSYQSGQIHRVYLRRQCNKSLRNAVHLWANLSREFCPWAATYYTALRAKGKSHACALRALGQRWLKIVWKMWQTRTLYDADLHARNQLKHGSWVLQMVNQPAVVKTD

SEQ ID NO: 493621 - protein, 350 aa, unidentified
MEEYIAFDAHKRYTWVEREAVATGQTSHCRLEHSRGAIRRYLSQCPPATPVAVEATGNWYWIIDEIEQAGLRPLLVHPRKAKLMMGQINKTDKLDAHGLNTLQRNGTLPTVWIPPGPLRDLRELTRTRLVLVAQRTRLKNRIRSTLEKYGMTSTASDPYGKGGRAELTAQLEQLPPHTRWVCELLLAQLDFLIQQIRPLEERLEELIEVTPAMQRLMSLPGVGVILAATIALEIGDIGRFATAERLASYAGTTPRVHASGGKVRYGKLRPDVNQYLKWAFVEAGNSVAVNHRRRPERHVSRLYWKLRARKGHSKAIGAVARHLAEAAFWVLQRNETYRDPTRGTGRSSEV

SEQ ID NO: 493622 - protein, 351 aa, unidentified
MYIIGVDYHPSFQQIAFLDQETGECGDQRLNHSDGEAEKFYRELQAKGVSVRVGLEATGYSRWFERLLTELGIEAWIGNAAEIKAKRVRKKKTDRQDAQLLLQLLEENRFPRIWVPSPENRDLRQLLWHRHRLVQMRTRIMNQLQALAMNEGKRWKHRLWSAEGRALLEKFPLALWASRRRQDLLELLDRLTPTIDELTFAVEQEARKWPEVQRLMTHPGVGPLTALAFVLIIGTPGRFRRGKQVGSYIGLVPSEESSGGRQRLGHISKQGNALLRFLLVEAAQAAARCNQDWRQRYWHLAMRREKSIAKVALGRQMAVRLYWMWRKGWDYAQLVEFGSHTGQLATGHGVH

SEQ ID NO: 493623 - protein, 408 aa, unidentified
MINDAINTSRVIGFDAHPDSFTAAILSGPTPAAAVVEKMFNKVPMNRLLQWAKKNTLDSDIIVLEASGNSFHIARSLRSAGREASVLESRHIGKLKEAHANNDKISAIRIGKAYLAGTAKIVWIPDETTQERRDTFHTYSKAVKRSTQVTNRIRSYLSDHGVRLKSKTHILNQKESIMQACQWSPRERLIIEGMLMDLQNAQSQRAHWNHFMAQEVLHDPLLLSLTRLTGVREIVAYSIGAIIGDINRFASPKKLVAYIGLNPAFDKSGEGEWNGGIKGHGRRDLRSHLIEAAQSILQSNHDLGRCGKKLMARKGSRNLAVAAVARKLAVAIWYLMKGLWSTVEEVEAGMKLKIGKMIGKMGKEGLSLIGKTRKEFKEEIEQNLKKGREYILDRARSSPLKSSLKEAS

SEQ ID NO: 493624 - protein, 322 aa, unidentified
MAMLSFGGIDVSKDRLDVMVLPEEQCSSVPNDAAGWAKLVEQLRGFSISAVGIEASGGYERGAVRALLAAGMSVRQVNPFKLRQFARASGVLAKNDPLDARMIASFIAIMPTRPAQPHAPAVERLAEILTVRRQLSDAKVAAENASRLLEDAMLQRLSRRRIARLAADIDLLDGRLVEIVMADAALVHRYQLLTSMPGVGPVLACTLIALLPELGRMNRKQVAALVGVAPYAFESGTLKGRRCIWGGRAHVRQVLYMAAMSASNWNPAFKTFHDRLKAAGKLPKVVIVAVMRKMITTLNAMVRDDIAWADRLSGRHSVTTAR

SEQ ID NO: 493625 - protein, 408 aa, unidentified
MQVLYPRCAGLDVHKDTVVACVRCVSEPEHHETRSFATTTRELLALGEWIASHGCSHVALEATGVYWRPVWHVLEGQVELVLANAHHIKNVPGRKTDVNDAMWIADLLAHGLIRSSFVPPQPIQELRDLTRTRKQVVREISQHSLRIQKVLEDANIKLGSVLSEVLGVSGRAMLGAIIEGERDPHKLADLAHGTARHKHDALVEALHGHIRPHHCTLLKLHLNLIIALEHTVAEVDAAVGKCLEPIRQRARLLTTMPGVRDTVAEVIVAEIGIDMTRFPTPGHLLSWATMCPRNDESAGKRRSTRLLKGNNWLKTALVTAAWAAVRTKTSYLRAQFLRLKARRGAKKAIIAVAASMLTAAYFILRDGVPYRDLGPNHFDRQQRGKTVRRLLRRLHDLGYNLPPQHQPV

SEQ ID NO: 493626 - protein, 339 aa, unidentified
MQNTKNNIYRHYIALDWSKEVVAMATLRDSGSKVEVQMLQPEPRIIKEQINKCYGSKILTIEETTTSHWLYVELKESVDKIVICDPYRNSLLKDGPQTDKIDAKKLCLLLRNGMLKEVYHTLDKEYEIRKLVSAYLDIIKASVRLKNQRSAIFRSEGKSHKKEETLTDSPIKKFITQKQNEHIEHYKDTIEEYEEKFKKIEKSNKTIQNLKKISGIGTKTAIMIYSTVIDASRFENKYKYWSYCGLTKHYKESGGKVYRSKMVRYSKLLKRCYKSSALASINGKNDIREYYEYLLQEGLSIEKARHQISRYISKVSYAVMKNKIEYRAYQWRESKNKDS

SEQ ID NO: 493627 - protein, 310 aa, unidentified
MDGLFVGLDIAKDRVDGYVQPTGERFSAGTEEPALAGFVSRLRALAPTLVVMEATGGYEIPVTAALTAAELPVVVVNPRQIRDYARATGQLAKTDALDARIIARFAEAVQPAVRPLPTPQAQALADLMARRRQVVDMLGAELNRQRQARQPRLQKRIADHVAWLQKALTKLDEDLTELIHKSPVWREKENLLTSTPGIGDVTAHALIADLPELGQLDRRRIAALVGIAPFNRDSGQWRGRRMIGGGRATVRRALYMPTVVAIQHNPAIAACYHRLVQSGRPKKVALIAAMRKLLTTLNAMLRDHRPWQPA

SEQ ID NO: 493628 - protein, 352 aa, unidentified
MSTSKITEVILGVDTHLDIHVGVLINVNGQLLGTLAVETQVSGYLKLLAWAKSFGLFQRAGVGGTGTYGAGLAQVLRDHDIAVFEVNRPDRTKRRLEGKSDPTDAESAARSVLSGSATAIAKTRSGAAEAMREISVVRRSAVKAKTQAINQIRSLLVSAPQEIREQLWDTKPAECVGNCLHLGSLGSAPFLAVLATSLRLLARRWTALAAELKELDDMLESLTQQYAHRLRNQFGVGPQSAAILISVAGDNPERLESESALAALCGVSPLPASSRKTVRHRLNRGGDRSANNALWTIAMVRMRSDSRTRAYVARRTAEGLSSKEIQRCLKRYIIRDLYPLILADLNESRHVG

SEQ ID NO: 493629 - protein, 419 aa, unidentified
MNKIETKKQRIVNDKTLIVAIDIGKATDTGYCRCPSGKDIKPFEFTNNSEGFRKLWDRICWEKTSNHLEEVVVGFESTGAYGEPLVHYLRQKPVKLVQVNPMHTKRMKELQGNSPGKTDRKDPKIIADIIGLGHALSVVIPEGAAAELRRLTLARERSIQRRTALYNQLQDLVFIVFPEFLQVMKDVKTQNARYLLRHYPTPQDMAACGSEALAVILKRVSRGKLGKAHAQMLYDAAAQSVGLQEGRMGILLEMEEILSGLEACNCFIEKLEEEMLPYLGQIPYSDLLLSVKGIGVITVAGLIGEVGDFRQFHTLREVMKLAGLNLFEISSGKHRGNRHISKRGRPLLRKLLYFAAINTIRKGGVMHACYQRYLERGMPKTKALIAIARKLLRILFALVRDHSQYIENYFPKEALNLAA

SEQ ID NO: 493630 - protein, 340 aa, unidentified
MSLQIRVSMKETRNEVKPKEACMAYVGIDVSKDTLAIDAGDLYTGTIRNNKSALGKAVRAIRKAAGGRDARITYVAEHTGCYSLLVHLELAKAGEAVSMVDPKRVRHFAKVMSVAAKSDPLDAAVIRKFAEFAKPEPTPLPSENLVESRETIRSRGLLMKVRVMLGALAGVTISATCKTALKAVIAAIDRQVDNLDGRLLELFEHADATTQRKVVEMEKIRGVGRLTAFSIATAVPEIGTLGPQRAASISGLAPFVRQSGKWKGHQKISAGRSEVRRALYMPAVCAIVHNEVLRKVYRHLIVDLHKPKKVAITAVMRKLIIHMDRVCAALPDAGATVVGE

SEQ ID NO: 493631 - protein, 387 aa, unidentified
MQAAESRSKAPTAIRVDLSAIFVSLELSRSKWLITSLSPGAGERMSKFVVTGGDVPGLLACLAELQRKAKARTGSGFRIVSIQEAGLDGFWIHRILEREGIESYVVDPASIATSRRRRRAKTDKIDGEALVRALLAYKRGEPRVCAMLRVPTPEEEDCRRLVRERKALTNERVRHVNRVKGLLFGQGVSGYQPLNRDRRKRLEELVTGDGRPLPSALKAQISRELDQIELLIEQIKAVEKSRDDMMVAAQTSSPAPALLLNLKGIGPQFAAVIWSEGLSRNFDNRRQVAAYAGLAPTPWQSGKVDRDQGVSKSGNPRLRTTLIQLAWLWLRHQPDSALTAWFKERVTQNGGRQKNATIVALARKLLVAMWKYVTAGVIIEGAVLTAD

SEQ ID NO: 493632 - protein, 269 aa, unidentified
MTFRPHALHLKAELFVKSSRVHVRDDGFTRCNFHLKFFIMVYRGIDISKSSFVAAYPSTNGNPTKTFPNTTAGMRELIGTLAVAEHHCVMEATSLRLLLYLLHQNGIAVSFAPPQKKQIKHFSRMMMPVTKTDEKDAYMIAMYGEKMNPPIYKMPSQATIRILTTEGFTYFDNAKQLSRFIGICPTYQQSRTSVNIREHINRNDDERLRSLLYIAFWTALRYNSRECYIRLKANEKPFKVALIAVTNKLVRPVLTITTINSIYRWICPG

SEQ ID NO: 493633 - protein, 410 aa, unidentified
MEVLHPRCCGLDVHKETVVACVRLAIDGKVVKESRTFSTTTADLVALSEWLAENKCTHVAMEATGVYWKPVWHILADGGFELVLANAAHIKNVPGRKTDVKDADWISELLAHGLIRASFVPDGPTQEMRTFLRTRKQFVREKASHILRTQKTLEDANIKLDSVITDIIGVSGRKMIEALIAGESDPAKLANLADRRVKASQPTLREALRGRVTAQHRFLLRLHLDQIDALDAAIARIDREVEASIAPFRTAVEQVSSVPGVKTLAAMQILSEIGTDMSRFPSDANLVSWACICPRSDESAGKRRSTRIRKGSPWLKTTLVQCAWAAVRKKDSYLNAQFHRIKAQRGPKKAIVAVAASILTAIYHMLKDGTLYHELGPNHFHARDRERQKNRLLKRLAQLGYTVALAPAPN

SEQ ID NO: 493634 - protein, 353 aa, unidentified
MTLTRVHEKGISMTVIIGVDPHKSTHTAVAIDRDEQPLARVQLVADRCQVQRLLAWVEPLGTQRTWAVESAAGLGKLLAQQLLASGEQVVDVPPTLAARVRLLGSTKAAKNDPNDALATAIAGLRHCGLRAVRVEDDTAVIRMVIDRYDDLVALRTQAACRLHVALRELIAGGAPRRLGAERAGKLLRSVRPQGAAGVERKRLALELLADVRRLDRDVATAKRRVSDAVTASGTSLLELHGVGPIVAGFILGHVGDPARFPTPARFASYNGTAPIEASSGPRSRHRLNPRGNRKLNHAFHLAAVTQVRHDTPGRVYYQRKIAEGKSKKEALRALKRRISDAVWRQLQVDIGRR

SEQ ID NO: 493635 - protein, 347 aa, unidentified
MVNKNRFQVVEYPVISSFLKRIVMNKFKQFIGIDISKDVFDVSLSEKTHHQFTNDTKGFIKFKKLIGKGSLCVMESTGVYHQALAMFLYGQSIAVCVENPLKIKRFIQMNLRKEKTDKADAEQIRLYAQKIAVKLWQPKEVYLEESEQINSLLSFYKKGQTAIKNRIHAITRLPRVSKVVLRTLKSQLKRQQKEMEKLESELLLLIKENEQQLLTNLESIPGIGRKTAIYLIVMTDGFRKFEKAKQLCSFAGITPTIRESGSSIRGKSRISKIGDKEVRNLLFMCSFTACHSNKSCSQIYTRITAKGKSKKLALIAVSNKLLKQAFAIAKSGLKYDENYVSIKPEII

SEQ ID NO: 493636 - protein, 410 aa, unidentified
MDVIVARQGALDVHKAQVTACVRVPGADGDRVERVEQFATTVRGLLVMSDWLKAHAVTHVVMEATGDYWKPVWHLLEHDFELMLVNARDVKQLPGRKTDVSDSSWLCRLAEAGLLRASFVPPKPIRDLRLLTRYRRTQIAERKREAQRLHKALEDTGIKLDCVATDILGKSGRAMLDALVAGTTNPEILAELALGKLRKKIPALREALEGRFGTLHALLIGAILAHLDFLDEQIAQLSEAIEEQMLPFAAAAELLCTIPGVAQRTAQVIIAEIGADMSVFPTAGHLASWAGQCPGNDQSAGKRRSGRTRKGSKNLNFALKDAAMAALRSNDSYLQALYRRKKPQLGHGRALGAVKHSMICAVWHMLSTGELYNDLGGDYYARRDPERQTRRLVAQLDRLGHTVILEQQAA

SEQ ID NO: 493637 - protein, 465 aa, unidentified
MAKKTTSKTKTQPLVQLNSLVAGIDIGSTSHFIAIPSDLDEHNVREVGAFTRDLQEAASWLKSKGIQSVAMESTGVYWIPFYDILEAEGIKVLLVNAKHVKNVPGRKSDVMDCQWLQQLHSYGLLRGAFRPEDKYCTLRSFMRQRAMLVEEEASFKLRMQKSLTQMNLHLHNVMSDITGDAGLKIMRDIVAGIHDPKLLAAHRTDRYKCTPEELEKSLEGNYRAEHIFSLKQALDLYDFYQIKIKECDDMIQKVLEALSLKVLPSSKCKKKEKKETTKKRRKNELHFEATDSLKRLTGVDLTEIDGLESHSVLKIIGEVGTDMSKWATVKHFTSWLGLAPGTKISGGKILSTRTRKCKNKAATIFRIAAYTLLRSQSAVGAFLRRKKAQLGAPEAITAAAHKIARIFYTMLKEKKSYKDMGADYYEQKFKDRTIKNMELRARSLGYILVKNGDVSNLENQGLTPC

SEQ ID NO: 493638 - protein, 441 aa, unidentified
MTLVKQLMARSPLLSGGFVRYKVAGIDVHKRMLAVVVADVAMGGEYEFERRQFGSSPEQLRLLAEWLIEEKVQEAVMESTAQYWKPVWQTLERHWKMECRKWDDAGTKSGSLHLAQAQSNRGPGGRKKDFVDAERLVKRLVAQELILSFVPDTDQRLWRTVSRRKYQLTCARVRLQNQLEALLEEAHLKLSSLVSDLLGASARRMLKALADGETDPAKVAALADRRLHATQQQLCDALAASKELNKVYRRLMKMALEELQLMEEQIDQLDHEIADLLSEHQDAVRRLAEVPGLGVDSAHQIIAEVGATAATFRSEKCLASWIGVCPGAEESAGVSASNRSPKGNRFMRRLLNQAANAAVKVKGSIFEVVFRRLLPRLGYQQAIWAIAHRLSRLIWKILHQRVRYDERGPAVSQKSKTSRTAKMIRELRDLGYRVEPSSNPA

SEQ ID NO: 493639 - protein, 352 aa, unidentified
MTVTIVETRVRARAITGGVDTHADVHVAAALDPIGGLLGVEEFPATPAGYARLLGWLGGFGTVCLVGVEGTGSYGAGLARHIAAAGVRVVEVDRSDRQDRRRAGKSDPLDAVSAARAALSGRAAGAPKGRDGQVEAIRALMVAKRSARSERIQTINQARALIITGPDDLRARFARHAPADLVAELASLRPRPGSMVRYHTLLSLRELGRRAHFLDGQLQRLDELIVPLVTARAPGLLGLYGVGPDTAAILLVAAGDHPERLRSEAAWAHLCATAPLSASSGKVTRYRLNPGGDRQANHALYRIVITRLSSHPPTRAYAVRRAKEGLSKKEIIRCLKRYVAREVYPHLRPPAG

SEQ ID NO: 493640 - protein, 339 aa, unidentified
MSKLFKNFVGIDISKSWFDAALITKDASSKAVHHQFAQTATGYGELCQWLQHNNAGIDDETLFCLEYTGIYNTGLVNFLVHHSASIWVEMPLRIKKAGGLERGSDDRSAAYKIAWYAVRYHDQAKLWKPADTSIEKIKHLITQRERIITSLKHLTVPAQELIDCGCIEEGNMIMKLQKPAINSLQKTKLRIEALISKIIKHDEQLSHTVELIQSVNGIGQVTATAMLVYTKGFTAFTNAKELACYCGVVPFNKTSGSSIRYKPSVSPFANMKLKKLLHLCAMSAIQNDTEMKAYFQRKLLEGKNKMSIINAVRNKLVHRIFAVVRDNRMYEDNYIRPCA

SEQ ID NO: 493641 - protein, 416 aa, unidentified
MSRGSAGSLEVGLSAATHQLLTEREGITAAMMVIGVDPHKSTHTATAVDPQTNQPVASVRIQATLSDYRRMLTWARQFEQRRWAVENAEGLGRHLSSWLLSRGEQVVDVPSTATARVRQLSRGGGRKNDQIDAAAAACVAALQGDGRPLEAEGITDALALLDEARMNLAQSRVRLVNQLHALLRELLAGGAPRDLSASTAAALLRRIRPAGDVERVRKQIAADLVTQIRSVDALLKSNAKQISELVTASGSTLTGTVGIGAITAGRVIGRTGRAGRFPTSASFANYAGAAPIEVASADKARHRLSRGGDRQLNAALHTVAITQVRTPGSRGHTYYNAKIAQGKTAREARRCLKRRLADHIWRTMITDERRSAASPRGQAGATLRSSAAGLTPTTSSSDKSLPGPANRDDTTPQPAP

SEQ ID NO: 493642 - protein, 388 aa, unidentified
MEVLYQSCAGIDVHQANIVVCILHGPLTSTRPKREMATFDTTTKGLRACHDFLSQFHVEAVGMESTGVYWRPVWHALCDDFELILAQPAHMKAIPGQKTDKKDAHWIAKLTRIGLLPRSFVPDETIQELRELTRQRKHYVESRNRETNRIHKILQSGGIKLTTYIEDIMGLSGRNLLQLLVDGTPITPRIVHQSVYTSLKKKVPQLLEALDDYFSDHHRFMLKQSLEIYDFYQKQIELLEERMNVYLSQYEKHVEILDSIPGIDVITASVIISEVGVDMSQFPTSGHLASWAGLCPGNNESAGKKRSTKIRHGNSYLKKCLCQAAFAVKRQKGSPLAERYYQIQSRRGSQKATIALAHQLLKIAYILLKEQMTYPEFLAQKKRLLGTS

SEQ ID NO: 493643 - protein, 426 aa, unidentified
MGMGKFTKILCISERKEYHIMEGPIITVDVSKGSCHYQPFIENGHPMRKPKQLSATIDGFQKLGQTIKDLEAKTEREDIPVIFEATGVYHRPLQKYLEDHKVRYYIISPLLSATYRKTDLHSNKTDALDCAHIAKAYYCEKELRQYQAQPQEYKRLYQLSRIYESELVHLRKRKVSLRSMLDIIYPRIDKTFKGNQNLYDPIPMEILKRYPHPSLLLSHREDTIVKTVGHRTGHLKGYTERIVHKIYEKAKECYSGCEINDIEVLKLPSLIENVQEQKKKCDSLLKEMIEIARACPYFASVVSIVGIGENLASRIIAELGDVSRFDNRAAIVAYAGLNPKIQQSGDIDGLHLKISKKGNKHLRCLLYLGAQCNYRLRKEDPLYEFTKKKRQQTQCPLSSKAAYTASAHKLLVIIYSLCKNGTLYHS

SEQ ID NO: 493644 - protein, 317 aa, unidentified
MAATAQGTEYRIGGTLFVSMELSSRVWKVTSTSEVGGKVREKNVPAGDLAGVMEEFCKAKKKHGLREDAEVVSCYEAGRDGFWIHRELTLLGVTNLVVDPSSIEVDRRARRRKTDRIDGRKLLAHLLRWCGGERCWSVVAVPSIEEEDARQLHRELEALKRERTRHRNRISSLLVVHGIRAEITDDFAERLSEMQLRDGRALPEHLCERLVRESERLHVVRAQIAELEAERRALIRTSSDPAIEMVRKLMGLSGIGENAAWLWVMEFFAWRHFRNRREIGSLAGLTPTPHASGESRRELGIDKAGNPRVRAMAIEIA

SEQ ID NO: 493645 - protein, 438 aa, unidentified
MSNKVIFNLDELFISVGIDVGADFSWMSIALPNQQFVGKPYKILHNSIDSLTTAVSKIKEAEELYSLESRIFLESTGIYHYPLFCYLRDKGFNCSVINPIITKNSTNINIRKVHNDRFDSEKAALVGLKPDLKVSLMPSDLALNCRNLCREYFDLMDNRSAYVNKLQGELRMAFPQYLGIFSKVTINTSLTLLETYTSPSAFLEADKQEIIDIIRSTARFGLTYAQNKYNAIIQAATDANQFGYIIASNIKRIHLYISFIRKYDEEINSILELLHELVDANEDADFVKQIHLIETFKGAGFLSAVSIMGEIGDFSAFSKPKQLFAYFGLDPAVKQSGKFEGTKVQMSKRGSAIARRVIHTLTLQSISISRNGEAKNSVLREYYLKKCDSKPKLVAMGAVSHKVCNMIFAILRDNKPFKIIAPQEHIKQYNAAKCDIAA

SEQ ID NO: 493646 - protein, 350 aa, unidentified
MLIIGCDYHPSFQQIAFVDTQTGELGERRLVHREEAEQFYGKLKEQSVKVRVGMESSGHSRWFERLLYELGFELWIGDPAEVRTKRVRKQKTDRQDALLLLQLLLENRFPRIWVPDAANRDLRQLLWHRHRLVQMRTRVMNQLHVIPLNEGLRRKKALWRPTGRKELEAIALARWASRRRQDLLEVLDQLTPKIQELTCALEEEVEKRPVTRLLMTHPGVGPLTALAYELVIGTPERFHCGKQVASYVGLVPEEKSSGERRRLGHISKQGNVLLRFLLVEAAQVTVRSQPQWRSKFLHLALRRGRKIAKVAMARKLAVHLYWMWRKSRDYGQLQKFGSHAGELGNRDGVQ

SEQ ID NO: 493647 - protein, 456 aa, unidentified
MSQTKRSGSRTGLSAVHPAAAAIDIGATMHVAAVGPDRDTEPVRTFQTFTDDLHRLADWFARCGIKTVAMESTGVYWIPVFEILEQRGFEVMVVNARDAKHVPGRKTDVSDAEWLQRLHEYGLLRPSFRPQAEIAGLRAYLRQRERLLDYAAVHIQHMQKALMQMNLQLHHVVSDITGVTGMTIIRAIVAGERDPNVLASHRERGCQASVETICQALAGNYREEHVFALSQAIELYDVYQTKVAACDKQIEVILQRLKQSATPPASKLLPPKHRSRPPNAPSFDARAALHAILGVDLTQIHGLGPYLALKLVGECGINLSAWPTAKHFTSWLGLAPHNKISGGKVLSSKTRRTSNRAASLLRLDAVSVGRTDTALGAFYRRLAARAGKAKAVTATARKIAVLFYNTLRHGRSYADPGATYYEERHRRRVLANLQRRAKSLGYVLHQADRDPIQAVS

SEQ ID NO: 493648 - protein, 337 aa, unidentified
MKYCGIDLHGNNNWVVIVDEQDRVLYSRRHANDLSRLLPVLAAYRAELSGIVLESTFNWYWLVDGLQEAGYRVLLANTAAIKQYEGLKHRGDESDARQLAHLLRLGLLAEGYIMPKAMRAVRDLARKRMQLVQQRTAQILSIESSLSRHCGWKLSSNRIKCLCQADLDEMKLEALPLQGIQANVAVMQALQTQIESLEQVLADYCGDEPGYPLLRTVNGIGKVLATVILLETGSVERFADAGHYASYCRCVGSAYLSNGKKKGEGNSKNGNRYLAWAFVEAANFAVRHCEPARRFYQRKKAKRNSIVAIKAVAHKLARACYHMLKLKQPFCVERCFA

SEQ ID NO: 493649 - protein, 414 aa, unidentified
MAEAETIWWFAGVDWGSEKHQVCLLDAQGATAGEREFPHSGEGLAELGDWLLSIAGAASVVAVAIEVPHGPVVDALIDRGFVVYAINPKQLDRLRDRFSVAGAKDDRRDAYVQADGLRTDRRLFRRLQVVDPRLIELRAWSRLAEELREERVRLSNRVHHQLWRYYPQMQKLTNDLAAPWFLELWAIAPTPAKAGRLRESTVERLLKQYRIRRMDAQTVLRILREPAIKVAEGVAEAASIHMRSLVARLRIVNRELREAERKLDELCTAVSEIEQPSGESLQRRDVAILRSMPGIGRINLGTLLSEASGPISRRDYQGLRTLSGAAPVTKRSGKSLIVVRRYAAHVRLRDTVYHWARVATQRDPKCRARYTALRKRGHSHGRALRGVADRLLALACVLLQRQTLFDPYFGRPTT

SEQ ID NO: 493650 - protein, 401 aa, unidentified
MKQDSKGRSVEAWDARRDDRKYVGLDVHKATIAVAVADEGRGEVRGYKTITNSPEAVAKLVKELGPASRLVCCYEAGPCGYGLQRQLSGLGAACTVVAPSLSPTKPGDRVKTDRRDAAKLARLLRSGELTAVWVPDAEHEALRDLSRARERARDARHRLRQQLGKLLLRLGIAEPGGTKRWTRRYWAWLRTVRLAQPLQQVVLEDAIEAVEVATARLQRLEGQVKQAATSGPHAPLIAALQSLRGVGVVTAVTLVAELGDLGRFPTPRPLMAYLGLVPSEHSSGGSQRRGRITRAGNAHVRHVLVQAAWHYRHAPKLTRALAKRQAGQPTAVTDVARAAHERLHARYRKLAGRKGRQKAVIAVARELAGFVWALARAHADHGVGHPGTTAPAPPAAIEVAA

SEQ ID NO: 493651 - protein, 324 aa, unidentified
MRFYTKQHPFYCGIDLHARTMYVCILSPDGEIVLHRNMPASPDALLKAIAPYRDNIVIAVECICTWYWLADLCVQEGLPFVLGHALYRKAIHGGKATNDKIDAQKIAVLLRGGMLPQAYVYPAEMRATRDLLRRRLPLTRQRAELLAHIQNTHSQYNRPEIGKKLASKGNRDGVAERFPAPAVQKRVEVDLALIDYDDRLLSDVELTLVQTAKQHHAQTLYRLQSVLGIGKILSLVVLYEIHDIARFPRVQDFVSSCRLVKCAKESAGKRSGTSGAKIGNAYLQWAFSAAAVLFLRNHPAGQNYLARLEHKHGTGKAFTIFAHK

SEQ ID NO: 493652 - protein, 374 aa, unidentified
MRNDSTVYVGLDIHKESIVAAYAIGSGEVQDVGELGVLQRDLDRLCTRMQSKGPSLHFVYEAGPCGYSVYRYLTSNGHRCTVCAPSKIPRKPGDRVKTDQRDAQKLVRGLRMNDLSAVHVPDVVDEAFRDLVRAWCGARTDLRQAKQRLKSFLLVHDVRYTGKANWGDAHRRWLSKFVFPHANSHLAFQEHLRTIEERLAQCERLEKLLRDAAQEWRFYPVIQALQTLRGVQFTVAVGLVAEIGELSRFNTPPQFLAWLVLCTSEHSSGPRTRQRAITKCGNGYARHLLIEAAWAYRYTPKVSPTIQKRHEGIAKPIIDRAWDAQARLCKRFHKLTARGKPHNVVVVAIARELSGYIWDIARMATTPSAVTHTN

SEQ ID NO: 493653 - protein, 324 aa, unidentified
MKTESSELFIGVDICKERLDIANDSNSEVWSELNNDSGVSLLVEKLTSLKPCLVVMEATGGLETLLYSSLVSAGLPAVVVNPRQVRDFAKALGKLAKTDAIDAWVLARFGALMRPEIRPIKDEKTRELAALVARRRQLLGMRTAEKTRLKQADKWTRKDIKSLIKVFDKRLAKLEKEISNNVKNTPGWKEKDKIITSVPGAGPNLSSYLLANLPELGKLNRREIATLVGVAPLNRDSGKFRGTRMIWGGRAQVRSALYMSALSASIYNPSIKLFYKRLIEKGKKPKVALTACMRKLLTILNTMVKNNTTWDQNYSINLDFNHGC

SEQ ID NO: 493654 - protein, 362 aa, unidentified
MNYVGVDIHKKYSVLCAVDERGRKLREARVEGNAPFGFAQFFSGLGGPSKAVVEACWNWGLIHDELEELEGIEEVVLAHPYKTRLIADAQIKTDRLDAYALSTLLRGNLVARAHVPRRETRMRKNLLRQRLYWARLRTMLRNRIHALLDRQRGLELPQCSDIFGVRGLSFLRRLELPETDAALLREQLALHDLIAQQMKAQEKRIGLEFGSEAMHRQLLSVPGIGPTLAAVIACEVDSIERFSSAEKLCAYAGVVPTTHSSGGKTRHGQLLPFCNKWLRWALIEASWVAIGCSPYFGALYKQHRARGKKANSAVLIVARRMCRIIWQLLHEKRDFEKRPLRPNFNFPGCSVVRLTAATAARP

SEQ ID NO: 493655 - protein, 358 aa, unidentified
MKHNNTNTQKSSSTKTAAKAKIIKLGIDVHADSFSVVRQIDNDTPPPAQKFTPEGFVKWVAKQLPAAEKVHRCYEAGPFGYSLHRQLLRMGVQNVVVRPQNWDELGRKVKTDRIDALALVQRLDRYVQGNRHALAVIAVPTPEQEQARGLGRHRQQLVQERQTHEAQGRSFLLYHGRRVQGQWWQPFAWEVLQQELEPWQCRILENFRAQILLADQQLAQVEKQVVAEAVSPAKGFGALTCQLLGREVLDWKRFANRRQVASLTGMCPSVHASGGHSRQGSITKHGNPRIRRLLVELAWRVVRFQPNYPPVRKWRPQLDNKRARGGRKKAAVAIGRHLAIDLWRMETGRSTAAQLHLT

SEQ ID NO: 493656 - protein, 431 aa, unidentified
MKGGDLMKNNILSTLYVGIDVSSKTNVLCALDFEGNKLLNLKALNNQPGAESILDSIIRCLDSNSLKYVVIALESTSFYSTHIANFLASNEILLAYKPLVYCLNPKTVANYRKTFVDMDKTDPLDAYVIADFARCGKITSKPWRGSQFLALQRLTRHRLHLIEGITREKAYMVSNIYLKFSELTVLDKEERPFSNTYGVTSSAILTEYLSLDDITYSSVEDLVAFIRDKGKNRFNDPNRTAQVLQKAARDSYRLDKILYEPLNVAIASSFNVVKALEDEVKTIDKAIERNIKGINPTEYQSLISIPGVGPVLASGILSEIGTITSFDSHNSLAKYAGLTWRVNQSGNYSSDETRMTKTGNKYLRYYLIEAANSVKNHVPEYKEYYYKKYGEVTTHQHKRALALTSRKFVRLVFGLLTKNQIYSNDKVGEIN

SEQ ID NO: 493657 - protein, 413 aa, unidentified
MLKIVYPICCGMDVHKSFVVACIASTNDHGVTTYKSRRFSTFTGDLRRCAAWLAENNCKDVCMESTGKYWIPIYNVLEHTCNVVLAHPKYVKAIRGKKTDKRDAKWIADIFKHNLVSGSFIPPADIRRLRELVRYRWKLTNFTTGEKNRAQNCLTVSNFKLDDVFSDVFGEAASAITTRILENPTEKITDVSGFRTKGMKATNEQVLAAVDGEMCAEQVEKLRIIRSHMDSLELCKANLESLILTTAEKYLPQLNLVMTVPGIQSFAAIGIISEIGVDMSVFPTSKHLCSWAGLTPQNNESAGKKKTTRISRAGAYIKPLLVQCALCAIRAKRFPEVRNRYLGLKKRRGHKKAIVAIARMLLTAIYNILKKNEPYNAELYRCCNTPPEHRAVSVEEAIFILQRQGYLVTPSAT

SEQ ID NO: 493658 - protein, 384 aa, unidentified
MNKHSMIFIGLDTHKEFHEVAYCEEQRGASPVHYGRISSSKVSVKKLLRQFESKYPSATLHVVYEAGPCGYWIYRLITSLGHCCYVVAPSLIPKKPGERIKTDRRDALKLVRSLKSEDLTPIYVPEPEDEAVRDLSRAREAAMKDLKEAKYQLKALLLRNNIRYEGTANWSKKHLRWLTELILPHPAQQIVLQEQLQTIEERIRRLERLDDELTHHVHQWRYYPVVKAVQAMRGVRLLVAVGVVAELGDLHRFDHPRKLMAYLGLVPSEQSSGGKRHLGAITKAGNGRARRLLIEGAHSYRYPANVSTELQLKQEGLPKDIVDIAWKAQLRLCKRYQRMSKKGKHYNLIITAIAREMAAYIWAIAKEVVLTPVNPKLRLSRVPA

SEQ ID NO: 493659 - protein, 369 aa, unidentified
MKKHSKKANEKGRRSASQGQPEITIGIDVGDQYSHFCWLDAAGEIVKRGRVSSTQAGLEKEFGKIPAGRIALETGTHCHWMSEVLSQLGHEVIVADARELKSISGSRRKNDPRDAEQLARLARVDVRLLHPVRMRKRKTQQDRSVLRARDLLVASRTQLICAIRGMVKADGSRLAKCSAESFPEQVGASIPEGMRRALAPLLETLDVLNEKIQYYDQLVTHIAEEEYPETCLLRQVPGVGPVTGLYFRLVIEEARRFQHSRDVGSYLGLVPKQQDSGESTPQLRISKAGDEGARRLLVNCAHYILGPFGPDSDVRRWGLRLAARGGKNAKKRAIVAVARKLAVLLHRLLVTGEVYEPLRNSQAAETAAA

SEQ ID NO: 493660 - protein, 326 aa, unidentified
MGDRGQVVQRGERKGLTWVGSWGEHLDWAVHGEGADARLAHDEDGLQELVRRLNELRPALVVLEATGGLEMAVLAALSVAGLPVAVVNPLQIRNFARATGRQAKTDRLDARCIAHFAAAVQPPPTPMPEATTIELELMLARRRQLIGVLVAEKNRLSGLIGPRKVARVVASVERVIKTIEKELEKLDDELKTKIEQSPVWRAKDELLRSVPGVGPGTSRTLLLDVPELGTLNRKQVAALVGVAPFNRDSGKAKGRRAIWGGRASVRSMLYMASVTAVLCNPVLRAFYDRLRTAGKPYKVAMTACMHKLLTILNAMAKAARLWQAAA

SEQ ID NO: 493661 - protein, 480 aa, unidentified
MAKRAVQHADLKAVPMLLNESLYVGIDIGKAKHVAGFLSKTLLERHERFEACPALVFENSREGFRLLIERIRSLAPLEHIFVLMERTGHYHRTLEQYLQELDITVYVMHVQSRSTGMLKTDKRDALTLANQLYNQLELGVQVPNKLQLIRRVVPPTQAAAELRGLIRHRYELIHESTRRKNKLTAICDELFPELVRVVKDPNGQVALALRERFPTPAALATVSLTTLQQIRGGARSFSDAKLLELQRQAAQSIGIKEVARLRGLVLEQTQLIKELQMLQEHIQQLDKEIGGIVEHAREGQILLSFPGIGPIMAATSIAAIGSSHNFPSAAALKSYFGWAPVVAQSGSTLDHTRLTHGGARTMKHMLFLAVFQAIRLKDNEWARLYERLVKTKCPFDEHTQSYLGKTRVIGRVAGQMTEAIYALLKRDAELLSKVPPSQDPPPPLLYDPEVHRQHHLGHYRPLKSTPPPNTITLLHPFPAE

SEQ ID NO: 493662 - protein, 345 aa, unidentified
MRRFVGLDVSQATTAICVVDSDGKTLAESVTATEPGAIAAFLRRRASDAERIGLETGPLSVWLWNELRGFGLPVVCIDARHAHAGLKVMLAKTDRNDAAGIAQLVRTGWFRQVHIKAESSHVVRAELATRTLLVRMRCDLESQIRGVLKTFGLVVGKAPSRLVKRAHEIVADELAAKPELASLVVSLLAMRASVVERIDALDSRLRARAKTSPVCRRFVTVPGVGPITALAIWASIEDQARFARSRDVGAYFGLTPRRYASGEINRSGRITKRGDGTVRTLLYEATNVLLLKISRTSALRGWGLAIAQRSGFRKAKVAVARKLAVLLHRLWRDGAEFRWSTEPAT

SEQ ID NO: 493663 - protein, 427 aa, unidentified
MSGIETGGQEPAFAAFVGIDWADQKHVWCLQGQDSTKRESGELEHTPEAVEAWVAQLCQRFGNRPIAVALEQSRGSLVFMLAKYEPLHLFPVPSTMSASMRKALYPSGSKDDPRDADVLLDLLLQHRNKLRRLSPDTEATRRIQNLVEERRKLVDEKTEHTNRLASHLKIYFPQMLNWFEHLDTELVCALLERWPTLEELQKVPPSKLRKFLGKHHCRNQELTEWRILAIRQSIPAIRDRAVIEAKSAAVKVIVQLIRILLEGIADLDERIEEAAAAHPDFFIFKSLPGAGPALAPRLLAAFGSQRERYRNAGEVQTYSGIAPVMEKSGKKQWIHFRWACPKFLRQSFHEWAGHSIGYSVWARAYYRQQRGKGVDHHGAVRALAFKWIRIVFRCWKQRVAYDESKYLAALTRRGSPLVAVVAIAKAL

SEQ ID NO: 493664 - protein, 347 aa, unidentified
MIYLGVDHHKKDAQIVGINEQGTIVVERRLPCKREDWEQLRAELDGPVQSVLEAGWNWGKLFDLLEELSFNPRLANPLKVRLIAESFIKTDRRDALALAQLLRMNWIPEVHVPPRQTRDRRNLLRQRAWLVQQRTRIKNRVHAILDRNHVELPEMRDVFGRGGRAWMNALELRNPDDLLLGAHRDMLDGVQAQIKETESWIDAALKDHADLEIITSLPGIGKLLGALIVLEIDGIERFVSPEKLSSYSGLVTSLYKSGPTEIHGGLVPGCNRHLRYAFVEAAWTAVRVSPYFAEFYKRLKTKKGSQTAIGAVARRLCVIAFHCLKRRRRYIERPYRFRPGCLANSLA

SEQ ID NO: 493665 - protein, 359 aa, unidentified
MSQHTFIGLDVHARSVWAGVLDGVTGEVRSCSAPVCTSELVPWLRAQGEALAVAYEAGPTGFGLARACEAVQIPCLVAAPSKIARAPGERVKTDRRDALRLAKLLRLGELTAVRVPSACEEGARDLVRAREDARGDLMRARHRLSKLLLRRGLVWEGSAWTQAHERWLAGQRFEERPLQLAYEEAVAAVESVRARREALDRAICEEAATEPWAPVVGRLACLRGVSTLTAFALATEIGDWERFDGRSIGAYLGLVPSESSSGERRRQGAITKTGNAHARRLLVEAAWQQRRPASHPSRELVRRREGQPAAVRERAETAGRRLRRRWARFDARGKRSTVAAVAVARELAGWCWSLAVMDS

SEQ ID NO: 493666 - protein, 345 aa, unidentified
MEHYVGLDVSLKLTAICIVDRTGNIEREGTVPSDPEAIATFVKTHAPHVARVGLETGATATWLWTELNKLGLPVVCIDARHAKAALKMQINKSDRNDAVGIARIMQCGWYKEVRVKDLNSHAVKALLVSRALLVKIKRDLENQIRGLLKNLGLVIGRAKMNVFAVRAAELTEHRPELAAAVAPLLNARAAIELQIADLDRKVMWLARNNAQARRFMTAPGVGPITALCFLATIDDPTRFKRSRSVGAYLGLTTRRYASGEIDWTGRISKCGDKMLRSYLYEAANVILTRVARWSALKAWGIRVAKRTGLRKAKVAVARKLAVVLHRMWIDGTEFRWSKEVANQPA

SEQ ID NO: 493667 - protein, 368 aa, unidentified
MEKRTRFVGLDVHKASIAVAVVGPFGDPEDHGQIANQPAAIHKLFDRLGGSDVRLTVAYEAGPTGYAVHRQLSALGIECIVVAPSLIPAKPGDRVKTDRRDAAKLARLLRTGDLTPVWVPNEAGEALRDLVRARDDAKADQLRARHRLSKFLLRRAVYPPVGVRTWSRAYDTWLGAVTFSQPADQVVLDDYRAVASAAAQRVRRLETALLQSGASGPQAELIGALQAIRGIGFLSAVTIAAEAGDLRRFASARQFMAYVGLVPSEWSSGERRHRGRITKTGNRLVRHVLGQAAHNARYRPNVSAGLRARQCRARPAIVELDRRAQARLHHRYRTLVGRIGKNKTVIAVARELAGFVWAAGQHVTPTPA

SEQ ID NO: 493668 - protein, 365 aa, unidentified
MNDRNIFVGIDFHKRYSVISAQDGAGNRLLEARVNGNTPEGFKSVFSQLPGKSKVAMEACWNWGKLYDILDDLPGIEEIVLSNPYKTRIIAESQIKTDKIDARKLAELLRGNFISRAYAPPREVRQLKQTLRQRLYWVRLRTAMRNRVHILLDRQQTLEMPQRSDLFTGRGMKILRKLRLPESDQKLLDQDLECLEMLDRHVKAIEKEMTHLCREDEDMRLLCSVPGLGIVLAPVIALEIDDISRFVRSEKLVAYAGLAPSTHSSGGKTYHGKMLWQSNRWLKWAFIEAAWVAIGCDPYLGGLYREYRARGKGANHAITRVARRMCKIVWQVLHDKRQYEKRTYTTTTIFPERSRLKGDGLRQTA

SEQ ID NO: 493669 - protein, 409 aa, unidentified
MQVVHERCAGLDVHKKSVFACIICLDSKGSKHVEVRSFGMVTRELLKLLDWLRENHTTHVAMEATGVYWRPIWAVLEGHFELMLVNPHRIKAIPGRKTDAKDCEWIADLLQHGLIRGSFVPPTAIQDLRDLTRYRAELTQEQNRVDNRIQKLLEQCNIKLSSVASDTLGASGRSMIEAIIAGENNPEQLAELAKRKLRAKIPELRLALEGRVRDHHRFLLKEYLQEWKAIGERIERIEREIDSKIVPFEPAVALWESIPGVNHVTACNLVAEIGVNMAQFPTAHHLASWAGVCPGNHESAGKRLSGATREGQQLVAKISVPIRLGSKPTKGCYLSSQFRRIAARRGSKRALVAVAHSLLVIAYTMVKTGRTYHELGGGYLDLINKEQLQRYFVKRLQNLGLTVTLEPVA

SEQ ID NO: 493670 - protein, 367 aa, unidentified
MKKISTGTTKKVEKVASQKLTIGLDLGDRWSWYCVLDEAGEVVLEQKVATTPKAMKEVFGGMPRSRLALETGTHSPWVSRVLSELGHEVIVAHARNVRLIGETRKKDDRLDARMLARLVRIDPKLLAPVKHRSAQAQADLMAIRARAGLVRARTSLINTARGVTKSYGERLRGCNPRNMNPVKAQELSPELQAALEPLLGAIESLSERIGEYSERIEEIAKNSYPEVARLTQVKGVGTLIALTYVLTLEDAHRFSKSRDAGCYVGLQPGRRNSGQSEPQLHISKEGDAYLRTLLVQGAHHILGPFGADSDLRRWGLKLAERGGKNGKKRAVIAVARKLAVLLHRLWVSGEAYEPLRNQRQVALPAAA

SEQ ID NO: 493671 - protein, 403 aa, unidentified
MVFIEYFGIDVGKGKSFIAHYSNNEFVKEFEITHDNNGFDSLKKYIKNFSGVYFLFEATGIYSKVLEKFCTDNKISFCVINPLEAKLLTNSLRNWKTDKSDAHKLAVLAKNINKKPSRNLLEEKYIKIRELTRYYEEINNQQNYLKNQLIQLLDMAFPELQNLFKDRYSKLALQVASKFPHPEFVDSNDIEELKKTINTCTEKNLSEKKKAQYANKLVEFSMASYPSVSKDSFLTDKLVYVIEDLLNLMKRNVSIKQRLLVLAEEFEEFKIIKSIPGIGDLTAIMIIGELGDIKSFDSHKQLNAYVGIDIKRYQSGKTHFKDKINKRGNKHARSLFYLIIKNFLLGQRLFKNHIIDYYYKLKKQPNGKGHKTASVACINKLLKTIHYLVINNKEYDYHMSPHG

SEQ ID NO: 493672 - protein, 309 aa, unidentified
MLTAEADKCKTKVVVNTAAGVQALLAWCAKHGAQPAQLHAILEPTGLYHEQAATALPQVRVSLVNPAQARDFAKALALRSKNDALDSYVLARYGQTLSPALWHPAPLHARQLRALLTRREALSKDLLRELNRKEKSQFSPSAPVVDGSIDKAIAFLREQIKQIERAIDQHIDNHPDLKQDCELLNSIPAIGPQAGNAILAVMHNRHIDSAQSLAAYLGVVPVQRQSGSSLNSCAHLSKAGPSQVRATLYMAALVGTRHNPHIRALYQRLLKAGKSKKAALGAAMRKLVHLCFGVLKNRIPYQPNYAMNG

SEQ ID NO: 493673 - protein, 404 aa, unidentified
MHNDLGFDIWCGLDVGKQAHHACALDAAGKKVFDKPLPQDQSKLEDLFTRLSEHGRVLVIVDQPNTIGALPIAVARSMGIQVAYLPGLAMRRAADLYPGNAKTDARDAFVIADAARTMPHTLRRVDLGEETLAELKVLVGFDEDLAAEATRLSNRIRGLLTQIHPALERVVGPRLATRQGLAVIEQLGGPQGMTAASKSKLLRVITKANPRHAQNFADAITQALSEQTVVVAGTAAAEQVLPKLAASLRQTLDQRSELAAQVEKVVDAHPLAEVLTSMPGVGVRTAARILLDVGDASLFPTAGHLAAYASLAPVTHRSGTSIRGEFPARSGNKHLKRALFLSSFAALRSDPVSRAYYDRKRAQGEKHNAALICLSRRRVDVLFAMLRNREPYRAPNPTPQPLAA

SEQ ID NO: 493674 - protein, 391 aa, unidentified
MILVGIDVAKDKHDCFIMNSDGEALTKVFTFPNNLDGFNFFYEKISSVSNTKDKIKVGLEATGHYGYNLLGFLLNKGLPTFVINPLHTNLFRKSLTLRKTKTDKVDSKTIAMMLMSDVALKPYTDTSYHNEELKSLSRYRFAKVQERAKLKTSVSRLVQILFPELEKLVATLHMTSIYSLLEEYPGASYIASAHLTKLTNLLNEASHGRYDRNTAIKFREAAKKFIGSVMPAKSLELKHTIKIIRELTIEINEIDAEIKKIMDRIASPITTIPGIGYNMGAMIISEIGDFNRFSSPDKVLAYAGLSPSTYQSGKLDNCHSHMEKRGSRYLRYALFVVAQKVCIWDSTFAEYLSKKRAEGKHYYVAISHAVKKLVRVIFHLERTRQTYLKAA

SEQ ID NO: 493675 - protein, 355 aa, unidentified
MKQEKYIGMDVHQATISVAVMDSSGKLIMECILETRAATILEFLHGLRGSLSVTFEEGTSAAWLHDLLKPHVTHLVVCDPRKNALLKDGSKSDRIDARKLAELLRGNQLHPVYHEEHGLRTLKELGRSYLTLTQDVSRVMTRIKALYRSWAIPCSGTTVYGPRYRAEWLAKIPQPGVRLRAERFYQQLDLLQPVRQEARRDLLSESRKHPAVKLLRQIPSIGPIRAAMLVALLQTPHRFRTKRQLWAYSGFAIETHDSGEYRYVRGKVQRNRERITVRGLNDNHNHDLKNLFKGAALSASTRPGPLYDFYVGLLEKGMRPTMARLTLARKIAAITLTIWKKGVSFDAKQLHRQAA

SEQ ID NO: 493676 - protein, 376 aa, unidentified
MEHDSTLYVGCDVHKDSITIAYALDAGEVELPGKTGTTQADIDRLCRRLQSKAPRIRFVYEAGPCGYGLYRQLVNKGFDCMVCAPSLIPKKPGERVKTDRRDAIRLVRSLRAGDLSAVYVPSVDDEAFRDLARTWVSARDDLKRARQQLKAFLLSHGVRYTGRADWGAAHQRWLGAHAFDSAWQQLAFEEHRRTIEDRLAQCARLETALREAVPNWRFYPAVLGLQSMRGVQFTTAVGMLAELGDLSRFAHPRQLMAWLGVTPSEHSSGEKRRQGSITKNGNSCARKLLVEAAWSYRHPARVSPDIQRRHEGIPKPIVDRAWDAQVRLCRRFRKLVARGKQKNIAVVAVARELAGFIWDIGRLAMSLALPHEVPHA

SEQ ID NO: 493677 - protein, 370 aa, unidentified
MSQSSTLFIGMDVHEDTMAVAYVAQDQGAEVTSIGTIGTRQCDIDQLIRKMQSKATHLIFVYEAGPCGYWLYRYLGKKDYDCWVVAPSLIPKKAGDRVKTDRRDAIQLARLARSGDLTVVYVPQVQDEAIRDLTRAREDAISDCKDAKFRLKAFLLRHDIRYTGRANWGPAHLRWLSEVVCPTPTQQMVFQEDVRAVQEHTERLQRLEQALHEHVQAWRLYPVVEALQALRGVQCTVAVTLIAAMGDLTRFDTPRELMQFLGLTPSEYSSGAHRRQGAMTKAGNTHARRVLVEGAWAYRYPAKVSRHVQLRLETQPKIIQDISWKAQVRLCNRYRRLVARGKHANIVTVAIARELAGFMWAIAREVPIIP

SEQ ID NO: 493678 - protein, 334 aa, unidentified
MENIALIGIDLGKNSFHIHCQDRRGKAVYRKKFTRPKLIEFLATCPATTIAMEACGGSHFMARKLEELGHSPKLISPQFVRPFVKSNKNDFVDAEAICEAASRPSMRFVQPRTESQQAMRALHRVRESLVQDKVKTTNQMHAFLLEFGISVPRGAAVISRLSTILEDNSLPLYLSQLLLKLQQHYHYLVEQIKDLESQLKRKLDEDEVGQRLLSIPCVGTLTASTISTEIGDGKQYASSRDFAAATGLVPRQYSTGGRTTLLGISKRGNKKIRTLLVQCARVFIQKLEHQSGKLADWIRELLCRKSNFVVTCALANKLARIAWALTARQQTYEA

SEQ ID NO: 493679 - protein, 324 aa, unidentified
MIDAILGIDVSKNTLDVSISSCTKVRTKSFANSSDGWHHLLDWLIAQKIQRVHACLESTGRYSLGIAYSLYEAGHVVSIINPAQIRDFVRTKLGRNKTDGIDASRIREYCELFKPSPWAPPSEAHRRLGELQTIRAGIIAGLTEWKNRKNSGIVDTEAQALADATILHFTSQLGAVDKAIALTIDNDSDLRSKRDLLLSINGVGDTLAGVVLAELPGPDVLRSSGEVVAYAGLNPRQHQSGTSVDRATRISKIGNAVLRAALYMPALSAMRYNPAIVALVTRLKSRGRLKPKQIVVAAMRKLLVLCFGVLKTGKPFDPAIAMGC

SEQ ID NO: 493680 - protein, 411 aa, unidentified
MEVVHARCAGLDISKRDAKVCVRVAGAGRCKTVETVTTWGSMTSQILALREHLIAERITCAVMEATSDYWKPFYYLLEDAGFDVLLVNARHVKNLPGRKTDVADATWLAQLGAHGLVRASFVPPEPIRQLRDLTRARTAITRERSREVQRLEKLLEDAGIKLSAVASDILGVSGRAMLEALIAGNNDPAALADLAKRRLRSKIPALTEALRGRFTDHHGFLARVHLELIDQHTAAIDDITTRIETTIKPFHWFRDLICTIPGISTLTADVIIAETGADMTRFPTADQLASWAGTTPGNNESAGKVKSSRTRPGNPYLQGALGAAAMSCAQNPGTYLGACYRRIASRRGPQKANVAIQHSMLIAIWHMGTNGCLYDDPGADYFNRLHPQRAKTRAIHQLEAMGYQVTLTHAS

SEQ ID NO: 493681 - protein, 363 aa, unidentified
MTVKATCLVGLDVHARQTHATLLDRATGELSACRLRGTPEEAVLPYLERIGRDLLAVYEAGPTGFGLAREAQRRGLDVRVVAPGSIPRAPGDRVKTDSRDSRKLLRQLAAGELTFAFVPSEEDEAFRDLIRGIEDLRGDLMRARHRLSKFLLRRGHRYQDGHAWTPKHGRWLRSLSFDGCAQATFADYCASVELLVGRRRTLLETLEQAVPGCTHAPTIGRLRCFRGIETLSAAGVCAETGGFDRFHRPTLLSGFLGIVPSERTSDLKRRQGSITKAGSPHARRLLVEAAQHYRKQPAIGQTLARRQAGQDPRVIEIAWRAQQRLHQRWQRLYHERRKPAGVVAIAVARELAGFLWEAATLDA

SEQ ID NO: 493682 - protein, 370 aa, unidentified
MTEVKGEQTSVLRNRPWIGMDVDKERFAAALYADPRPGTPDLRSMPAKSFTRDAEGVAACVEWAGKTLAKSRPGSPAPRVCMEATGRYSIDLAREILRQRPEWEPAIANPRFVKKHGESMGQRCKSDKADARVCACYGADRQPRPYQAPQPAFEQLQELARERRAIVEQRAALKNRMADTPTSKIARRTREQLMKQYDKLVGKLDAAIARTFEEIPQLCADAQAVARIPGVAEVVSSVTLSELGDLRNYRRSRSVAAAVGANPRVIESGNHKGKTRMSKQGNSRVRAILYCAAMACLRTRNDHCLKRFYNRLVERGKTHMQALGALMRKIIVLMRALVISGQPFDPDYDLKKHLCTASPEKELQPVDNLA

SEQ ID NO: 493683 - protein, 431 aa, unidentified
MNYNQNEKIAQITSQTLIIGVDIAKFKHVARAQDYRGMEFGSPCYFDNTKQGFQLFLDWINQLKLEQHMEKVIVGMEPTGHYWLNLAHILKENQIKFVAVNPLQVKKSKELDDNSPTKNDVKDARVIAQLVKDGRYAEPTIPQGVYAELRVAKKIRDLLTEDLQTVQGQIHNWLDRYFPEFLTVFKSWEGKAALQFLRLGALPNELINFSDQYLLDHLRKAVSRSVGINKIQELKQAAKESIGLCQGSNMAKLELATLLDKYDLIQKKFEELDQKIDNLIEHIPGVQQMLAIKGVGRDTVAGFFAEVGDLQEYSHPRQIIKLAGLSLKENTSGKHKGQTRITKRGRKKLRALLFRVCMIMVAKNSAFKALHAYYTQRPDNPLKKMQSLIALCNKLIRIFFAIGKKQFEFSEEKMLQDIPHMRANIKVEKAA

SEQ ID NO: 493684 - protein, 398 aa, unidentified
MTVIGIDVSKGKSTIAAVNNNGELVLGPYDVEHNKQQLQELVARCQKIEDLSVILMEFTGHYHFPILQELLNAGLPVSIANPLLMKKYSDTEIRKAKTDKKDAVRIALFALEKSYLLQPYAETEEKYKELRFLSRQYSQRIAALCVAKEQLLCLLDETMPGITKFLALNSRNPEKSALLLFIKRFESFAKIQRMSSSRFLNAYAKMVARTTDRRAGAKGLAIYEMAKQSIYTRGDDISTVMAQNQLVDLISLSQKSADEIMFRMRNIAELIPEYAVLRSMNGVGDRLGPIILAEIGDVRRFHSGKALNAYAGNDAPPYQSGQFESRNRHISKRGNPALRKACFEVMQALKLNKPQDDPVYQFILKKEQEGKPKNVAKMAGVNKFLRIYYARAMELYEL

SEQ ID NO: 493685 - protein, 365 aa, unidentified
MKKGITFVGLDVHSTSIALAVLPPGTDIPLEREIPNDPKLIRRTFTRLKADAQQLRCCYEAGPCGFELHRQLTVLEIPCDVVAPALTPRKPGERIKTDRRDARKLVRLYRAGELTPIRVPTPEEEAVRDLVRAREDVRRDLTAARHRLSKFLLRHGRLFSHGKKWTQRFWRWLRAQPFDRPAERVTFEHYVLQVLHLGERLEALEREITALAETEPYQPAVARLACLRGISTLSAMTLLAEIQDFRRFEHPRQLMAFVGLVPSEHSSGPKQRRGGITKTGNSHARRILVEAAWAYRHPPVLGPRPRRLLADQPPEVVVQVRKAHRRLHKRYARLVGRGKRAQVAVTAVARELCGFVWALMTHEAA

SEQ ID NO: 493686 - protein, 347 aa, unidentified
MVTLGTDSHKQSHTVVAVDENGRQLGELRVEARPAGHREALGWARQWQERRWAMENCRQLSRGLERDLLVAGEQVLQVSPKLMGRSRRSGRQLGKSDPIDAMAVARVALREPNLPVARLEGKSRELKLLVDHREDLVGERTRIQNRLLWHLHELEPGLQIAGGGLTRKVVLKEVKRRLEAHQGVVSEIARELVERLAELTISVNQLQRRIEVLAGELAPSLVSLPGCAGLTAAKLLAETADVRRFHSSGAFAMHNGTAPIPVWSGNQQRHRLNRGGNRQLNAALHRIAITQIRLGGDAAAYVARRISLGNSKAEAIRSLRRQLSDEVYQRLRLDRLEPLAQATGVAA

SEQ ID NO: 493687 - protein, 343 aa, unidentified
MKLHVIGIDLGKTVFHLVGLDSTGRAVIRKKCSRKQLLAFTANLEVELIGMESCSGSHFLGRALREQGHEVRLMPAQYVKPYLQTNKSDFLDAEAIAEAVQRPRMRFVPIKTEEQLDLQALHRVRERWVMRRTAVVNQIRSLLLERGLTLPKGRRYVDQQLPRILEDAELGLSGSFRVLLAQLKLELDQLGARIEEMDRVIQKTAKENEDCQRLTEIPGVGPVTATALIAAVGNASAFRKGRNLAAWMGIVPGEYTTGGKQKLLGISKRGNKYLRTLFIQGARSVVQQRDKQAPGLSSWLAQLLARAHQNVVIVALANKLVRMAWTVLCKNERYRAPVLAVTT

SEQ ID NO: 493688 - protein, 360 aa, unidentified
MKTIIGCDFHPGWQQAAVFDAETGEVTERKLVHGDGEAERFYRALEAPALVGVEACGNSQWFIDLLERLGHEVWVGDAAQIRASYVRKQKTDKRDAAHILNLLLEERFPRLWTPSAEQRDLRQLLIHRHKLVEVRTRVKNGLQHLALNRGVQKKSSLWSVRGRAYLEKLPLEGWAARRREDLLRLLAELERQIGELDKAVSEAAEAHPQARLLMTQPGVGPITALAFVLTIGDVSRFRHSGQVSSYLGLIPCERTSGGRQRLGSISKQGNRFLRQLLVEAAQSVTRLDEGFRKQYVARCHHKPKGVAKVAAARKLAVRLYWMLRTNTPYPQIAHIESSPRVPLVGASQTDELIGRSRIQQ

SEQ ID NO: 493689 - protein, 305 aa, unidentified
MISWVGIDISKSNLVVWVQPQKEGFEIPNTSEGFVELIKRLSCYEVGRVLLEATGGYERQVMAALQQANLQVLRINPRRARAFAVAMGKNAKTDPIDAAVLADFAEVLHGSHEKVISPEREALRELIQLREHFVQQRDDNKRRLQQAQLPTVVSATKDHIRYLQAQIKALEKHLVQSMFDLDAEKSRRLMSVKGIGKVAAASLLVYLPELGELDRREVAALAGIAPYNDDSGNHNGKRQIYGGRTRVRHALYMSSWVVIRFQADFKTRYEALRERGKSAKVALIACMRILLIRLNAMLRDGTEWR

SEQ ID NO: 493690 - protein, 386 aa, unidentified
MSQSSNTLLRSINYDQTLVLAIELSNKSWVLAAQVPGLPRTKAQRTIEPNKNALLAAIDGYRARAAVVGYAVERVITTYEAGWSGFWLARWLVAQGIEVHVVQPSSVPVDRRMRRAKSDGIDAELLLRTLLAWLRGEPRVCSMVPIPDEADEDARRCVRERTELLSDRVGLTNRIGAVLATLGVGDYNPLLQSRRRRLAELRTGLGEPIPPNALTKIERLLARLELVLAQIAELERERDEVAVADAPDRAGKMIQQLTSLRGIGVQSATVLVREAFVRHFSNGKALGSYAGLTSTPYSSGGIDREQGIGKAGNRQLRTAMVELAWLWQRYQPGAAQVAWFRDRVGSTGRRLRKVMVVALARKLLIALWRFVIDGVMPEGAVMKPSI

SEQ ID NO: 493691 - protein, 350 aa, unidentified
MPMLAEVVDAVVGGDTHRDTHALELTALSGATIATLMIGNDERGFAEAIAWVAEHAPGPRVVVGLEGTRSYGIGLARVLQAAGLTVVEIERPRRGERRRGKSDPIDAHLAALHALRLDADRLPTPRADGDREALRILLGARRELTTAKTRTINRLRALLLTGSDADRALSRGALSSDRLAAITRRRGGQHETREYAVRRAEARRLALAISGIDRELADNKWHLADLVTHLAPQLLAKRGVGPVSAAQAIVSWSHPGRCRNDAAYAALAGASPIPASSGRIVRHRLNRGGDRHLNRTLHDILLTRWRTCPRTRAYIARRRAEGKTDPEIRRCLKRYIARELYRSLNTAMAA

SEQ ID NO: 493692 - protein, 320 aa, unidentified
MTVLGLDVSKATIDACLLSNDSEASKKIANNEKGFAQLKNWLKNRKVKDVHVCMEATGSYFESVAESFADDGFVVSVVNPAQIKSFGASQLLRAKTDEVDAKLIAQYCLSQQPPAWVPPTAEQRKFRALVRFCENLKATRASYEVQRQTPNIVREVERSIDEVLANLDEQIEKVEEQIAHLIDNDPDLRRRHGLLTSIDGIGDVAASTILAEAPKLEEFSSSKAVAAFAGLSSRTRSSGTSVRGRGAICKVGNARLRKVLWWPAIVGIRYNPRLRDLAQRMHALGKPNKKIIVAAMRKLLVIAYGVLKSGRPFDGALTSA

SEQ ID NO: 493693 - protein, 351 aa, unidentified
MQSQMIATPKLFIGLDVHKKSWQAHLRTDISDHKGFSLPPDPEILANYVFKHFPDHQVQLSYEAGCCGFSAAREFLNLGWSVTVVNPADIPHMDKQLYQKTDKIDCRNLAKQLQLGQLKPIYIPTEDQEQLRSLLRQRNQLVKQHRKVKSNIKGLLLFHGIVIPPEFDNPNWSKNFQQWLFQIPWSHVTGLQCLHSKLRIYKLLDQEILLTSKELRAYCRKVHTTDYYLLKSNPGIGGILSAAILAELGDIRRFNNERQFANCIGLVPGIHQSSETNNYLGVTPRCKALLRSYLIESAWIAIRLDPGIQAFYRKHVGKNPKSVIVKVAHKMCRRILSVIKSGKPYQLGFSA

SEQ ID NO: 493694 - protein, 343 aa, unidentified
MKRRTLGVDLAKDCFQVSVSRGDGSVIERHRFNRAQFTEFMAQSPASRVLLEACGTAHHWARSLSALGHQVELLPAQHVRPYRRGNKNDRRDADALLEAGRCDDIVPVPIKNENQQAVIQLHRLREQLKTTRTARINSLRGALREFGVDLPAGAVNAIKHAPRHLDALPAHLRAALQAVLQEIETLQLRLLAVERSLEEIAAEDSAVKRLRQVEGIGLLNATAMVATAGSASHFPSGRQFAAWLGITPRESSSGYRRQLGRITKRGDVYLRTLLIHGARSVLARAKQLNRIDPARLSRLQQWGLQLQRRVGHNKAAVALANKLARIRWAVWRTETRYQPGYGA

SEQ ID NO: 493695 - protein, 351 aa, unidentified
MIVIGSDPHKRSYSFSAVGAGTGELRSSETVQATSAGHELLLAWGRGLDLERVWAIEDCRHVSGKLERFLLARGERVVRVPPKLMAGRRRSLREAGKSDPIDALAVARAALEEGVDALPCAVLEGPAREVKLLLDHREDLVAERTRVQCRLRWLLHDRWPELELPTGCLDRLVWLDRVARRLARAEQAADVRVMRHQVRRLRELVREANALERELGGLVRAQQPALLELPGVGVLTAAKLIAEIAGIERFATPAKLARLAGVAPIPASSGNRQRMRLHRGGNRQINAAVHRIAVTQLRIHQPAKDYIARKTTEGKTKTEALRALKRHLIRTIYNTMAPNPRDTPTPALALT

SEQ ID NO: 493696 - protein, 316 aa, unidentified
MQSPLYVGVDVAKEEVVVSCSQNSFPVRAIPNKPSPLKQFLKTLPPDARIGMEATGIYHQGMADLAVSMGFTVYVLNPKDTWHYAKGTGMRAKTDRVDARLIARYVANESAYLHPYEPPTAEQRLMDQLLRRRSKIVSLKTALRLSCADAPFLDSQADKVMAGFADLLKQIDREIARLNTLIPNRDEQVKKLQTIAGVGPLTSSWLANLFDRVKFKNSDAVVAFVGIDPRPCDSGQKRGRRRLSKRGPSEGRRLLYNAAMAAAKSPVWQPLYAHYRQLGWPSTGALVIIARKILRIAFALTKQGSSFDPTLVPTGA

SEQ ID NO: 493697 - protein, 311 aa, unidentified
MSDKTTVGIDVSKVALDVWIDTRERLIHLENSASGIVQLLKEFEGLHISGVIMEATSRYHSLAESMLISAGLPVAVINPLQIKNFAWAMGKVAKSDPIDARIICEYGRRMKPEFRPVRDKVLQDMAMLLTRRRQLVQNRVMEITRLQEKSGAWIEKDIAEHIACLNVQIDALDKEIKDQLNQNAAFSPKRKMLETVKGIGPVTQAAILSQLPELGHLNRRQISALVGVCPYDRDSGQLRGKRAIWGCRSGLRATLYMAMLSAVRYNPQIKSFYTSLVAHGKPKKVAITACIRKFITILNAMFRDQKDWAYS

SEQ ID NO: 493698 - protein, 335 aa, unidentified
MQIYGIDLAKEKFDVSFLRLSSKSNVVTPVHHVVRNTQNGIKAFLKGLPSDSVLVAEHTGVYGERLLKMCTEMNVKIAYVGGHVIHTYKSGPDRGKTDEQDCNVLRDFGERFTDKLVYTTFPEEDIYELRQLSRQRTMLVEERKRIMTADKTEDCRPYRSVAVKRSMQHIVDLLDEEIKDMERDMLTVIRKHDKISNSYDIITSVNGVGLVTAVELIVKTRNFTTITTAKQYSAYAGTAPYEKSSGKMNQGAHVSKWGNRRSKTLLYICAECARMHNKEMKLYYERRTIIDKKAHHYVLNAIANKLLRLIFSLINKNEKYNPCYIQRDPRSININ

SEQ ID NO: 493699 - protein, 412 aa, unidentified
MPKTLHVGVDVALKTLAACFVDDEGKALHTIKSMPNTPAGARQIQQQIARLCQQDCFQLVRVGTEATSVYDLHVLEYLLEAGPGAPVPLSLYRINPRLIKHFKLCSTEGSKTDAIDAFFIADYVRFKPLLRPYSTQSALLPLQRLTRFRRSIVKNIAAETNRLLATIFLHMPGIVQQKPMDPSAPTMAAITGEYLTPEQLLATPLEELAALVAGHARNGVDPDAAAQAIREAVTDSFRITPALADALRLIEAASVANIRALKKSLESIDAQIEKSLAAFPNTLRTVKGIGPVFAAGLIAEIGDIRNYVSPDKLAKRAGLVWNQRQSGPFAAEDTHLTTTANRHLRYYLVEAANSLRIHNEEYARYYQRKFNEVRDHQHRRALVLTARKFVRLVFALLKDGRIYLPNRASQQP

SEQ ID NO: 493700 - protein, 411 aa, unidentified
MEQIHDRVAGLDVHRDQVTVCVRVPGPRGGVQTEKARFGTTTGGLAALAEWLAGYAVTLAAMEATGVYWKPVYYALEDRFVVWLCNARHVKNVPGRKTDMSDAEWLADVAAHGMVRPSFVPPPPIRELRELTRYRKTQIDVRAAEIARLEKVLQDAGIKLTSVASKVLTQSGRAMVEALIAGERDPAALAGLAKGKLRPKIPQLTEALRGHFGAHHAIVAARILAHLDFLDDTIAELDREAGARVAGRYQQAARLLAEVPGLERRSVEVIIAETGADMSCFPSPAHLASWAGLCPGNHESAGKRRRVATTQGNQWLRRTMIESARAAARTRDSYFCAQYRQIARRRGPNKAAVAVAHSLLDVIWHMLTTGEVFADLGADFCTSRHDEEHQTLRLVSQLEKLGYTVELVPTA

SEQ ID NO: 493701 - protein, 355 aa, unidentified
MSAPYAGRQIVGMDLHRRRSVLVRMTEAGERLETTRIVNDPDRLRAVMVRAGETPEVVLEAAYGWYWAADLLAELGAGVHLAHPLGVKAFSYRRVKNDERDAADLADLLRMGRLPEAWIAPPATRELRELVRHRAKLVALRSNLKCQVHAVLAGAGVPVVMSDLFGVAGTDLLERIDLSPAGRARVNSALRLIETLGFEVEVFTRLATARLRDDAGYRAIQAIPGVGPVLGAVFVAEIGDITRFPSPAQLASWSGLTPLHRESDTTVHRGRITKQGSRLVRWAAVEAVQRLPAHTRLGAVRDRVAARRGRNIGVVAAARELTALVFYGLRDHHIRCLPDPDPDTAPDTAPSEPAA

SEQ ID NO: 493702 - protein, 339 aa, unidentified
MKVSTLGIDLAKDVFQLHGVDHNGNTILRKKLTRNKFVPFVMQLEPCLIGMEACASSHHFARVLAQLGHQVKLIPPQYVKPYVKTNKTDAADAEAICEAVTRPNMRFVQVKTAEQQAVLALHTERDLLSRERVACTNSLRATLAEFGLVMPVGMSQFHRGVADILGDGELELSPFVRRCTARQLEHIQALEEQIHLIEQELSDWAKTQPACQRVSKVPGVGLLTSTYLVASAGNGQQFSSAKQFSAWLGLTPREHSSGGKQRLGSISKRGDRYFRYLLINGARAVAAVIGRHTDEMPWLTDLLKKKSFNVAVVAQAHKTARILWSMLVKGTEYRLGTAH

SEQ ID NO: 493703 - protein, 324 aa, unidentified
MYFIGVDHHKQVSVMTVLDEDGEELKSGRMPNLRKSVERFLEGSRPFTAVLEAGRSSYVMADLLRELGGEVKIANALQVKAIAHARIKTDKRDSRTLAHLLRANLIPEIYQREAWNRRAQRVMRMRAYWVRKQTEVKNKIRALLAQQREEVRLEVEKRESGLFSLKGLEFAARLPLEGREKEVLEDLLQGYQEIQAHIKKSDGLVRALYGEIEEAPRIDTVPGFATTLSVLTAVEIADVKRFSRAAELHSYAGVIPSTYSSGERTYHGRITKQGNVWLRWAALEAVYPAIVGGSKKDTKKGNRGVGRDKAEVLKRSWVFSSLIS

SEQ ID NO: 493704 - protein, 413 aa, unidentified
MQVVYERCCGLDVHQKTVVGCRLLTQPKGTIEKSICTFATTTNGLDALDHWLAEGHVQQVALESTGIYWRPIFNRLEGRYEIFLVNAQHMHAIPGHKTDIKDSEWIADLLRHGLLKASFIPPKPIRELRDLVRTQTQLVQERNRHINRIHKILETANIKLSSVVTDILGKSARQMLETLIAGESDPTLLAKLARGRMRPKIAQLQQALQGHLEPHHRFLLSETLAHLDFLQQRVGQLEQEVAERLSPFEKSLALLMTIPGISRRSATIILSELGTDMAAFPSAAHLASWVGLCPGSHLSAGKRRNGKPTKGNRYLRSVLTQIAWVLTRMRNNYLSAQYRHLKPRLGKKKAVVAVAHSVLVIIYHVLAKGEPYQDLGSDYFRRQDKEQQARRFTRQLEALGYRVELAPQEEVTS

SEQ ID NO: 493705 - protein, 338 aa, unidentified
MKLYGGIDLHSNNSVIALLDEQDQVVYRRRLPNDLATILGELAPYQGAIEGLVVESTYNWYWLVDGLMAAGYRVHLANTAAIVQYTGLKYTDDDSDARWLAKLLRLKLLPEGYIYPKAERAVRDLLRKRSQLVRQRTSNLLAVQNLLARNRGESLTGNALKRLSPEAVDQLLSEPYLALAVNSNLGVIRALDEQITVLEKTVKAHIKLSGGLPFLLSVSGVGDILGLTILLETGEIGRFASVGQYASYCRCVGSERISNGKRKGHGNSKNGNRYLAWAYVEAAHFAVRYNAQIKRYYQRKCTRSNTVVAIKTVAHKLARACYYILRDQVPFDVNKAFA

SEQ ID NO: 493706 - protein, 355 aa, unidentified
MNVTHYIGFDVHKKSISFCAKTVDGQVADEGKLIAERSVLRQWASQRQQPWRGAMEATLFSGWVYDSLKPYAVQLDMAHPAMMRAISAGKKKNDKIDARTIADMVRCDWLPVCYVAPPEMRELRRLLRYRSLVVREAVRMKNKIAGLLMEVGAPYNKEKLHGRQYFAELLQNLEEVPESVKDLLRLTRGAMDTFQATQKQLVKRLLADRELAQRVERLASIPGVGEITALTWALEIADPRRFSSSAEVMSYCGLTAALKSSAGKEQRGPISKQRNAWLQTALIEAAKLAPHWNPQLATVHERELKRGHRNRATLAVARKLAAYLLAVDKSGKPFQLRTPPPAEETQATSEAEKAA

SEQ ID NO: 493707 - protein, 410 aa, unidentified
MEVLYRRCCGLDVHKETVVACLRLVSDGKVDIEVRTFETTTASLIALSEWLAQNGCTHIAMEATGIYWKPVWHILADGEFQLILANSAHVKNVPGRKTDVNDATWLAELLAHGLIRASFVPDTQTQELRTLMRTRKQLVREKASHILRVQKTLEDANIKLDSVITDVMGMSGRAMIEALIAGESNPTKLASLANYRLKASQENLREALRGRVTKHHRFLLRLHLSQIDALDVAIAMIDRQVEAGIAPFRAAVEQVSTVPGIRGVGAQVIISEIGTDMSRFPSDGHLISWAGLCPRSDESAGKRRSNRLRKGAPWLKTTLVQCGWAAVRKKDSYLRAQFLRLKARRGPKKAIIAVAASILSAIYHMLKDGTTYQDLGSNHFQNRSKSQQTLRLVKRLTDLGYDVALKPLPS

SEQ ID NO: 493708 - protein, 359 aa, unidentified
MQAKVKTISFQGQNIYIGIDAHLKNWTVTAMTENSLTKTLSQDPDAGILYTYLQRNFPGGNYFSAYEAGFCGFSVHRKLQKYGIQNIVVNPADIPTTDKERKQKEDRRDSRKIARSLKNGELNGIHVPDLETEELRSLVRYRKTLVKEISRNKSRIKSHLYCFGIDIPLTLAQASLHWSGRFTQWLETVQLSTCYGDIVLQSTLQTVRHLRSELLKINRQLRSLEKESKYSFKIKLLRSIPGVALIVAVTLLSELETIIRFKNLDKLCSFVGLVPTTNSSGDDERVGRITRRSNKPLRSLIIEAAWIASRNDPTLAQCYIELCKRMKPNEAIVKIAKKLLNRIRYVMKNEKEYVHSVVQ

SEQ ID NO: 493709 - protein, 383 aa, unidentified
MTQNKHAGKSTYENLHTIYVSIELSKKTWLITSISPGAGEKLSRHSVPGGDIAGLLARLAQLKQKARDRTGQDYPFVTIQEAGLDGFWVHRVLEAEGHESHVVDAASIATSRRRRRVKTDRLDGETMIRALLAFKRGEPRVCSMLSVPTPFEEDRRRIVRERKVLMEERIRHSNRIKGLLFSQGIRGYDPLRRDRRERLETLRTGDGRELPVHLKSQVLRELDRMEMLLDQIKAVEAERDAMLAEEQRSAREVVMLTKVVGIGPEFAAVLWGEGLFRHFDNRRQVAAYAGLAPTPWQSGSIDREQGIGKSGNPRLRSTLLEMAWLWLRHQPASELSRWFNERVAQNGGRFKKVMITALARKLVVALWKYVTAGVVIEGARVRP

SEQ ID NO: 493710 - protein, 343 aa, unidentified
MKDTIYDHYIAIDWSIENMAIARMTKKSNKIILIDVPSDIVEMEVYLKKLKGSKILVVEETTTSQWLYTELRDYVDRMVICDPHRNKLLNDGPKTDKIDAAKLVHLLKAGLIKEVYHSTDKFLYLRRFVSGYEDLVKAGVRLQNQRYSLLRACGKRGYEWAGTKLDSPGDQFALDCIDRQIESYKQEKEGYGKEFERLAKDYPEIRHQKSLPGIGPIHAVKIVTRVVAPYRFADKGHYLSYIGLIKLERVSGGRSYGRKNSRYCRQLKSVYKTSTWAAIGGNNPINDYYEYLIQEKGYPEHNARHKACRQLAILSLGVFKSGKKYQPYRRDHVKGYQEVKSGM

SEQ ID NO: 493711 - protein, 407 aa, unidentified
MQLFVGDDWAEDHHDVEVMNAAGAVLGRARLPEGVAGMTRLHELIGRHLGEDAGDVEVVIGIETDRGPWVAALVAAGYAVFPVNPLQASRYRERHGVSGAKSDGGDAHMLADMVRTDSHQLRPAAGDSAGAEGIKVLARTHKTLIWDRTRQLQRLRHQLREYFPAALAAFADLAAPDALELLARAPEPARAAKLTRAQISAALKRAHRRDIPGKADAILAALRSPQLGQPPAITAAYAATTRSLIALITALNQQVKALQGQVEAHFGQHPDAEIYLSQPGMGAILGARVLGEFGDDPHRYADGKARRNYAATSPITRASGKKKTVAARFARNNRLTDALMAQAFAALNASPGARAYYDTLRARGIDHNDALRRLANRLVGILHGCLKTRTPYSEATAWSHRSGEFAA

SEQ ID NO: 493712 - protein, 412 aa, unidentified
MEQIHDRIAGLDVHRDQVTACVRIPGPRGGVRTEKGRFGTTTGGLAALAEWLSGHAVTLAAMEATGVYWKPVYYALEDRFQVWLCNAHHVKNVPGRKTDMSDAEWLADVAAHGMVRPSFVPPPPVRELRELTRYRKTQVDARAAEIARVEKVLQDAGVKLTSVASKVLTQSGRAMIEALIAGERGPAALAGLAKGKLRPKIPQLTEALDGHFGAHHAIVAARILTHLDSLDDAIAVLDGQIAARVAGRYQSAARLLADVPGLERRSIEVIIAETGADMSCFPSPAHLASWAGLCPGNHESAGKRRKVATTPGNQWLRRTLIESARAAARTRDSYFGAQYRQIARRRGPNKAAVAVAHSMLDVIWHMLTTGEVFTDLGADYFTNRQDKEHQTQRLVRQLEKLGYTVQLAAATA

SEQ ID NO: 493713 - protein, 388 aa, unidentified
MQIITDRPQAPTAIRTDLGAIFVSLELSRSTWLITSLSPGGGEKMSKHTVRSGDVAGLWARFCQLKDKVQVRTGHVVPIIVIQEAGLDGFWIHRFLQDERVESHVVDPASIATSRRRRRAKTDKIDGEALVRALLAYKRGEPRVCAMVRAPTPQEEDRRRICRERKTLTAERVEHVNRIKGLLFAQGISDYEPLLRKRRERLEELRTGDGRPLPEHLKAQIGRELDRLELTLQQIKSVETERDAMLSPSDEGTPAPGAMLKNLKGIGPEFAGVLWSEGLFRSFSNRRQVAAYAGLAPTPWRSGSVAHEQGVSKAGNPRLRTTMIQLAWLWVRHQPRSILTLWFHQRVQLNGGRVRKVLIVALARKLLIAFWKYVTAGVVLEGAEITAA

SEQ ID NO: 493714 - protein, 372 aa, unidentified
MKSVNYSAYIGLDVHKDTIAVAIASPERQGEVRFYGNISSAKDSVIRLMKKLIKLHEPILVCYEAGPTGYGLYRLLLSMNIDCIVVAPSRIPKLSTNKIKNDHRDAVALARLLRAGELVDVWVPDITHEAMRDLVRARSCAKKDTKVAKQRIQSILLRTGKIYEKKMWTVRHRVWLANQSFPLPSQQIAYEHYRQSLEQIENRITQLDQEIDRLLPDWSLNNLVNQLQALKGVGRTIAISVVAELGDFSRFSNPKQIMAFLGLIPGEYSSGATVRKAGITKAGNVELRRLLYEAAWSYRTNAKVGNWLVTYRPDSVCQEAKDISWKAQQRLCFRYRSLVAKGKKSQVAITAVARELLGFMWDIAVTIQSQKV

SEQ ID NO: 493715 - protein, 341 aa, unidentified
MTLYIGVDIHARQQTVSYLDTEDGSIEQRELHHERDDVREFYSQFKGEVIIGIEACGYTNWFEELVEGLGHKLLVGDAAEIRRLARRRQKNDRRDANLLLELLLHNEFPALFRYPPESREVLRQLRYRHKLVKLRTMVANTLHALAINAGLSLRAQLLTRRGRKQLGDLRLSVISEQQRDELLSQADELSRRIVKVEQWLQAQAKSDARVRRLQTHPGVGLLTSLCLVHTLGELNRFSSTRKVAAYVGFDPVEHSSAERKVYGGISKAGSRLLRYLLVEAGQTACKHDQQLKQFYRRLVPRRGKPRAKVAVARKLLIRCFIMGRAEIDYAEFLRRGRKAAE

SEQ ID NO: 493716 - protein, 433 aa, unidentified
MTNRLQVGIDFSQKKADFCLLFPDGHPLDLHVSFANSCSGYSMAKQLLLDALDTYACDGIDISGEATGYFWLPFFLQLSADPDLTLRNMDLFLLNPRWVKWFKKCFAEDHKCDGKDSFYIAERTRTRRPDVAWSPPDCLPLRFYTRLRFHIVQNLAREKCYFSAFLFLKASSYRCLKPFSNVFGVTSRLVLTQQPTLDELAELPVEDLASHLYELSGHHLPDPLDNARKLQHVAQESFPLDASLVLPVQRILDLTLDHICFLETQLEQVDRWIATELEAYPVIAQLATIPGVGPVFSSGIGAEIGGVQRFLQGQKWDKKRKRYRPRNLRDAEDAVAKIAGLWWPRADSGDFEAQDRRMAKSGNRYLRYYVIQASNLMRLHIPEYAKFYARKHKEASKHHHKRALVMTARKSIGLVVGLLHRDEPYRSKGDRRT

SEQ ID NO: 493717 - protein, 303 aa, unidentified
MNATTVAVDLAKNVFEIALADVRWKILERARLTRAQFERWFDNRKVDLVVMEACGSAHHWARTLRTRGIEVRLLPAQYVRAYVKRNKTDAADCLALLEAARAQDIKPVAVKSVEQQALQALHRTRSGWMSTRTRRINTLRGFCREFGLVVPEGAATGLAQIARYLADEHSGLPQMLRPSMRLVLEEIRLMEARIGQLEQELAALAKQSPACQVLLSVPGIGLLTSTAMVAAVGDPRSFPSGRRYSSFLGLTPREYSSGNTRYLGRISKRGDRYIRMLLTHGARSILRAATVARRAGRMIDGFR

SEQ ID NO: 493718 - protein, 442 aa, unidentified
MAMRKREDSPEVFPNAAGIDIGGSSHWVAVPRTADDKPVREFGTMTDDLNAMADWLLACGVDTVALESTGAYWIPVYEVLERRGLAVWLVDARQMKYVPGRKSDVLDCQWLQKLMSLGLLRAAWRPGDKVCVVRAVARQREVLLTEQGSWVQRMQKTLVQMNIQLTEVLSDIMGATGQAIIRAIVAGERDPKVLARYRHGRIRRSADDIARALTGNWREEHLFVLNQALSMYDDLARHLGECDARLQTLVDESGRHHVDMGTGPRAGTRLRGNFDQRQRLANWAGVDLTRINGLGVSTVLTLLSEIGPDLSRFASVKHFCSWLGLTPGTKISGGKVLSSGTKRSANRARQALKMAAMTLSHSDSALGAFYRRLCARMDKPRANTAVAHKLARMVYFMLTRGEAFVDQGQQRYEEQQRQRSIATLKRRAARLGFRIESVPATP

SEQ ID NO: 493719 - protein, 349 aa, unidentified
MKIIGCDFHPSYQQIAMLDSVSGEIVEKALSHERKEEVRTFYAGLEGSVRVGIEASGQSQWFERMLAELGHEVWIGDAAKIRASCERKQKTDRRDAELLLRLLAEDRFPRIWVPTAVERDVRQLLLHRHKLVRLRTQVKNQLQAQALNQGVQRKRKLWSEAGRKQLESLPLLPWASRRRAELLQLLDQLEASISELDRAVAEQASARPAARRLMTHPGVGPVTALAFALTMGPTERFQRGKQVASYLGLIPSEHSSGGHQQRLGHISKQGNPFLRGLLVEAAQSAVRYEPEMRRAYQRLAQRKCRALAKVAMARKLAVRLYWMLRLQVNYAQLIQGSHAGQSGTFCGRS

SEQ ID NO: 493720 - protein, 460 aa, unidentified
MQVVYERCCGLDVHKKVVVACLLVLMANGQRRKEIRTFGTMTQDLLALLDWLKEAGCTHVAFESTGVYWKPIFNLLEGQMSVLLVNAQHIKAVPGRKTDVKDAEWIADLLQHGLLRPSFIPPAPQRELRELTRYRSSLVADRARVINRLQKVLEDTNLKLASVVTDVTGVSARAILRAYLNGETNPWALANLARGSLRGKQVQLAQAMVGTIKDHHRFLLLQQMTLIETLEQQIAQFDQEIADRIGHDDGELEVNQLPSPEPQQIPSSSIPAVSVSSEQEKAAPSFTLTRQNLEGYAKALERLDGIPGVNRRIAEVILAEIGINMDQFPSDAHLASWAGMCPGSNVSAGKRLGGKTTKGSPWLRAALVEAAHGAAHSKGTYLGEQYRRLARRIGKKKAIIAVAHSILVIIYHILKEEKTYQELGSAYFEERERDAVKRRALRNLERLGYEVTIQEKGAVA

SEQ ID NO: 493721 - protein, 326 aa, unidentified
MTCKVGVDISKMKLDVAWLRADGKYRSKVFPNNASGFADLLLWLDAHLPGGRAEAHVCMEATGPYHEGLALFLHDHAVAVSVVNPLQVKRFMELERVRNKTDDGDAKALARFCDRTQPALWEAPSAGVRALQALVARLDTLLELRQGELNRLEVAHDSVKASLVAVIASLDDSIKDVRTKIRKTIDDDPDLQQRGELLASIPGLGDRTIPQLLAYIGRPERFTSVKALIAYASLTPMIKQSGTSLDKRRGTHPQGHRELKKSLYFPAMVAGRYNPLVAQFWQRLKAQNKPGKLIVVACMHKLLAIAYGVLKSGKPFDVNYGKKVCA

SEQ ID NO: 493722 - protein, 416 aa, unidentified
MSGKREIACGVDVHNKFILATILSSDGLKLQYRFGTSLEDLLKFKSWLKENGCHKVALESTGNYWLPIYHVLEGSVNFILANAYQIKHTPGRKTDTLDSEWIAEICLKNLITPSRIFTKDRRELRSLTRARESLIKVRTKIKNRVTHELEAACIKLSSVIADVFGKSGRHIVDGLLNGMDLEEILESIPSRRVRKNKEEIRGIIQANLSSSQIFLLRSHLNTIDSVTKQIKEIDAKISDQISLRNEDMRIALSMPGMGFISASTILAEIGDFRDFSSANKLAAYCGLVPSVYQSAGKLINGHITKHGSPHIRRIIIEVAHAIILTKRISKLKKFFLRIKARRGAKIGIVALARKVLCILYHLLVHRELYQDDSLGKPRCIKKPRLQSIEAMDLDEMIKTLINAGYVVRKGESLESG

SEQ ID NO: 493723 - protein, 342 aa, unidentified
MQVTTIGLDLAKNVFQVHGVDAEGGVAVRKKLRRVGVLAFFSALPPCLIGMEACASAHHWARELTGLGHEVKLMPPSYVKPYVKRGKNAAADAEAICEAVTRPSMRFVAAKSAEQQSAVMLHRSRDLLIRQRTMLTNALRGHLAELGIVVAQGLRKLPTLIEVLLDETDRRIPTMARQALGVLVAQLQDLQTRIKALERALLAWHRTSRASRRLETIPGIGFITATAIAATVTDPTHFKSGRQFAAWLGLVPRQNSTGGKERLGRISKMGDRYIRRLLVIGATALIRFARNRSTPLTAWADALLARRPARLVSVALANKMARIAWAVLLRGEAYRAPVAATA

SEQ ID NO: 493724 - protein, 427 aa, unidentified
MNCTQNLKIEQVTDQTLVIGMDIAKQKHYAAIVDARGRVLKKSFSVSQSRIGFEQFYALIQETMREFGKTEVIVGIEPTGHYWLNLAYFLEEKGIPLVMVNPMHVKRSKELDDNLPTKHDAKDALVIAKLVKDGRFSYPRIFHEVEAELRAGSTFRESLIKERNAIHNQIIRWTDRYFPEFPQVFPSFGKMALAALEKTPFPMDIVDQTVEELIELYRESEALKYPQKPKIQKLLEVSRHSIGITEGQQMARIEITTLVRRYRQLEQEIATLTEQLIVLAQTTVEYEWLQTIPGLGDATIVELLSEIGSFAQYQDPRQLIKLAGLTLKENSSGQHKGQKRISKRGRKRLRALLFRVMMPLIRHNEAFRKLHEYYTTRPVNPLRKKQSIVVLCGKLLKILYAVCTKRQAFDGERMMQDIFTQSQAQAA

SEQ ID NO: 493725 - protein, 338 aa, unidentified
MGKITTIGLDLAKNVFHVVCCDRHGKIIKKKMLRRSGLLAWFANLPPCLIGMEACASAHYWARSLQAQGQRVKLIPAQHVKPYVRGNKNDYNDALAIAEAVTRPEMRFVSIKTPAQQDIQAVHRLRERRLRDRTALSNQLRGLLGEYGIVFSRGVNVLRTRIPEILEDSENGLSDFFRSLLSQGYQQLTELDAHIDAYTQALEAHGKRDDACQRLRTIPGYGPIVSSAFYSVVGNGAAYRRGRDVSASLGIVPRQHSSGGKAVLLGISKRGDRYLRSLLIHGARAVVNQAASKEDALSRWINKTRAARGFNKAVVALANKLARIGWAILANNTVYQAR

SEQ ID NO: 493726 - protein, 369 aa, unidentified
MTATMTWVGLDVHARSTHAAAIDRNSGELTRARFGAGADPVVGWLRELPQPVHACYEAGPTGYALYRAAEAAGVRIDVVAPSKTPRAAADRIKTDRKDAELLVRLLLAGSLTPVAVPPASFEAARDLARAREQVRADLARLRHRISKLLLRYGRVYDGGGTWTQAHRRWLSGQRFEHVPTELAYLDALAAIDGLLARRAALDERLSLLATEPDYWPTVARLRCFRGIETLSALVLHLEVGDFHRFQRPGQLAAWLGLVPSLHQSGESETRGSDHQDRLRLRAPDPRRGRLALPARAADRRHLTRPALRPTRPRPPDRLASPAPPLPTTATAARTRQARQHRRRRRRARARLLPLVGSRGRLTPTCTRPR

SEQ ID NO: 493727 - protein, 317 aa, unidentified
MAKVPPTYIGIDVSKARFDMASSPCRTMKSFLNDRSGTDELVKYLCAVKPVLIVLEASGGIERALVRALVAAELPVAVANPRQVRDFAKATGKLAKTDALDAQTLARFAEAVRPALRLLPNEMTLELRALVGRRRQIIEILTAEKNRLSRASRRVQTRIQAHIDWLESELERYNEDLDEAINQSPLWREQQDLLKSVPGVGYVISRTILAELPELGCLNRKQIAALVGVAPLNWDSGLMRGRRVIWGGRAHVRTALYMAAVTASRCNPVIRDFYKRLRAAGKPANVALVASIRKLLVILNAILKHHVRWRPVVNQLD

SEQ ID NO: 493728 - protein, 285 aa, unidentified
MDKYTNFIGIDVSKDTFDTYLIGGAHHKFSNNVKGFKAFFDHIPSDCLIVMEATGAYHQQLALHLYECNLSVSIVNALSVKRFIQMKLKKNKTDKSDAKMIALFGQEQLPALWIPNLKYIDTCKDIQTTIGLYLRQQTSLKNKIHCLDSKGVKKGTLVRSLVRQLKSTKKEIKKLEHEMEQLIKENEPEMFKNIQSIPGLGKKTTMLLISATNGFKNFENHRQVSAYIGLAPQHYSSGTSVHKKSRITKTGNPRVRNHLFMCSFTASIHNPQCRALYERIVNKDD

SEQ ID NO: 493729 - protein, 368 aa, unidentified
MKKCSETTADITIGLDLGDKKSHFHVVDDSGETLEEGKLPTTPKALSRYFSGVERARVVIETGTHSPWVDELVRKCGHESMVANARKLRLISENDRKSDKADAELLARLGRADPKLLSPIQHRGSKARLALSRLRARDALVSTRTKLINHVRGAVKPTGSRITGCSTGAFSQKALEQIPEDLRPALTPLLELIGSLSEKIKEFDKSIARMCKKVFPETERLRRVRGVGPLTALAYVLILEDPQRFQKSRAVGAYLGMVPKRDDSGEDKPHLRITKAGDCLLRRLLVGSAQYLLGPFGEDSDLRRHGELISQRGGKIAKKRAVVAVARKLAVLLHRLWVSGEEYEPLRNSVRQEKTQRRKMHVPERRAQ

SEQ ID NO: 493730 - protein, 418 aa, unidentified
MGKRKNRVCGADVHKDIIVATILNSDNTEFQGKFGTTSMELGRFRDWLIAHNCEQVAFEATGVYWFPVYDALSPSIDTIVANPWMIKGIPRNKSDTLDSKWIADNCLDGKIKRSRVLPKDDRDLRTLTRARSAYTKTRTQLRNRIHKYLALCGITLSSYISDIFGKSGRHILDGLIESKDIDTILDSIPSGKVKKKRELIKASLGKGLDDVSRMLIKDTLELLHHLEEKVNDTSLVILGRLQERAKDLAIVMSVPGIGFVSASIILAEIGDYHDFQTSEQLVKWCGLAPGLNESAGKKRPCGITKQGSKSLRTILVEIAQVVAKMSNNKLSRFFHRLRARKNYNLAITALARKLISIIFHLLINQELYQENNCTTVKTKPIKKDLSCLSKEEQLKDGVAAIVDAFYHLKKKSSLEGGG

SEQ ID NO: 493731 - protein, 433 aa, unidentified
MLKLNYMSTLFVGIDVSSKTNAVYAMDFEENKYISSSFGNNQPGADQLVNMIAECMQKHKNLDTILIVLESTSVYSVHISNFLSASEVLMPYKPYVFCVNPKATSNYRKSYIGMEKTDPTDAYLIADFGRVGRTKKLEPWRGGQFISLKRLTRHRMHLSECITREKTYMVSNLYLKFSELQLLEGDDKPFGSLYGATSSAVLTEFLSPQEIIDMPEEDLLTFLAGKSRNRISDLSKTSELLRKAARDSYRLDKCMYEPLSISLASSFNCIHAYQKKIKLIEQAIEKCINGMNPNALLILQSIPGIGPIWASGILSEIGDITVFHSSDALAKYAGLYWPKGDSGDFTSEDNKMSKAGNPYLRCYLGEAANSVRKHIPEYADFYARKYAEVTKHQHKRALALTSRKFVRLVFGLLVKNQLYTGEKLDTEYNIESN

SEQ ID NO: 493732 - protein, 342 aa, unidentified
MGSVKGRRRSRHTMSAVVCGLDVHKDSTYATILNPEGKIIDQTRMINEKVLSYLSHFKVGEVAMEASTSVASLYRQLASEGFDVVVSHPKKTRYIAEARIKSDRVDSKVIAELARLDTLPLAYVPSKETLDLREKVRRRAFLVRERVKLRVKIKSFLTYEGIKWPVDNGLFSRKGVEWLGSLKFESVDSYLRIMEIFDEEIRLLSRQLEGLAREDEDVKLLMTVPGIGYYSALLVKSEIGDVNRFPSGERLCGYAGLVPSTHASGGVVRHGGITKEGSRWLRWVMVEAAQTHVHKYDTSITRAYQGIAERRGRRAATVAAARKLLLCCYSVLKNKRPYYDQA

SEQ ID NO: 493733 - protein, 363 aa, unidentified
MFTERTSVGLDVHARSVAAAAIDGVIGELFQAKLTPSHEHIRGWLADLPGPLAVTYEAGPTGFDLYRTLTAAGIRCVVAAPSKLQKPSGDRVKTDAKDAVHLARLLRLDEVTAVAIPSVDQEAARDLVRAREDCRGDLMRARHRLSKLLLRHGLVYHGGQAWTGKHDIWLRHEALPQLSAGATRLTFDSDYETVLAVKARRDRLDTAIAEMAGNSEFTDMVHRLGCLRGISTLTGFALAVEIGDWHRFTGNTIGSFVGLVPSEHSSGASRVQGPITKAGNTHVRRLLVEAAWHHRARYTVGKTMRDRWELAPAAARARGDEGNRRLHHRWVKFIDRRKKNTIANVAIPVKLAGWTWSLAVLEE

SEQ ID NO: 493734 - protein, 403 aa, unidentified
MNNVAGIDVSKGKSMVSVLRPFGEVVAKPFSVGHTGSELKELADYLKSLDGETRVVMEHTGRYYEPVARFLHDEGVFVSAVNPKLIKDYGNNTLRKVKTDKADSRKIARYGLDNWAELRQHTPMDTIRMHLKTLNRQQSLYTKTKTMMKNNLIALLDQTYPGVNALFDSPVREDGSQKWVDFAMTFWHVDCVRNMSLTAFAERYRKWCKRHGYNFSQSKAVEVHAGAQDLIAMLPKDALTKTMVRQAIDALNAVSASLERLKAEMCTLAAQLPEYPVVMAMHGVGDSLGPQLMAELGDVTRFTHRNAITAFAGVDPGADQSGTHEAKSTRVSKSGPPELRRALFLVMDCLLKTQPQDDPVYRFMDKKRAEGKPYLVYMTAGANKFLRIYYGRVKEYLASLEGN

SEQ ID NO: 493735 - protein, 403 aa, unidentified
MNAVGIDVSKGKSMVTILRPFGEIVSSPFEIKHTSSDIHSLIKLIHSIEGESRVVMEHTGRYYEALAHQLSAADLFVSAVNPKLVKDFNNDSLRKIKSDKADSVKIARYALDKWQSLEPYSITDELRAQLKVMNRQFHFYVKQKTAMKNNLIDLIDQTYPNANTYFNSPTRSDGSQKWVDFVSTYWHVDCIRKMSLNAFVEHYQNWCKRKKYAFNKSKAEEIYTKTKELVPVFPKNEITKHIIRQAIDQLNSTSVTVETIRTLMNETASKLPEYSIVMQFKGIGPSLGPQLMAEIGDVTRFTHKGALTAFAGVDPGVNESGSYAQKSVPTSKRGSSNLRKTLFQVMDVLIKTMPQDDPVYQFMDRKRTQGKPYYVYMTAGANKFLRIYYGRVKEYLSVLPDPS

SEQ ID NO: 493736 - protein, 398 aa, unidentified
MLSIGIDVSKGKSTVCGMKPGGEIVYTPFEVQHTREGMSELVSLLRGSGEEVRVVLESTGSYHCPVVAALLENGIFVSVVNSLRMKRFCSQSIRRVKTDQIDAMQIALYGLAYWQELQPTRLPENTYRELQLLARQYYQMTSMLIKAKVDFNALCDQVLPGMQELMSDHAGRHKLSDFVLRYHHTAHILEMGETRFRKDYCKWAEKKGYRNHERMAALIFATAQNGIPVLPNAPSTQIVITEAIRVLHTVEASRDAILTQMQALAKTLPEYSLVREMPCIGDTLAPRLIAEIGDVRRFHSKRALIAYAGIDAPPYQSGKFSANNRHISKRGNRYLRKTGYEVMQSYVMHKPANDPIFTFIEKKRSEGKSGKLAMVAGLNKFLRVYYGKVTELYRSLPQ

SEQ ID NO: 493737 - protein, 457 aa, unidentified
MPARGKQPRSGAGSPAHTIDPNAAGVDIGATEIYIAVPTDRDPHPVRKFSTFTEDLLAAADWLKQCGIKTVAMESTGVYWIPLFQILEAGGMKVCLVNARHVKNVPGRKSDVCDCQWLQHLHSAGLLRASFRPEQQICAVRSLVRYRDSLVQLSAMHLQHMQKALDQMNLQLHHVISDLGGKTGMAIVEAIVAGERDPHQLATLRDPRTRASKETIAKSLVGDYRREHLFTLRQSLTGFRQNGQLIADCDVEIESLLKEFSSGDGPGAEAVPEPQAELKRKPRRNEMNFDLRTQLHRIFAVDLTEIPGIDTLTAHTLFTEVGRDLSKFANVAAFTSWMGLCPDNRVSGGKILHAQTRRVNNRVAKALRMAAQALSRSHGWMGQYYRRMRAKLGGPKAITATAHKLARIIYHSLTTGQAYDETVFAQQETQNNQRNEKRLRHQARKLGFELTLIPTEV

SEQ ID NO: 493738 - protein, 310 aa, unidentified
MDAIVVGIDVSKDRLDVHVHPSGEAFGVARNAEGLEALNARLIPLGPWAVAVEATGGFESVVAASLGGAGLPVIVVNPAQVRAFAKALGKRAKTDPIDAAVIARFVEATKPQIRPLPDADTQLLAELVARRRQIIQMIVAERQREKQMANRRLKKSVARLILALSKELNELDAGIDEAVRGSPAWREKEDLLKSVPGVGPIVARTLIAEMPELGQLDRRQVASLAGLAPWTRQSGKWRGRSFTGGGRCTVRTAIFMAAMVARRCNPVLKTFYQRLVEAGKPKMVAIIAVARKLLTILNAIIRDKTPWQIA

SEQ ID NO: 493739 - protein, 360 aa, unidentified
MDIAEGTTGRFVIGGVDTHKDLHVAAVVDDHDRLLGSQSFPTTRHGYKQMLAWMRSFGPVQRVGVEATGTYGAGLLRYLQKASVEVLEVTTPDKGDRRKRGKNDDLDAQNAAHAAFTGRRTVTPKSRDGMIEALRVLKACRKTAVAARRVALQMIHNTVVCAPDDLRDQLRKLTRMELIRTLAAWRPDMTDFRNVVSAYRITLRSLARRYLELHDEIGDLDGMIGAIVDDLAPDLVAQNCIGHESAAQLLLTAGDNSERLHSEASFAALCGVNPVPASSGKTTRHRLNRGGDRAANSALHIIAIGRLRTEPRTKACVAKRIAEGHSKLEAIRCVKRYIAREVFSLISQRRREINQLPVAA

SEQ ID NO: 493740 - protein, 454 aa, unidentified
MEEPQQVQADEEHERVWDRVAAIDIAKASGVACTRVPDEDHPGRRRTHVWTVKATKQAVIELADHLRCQGIEIVTLESTSDYWRVWHVVLEAAGLKVQLVNARHVKNVPGRAKTDKKDAVWLAKLTERGMLQPSFIPPPEIRRLREFTRLRAELVHERTRHWARLEKLLERALIKISSVASTLDTDSCRAMIEALIAGERNPRAIAELAIGKMRPKRAALAEALDGDWQPHHGELARILLDQIDALTRQIDQLAGRVGELISQIPDAWGVDADGVTGPQAGKGPDAVILPAVARLDEITGCGVIAAQVIIAEIGLDMTVFGTPGRLVSWAKRSPQTRQSGTKTAGGKTGKGNPYLNGILGEIAASASRTDTFLGERCRRIARRRGKRKALAAIARSILVIVFHLLADREARFRDLGSGWYDTFIDKQRKTRNLIRQLEALGHVVTLSPAEAPAA

SEQ ID NO: 493741 - protein, 416 aa, unidentified
MKKGQNTRGYQRYMALDIHREYILVGAQNEEQDWVLTPRRVSIEKFPEWAKKNIRSGDIVVLETTTNVWATYDIVAPLASRVLVANAADVEEIAKARVKTDKEDIKRLLKLLIGGIVPEVWVPPLQVRELRAFISYRGRLVKTSTMIRNRLQSLLHKHNLKLSAEGLLDQVWWEGQKTISTLEKMQIRQELVLLQEVEKLKVAVDEELERQSTGAIWGKQALQLMQLPGVGFVVAMTVLSAIGDISRFESAKQLVGYAGIGAGVHDSGKTHKEKKITKKGRKELRWALVEAAWRAVRMSPFWKAEFEKHLSRLRKPNQAIVVIARKLLITIWHVLSKEETDIHASEEDLAYKMLLLSWSLSEDVRLGLNYKQFAKYALIKLGVENDITRFVRKNVPRRLAPREEVLARMAELGLTV

SEQ ID NO: 493742 - protein, 343 aa, unidentified
MARFVGLDVSQKLTSICVVDDTGRRVWRGQCASDPEQIARLINRYARDAAGIGIETGPMTPWLVHEFRARGLDVTCLDARHASAVLKMQMNKTDQNDAEGLAQIMRTGWYRSVHIKSLDAHRARALLGARAQLVGMTTRLSNHIRGVLKTFGLLPGAMRGLPFDRRVETLLADRDDLTSIVRPMLSAWRQLREQITAFDKEVRALAKKDPTCRRLMSVPGMGVVSVLAYVSTVEDPKRFARSRSVGAHMGLTPRQYQSGEIDRSGRISRCGDTLARTLMYEAAVVILTRVKRASNLKDWAQAIAKRSGPGKARVALARKLSVILHSIWRSGETFRWSKQPAVG

SEQ ID NO: 493743 - protein, 346 aa, unidentified
MEYVGFDLGKVNSQICVLTEHGELVEKRLKTERETLAQFFGRRSEQVCVLIEASTESEWVARCLEEIGCRVIVADPNFAPMYATRSKKVKTDRRDARALCEACRLGAYRQAHRISDEARATKNLLAVREQLVLTRSRYISFAKSLLRGEGLRLNSSDADRLSRKLEAMELPSVLRQTLTPLIAAMKILDEQIEITDKELERLAADNEIVKRLRTVPGVGVITAASFAAVIDKVERFETAKQVRMYLGLVPSENSSGERQQRGRLTKTGNRRLRYLLVEAAWSLLRSKKADTCKLQKWTQAIAARRGKQIAVVALARKLAGILYAMWRDGTEFGATSKEGEPVLAGG

SEQ ID NO: 493744 - protein, 374 aa, unidentified
MHRYIWVGLDVHKATIAVAVTKGEEAPRSLGTIPNDPDAIAKLMRKLGPLAHLRVCYEAGPCGYVLYRQLTAMGVHCTVVAPTLVPVRPGDRVKTDRRDALKLARLLRGGELTAVWVPDEAHEALRDLVRAREAAHKDLRRARHRLQKFLLRQGHRCPLRTKAWGVRYLAWVSGLRFAHAAQSVVHREYLAEVERLAARRTRLDRELEVALAQAPAAIQTVVRALQVLRGVAFVTAVTAVAEVGQFRRFTRARQLMAYSGLVPRESSSGDTVWRGAITKTGNAHLRRVLIEAAWQYRHPPRAGITIRQRRKGQAAALCAIAEKADHRLHLRYRRLLARGKSKGKVVTAIGRELLGFLWAVAVHAENGSTMPAAA

SEQ ID NO: 493745 - protein, 482 aa, unidentified
MAMRKLSTFERLQPGRLNRQQRRELGQRIAAADPGLAVVHPDAAGIDIGNQSHFVAIPPDRDPVPIREFGAWTAALQELAQWLTAHGIRTVALQATGVYWIAVQDVLEQAGLEVYLVNARGTKNLPGRKSDVQECEWLRKLHTYGLLRNSFRPPEVIRAVRTIWRQRDRWVQEAARAVQHMQKALTTMNVQLANTISDLSGVTGQAILRAIVAGTRDPWALAQLRDRRIAASEEEIAHSLQGTWREEVLFELRQALEAYDFYQGQLAACDRELAKYTAAVPSRERPAPPEGPDGAAPRLPAKPARRAKSRRQGHPGFDLAGELHRTLGVDLTRIDGIDVLTAQVVFSEIGPDFSAFPDENHFASWLTLAPQRDISGGKVIRHVPAAGRNRVANALRMAAQSLCRSDSYLGARYRRLRARLDGPVAVKAMARYLACLVYRLVTKGQAYVDRGAAHYEAKRQERERRALERRAATLGLTLVPAA

SEQ ID NO: 493746 - protein, 345 aa, unidentified
MYRTRVGVDLAKKVIQVCIYRNKKVQSNIEMTPDEFLSWLVNQKPLTIIFEACSMSNYWKQKATEAGHEALFISAKLVSVVRQNQKTDKNDALAIVQATFLPDVTFIGGKTIEQQQIQTIKRLRELAVKHQGACQKQLVSLLLELNIRIGNRQGGILCAIDAVLEDATNGLSDECRRAIYIGKGQLAVSIEAVEHYDKCLEKVVSINKECKKLLKLEGVGTTNAINLYLALGCWDIGVFSKGKDASACIGLTPIQHSSGGLVKLGSIGKHCKNSILRSQLICGAMAVVRQLATREAKTKKDVWLKGLIERRGKKCAAVALANKTVRTAFAMLTQGTEYKAELLTA

SEQ ID NO: 493747 - protein, 465 aa, unidentified
MKRHRRRHAPKPRVSPSVLDHINPHAAGIDCGSAEHFVAVPPDRDPTPVQSFATFTGDLQRLADWLTACRVKSVAMEATGVYWIPLYEILDARGFTVLLVNARHVKNVPGRKSDVSDCEWLRDLHIVGLLRGSFRPTDGIVALRAYLRHRQTLIETAGSHVQRMQKALVQMNVQLPLVVSDITGVTGLRILRDIVAGRTNPHALAQHRDYRCHASEAEIAAALTGNYRPEHVFGLRQNLEAFDHIQQQLAACDIAIEAHLQTLAADTTRATTPLPAARPRQKPRDNEPRFELRTPLHQLTGVDLSQLDGIGPYNALRLLSEIGTDMTRWPTDKHFTSWLTLAPKNKISGGRLLSSRTQPSANRAAAILRLAAMNLGRSQTALGAFYRRLAFRVGKAKAVTATARKLAILVYRTLKDGLVYRDPGAEAYDAQHRAHVLRRLRQRAENLGFALVDLKTGEVADGTVS

SEQ ID NO: 493748 - protein, 408 aa, unidentified
MSAQQTPAVFIGLDVGKSEHHAVALTAAGKKVYDKALPNDETRLREVLAELTTTHGPTLLVVDQPATIGALPVAVAQTCEGVEVAYLPGLAMRRIADLHPGAAKTDAKDAAIIAEAARTMPHTLRSIRADEEQIAELAMLAGFDDDLVAQLTATSNRLRGLLTQIHPSLERVLGPKITHPAVADLLSRYPTPAQLKTAGPGHVRARLRKHAPRLAASLTEQIFHALDEQSVVVAGTQAAATVIPILAEQLAGLTRQRAGLASQVEAVVEAHPLHPVLISMPGVGIRTAARILTEVVGKDFADAGHLASYAGIAPVTRRSGTSIRGERTPRGGNKRLKRALFLSAFASLSHPASRAYYERKRAQGKRHNQALIALARRRTDVLYAMLRDGTLYQDPGTPTATPSVALAA

SEQ ID NO: 493749 - protein, 312 aa, unidentified
MDSIKYIGMDIHKEAISIAVMNGAGKLVMESIIETKAITILQFIRGLRGDLHVTFEEGTWATWMYDLLKPHVTKVVVCDPRKNALLKEGNKSDKMDARKLADLLRGGFLRSVYHGENGIRTLKELSRCYLTISKDLTRVMNRIKALYRSWAIPCGGAQVYAPRHRSEWLSKITDVGVRRRAEHFYQQLDGLQALRHAVRRDLLVESRKHSATTLLRQIPCIGPVRAAQLMALIQTPHRFRTKRQIWTYSGLGLETHDSGQYRYVEGQLQRSRKAQQLRGLNENHNHDLKNIFKGAATSASSRPGPFHDFYED

SEQ ID NO: 493750 - protein, 355 aa, unidentified
MRPYTLGIDLHKRSSVWVLLDGDGNEIWKDSVACHPDHITKILKWMPAAGSEIQAAIEPTCGWRWVTAILEGAGIEVHPANVNKVRLIAESTQKHDLGDARALANLLRLGYLPESYRVSDSTYGLRLILRHRTYLVRMRTSAKNRLHGMATTQGLHLIARGNPLSKAGKAGIMEGNNALMKELHTLIEELDRRIAECDARCEEIAKGEPLVPILRSMPGVGVVTALTVIAEVGDFTRFTSAKHIASFSGLIPRQRSSGESVRFGSITNQGSRTLRMIMVEAAFRIRPTNAPELYAFVARLASTCGKKRARIALARKMLCILWHMAKTKTPYDKSKNVVHFPRIANVSHIDTYRGA

SEQ ID NO: 493751 - protein, 415 aa, unidentified
MDVLHERCAGLDNSKKDAKVCVRTPSPKRRGSFTTETTTWGSTTNTVLDLRDHLIAAEVTLVVIEATSDYWKPFYYVLAEGLNVVLVNARQVKNLPGRKTDVSDAAWLAQLGSHGLVRPSFVPPEPIRELRDLTRARTTATRERSRVVQRLEKLLEDTGIKLSAVASDIMGVSGRAMLEALIRGEGDPQVLADLAKRKLRSKIPELTEALTGRFREHHAFLTRLHLDQYDQLTRMIDQITTRVEEAMTPFRSALDLLDTIPGINQHVAEVIIAETGGDMNRFASAKNLASWAGVCPKHHESAGRTKNTKVRPGNPYLKGALGLAAFGAVRTKDTYLAARYKRLTARRGPLRALVAVEHSIITAIWHMLTDNVAYRDLGGTYFTQRDPERATRRAIGQLNQLGYTVTLNPRETTPA

SEQ ID NO: 493752 - protein, 343 aa, unidentified
MDHFAGLDVSVKETSVCIVDDTGRIVREVKAASEPDALLAVLKNPAYCFKRIGLEAGPLSQWLFSALAEAELPVLCVETRHMRAVLKAQINKTDRNDARGIAQMIRVGLYRPVHVKTLRSQKLRMLLTHRKLLQSKAIAVDNDLRGTLRNFGLKVGMVGAARFEARIKELVENLPDLAAMVEPLLVVRRVLREQMGVLHRRVLTVVRDDEVCRRLMTVPGVGPVVALTYRATVDVPARFRKSKSVGAVFGLTCSRDQSGERDRPGAISRCGDEMMRAMLYEAAQSMLVRSTRWSWLKAWAMQIAKRRGKKKAIVALARRLAVIMHRIWVDGTEFRWTRKVVTA

SEQ ID NO: 493753 - protein, 350 aa, unidentified
MKIIGCDLHTRYQQIAMVETDTGELVERRLEHESGEARAFYGSLTGPVRVGIEATGHTHWFEAMLAELGHELWMGDAAKIRAAVVRKQKTDARDAAHLLDLLCSGRFPKIWRPSWEQRDLRQLVWHRQKLVWMRGAVKNQMHALAMGEGVCRKKKLFTAKGRKELEGLALGPWASYRRQELLRMFDELQASVARLDQAVEQAAQSQALAVRLMTHPGVGPVTSLAFVLIIGPVERFERSRQVVSYLGLNPQEHSSGGKQRLGSISKQGNPMMRSLLVEAGHTAARFDPELKRMYQRLKFRRGAAVAKVAVARKLAVRLYWMLRSTADYAQLVRMQGSPWATLVENSPSLG

SEQ ID NO: 493754 - protein, 393 aa, unidentified
MVYLGIDIGKNNHVATLIDSQAKPLFKGFSFTNTIDGGDGLIERLTQHIESPSCVSIGMEATGHYWLSLYSFLVSKGYTVHVINPIQTDGWRKGIEIRKRKTDKIDSFLIADLLRYGNFVETSLSDENIMSLRNLTRFRHYLVGSIGDLKRKAICVLDQTFPEYQNVFSDTFGQTSSELLLHFQSAEDFASISATQLEEVLVGMARKSFAKNKLTQISELAAKSFGLKFCRDSFSLQLKLLIEQIRFIDAQVSDVEAEIEVLLAKLNSPITTIPGIGIVTGAAILSEIGDIDRFKNPSKLVAFSGIDATVVQSGESSGTYKMSKRGSAYLRKALFQVAIVASNSDPVFKAYYQKKRAEGKHHLTATGAVARKLCYTIHAILKNNTPYEVQNHI

SEQ ID NO: 493755 - protein, 422 aa, unidentified
MEHATHFAALIGIDWSDRKHDICLVDTQTGAQELSIIKQRPEALNEWALGLRARFGGARVAVCLEQSRGPLIYALLKYDFLILYPINPKTLARFREAFTPSRAKDDPRDAEYLVALLVHHRERLKAWMPDDERTRTLQLLVEHRRRLVSDQTRTSNRLTALLKGYFPQVLAWFPDIRTELVCEFLLRWPSLDALRGVRRTTLGKFFRAHNSHRKATLCARLDAIKAAVPLTTDTAVINSSVLMVKALASQMRTTLAAVHEFDVRIEALCQAHEDFELFASLPGAGKVYASRLLTAMGSNRERWQTADELLRFSGVAPVVERSGKSSWTRWRYFCPKFFRQSFVEYAGESIRHSEWARAFYASQKAKGKSHQAAVRALAYKWIRIIWKCWQTREKYSEARYVECLRKKGSALVPVMPEAQEIA

SEQ ID NO: 493756 - protein, 364 aa, unidentified
MDDVSTEQTKKMTVGLDLGDKYSYLCVLDTESGTLVEEGRLRTTPDDLHRRFDSAEQMKIAIEVGTHSTWISRLLEECGHEVLIANPRKTRLIYGDKRKTDKLDAQKLARLARVDPELLYPIEHRGKDSQTHLALIHSRDALIRSRTQLINHIRGTVKSFGARLPKCSAESFHKKVAAQLPHELAEALEDVVATIASLTEKIRGYDRRIEQLCKERYPQETKLLRQVPGVGALTSLTFVLTLEDPRRFEKSRSVGAYLGLVPGKDQSGESDPGKRISGEGDEMLRRLLVGSAHYILGPFAPDSDLRGHGQKIASRGGKNAKKRAVVAVARKLAVVLHRLWVTGECYEPLHNAQLSGALGEEEAA

SEQ ID NO: 493757 - protein, 347 aa, unidentified
MEEYAGLDVSLKAVSICVSDGDGRVLWRGEVVNESDIVIAALSRHAPNLVRAVLETGSCGVPLYRGLEAAAVPIVCICARHAKGVLKCKVNKSDANDAEGLAQLARTGWYREVYVKSAEAHVIRAHLLARKQITKARRDFENQIRALLRISGFKVGAAPKARFEARVRRLLEQIPALHLPVDQLLMARRSLLASQDALESEAKRLAKDDHRCRTLQTMPGVGPLTALALVSTMDGPARFAKSSSVGAYLGLTPRGHQSGEVAWTGRISKTGDGVSRALLYEAANSLMVRVKAGAPVKTWPPLKVWAVNLAERVGGKKARVALARKMAVILHRMLSDGTAYRWTPEAA

SEQ ID NO: 493758 - protein, 409 aa, unidentified
MRPILRSCCGIDVHKSMIKACVAKGPLNKPPKIEIRTYSTMTSDLLKLSEWLKENKVQAVAMESTGVYWKPIFNILEADFPVSIANPKYLKKVPGKKTDVSDSEWIATLLRCGLIPKSFIPPMAIRELRDLNRTRRKMVEHMASEKNRLQKVLEDANIKLTSVVSKVDGVSSMNMIQALLTQDEISREDIAAMVHGKLKNKIEVLVQALHGRLTDHHRYLLRLHLKQIAFLADQIKELDDVIQKKMKAFKKESDLIKTVPGIGDTTSSAIIAEIGTDMSQFPDEAHLSSWAGICPGNNESAGVKKSGKIRKGDKFLKATLCEAAWSASKKKGSAYSAYYNNVAKRRGKKRALVALAHRMLMDIYRTLKTGEPYVDEGAEAVFERNSSGRQKSAIRFLEKAGYAVTKASA

SEQ ID NO: 493759 - protein, 312 aa, unidentified
MAEIICGVDVSSQTLDARIGRDGAEVRVAATPEGVATLAAFCQEHRATLVVMEATGGYEKLVHALLWSHGIPAAIVNPRSVRKFAEAMGFLEKTDRIDAGVIAWYGAVKGIVAQVPASEAQERLKALVTRLRQLTELRTMQVNQRRLVADPEVNGLFSDMMALIARQSRELEVKIAALIGSDPTWCKLDACFREIKGVADRTVARVMAEMPEIGTLSNKAVAKLAGLAPLAKDSGKHQGKRVTRGGRANLRNILFVIVENVRRYNPTFVALNERLIKAGKPKKVIRVALARKLLVQLNAKARDARKELALAT

SEQ ID NO: 493760 - protein, 382 aa, unidentified
MPAYADPTSKPLSADTIFLAFELSGTSWLVALHAPDADKVERHRLSAGVAAEVLGLIARTKARVTRRLGTTPRVACCYEAGRDGFWLHRVLEAEGIASHVMDPTSLQVDRRARRAKTDRLDAQALLRALMAWSRGERQVCSMVRPPSPEHEDERRLSRERGTLLKERLRLSNRIKGLCAAQGIYDYEPLGADRRERLARLVTGDGRALPGRLAAEIGRQLDCLELVLRHLAEVEAVRDARAAQAREEGGSKLAALLRLKGIGPELATVLELEVFHRHFANRRDVAAYAGLAPSPYASGGTSREQGISKAGNRRARKALIELAWLWLRHQPESALARWYRDRVGTATGRVKRIAIVALARKLLVAIWRYVETGLVPAEATVRT

SEQ ID NO: 493761 - protein, 337 aa, unidentified
METYVGLDVSQKSTVVCVIDKDGNPVWRGTVASHPQAIESIIGQQAPEVRRVGMETGPLAVWFYHGLRERGVPVDCIHARHVHAALATQLNKTDSNDARGIAQLTRSGWYRPVEVKSIASHEVRLLLGARSQLIRMRTGLYNQIRGVLKTFGVVLPPGTRSAFEKLVEQHTPTTSLIHGVINILLNSWRHIDRQVRETDKALERIARASDVCRRLMTVPGVGVTTAVAFAAAVDNPDRFQRVGDIGPYLGLTPRKYQSGEVDHNGGISKTGCKLTRHMLFEAASVLLLRHKRDCALRRWAQSLIPRIDLRKALVATARKLATLLLSMWKSGKEFIPG

SEQ ID NO: 493762 - protein, 320 aa, unidentified
MRNTVGLDISKLTFDATAIVGNAEYSAKFDNDSKGLDQFSDRLKSLGCQNLHICMEATGNYYEEVADYFAQYYSVYVVNPLKISKYAESRFKRTKTDKQDAKLIAQYCRSAKESELVKRQKPTDEQYRLSRMTAAYAQIKSECAAMKNRHHAAKDEEAAKAYAQIIKAMNEQLEVLKEKIKEQTEKPNCKEGVKRLETIPAIGRMTAAVLFHHLTSSKFETSNKFAAFAGLSPQQKESGTSVRGKGKLTKFGNRKLRAVLFMPAMVAYRIRAFPGFIKRLEEKKKPKKVIIAALMRKLAVIAYHVHKKGGDYDPSRYKSA

SEQ ID NO: 493763 - protein, 382 aa, unidentified
MQRATNTATVSANTLECALEMSKKTWLLAIQFPDREQPSVYTIKGGDAAALLAKLIAARDRWAKVSGSPPSIVLCYEVGYDAFWLARFLMAHGIECLVIDPGSLEVKRRPRRVKTDRVDLKKLLRTLSAWRRGERHVWSVVRIPTIEEEDLRHSHRERRRLIGERTAHINRIKGLLFAQGIRVDNIKTLALEKLVTGDGHRLLPRLAAEIEREMKRFAMVQEQIDEIEKERDTAPTTCKETEKKRHLLLQLKSIGPANAALLSREVYYRHFDNQRQVGSFLGLTPSPYDSGEEERCQGISRAGSGRVRAVMIEAAWLWVQHQSKSALTRWFIQRTAGQSKRIRKIMIVALARKLAIALWRFVELGLVPEGALLSARVTAKAR

SEQ ID NO: 493764 - protein, 343 aa, unidentified
MLSFGIDTHKATLAVSAVDPLGRQLAARTFSNDRRGHAALLSWTRQQGQPRRIGIEGAGSFGAALAELLLASGEDVVEVPAQFTDRARRSLRQRGKSDPGDALAIARLTAREPHLAAVRRPGPTADLKLLVTARDQLVAERTRLVNQLHADLLVLSPGYGRRLSNLTSARHQAAVARLLGRRAGVRSALAKGRLQRVRRLALDIGRLEARISSTLSAAHCSLPRLVGLGPMMAAKALGEVGDVRRYRGPAAFAAASGTAPLSASSGQVQRHRLNRGGNRQLNRVLHTMALVQVRCDKRAQAYLARRLAEGKTRREAIRALKWHLARVVYRTMLADAVSSELAT

SEQ ID NO: 493765 - protein, 484 aa, unidentified
MKKPSNKARRPAPPIVARGKGPIRPATSLPVVHPHAAGIDVGASELYVCVPEDAVSPGESPVRRFGVFTGELDKLVEWLQSCGVKTVAMESTGVYWIPPYQKLEAGGLEVVLANARHLRQVPGRKTDVKDCQWLQRLHSYGMLQGSFRPAEEYCRLRSLMRHRENLVDGCVQQVQYMQKALNLMNVRLHQVVSDLNGETGLRILDAILAGERDPKKLTSLRDERIKRSTPPEMEAALQGDWREEQLFILQQARETYRFVETQLARCDAQIEKVLQQIVVVAERRPSLETPPNPTAAPTPRKKKERRPRKTGHGLKRDLRAELQRICGIDLTQVIGLNVLSVLIIISEIGVNMSRWRSAKAFCSWLGLNPGNRISGGKVLSSRTPHVVNRVSLLLRTLATAVGRSETWLGIFHRRMKARLGPAGANTATARKMACLIYHLLKYQEQYIDVDTLIYAEKIQRIRLNKLRKTAQELGFELLPIKEAA

SEQ ID NO: 493766 - protein, 370 aa, unidentified
MATGGRLSKIAELTRSAEVTTTGPITIGIDLGDRYSQCCFLGPNGECLTEGRIRTTPEALARHFQGLPPARIAIEVGGHSRWISQQLASWGHEVLVANARMVQLIAAGVRKSDQVDAQLLARLARTDPTLLAPITHVGYHQYPDIARLRARALLVRTRTRLINAVRGIVKTVGIRLPACNTRGFAEKAASLVPADLQPSLGPLLETIATLSAQIKEYDRAVEHIAHEQYPDTARLRQVPGVGPVTALQFVLTIGDPQRFRRSRDVGAFLGLVPRRRQSGASEQQLRISKAGNSEMRTLLVQCAQYILGRFGPDTDLKRWGMAMAARGGKNAKRRAIIAVARKLSVLLHTLWTSGAVYDPLYNTAAMLKRA

SEQ ID NO: 493767 - protein, 502 aa, unidentified
MKSQPAKKAQNDKKQRYQASGKPTPGKWDEMNRKQRREMMRKMQSEDLNLEVVHPQAAGIDIGNESHYVAVPSSLDPQPVRCFGCTTAELKKMAEWLTQCGIRTVALQSTGVYWIAVYDILEEAGLEVYLVNARETKNLPGRKTDVQESQWLMKLHTYGLLRNSFRPSQEIRTLRTYWRQRQDLVRSTGRHVQRMQKALTQMNIQLANVISDISGVTGQAILKAILNGERDPRELAAYRDCRIEASEEEIAQALEGNWQEDQLFLLRQEQAGYEFCQKQIMECDQQLAQYLTKLEDRTQGATLPEETRKKRRKKKKGNPQFNLREELFRMTGTDLTQIDGIDVMTAMTVVSEVGWDMSKWKTENHFVSWLKLSPDNKISGGKIIGKGRMPTNNRATTVLRMAATTLRESDSYLGAQFRRFRTRLGPPVATKAMAAKLARLVYRMLRYGMKYADQGAELYDAQYRKQQVIHLKAKSRPASPDNSRFWRHERPLHGTKPLSTRF

SEQ ID NO: 493768 - protein, 358 aa, unidentified
MFIKQSVGIDVSKDRLDVSICCLNSHIEICNIAQASFENSKKGVIRLENWIRNHSIKDLDYTVVLEATGIYHETLAYHLYEQNIKVAIVLPSKISAYFKSTNKRSINDKISARLIAEFGLMRKLDTWAPPSPCLRKLKVLVRERLRLIEMRNMVKNNEHTYKYAANRIDTTQERICELRNMLNKQIKEIEEEIRLILRGNPELYEKVKKICTIKGVGLITVVTIVAETNGFSLIRNARQLVCYAGYDIVKKESGTSVRKGGSISHKGNKNIRRALYFPAITAKEKNEFFSNFYDRLYSRHSIKMKAYVAIQRKLLMLIYTLWKNNEKYEPEKHKPYKFLEQPNEAALIELDHCPLIVE

SEQ ID NO: 493769 - protein, 367 aa, unidentified
MKDSITVVGLDVHKNSIQIVTADTDGAMEVRHFGRIGGTMDALDRAVRKLVSRGSTLRFVYEAGPCGYEIYRHLTGKGFSCKVIAPSKTPKKSGDRIKNDRRDAETLARMERAGELTAIYVPREEDEAMRDLTRAREDAVKALKTARHQLNAFLLRYGQRYPGKASWTPSHLRWLSDVTLPHPSQQIVLQEYIHTVVACAERTARLTDQIMKLLPDWRMFPVVKALQALRGVAPIVATTTVAEIGDLSRFANPRQLMAYLGLVPSEDSSGESTHRGSITKTGNGHVRRVLVEAAHAYGFPARVSRHLLKRHEGVPQPVLDIAWKAQVRLCGKFRRLMARGKLKNKVVTAIARELSGFMWAIAREVEV

SEQ ID NO: 493770 - protein, 378 aa, unidentified
MPTMPKRAALSNPGMFDLGVSHLDAAGVPPLVFGGVDTHADTHTVAAVSHLGVMLGNASFPATAGGYRQLYCWLAAHGSLIRVGVEGTGSYGAGLAAALTERGVELVEVNRPNRVIRRARGKSDPIDAEAAARAALNGVATAVPKARTSVVEAIRVILVARRGAVQARTAAINTLHHMIITAPRQLRDQLQPLTRRHQIAVCSGLRSTDITSPTRATKLALRRLACRINHLTAEISDATKDITALVRGHAPQLLAEVGVGALSAAQLLITAGDNPDRMTSPAGFAALCGTTPIPVSSGKTNRHRLNRGGDRQANCALHTIINSRLRYHPETQAYAAKRTAARKTERDIRRSLKRYLARRLFTLILNPNQAAENLPAAA

SEQ ID NO: 493771 - protein, 348 aa, unidentified
MSHFVGLDVSVKETSVCVVDDAGKVVCERKVLTEPDDITVLLTSIGGDYVRVGIEAGPLSQWLVNGLSEAGLPVICVETRHMKALLQAQQVNKSDRNDARGIAQMMRVGLFKPVHVKTLAAQEQRMLLTSRKLVQRKLIDIESDMRGTLRNFGLKVGAVSTTGYEARIRHLVEGFPRLAAIVEPLLTVRRVMRQQLATLHKMLLDTVRHDPVCRRLMTAPGVGPVVALTYRASIDQPQRFVHSRAVGAHVGLTPRRHQSGEIDYDGGISKSGDTMLRTMLYEAAQILMTQSRHWSWLKAWGMKVAQRRGMRRAIVAVARRLAVVLHRMWTDGTDFRWGSEPGTAVAAA

SEQ ID NO: 493772 - protein, 408 aa, unidentified
MNPLFVGIDVSSKNNVAYLMKPDGSKHSSFSVQNNLGGAKLLSERIVSALGSMQLERVVIGLEATSIYGDSLVYALREDGRLGRFQRKIHVLNPKQVRKFKEAYSDLPKNDWVDAFVIADHLRFGRINREVYMDDYRYKALQTLTRARFDVIQNLTREKQRFANYLFLKCSGMAQDKDIQNTSATTIALMEHFETVDDLANADLEELTAFITETGRGKFADPDATAKAVRAAAKGSYRLPKTVNDTVNQAMAVSIASMRALKGQVKVLDKAIEQQFEIIPNTLTSLPGIGKVYSAGIIAEIGDIHRFDSQASVAKYAGLVWNRSQSGDFEAEHSRMIKSGNRYLRYYLLEAANSVRRCDSEFRRYYDLKFKEVNKYQHKRALALTARKLVRLVFRLLKDNRLYIPPEG

SEQ ID NO: 493773 - protein, 409 aa, unidentified
MRYYLGVDWADQTHAVWVVDEGGTKVATRTVPHTAEGLAEWGRQLDEWRAHGIELWAAIERPEGRVVDFLLDHGVVVYAVNPKALDRARDRFRQSAAKSDPFDARVLADFLRTDHAHLRALQPSSEAAQELKLLTDDYQRQIRQQTRLVNQLTTTLKAYYPRGLEVAEVTTALAREFLQAYPTPATVTALTARQWQRWARTHRLSETRTQQLWVVLQQPQLPVPPHVVRAKARLMQSLVAQLTVVLEGVTAYREAIEDLFARLPAAQWIRTLPIGDRGITAPTLWARLGDAPGRWQSFRHLQAQAGTVPVTIRSGKQQVVRFRFACDKSLRYVVDHVAFLSLRWSEWAQAYYAEQRARGHSYRQALRALSAKWLKIIFVMWERQIPYDEQYHLAVMTRQQLRQRQEKVA

SEQ ID NO: 493774 - protein, 315 aa, unidentified
MDEPRRVTTCVGIDVSKDRLDAHVLPTAEAFAVARDGKGLESLVERLAALDVSLIVLEATGGFETTVAATLAGAGLPLAVVNPRQIRSFAKALGRLAKTDAIDAEVIALFADKVRPQVRPLPTADARALGELVARRRQIVEMIGMEANRRSHATDKRLAKTIDRHVAFLEKDLAAVDSDIDTDVRASPAWRETEDLLSSVPGVGPVTARTLIAELPELGGLDRRKLAALVGVAPFNRDSGAWRGHRMIGGGRTSVRNVLYMAALAAIRHNPVVRATYQRLVTRGRPKKVAIIACLRQLLTILNAIVRTKSPWKIA

SEQ ID NO: 493775 - protein, 343 aa, unidentified
MKLSRIGIDLAKNVFQLHGVDRHGKGVFKRRLRRNQWLAVLLDHAAPGCEIGMEACTGAHHWARQLQAKGFTVKLIAPQFVKPYVKSNKNDAADAEAICEAMSRPNMRYVAIKTVAQQDIQALHRVRSGLIGQRTAKANQIRGLVAEYGLVAPQQLGHLRRAIPDWLEDAENGLTIPFRGLLQGLWNDLLTLDERVGELDREIKRIADSDPVAKRLQQLRGVGPMVATALVAAVGDASQYHKGRQMAASFGLTPRQHSSGGKDRLLGISKRGDAYLRSILIHGARAVVFQAKHKDDRLSQWVTSIAQRRHPNVAAVALANKTVRMAWAMMRNETDYDPGFVVT

SEQ ID NO: 493776 - protein, 408 aa, unidentified
MERFYLGVDWADQFHQVWVSDFDGKKVVEKKVTQNVEGLAEFGRWLDEQRAKPIELWAAIEKPQGRIVDFLLDHGVEVYPVNPKALDRARDRFRMSRSKSDGFDAYVLAQFLRTDHGHLRALKPNSVQAQELKLLTRDQQRLGHQKTRLLNQLTATLKEYYSRPLEVFSDLETQIALDFLKQNPTPDDLSKLTRRQWNRFAKREHHLGAERAQELWEQLNQPQLTVPEHVVRAKAHLLRVLLGQLDPLRKAVKSYEERIKSFFGSMPTAELFKGLPGAKTGTIIATLWAELGDAKSRWESFRHLQAEAGVVPVTKTSGKSRVVQFRFSCNKIMRHAAYWLAFVSLNRSEWANHYYRDQRAKGHSHHQSLRALGAKWLKIIFVMWRDHKPYDENYHLANIARQKMRQAA

SEQ ID NO: 493777 - protein, 335 aa, unidentified
MQQKQYVGIDLHRRRSVIVRKNEAGEHLETVHIDNDAAALAAEVSKAGEHPEVVLEATYGWYWAVDVLNGLGATVHLAHPLGLNWGNRRRKDDEIDANDLIDMLRLGRLPEAWIAPPATRQLRELVRYRAKLSRLRSGLKSQVHAVLAKEGVRVPMSDLFGVAGLQLLDDVALGDAYASRVRSLRDLIAAFDAEVNAADRQVRHALAGHPGWQAVQAIPGVGPVFGAVFVAEIDDIERFSNPRQLCSWAGITPKHHESDTTVIRGHITKQGSRLVRWAAVEAAQKTSGFLKTDYRRIAERRNNTKVARVAVARKILTLVYYGLRDGQIRCLADTA

SEQ ID NO: 493778 - protein, 349 aa, unidentified
MEHYVGIDVSLELSSVCVVDVGGKIVAEAKIESHPDAIINFLRKLGLSIERIGLEAGPLSQWLHAGLTKGSFETVLLETRHVKAALSAMTVKTDRRDARGIAQLLRMGWFRPVHCKSPGSQEVRALLVARKQLLGKLLDVEFSIRGILRGFGLKMGIVTRTGFEGRVRELCAGQAMLEQIAEAMLAARAALRKEYSKLHKAMLALVRRDAICRRLMSAPGVGPLVAITFKTAIDDPARIRKSKAVGALLGLTPRKYQSGETDVTGHVSCVGDTMARTALYEAANAILSRVTRFSALKRWGMDVAKRRGMKRAKVALARKLGVILHRMWMEGTSFRWTKEASQAPQIARA

SEQ ID NO: 493779 - protein, 318 aa, unidentified
MKSNTNQNINVGVDTGKFQLDIYIRPLAIYFTVTNDEKGIKEAVTKIKQYNPQRIIIEATGRLEMPFIIACAYAGLPFVIANPVHIKRFAGAIGQRAKTDKLDAQLIAHYGEAIKPKLSTLKPDVMQTMSDLVARRSQLLVMQTMEKNRLQILPKSLVMTIKPILTAIKNQIDKVEAKVVALIESNPDYQAKNEILQSMKGIGKIAAASIISNLPELGYINNKEASSLVGVAPMNKESGRFKGMRKIQGGRHQVRTVLYMAMMSAIQSNPVFKTTYQRLVAAGKPKKVAIIACIRKMVVILNSMLRDGVMWEAPKVVN

SEQ ID NO: 493780 - protein, 333 aa, unidentified
MVYAAIDIHKRVFQAAVLDAESGQLAQERLPATREALDDWATRSAGKLEAVALEATTGWRWVARELQARGFDVRLCDPGEARALGGSKRRPKTDRLDAAWLARLLAKEMLPEAWLPPAEIQYLRDRTRLRHALAQDRNRWAQRLHALLTHEGWPCGRGRLLTVSGQKWASALALPEPARASVEAMLTIIHALDEQIELLDTELRRLARSDPRLQALCAIFGVGPVLAAHILAELGAASRFRRARQVVRLSGLDPVVSESANVRRRGRLSKQGSPELRWALAEAAHHACRRRSPDHALYTSAKQRRGTQRATLTVARKIARRAYHVLADLEQAA

SEQ ID NO: 493781 - protein, 315 aa, unidentified
MAMPVSVTKPIVGVDVAKNELVIYQSDGDLLEEIPNTKTSIKQWLKALSGTVAIAIEATNIYHLDFADLAYEAGCTIYMVGGYELKHYREGVKIRAKTDALDAKLLARYLKNEAEELRPWTPPSPLYRQLLSLFRRRAALVQARVGLVQSWSNEPLLKAAFAEQVKSMQQLETLIEKTINDQLKEAGLLGQLKRCLKVEGIGFLTGARLITAFQRGDFRNADAFIAFLGMDLRVAKSGQKDARRSLTKRGDPEARRLLHNAAMSASRTKAWKGYYEEQRTRGFSTTQALVMLARKLARVVFALLKGQSEYQPKTS

SEQ ID NO: 493782 - protein, 337 aa, unidentified
MKVTLIGIDLAKSIFQICGVNQAGKRVFNRQVRRARLMEFLMQHPDATIAMEACSGSNYWGRTLQQRGFKVMLIPPQHVKPFVKGNKNDRNDAFAITEAARRPDLKCVEPRTLAQTDMIQVHRVLDRMTRQRTALINQIRGFLNEYGIVVAQGKEKLLVAMPDLLEDAENGLTPSSRALFQQMVEQWRQANEAIKQIEKGLKGKARTDEDAQRLMKMKGVAVKISTATIAHAGNGHGYKSGRHFSANLGLVPKEHSSGGQQKLGGITKRGNRYLRRLLIQGAWSVVRNADKNDDRLSRWARQLVERRGKHKAVVAVANKMARIMWSMLYHQTEYRAN

SEQ ID NO: 493783 - protein, 355 aa, unidentified
MKRSTKYVALDVHQATTVTSVREEGGRVIARTVLPTEASAITEYVRGMRGTIHVTFEEGTQAQWLYDLLVPIAHRVVVCNRRGEAHQGNKGDQRDADELSDLLRCGKLRAVYHDRGQRATLQELARTYENLVEDSTRVMLRLKALFRARGIKTPGTAVYHPARRVAWLRQLPAAGVRFRAEALCAELDVLHELRPKAKAAMLAEARRDPAWALLQTVPYLGPVRVALILARMQTPWRFRTKRHLWAYVGLAVVTRTSAEYEMDGRRAVRRRRRLAMTRGLNRNHNRVLKNVFKGAATAASVRPGALQEWYQGLLTRGLRDELARVTLARKLAAITLHLWKRGERYDPAQLSLQAH

SEQ ID NO: 493784 - protein, 450 aa, unidentified
MSPLALDVVTKTGKTPVLGRMLSKYVGRKTSSVENDITKARNHSRQRGNIMRVVFGIDVSKASSEVAILVNGEKIHGYTIPNDAIGFNRLLGDLRTVYQPEIVFEATGVYSRRLQAFFEDNSYAYIRLNPLESKKQLNSLRVRKTDKIDAEKLATSQFILNRKPSYVQEALYQELRNLSRFYQNLTEDIVCSKNRLHKVLQVTFPELANILSSPTGKQYWNLVMASPCNSFVLELDDAALRAIIRQSTSKRISEKRVTYLVDKLTKLANHSYCAVKKTFPMMEEVKYYAGELLRLSEYRQSVLEEMITLAQPLPEYEILLSIPGIAETTATSIIGELGDIRRFHSANQINAFIGIDLRHYESGDFLAKEHITKRGNPYARKILFKCIHNIASASHTNLYHIADFYEKRKRQSQVTSTKPHTIASIHRLIRTMYYLITHNKLYDYTSTQNR

SEQ ID NO: 493785 - protein, 344 aa, unidentified
MPIVGGLDIHRKQLTFDYADTVTGEVKRGQIVPADREHLRAWLARFAGRDDVGFAVEGCTGWRYVAEELAAAGVAAHVGEPADTAAARGRKRHAKTDKTDCRHLRQLLAEGRLPGCWVPPPHILECRALLETCHDLRAEHTAWLQRIHAVFCHQGAPRLGEGFLRTEQGVAALRAASAAHLSPAGQFQIDTALEVIAALGTRLQDVRRQLREAAANLAGARALAARIYGVGPIAALAMTAWLAGAGRFSSSRKAVRFTGLDITVYSSDGKRATGRLSRPGPPVLRWAVYEAGKAHARASAPDHRSYAAVRDRKNSKRAALSEARKIVRQACRILAELGHDALAA

SEQ ID NO: 493786 - protein, 352 aa, unidentified
MQYFIGCDMHTRFQMVAWIDAETGEIRVRRLEHEGKEVEKFYAQFARGTVVGVEATFPALWFERLLGQVGHELWVGDAARIRASEIRYQKTDARDAELLLDLLRSGRFPRIWVPSAEERDLRQLLVHRMKQVRTRTQVKNQLHALAISQGMCRRSKLWSQKGRKEFASLALLPWAARRRKELLEQFDRLDATVRELDRAGEEAGRTYSDVALLRSHPGVGGVVSLAFVLTVGPAERFPNSRSLVSYCGLNPREHSSGGRQRLGAISKQGNSMMRWLLVEAGQTAARLDPRLRRTYQRLKNRRHSAVAKVAIARRLAVRLYWMLRTRHNYAQLVRMSGSPGSAVVPPQAGSSV

SEQ ID NO: 493787 - protein, 336 aa, unidentified
MKKVKQVIGIDVSKDTLAVCYGFSTETQATSYTKPTTFLNNLKGFTKLLHWVEELKDEKTDLCFVMEATGVYYENLAYFLSESRQIVHVLLPNKTKHFAKSLDIKSKTDEIDAKMLTQIGLERQLLKWQPQSENLHLIKQICREYKDLKEKITVVKNQLHAKDHAYNSSKQVIKRLKAQERFLETQILQVEHELRVLCSEDEELNEKINKIQTVPGLSFITIITIIAETNAFSLIENSKQLCSYCGFDVIHNQSGIFKGKSKMSKKGNRFIRRALYMPALCAIKHNPTLKAFYNQLTERKKVKKVGVTAVARKMLILTYTLWKNSAEFELDYKKAA

SEQ ID NO: 493788 - protein, 393 aa, unidentified
MICVGIDVAKDKHDCFILSSEGEVLADVFTIQNNAEGFDTLLQTIRRCVCPGDKIKVGLEATGHYSYNILGFLLDKGLDTYVINPLHTNLYRKSLSLRKTKTDRVDARTIAAMLMSDVDLKPYTDTAYHNEELKSLTRYRFDKVRERAKLKQSVSRLVTILFPELEKLVPTLHLASVYGLLSELPGAKQVAGAHLTHLKAVLSDASKGRYGRDMATTLRDAARCSVGSVMPAKSLELQHTIRLIRELDAEIEDIEAAIQSMMDEIQSPITTIPGIGVRMGAMILAEIGDFSCFDSPDKILAYAGMSPSTYQSGQLSLSGSYSHMEKRGSRYLRYALYNATKYVCLWDPTFAAYLAKKRAEGKHYNVALSHAAKKFVRLIYAMERSQQPYNTAA

SEQ ID NO: 493789 - protein, 320 aa, unidentified
MPRSSGSVIVGIDVSQPVLDIAASVACKVKQVSNTPAGVAKLIPVLKGINPELIVLEATGGYQRTVVDAMHLAGLSIHVANPRKVRAFAIAGGVLCKTDKIDARTLVEFGSAMEPEPTAPLDPASREVAELQTRHRQLVENGTAEKNRLKIAPPHLQEGIRRHIAWLDEEIAQIEKRLKDVIKADPALRTKNQIITSVPGVGPGTAAALLGHFPELGFISNKQAASLAGLAPFADDSGKKTGKRFIRHGRSNVRSAVYMATLVAIRCTEQFSSCYQRLVGTGKPKKVAIVACMRKLIVTLNSMMRSGSTWSPTVAGAAMA

SEQ ID NO: 493790 - protein, 341 aa, unidentified
MDHYAGIDVSLECSSVCVVDASGKIVREAKVASEPEALIAWFASLGFGLERIGLEAGPLSQWLFAAMREAGLAVELLETRHVRKAFEAMPVKSDRNDARGIAQLMRLGWFRPVHCKSMSAQETRTLLTARKLVQSKLRDVENSLRGILRGFGLKVGKTTEREFAGRIEELVAGHPHLQVIAKALLAVRAVLRKEFAAFEKQVRKMARSDIRTRLLMSTPAVGPIVALTYASAIDDPTRFRSSKQAGAHFGLTPKKHQSGETDYTGRISKIGDSSVRTALYEAAHVMLTKPLKGCTQLKSWAMRIARRAGMSKAKVALARRLAVIMHRMLADGTPFNAAAAA

SEQ ID NO: 493791 - protein, 483 aa, unidentified
MIKSVGIDLSRSGVHQVRCLDEQARPCDSFSFDSTLEGLERLEEHVLSNGATPTIVFEPTGLAWIPLAVYLRARHPECRLVKARLQKVAALRRYLRSRTKSDRVDGVTLAKMPFIDSEQLDEAYLPPAKYHALQRLTRQRERLMKSITIRKNRIGSIINGYLPGLRKAFTDEWSERARAFYRQKLNPFTVVHVGKRALETLLAGVKNRGAQAESHRVYQACQRQAEFYERSKAAGMINEDFFDDLQEEIACELRLMEAEEAEVEKVSERIEELYLQLHPADHLRAIPGIGVRTAQVFLAVIGDPHRFRNQSAFANWTGVVPGAKQSADTESKGLRMTKAGPSMMKRALFQAGDIARRYDPQLAHLYHREMVSHGKTHLQAMGAVMSHLGARILAVLRENRPYDLRDTHDQPIDKKGAMELVRSEYKVPELIRQVRRHRKSNQGRLTSLRTREAAKAPQSGPTHTSPRTVYSAEEVESVESIVN

SEQ ID NO: 493792 - protein, 358 aa, unidentified
MRFYTKQHQYYCGIDLHTKKMFVCILDAAGQIRVHQNIKTDQETFLNIISPFREDLVVAAECMFTWYWIADLCAEKNIPFVLGHALYMKAIHGGKAKNDKIDSHKIATLLRGGMLPQAYVYPARMRATRDLLRRRNHFMRKRAELYAHIQNTRSQYNLPDFLGRIAKPQNREGIVERFNDPSVQKSIAVNLEMIQAYDHILTQLERDIITSAKEHDLRSYALLQTIPGVGRILALIILYEIETIERFPQVQDFVSYCRLIKSIKESNGKKYGSSGKKIGNAHLKWAFSEAAVLFLKGNEPAKRYLEKLSRKHCKAKALSILAHKLGRAVYFMLKNKEAFNQKKFLGLQKLEGMDQPVV

SEQ ID NO: 493793 - protein, 451 aa, unidentified
MNKKVSMQIINPNAAGIDVGSRSHFVAIGQGKEDVKEFGVYNEDLQAIAAWLLLHKVTTVAMESTGTYWQSLFAVLQNAGIQVILCNGKFTKNIKGKKTDVQDCQWIQKLHTIGLLSGSFLPDEATEQLRTYCRHRANLLDNAADTTRKMQKYLRLLNLRLDVVVKDITGLTGLAIIEAICKGEVNAQVLASLRHGNCKKSEEEIAKALQTNGRKDYLFGLKHEYKMYQSLQSAITSCDVEIEKMLTEQINNNDDKRQHIIDKKIHKRINKNSPKNIDINLMAYQYFEGVDLLAIEGVSHSTVLSIMSEVGPEGLKKFDTAKQFASWLRLVPNNKISGGKVLSSKIPKGSNRLKIALRNAANAIGNLKDTPLSNFFNRINFRKGRVSAISATARKLAIIIWNMIIKKQPYNNEHGYEFLDQKRKRKVKEMRKLIHKFDIKTDELGLQLSGL

SEQ ID NO: 493794 - protein, 361 aa, unidentified
MLYSGVDLHRRLIVICTVDEGGSVVARCRMKTDPALVSEYFRRWPDQHRAVVECTTGWYWFSDLLRSLGVQVVLAHAKYLKAISYAKVKTDAVDALTLAQLLRMGYIPEAHQLPPEYRAMRDLLRQRMVMEHKRTNIIQRVTSILAQFNITKLPFSPYQPGFANFLDQCPIPEEYRMTLLMYHQQCLQVTEHRKHLEKHFKTLLRPTPAVQRLMSVPGIGDITGSIIAMETGDIHRFADDKHYCSYCRLVPGAKDSGGKHSHRSGSKDGNQYLKFAFTESAIKAMRFYPDIKHFANRLERRATKAIARTVVAKELAKISYYVLSRQQEFRTFKGIEINKLRNWPRARKPVRLTGGSTPPSV

SEQ ID NO: 493795 - protein, 339 aa, unidentified
MTYYAGIDVSLELSSICVVDGEGRIVREGKATSEPAALIDWFAPLGLEIARMGMEAGPLSQWLYAGMKDAGLAVELIETRHVRDAFKAMPVKTDRKDARGIAQLMRLGWFRPVHCKTAAAQEVRALLTARKLIQSKLIDVEMSARGILRGFGLKVGATTVKRFAGRHRELVAGHATLEVIAEALLDVHATLARELSGLERRVRAIARTDARVRLVMSAPGVGAIVGLTYVAAIDEPSRFKSSKMVGAHFGLTPRKYQSGETDVTGRISKIGDQAVRTVLYEAAHTILTRAIKASALKSWAMKIAKRAGMKKAKVALARKLAVILHRMWVDGRTYRALPA

SEQ ID NO: 493796 - protein, 295 aa, unidentified
MRKSSFYVGVDVGQSELWAAIAGTKPRAFVNSTTGIKSLQRWVSGALPSATIHYAMEATGVYSQTLATRLLHDQESIEVSITNPAQIVAFGRAQLRRCKSDRLDCQVILEYAQSQKPPRWQPESKTLQQLRSLVSQADAVQKNLLEWNNRSHTHQQSLELPSLVKKSTAALQRVAERQLELLQAEIKSLCTLDPELQVHYKLLQTIPGVGEKSAAAVMAYGGSALTERSRKQLTAHAGLAPRSRQSGTSLHQQGHLAKEGNKQLRKALYMPALVATQHNLNLPLFSGHRERIELW

SEQ ID NO: 493797 - protein, 447 aa, unidentified
MLEPNAAGIDVGAREMFVAAPPGADEHPVRVFTTFTEDLHRLADWLAQCGVTTVAMEATGVYWIPLYEILEQRGVRPCLVNARHMKNVPGRRTDWHECQWLQFLHSVGLLRAAFRPEEDICAVRTVLRHRSELVMAATQHVQHMHKALTQMNLQIHHVISDITGATGLAIVDAILAGQRDPAELAKLRDVRIKADPETIRKSLVGNWRPEHLFTLRQSRELYRIYQQQIVECDVQVETMLGKFEPRIDPAEKPLPPDRKRNRTGKKRRKKMGHPNPGFDLRTEAYKLFGVDVTQIPGLEENTLPLFSEVGRDMSRWPTAAHFVSWLALCPDNDISGGKLLWRGMRVVKNRAGHLFRLAAYSLHHSPTPLGNYLRRMKAKLDSKAATTATAHKIAVIFYTMVKNQVEYDETIWAARDAAREKRLEAKLKRQAKQLGYQLVPIEHKPAA

SEQ ID NO: 493798 - protein, 384 aa, unidentified
MKQTQETLRKEDTTKQKVLYIAFELGNTEWKLAFSDGSKIRYVSIDARKLYQVEREIERARKHFGLAEGIQIVSCYEAGRDGFWLHRYLVSRGIENLVVDSSSIEVNRRRRRAKTDRLDAGKLLGMLQRYVGGEQRAWRVVRVPTEQVEDERNIGRELDVLMAERTMHSNRIKGLLVQQGIVIKNVISKKFLNKLEVACRWDGQRVAGDFKARIVREHERLRMVYEQMRRLKKERAARVQRQATRSMKQVVQLQKLRGIGPESSWDLVMEFFGWRQFQNRRQVAALAGLTPTPYDSGGSVREQGISKEGNRRIRALSIESAWCWLRFQPESHLSQWFEQRFATGGKRMRRIGIVALARRLLIELWRYLNTGVIPQGAHLSRQET

SEQ ID NO: 493799 - protein, 358 aa, unidentified
MAKSTQSTSVIGGVDTHKDLHVAAVVNDNNQVLGTQSFATTRQGYKLMLTWMRSFGDLKRIGVECTGSYGAGLLRYLQGADVEVLEVTAPDKLDRRRRGKNDDFDAQSAAHAAFAERRTVTPRSRDGMVESLRILKVCRKTAVQARRVALQIIQTTIVCAPDRLRDLLRNMTRMQLIRTLAAWRPDLTGYRDVEEAYRIALKSLARRYLELHDEVADLDDMIAAIVKDLAPELIARSGVGFNSAAQLLLTAGDNPERLKSEASFAALCGVSPVPASSGKTARHRLNRGGDRAANSALHIIAIGRLRLDPETRAYVARRIAEGSSKLEAIRCLKRYIAREVFNIIMRRHKQINQSQIAA

SEQ ID NO: 493800 - protein, 357 aa, unidentified
MSSNMKKYIGLDVHKEAIAIAVLNGAGKLVMESIVETKASTLLDFLHGLRGELHVTLEEGTWAAWLYDVLKPHVEEIVVCNPRRNALLKEGSKSDKVDARKLAELLRGGLLRAVYHGENGLRTLRELARSYLTISKDQARVMSRLKALYRSWGIPCSGTQVYAPRDREQWLSKIAQPGVRRRAELFYQQMDGLSVVRHTVRGELLAESRKHQAVKILRQIPLIGPLRAALLLALMQTPHRFRSKRQLWTYSGLGVETHDSAQHRYVDGQLQRSKKPQQIRGLNQNHNHEMKRIFKSTALSASRCAGPLQDFYAGLLARGMKPEMARLTLARKIAAITLTLWKKGGRFDAEHLKSQAA

SEQ ID NO: 493801 - protein, 354 aa, unidentified
MVIVGTDVHKRTHTFVAVDEVGRQLGHKVVPATTPGHLKALNWAREQFGEHLLWGIEDCRNLSARLERDLLSMGQAVVRVAPKLTAQTRASARTRGKSDPIDALAVARAVLREPDLPTACHDTGSRELKLLVDRREDLVAQRTSTINRLRQRVHELDPAAEPAPKSLDRARPCATLASWLDTQTGILAELARDELADIIRLNDTINALTVRIEDRVNDVAPALLTLPGCGALTAAKIVGEAATVTRFRSEAAFARHCGTAPIPVWSGNTAGRVRLNRSGNRQLNAALHRIAITQLRIPDSAGQRYYRRRLADGKTTKEALRALKRHLARTVYHRLHTDEAARTTPPTNDLHTAA

SEQ ID NO: 493802 - protein, 324 aa, unidentified
MKSKSLELFIGIDICKDRLDVADDSESIPWSVANDDSGISSLVDRLKALQPALIVMEATGGLETLLYAALTTAGLPAVVMNPRQVRDFAKAMGTLAKTDALDAQVLARFGAAIQPEVRPMKDDTTQELTALVTRRRQLLAMLTAEKTRLQQAAKWIRKDIKAHTVSLEKLLKKLEGHVAEIIKKTPGWKEKDSLIRSVPGAGNVLSMNLLSSLTELGTLNRREIATLVGVAPLNRDSGNFRGKRMVWGGRAQVRAALYMAALSASRYNPVIKSFYQRLIAKGKKPKVALTACMRKLLVILNTMVKTQTAWNPNQFSPLDFNHGC

SEQ ID NO: 493803 - protein, 418 aa, unidentified
MAFKIFRKNCCGLDVHKTWIYACIGITDTDGRTEYKQARFSSFSKGLGELCDWLAKYHCFEVCMESTGKYWIPVFNILEKSGLSVVLAHPKYTKPQKGNKTDRKDAKWICDLFMCDMVRPSFIPPADIRHLRELVRCRFKLTCMITGKKNRAQNCLTVSNLKLDDVFSDVFGKSSRSITEQLLAHPGEFFDVAPFVDGRCKTPIEEIQAAVDGAISPEQAVKLRQCLNHIDELEKHINETTQEILRLGDRYPDILKLIRTVPGFNSNPLTAVQILSEIGGDMSVFPSAKHLVSWAGCCPRNDQSNQKVKSTRISRAGTYIKPLLVQIANSLLRSKKHPEITERYKRIKARRGHKKAIIAVCRMLLTAIWHMLSDLKPYTPDGFLEPRPVEKSKVLTTAQALSLLKQRGYVISDAAAMN

SEQ ID NO: 493804 - protein, 326 aa, unidentified
MGAVVNQIPSSFASPLFVGIDVSGPFLDVAYHESSETFRLPNAPEGFAELIHRLLPLKPQLIVLEATGKLERAVLQALCQAGLPAVAVNSKWVRDFARSTGQLAKTDRLDARVIAHFGATIKPEIRPLTDEQTQQLQALILRRAQLIEMLTAEQNRRKRAHKSALPSIDEFIRFITQRIKDADRDIDAFLHANELWRKTEALLRSTPGIGKTTAAALIAFLPELGSLNARQIASLVGLAPFNSDSGAHRGERHIKGGRHIVRRALYMACVAAQRANPNIKAFCDRLRAKGKKTKVAFVAGMRKLLTQLNAMMRDRTPWNPPHHDHL

SEQ ID NO: 493805 - protein, 317 aa, unidentified
MKRGKRNTKCGGIDVGKRWLDAAVHGLSETLRVGNDAEGIARLIAWLEGHGARRVGLEASGGYERLVRSALEAAGFEVVVHQPIEVRLFARLKRLKAKNDRLDAALIAAATAQVDAVKAAADPRLQELAERLTAYEQVSDQLAELKTFMEQVRLEDVAADFGRLMSALAELKQKLLRQVIAQIKAHSDLLARYRLLLSLPGFGPAVSASLVVRMPELGQMHHGQAASLLGVAPFDRDSGQFKGMRFIFGGRARPRRMVYLAALSAKRCDPTFKARADRLLARGKAAKVAIVAVMRHLIETANLVLARGQPWSKTAPA

SEQ ID NO: 493806 - protein, 340 aa, unidentified
MKYIGMDAHSRTSTFVVIGKSGRALRQERVASTEKELLGFVRSVKGEKKLAFEEGVMSQWLYLLLKDEVDELVVCQPRQKEGAKTDAIDAGEIADLLRVGRLKSVFHADSALMELRTLVSGYDDVIEELVRAKNRYKALYRQVAVPVDGAGFYESEEMISRLDTDERRYVACTVFEQLGLLEEQRRGYVERFEANVRSHKPIRLLTSIPGIGPVRANQIVAVMVTPHRFPDKYHLCSYAGLTKHKLVSDGKLYGRKRAHGPTALKRVFRSAALSAMKSNTAFRRKYEAKRSAGGDDRAARGAVARKLAATVLGVWKSGKRYDDKHTEVTQRRNQDCHSGA

SEQ ID NO: 493807 - protein, 355 aa, unidentified
MSQEKYIGMDVHQATISVAVMDAQGKLIMECLLETKAATIVEFVRGLQGPLSLAFEEGTSAAWLHDLLKPHVDRLVVCDPRKASLLKDGNKSDRIDARKLAELLRTNQLKPVYHGEHGVRTLKELGRSYLTLTQDVTRVMNRIKALYRSWAIPCSGTTVYAPRHRAEWLAKIGEPGVRLRAQRLYQQLDGLQPVRLQARLELLRESHKHPAVKLLRQIPSIGPIRAALLVALLQTPHRFRTKRQLWAYSGFAVETHDSGEYRCVRGKLQRNRERITVRGLSHNYNKDLKNLFKGAAISASTRPGPLHDFYAARIAQGMRPTMARLTLARKMAAITLTMWKKGVGFDPQQLHRQAA

SEQ ID NO: 493808 - protein, 431 aa, unidentified
MKKGMNQKIEEMTARTLIVGVDIAKSVHWARFVDYRGVEIGKAVSFTSDKVGFEAIITQIKKICNLKILKEPYNHVVIGMEPTGHYWKPFANYLIKREYRVVCVNPYHTKKAKELDDNSPTASDKKDAITIARLIKDGRYFNPYLPEEIYAELRILTNIRHGILKRNNAAKNNITAMIDEYFPEITTVFKNPLTGKACRQVLKSCPFPCQILSLGETGVLEEIKKAVKKTVGMKKVRELIEAAENSVGVDYGLESAKLKLRILLDELELVEKQLDEVEATMEKMLDSTGYSKQILSIKGIGVISAASFLGEVGDPLRFDNARQISNYAGYNLTEDSSGKNKSGTCISKRGRKQLRSVLYKMALVMVAKNNEMKQLYYYLKTRKNNPLKKKQALVVISKKIITIIYSLFKKQETYNPELVLGAVRKEMMLVA

SEQ ID NO: 493809 - protein, 523 aa, unidentified
MSVTRVRQRSRSRRREVLQKPAGVIHVRVQKVGPEHFGIVGVDCAKARSKWMLCDFFGNVLIPPTVVEHNRADLEAAVARLREAQQLHALHDLIVAVERTGRYHHIVRQALAAAGYEVRIVHPFTTKRYRQVSDPGNKTDDTDLAAIHRAAVNGFALLERPVEPIWRELQLLVRHRRDLVFKTSALSAQIREHLEAALPGFASCFDKLWDRALAWTLLRHFESAPAMHAAGLPKLLELLRRQEVRFQRPTVERVLAWAGQAAASDEAAALHRRIALALYDDRTRKTQEILERERDIAGYLTQTPYVLLLSFPGINVVSAADFAGEMGPIANYANARCITGRAGLCPSRHQSDQVDLRNGPLRRCANRRLRAAILGIADDLSLCNHHFDALAVRWRAAGKDPRHTHVKVAQRFCRIAYHMVAGGQVFHHPALQQRHYILDKLLAFHREHDTPMPQTLTGLETAVGHIPSSAHADEAKPLAAELLRIHAGRRRGPQRLSDILPLVLARLGVGAVQSTESGERDST

SEQ ID NO: 493810 - protein, 370 aa, unidentified
MEKYKFVGLDVHKETIAVSVADPDGGETRYMGEVPNTPDSVVKLVKRLGKEGVKLSFCYEAGPCGYGLHRQLKDLGQVCQVVAPSLIPRKPGDRVKTDRRDSLNLARLHRAGELTAVWVPDGAQEALRDLTRAREDMKHLQRQAKQRLLGFLLRHGKRFEGKDNWTKAHFRWREEVKFEQPLQQIVFQEYVDSVQAMARRVAGLDEQMKSAAGESVFRPLIEGLMALRGVQLVTATTIVAEIGDLRRFANAPQLMAYLGVVPSEHSSGESKSRGGITKTGNGHVRRVLVEAAWQYRYPARKSAFLQRRAERASEQIQEIAWKAQKRLCARYRLLEARGKLKVKVCIAIARELTGFIWAIGQTLPQPAARG

SEQ ID NO: 493811 - protein, 469 aa, unidentified
MIYSVGIDVHKGRHRVYCLDERAQVCDAFSFQTTPEGLSTLGERIFKDGSSPVVVFEPAGLSWLMVAAYLRSQRPECRLVKAKGQKVAALRRYLRTSAKSDRIDALTLAKMPFIDPERLDELYLAPAETQALLRLTRQRKRLEDQRTAHKKRIGAIVDGYLPGVRQAFSYAWSIRARAFFHSGINLFKVVREGEEALCHFFVQAKPRDKGGKAEGHLVYRACQNALAIVELCQAAGSLSEEFYTDLQDEIDRELRLMEAAEAEIEALDRRIEELYRRLHPSDNLRTIPGVGEHTAPAFVACIGDPARFPSQSAFANWTGAVPGAKQSSETESKGLRMTKAGPAIMKWALYQVGQIGRQWDPQLAAVYYRQMVYHGKTHKQAMGAVMSHIGARVFTVLREDRAYELRDTEGKSITTMAARALILAKYQVSEDIRKERRRSKGRKGITAIVWKRGGCWSATYTRQPELLKL

SEQ ID NO: 493812 - protein, 401 aa, unidentified
MMEEAYVGVDTSKDTFEVAIKDCRKNELVKTTNYNQNLQGIDDLIVQIEAVKNTMNADILIGMEATGIYHLPLYHELMKRGYKVRVFNALELVKFRRGKIRKTKTDKIDAGLIAEALIYEEYKPIKAEVPENIGTLREYCRIRERIVYKLSTCKVQATRDLDIILRGYDKLFDDTFCKTSRYILKRYLKRNSIQTPIESDITGLLNKYMNRSRAEDKARKICQVFKNALTVNHLIDPAIYELHLLISQMELLEKQIMKIQNKVEKVFSSIKSKIITIPGVGIPTGATILSEIGNIDNFESATKLVAYAGLDPVVKESGNFKANNTDISKRGSPALREALYLAAFGSLNSNPVCKAVYDRMISKGKHFKVAMCAVARKLLHIIFSVLKNNKDFYIPQYIKSS

SEQ ID NO: 493813 - protein, 340 aa, unidentified
MKKVSTIGLDLAKNVFQAHGADASGAVIFRKKLRRAQVLEFFATQPACTVAMEACGGSHFWGREIGNYGHRVRLIPPAYVKPFVKRQKNDAADAEAICEAAQRPTMRFVAVKSEAAQGAAVVFRTRDMLVRQRTQIINALRGHLAEFGLIVAQGPAHVAKLIMAVQDPKQPLPEAARPILCVLVDMLGLLDQRIKLLDIAIARRAKEDEVARRLMSIPGVGPVIATAMAALAPPAETFKRGRDFAAWLGLTPLQHSTGGKQRLGATSKMGERTLRRLLIIGASSVVRWAARKGAPAGSWLASMIARKPAMLVRVALANKMARVIWALMAKGGTYRAPVVA

SEQ ID NO: 493814 - protein, 486 aa, unidentified
MLFGDAAQAVFPLGRFILHYDDRAPDAETKKIQPIVSMKSLPVINPHAAALDVGSEQLHLSIAGDEPVVFGTVTDEVYRLRDYLQRQNVTSVAMEATGVYWLYAYTVLEAAKLELVVVNGRHVRNLPGRKTDMADCQWLATLHAHGLLRGGFVPPAAIRRLQDYQRLRADHIIGAASQVQKMQQALERMNIKFHDVISDLVGVSGLKVVRAILAGERQPEQLLGLCDVQIQKKKRERVVASLRGTWTPEHLFALGQSLAVWEFYQKLMAECDRQIEAVLKELAGPPPPSEDNRQASPAGKPPGKNAPQIDQFHQLLLRLCGGRDVTAIAGIGDYLLLQLLAETGTELKAWPSEKHFTAWAGLAPGTRQSGKRKGSVKVQRNRAGRLFCAGARSLVQSVDKALGGFYRRLAARKGGLVALKALARKLAQLYYRVLKHGLAYAEQGLRAYEQKYAESQRRLLTKLAAKQGFQLVAVAPQNSQQPACSA

SEQ ID NO: 493815 - protein, 320 aa, unidentified
MSKKKPQAFIGIDVSKRLLEVAVHESDYQFRCANRASAFGELIVELIALRPALIVLEATGGLEIPVVAALHAAGLPVVVVNPRQVRDFAKALGQLAKTDRLDARVLAHFGAAIKPPQRPIKSAEELELDALVGRRGQLIEMLIDEKNRRGSAATDTVRDEIKQHIDWLEERIAELDEQLKALLKSSSVWQAKDDVLQSVPGIGPVVSFSMIADLPELGTLNRQQISKLVGVAPLNRDSGPQRGTRHIYGGRVIVRCRLYMAALTATRFNPVIKEFYDRLMAKNKPFKVAITACMRKLLAIINVMIRDNQRWKTNDEPVLP

SEQ ID NO: 493816 - protein, 343 aa, unidentified
MEYFVGMDVSMASISICEIDAKGTVIREGKVSSTPEAVATWLEESGRGFARIGLEAGPLAPWLYAGLSSRGLPVICIETRQMKAFASASPVKTDRRDARSIRSADRTGLYRATHVKTARSQELRMVLTHRETLVHQVRQLSNTVRGTLKAFGLKVGMARGRLFAARVRELTADNPHLSAAAEPLLLARQALLEQLDKLDRQVHAAARDDSVCRRLMTVPGVGPVTALAFRTGLDVPERFQKSVMVGAHFGLVPRRYASGEQDRSGPISKCGDAMVRWLLFEAANALLTRTRRWSWLKHWGLAVAKRRGMKRAKVAVARRLAVIMHRMWIDGTDFQYRKEETAI

SEQ ID NO: 493817 - protein, 425 aa, unidentified
MPYQIAGIDVHKKMLAVVVADVHVDGEYQFTHRKVGTSPSELRALADWLLECDVEEVVMESTAQYWRPVWETLERYWKPQRRSREGASPMSGTLHLAQAQSNRGAGGRKKDFPDAERLVKRLVAQELTLSFVPDAEQRLWRTVMRRKYQITCNRVQLHNRLESLLEEAHIKISSLVSDLLGTSARRMLQALADGETNPATLAALADQRLRATAHQLSDAFSACTTLNPVYRWLLKLALEELRLIEDHLGQLDQQMADLLAEHHDAVQRLAEVPGLGADSAQQIIAEVGATAATFPSPKHLASWMGACPGNEESAGVNYSHRCPKGNRQMRRVLNQAANAAVKAKGTIFAVVYRRLVPRLGHAQAIGAIAHRLCRLIWKILHQGIRYEERGPAVTKEARQARARKMIRELRILGYRVELVPHAPTA

SEQ ID NO: 493818 - protein, 345 aa, unidentified
MTEAYDGRQVVGMDLHRRRSVLVRMTMDGRKLETARIENSPAALRREIAKAGKNPLVVLEATYGWYWAADVLAEAGAEVHLAHPLGVRAFSYRRVKNDERDAADLADLLRAGLLPEAWIAPAGVRALREVVRYRHKLVQQRTSCKDQVHAVLAKLGVPVTHSDVFGRGGGLWLDQLVLPAPYAGKVASLRALIGVLDGEIARLGDQAAAMLAADPGYAAVRELDGIGPVLAAVICAEIGDVTRFRKPGQLCSWAGLTPRHYESDTKVIRGHVSKQGSKMLRWALTEAIQHQPAGTRPREAKEAIIARRGEQARNIAKTAAARVLLTQVFYALRDGHARSAGRPAA

SEQ ID NO: 493819 - protein, 442 aa, unidentified
MRLLNANANEHPLRIKLSAHIRTGITMEPQRNKVCGIDVHKRFLIATILSRDGKKDTQRFSVTLEDLLKFRDWVIENGCEQVAIESTGIYWHPVHSVLEGKIDLIVANSYKIKHTPGRKTDVSDSEWISELCLNGMIEPSRIFPKDDRELRRLTRAREGYVKQMTQEKNKIHQSLDSACIKLASVISDIFGKSGMYLLNCVLEGRDLDEIIEGIPSGRLKKKADQIKESIKSRLEISQVILIRGSLSLMKSIQERIDELDGEISARIQYRKNDLAIAMSMPGTGFVSATAILAEIGNCTDFKKPEQLAAWCGLVPSLYQSAEKTILGGITKQGSKHIRRMLIQVAYAISRTKDSKLKKFFLRIQAKKGSKVAAVALARKILCILHHLLMNQEMYIEDRDKKNKRQKTLTPPSPIEMPIQEMIDCIVRAGYVVTKSDSIGGFG

SEQ ID NO: 493820 - protein, 312 aa, unidentified
MTQTTIGIDISKDRLDAHRLPEGSTKSFHNDKKGCRALLAWIGRDPVARVVYEATGAYHRQLESALGQAGLPLARVNPRQARRFAEAIGTLAKTDRLDAAMLARMGAALQPPQTHPADQALADLKDLHLARRALVKDRTAARNRQKILRLPLIKRQIAQRLRQIDRQIQAIDAAIGQQIQHHPDLRRRFEILISIPGISNTTAATLLVEMPELGTLQPRQTASLAGLAPVTRQSGTWRGKAHIRGGRANLRQALYMPALVAARFNPDLKAIYTRLKNAGKPPKVAITAVMRKLIITANALLRDNRKWTHQRP

SEQ ID NO: 493821 - protein, 430 aa, unidentified
MKSNTQNAKIEAITEKTLVLGIDVGSEMHYARAFDYRGIEYSKKPFKFINTEAGFVTFKEWILDLKERHEKDKVIPGMEPTGHYWFNLGKFLQDNEMKPVLVNPHHVKKSKELDDNNPTKNDRKDPKVIAGLVREGRYMIPYLPDGVYADLRTASNIRFQLQAELTRIQNRISRWFNIYFPEYKTVYGKPDAKSGMLILKAAPLPEDILTLGIDGVNQIWRDAKLRAVGKARAKTLIEAAEHSVGSKEGAVSARMEIRMLLEDYESRNTRLQEVMVLIEELVRKIPMAEKLLEIKGVGIRTVSGFLAEVGDISRFNNPKELQKLAGLALVENSLGKHKGETTISRRGRKRLRYLLFEVAMSLVSKNQEFRELHNYYTTRRLNPLKKMQSLMAIAAKLIRVFYAILTKGVDYDPKKMVSDIKRPAVYLQAA

SEQ ID NO: 493822 - protein, 338 aa, unidentified
MKLYGAIDLHSTNNVMVVINEHDQVVYQKRLPNDLSLIAQQLSSYRRSLEGIVVESTYNWYWLVDRLMEKGYRLHLANTAAIQQYNGLKYTDDHSDARWLAHLLRLGVLPEGYIYPKQERAVRDLLRKRGQLVHQRTANLLSIQSLISRTTGNSISAQYIKALNIERVDGVLPNSDLVLALKANLAVMNSADGQIEILEKAVQDRVKLRPQFRFLKTVPGIGPILALTIMLETGQIERFASVGNYASYCRCVGSKKISNGKRKGSGNTKNGNKYLAWAFVEAANFAIRFNSKIKGFYQKKKSKRNAIVAIKAVAHKLCRACYYIIKDQVAFDITKAFA

SEQ ID NO: 493823 - protein, 341 aa, unidentified
MGEVITIGLDIAKSVFQVHGVDGVGAVVIRKRVSRAKVLEYFGELPRCLVGIEACPSAHHWGRELQALGHTVRLIPPNYVKAYLKRSKNDANDAAAICEAVTRPSMRFVPIKTKEQQTVLMLHRSRQLLVRQRTMLSNALRGHLAELGIVSAKGRHGMAELLRIIADGRISSAVCNILEVLARQHSAIGIEIASIDKNIMALHRASEASRRLAEIPGIGPIVATALVAEIGDWKAFESGRSLAAWIGLVPKQCSTGGKERLGRITKQGNRYLRWLLVVGAMAVIRYARKYGTEKRPWLGRLMERRPTKVAAVALANKITRMAWAIMVRDERYKEPKLLLAA

SEQ ID NO: 493824 - protein, 344 aa, unidentified
MERYLGIDPHRDSCTLALVSPRGKKVKQMVVPTDGSALVKAVRELRGPLHVCVEEGEWGEWISEILTPWVARLVVCRPEKRRGPKSDACDARELAERLRTNRTGPPVYKPSVEWARLREAVRLESKLTQDLTRTKLRLNSLYRRRGVTCPNGDLYLPRHRGKWVVRLPPSGRPCAELWGEQIDLLGELREKAERQMHAAAAKFPIWRLLQTAPGIGEKRAAILLATVVTPHRFRTKRQFWSYCGLGIVTRSTSDWVQQSGHWVRAPVIETRGLNRSANRPLKAVFKGAALSARRMLPPNPFRDHYDRMLEAGTKPNLAQLTLARKLAAIVLAMWKTESEYKTMS

SEQ ID NO: 493825 - protein, 398 aa, unidentified
MIAVGIDVSKSKSTIAIINSDGQLLLKPKNYNHTSNDLKGLIDLIKGYQDDVKVAMEATGHYHYPILKALLNEHIYVSLVNPYVMKKYGDSNIRKGKTDKKDSIRIAYYVIEKSYQLSPYTVVDQKYDDLKFLSRQYNQVVTMKVKSRVQLGNLLDETMPGIQTLFASNNASNPSKNIFLDFIEKYECFDNIKKMGEKRFITSYIKFAEKKRCRNIQAKALAIYELAQNSITTRSTDVSTSIALHQCINLLKQCTESSNQLLVQMQSISFTLPEYTTVRAMHGVGDKLASRLIAEIGDVRRFTSGKALNAYAGNDAPPYQSGQFEGTNRHISKRGSSSLRKACYEVMQALKLHKIVDDPCYQFMIKKEAEGKPKNVAKMAGVNKFLRIYYARVMELYN

SEQ ID NO: 493826 - protein, 320 aa, unidentified
MAKIICGVDISSKVLDVFLNQSFHRFPNTVAGIADLLVLCQQHQVDLVAVEASGGYERRLYLQLWAAGLPVAICNARAVRDFAKSMGRLEKTDTLDAAVIAEYACAKKKLVAHPPQPGEHQPLRALVARLRQLTEVRASQLQQRLLVTDDEALATFTRLIGFLNSEIRQLEQRITQLIDADPLWQNLDRAFRSIKGVADRTVACLMAELPEIGTLSHKAISKLVGLAPLADDSGKRRGPRSIRGGRSTVRHLLFIVASVVRRYHPDFAEFSQRLAAKGKAKKVILVALAHKLLIRLNAKARDARQLMEMASPALTTTLSS

SEQ ID NO: 493827 - protein, 342 aa, unidentified
MNYYAGIDVSLEASSICVVDASGKIIKEAKVLSEPEALIAWFQALPFTLARIGLEAGPLSQWLYAGLKDAGFAAELLETRHVRDAFKAMPVKTDRNDARGIAQLMRLGWFRPAPCKSAPAQETRALLTARKLVQGKLYDIEMSLRGILRGFGLKVGRTKKAGFASRIMELTEHHPALKAIAKALLTVHEVLLKELNRFENQVRKLARSDARARLLMTTPGVGPIVGLTYVAAIDDPARFSSSKMVGAHFGMTPKKYQSGDIDVTGRISKMGDKSVRAALYEAAHVILTTPVKGGALKSWAAKLARRAGMRKAKVALARKLAVILHRMLANGASFDAAKAAAA

SEQ ID NO: 493828 - protein, 378 aa, unidentified
MKSTQAILQTKDMAIERALYVSFELGDKAWKLTICDGQRAPARFTIAAGAQCAVLQCIAKSKVRCGLPPDAPVYSCYEAGRDGWWLHRWLKEQGIHNIVVDSSSIEVNRRSRRAKSDRLDGDKLLAMLLRYYRGDTRVWSLLQEPSPQAEDERRLHRELQRLVRERTAHTNRIRALLVLHNLRPAHVGDRAWLQWWPAHQAQLLPQLRWEIERELQRLDLVKQQIHTIEAQRTHELAQQRHPLVSRLIQLRAIGVCSAWTLVKEVFGWRRFGNRRQLAGSLGLTPTPYSSGDSHVEQGISKAGNKRVRALLVELAWRWLRLQPHSQLSRWFNQRFAHGSKRMRRIGIVALARRLAIALWRFVEHGEIPADAMLKPISA

SEQ ID NO: 493829 - protein, 327 aa, unidentified
MERTRLGLDIAKGVFQAVLVAERSRLVWKRRWRRPQVLSELARLEPTMVLMEACGSAHYWAREIEALGHTVWLLPAQHVCAYRQGQKDDVTDALALVEASYRAELHPVPIKSEAQKELKLVYQVRRRLIQARTTLANQTRGELSEFGIVLPQGLNVLRRQLPTLLSRLRPRVAELMNQQYDELVALDQQIAAVTRTLERLAAEREDCRRLMQLPGIGPITAVLLVAHCCPHAYRNGRSYAAVLGLVPRHDNSADRVRLSRLTKHGQRELRTLLIHGGRSVLKYAARHDDRLSRWALEVAARRGKNRAAVAVANKLARYAWAELKRAA

SEQ ID NO: 493830 - protein, 355 aa, unidentified
MSIIKQVFGIDVSKDSFEVRFGTITDRQEERFVAAASFPNARRGFLRLLAWAKKQLVSDEAPVWFVMEATGIYYEQVAYFLAEHQQQTVVLLPNKVKNFAKTLDNKSKTDGLDARTLCQFGLERPLIPWQPPSPQMRTLKALTREYHTVQQMATQVKNQLHAKDHSYEPSQETLTRLRAQLRLFQKQLKSIEQQIRSLVERDDDLNNRINNIILAKGIGFMTVVTTVAETNGFALITSTKQISSYAGLDVVIKQSGKRQGKPAISKKGNKHLRRAVFMPALAASRYNPTLKTFYLRLVRTKANKKVALLAVARKILCLIYTLWKKNVPYDPNYRHPMAANMRSDSNILLLKPLDS

SEQ ID NO: 493831 - protein, 333 aa, unidentified
MQVYGIDLSKDKFDVNYLDASGQQKKKTVKNNLSAISSFLSTVPEGSVLCAENTGTYGDLLLFLCNQLQVTIALVPGYSVKHSLGLVKGKSDEVDAGRLREYGERFFDKLSFKTYQSEQISELRQLYSLRSQLVKSHKVLKTGSHGRSVMPMQSISAQGYLESSLQFIDQQIDAVEQEMLDIITANADLDENYQLAVSVKGIGPVIATDLIIKTGNFREIDTASKAASYAGVCPFPNSSGKMVLKTKISPFGDKKLKTLLYMGAKSAVKHNKEYKLYYQKKRQENKPHYLIMNNVSNKLLRTIYSVVCNKIPYTQDYICLDPRERNLTGSEKK

SEQ ID NO: 493832 - protein, 449 aa, unidentified
MSQSNQPINGIPVIHPRAAGIDIGSRFHVVAVPPHLSDEPVQTFQAFTADLQRLAVWLQSIGIETVVMESTGVYWVSVFEVLESAGIDVMVANARETRSVPGRKSDINDAQWLQRLHACGLLRASFRPGRDVAALRAYLRHRERLLDYTASHIQHMQKALTFMNLQLHHVVQDITGATGMKIIRSIVKGERNPDVLAKLRDIRCKASTEIIRSALVGNYQPEHVFALTQSLALYDFYQARIHECDEQIEQSLAILNTDKPLPDQPIPQARRRTKQHNAINFDVRSALYQLTGTDLTQIHGIGPFLALRLIAECGTDLSKWPTAKHFTSWLTLSPGCKISGGKVLSAHSRKSTNRLTAHLRLAAVTVGKTQTALGAFYRRLAARIGKAKAVTATARKIAVLFYNTMRFGMSYVDPGADLYEQKYRERVLKQLHRRAAQFGLELHPAECVS

SEQ ID NO: 493833 - protein, 352 aa, unidentified
MNEITTVGVDLAKNVIVVCAADASGRTMFFKQLGFRGFAQWAANLPPCTIAMEACSSAHFWARTLSGLGHRPKLLAPDLVQPFRKSKGAKNDRNDAQAILITALQPDMRFVSVKSVEQQSILAVHRMREGWKSERTALINRVRGLLAEFGIWLGRSPQTLTRRLPQLMQEDQLPARVRALLAQAHGQLLQLEALMQQCELDIQAHARHSEAAQRLGAVNGIGPITASAIVATVGNAADFRNGRQLAAWNGLVPKQSSSGGKERLGKITKRGDTYLRGLLTQGARSTLNAALARPPDKRSQLEHWIVALRHRVGYHKSLVAIANKHARICWALLARGERYDPHAASRYPRAAA

SEQ ID NO: 493834 - protein, 350 aa, unidentified
MSQNLNSAVAVIGIDIGKNSFHVVGLDDRGAIVLRQKWSRGQIEARLANMPPCLIGMEACVGAHHLSRKLKALGHDARLMPAKYVRPYSKGQKNDFRDAEAIAEAVQRPTMKFVATKTADQLDLQALHRVRERLVSQRTGIINQIRAFLLERGIAVRQGQRFLRAELPRILAAPPEVLSARMVRVISDLAEDWRRLDQRIDYLSSEIAVLARQDAGCERLMSVPGIGPIISSAMVAAIGTGDAFAKGRDFAAWLGLVPKQISTGDRTILGKISKRGNRYLRVLFVQAAWVVLIKPMSWERHGLKHWIEAARKRLHRNVLAIALANKLARIAWGVLAGSGRTFEASKLQAA

SEQ ID NO: 493835 - protein, 416 aa, unidentified
MKKNSKSPMKKEPRAKGAKAQRPVQREAKEVLAELVEKLRGKLEVKATSVSPSEAGPRAELGPNVDRLTVGVDLGDQWSHYCILGLQGETLSEGQLQTREAEVAEFFQALSPARVVMEVGTHSAWVQEIIAGEGHEVVVANPRLMEGSKRRKRKNDRIDAKKLARLGRVDPQSLHPIRHRSREVRQDLVVLRAREALVAARTQLINATRGLVKSIGTRLPQCSSQSFGQKVKDAIPEKVREALLPMVQFADALSDCIQSYDQKIQELGSEKYGHTKLLRQVKGVGPITALAYVLTLENPEHFAKSRDVGPYLGLVPKQEDSGESQPQLGISKTGDTMLRKLLVGSAHYILGPFGPETDLRRYGLRLCERGGKNAKKRAAVAVARKLAVLLHRLWVSGEVYEPLGYASSGAIAQQAA

SEQ ID NO: 493836 - protein, 388 aa, unidentified
MSKPFDLSKSLAALDQDSTLIVVIEMSQSSWLVAARAPGLARDPLKKLPPDPEQLFKLIDRWREESRRAGRVVRRVCVAFEAGRDGFWLARLLAQHEIEVHVIHPTSIPVKRDHRRAKTDRLDTELLMRAFLGWLRGEADHCSMAAIPTLAEEDAKRPTRERESRVNARSRLVNRMKGALARLGIRGFNPKLRKAAEKLEELRTGAGEPLPPNTLAELRRDMAQLRFVADQIKQIEKAREARLEKAPREGAHPMVLMLASIKGVGLETAEMLVAEVLSRKLRDRRAVARYGGLTGSPDESGSRSREKGLARSGNARVRRGMIQLAWRFLMFQKESALAKWFEARTANGPRGVRKTMIVALARKLLIDLWRFVEDGTMLVGVELFDSRA

SEQ ID NO: 493837 - protein, 425 aa, unidentified
MFSRVKIACGLDVHHSKIVGSIVTSYGTHETRTFTTNIDDTLKLKDWILTHKCERVAMEATGIYWYPIYNLLEEYVAVQVANPLFIKGIPGRKTDQIDAEWIGMLCLNGLIKPSIVPKREVRKMRDLVRTMTGLTHERTRHKNRIHKIMVRAGIRIGAHLSNLYGPSGLKILIGLLEGKSIDTILLDLKSTKITKKRDELVQSICGTLDENDVYLIRLELDSIEFINHQIEDLKPRLTYLMTPMNDDINILMTIPGIGQDSAMKILAEIGDIHLFPSGKHLVSWAGIAPGMNESAGKKTPGHITKRGSKYLRTFLIEPAHAIARMKSDNQLKRYFSRMVGRLGYKPAIIALARKLLMIIYHLLANHEPYFEENFSKKKPIKLPVASPPSMTADQILNIMSDAIANMSEVDRAEFVRKLNRIRTPG

SEQ ID NO: 493838 - protein, 429 aa, unidentified
MNDAASLSNPIVAWIGLDWADQKHAVCLQATESVLLEQTVVEQAPEALHSWVAELRRRFPQGLIAIALEQSRGSLFYALMNYTFFLLYPIPPKSLKDYRQALYPSGSKDDPVDAQLLLEFLRKHPKRFRPWRADSAETRQITLLNEQRRQLVDDRTALTNRLTILLKGYFPQALEWVKDLRTPLAWDFIDQFPSLERAQQASRLAVLQVYRAHTRRPPEELEALCDQIQGARPLTTDRAIIESSLLMAGILVAQLRALAAGIEQVEQQVGVLFAAHPDHAIFQSFPGAGKALAPRLLAAWGSDRQRFASAANMQCFAGPAPVTSRSGKSQWVHRRFACPTFLGQTFHEFAAQSRLKSPWAKAYYQQMRNKGHDHHPAVRALAFKWIRIMFRCWQERTPYDELRYQQALNRRGSPLAQTLRQPANHAADA

SEQ ID NO: 493839 - protein, 343 aa, unidentified
MTFVGCDLHTRQQQVAVLDTTTGEIREQQLLHEGTTVEDFYAALPRPVTVGIESTGYAIWFHALLQRLGHTVLVGDAAKIRAMVVRKTKTDRRDALHILDLLRHDRFPSIWIPDPATRELRALLMHRLRLVRIQTMLKNGVHALALNQGLARGSKLLRRAGLAQLQALPLPPYTAQRRDQSLDLLATLRTHLDHLDDAIAAAALTHPDAPRLLTHPGVGPVTALATVVVLGTVSRFPDSKHVVSYVGLAPALSASADKYRLGKITKQGSALLRFVLGQAAAHASRLDPELTRTYRTLAQRRGRAKAKVAVARKLLVRLFIMLRDHIDYDEFRRRGRAPVVAPG

SEQ ID NO: 493840 - protein, 357 aa, unidentified
MGKPILNLSTVTRVGLDLAKRVFQVHAVDAKGEIVVTRKLTRSQLISFFAELPPSVVAMEACSSAHHWGRALIELGHEVRLIPPAHVKPYVRRNKSDQVDAAAIYEAMSRPGQRFVPVRSIDNQAELMRHRARELLAGQRTAALNALRGHLAEIGVVAPQGVQHAYDLKRLAGDGFNENGEVVVPDCVRVALRPLISQIDALDEAIGALDREIAASVKADATAKRLMTIPGVGPVTASAIVATVQDAGAFASGREFAAFLGLTPRQNSTGGKTRLGRITKMGDRYLRKLLVIGACATLRHRRGHSDALRLWASGMLERKTVKYKFKLTAVALANKVARIVFVLMTRGGQYDDRPVAA

SEQ ID NO: 493841 - protein, 456 aa, unidentified
MKNEKTAKLQIANLNAAGIDVGAKSYMVAIDQEKLNVREFGVYTKDHERLIHHLKCHGIKTVAMESTGSYWQTLFASLQAAGLDVLLVNGSQTKNVKGRKTDVIDCMWIQKLHALGLLSGSFLLSNVLQELRTYYFHRQHLIEQTVMYANKMEKSLRLMNIRLDIVLRDVTGKSGLNIIEAILSGDRDPKKLASLADVRVKKSQEEIANALQGSWRQELLFELQASLQFYKLYEVALIECDNLIEMKLTEYVPKENVFTGNDIQGKVNYKKTRKHSPAFNVSKISYDYFGTDLFSIPGVSHTTVLCLLTNIGNDIHKFPTGKSFASWLRLVPNNKISGGRIISSRSPSGKNYLAIALRQAANSIGNQKEHPLTPFFKRIAFRKGRISAITATARKLAVIIWNMLTKVQPYNKENKQTNNERHKHIQLRNIERRIGSLQLNQDELKKLFTRTSLLVT

SEQ ID NO: 493842 - protein, 458 aa, unidentified
MPKKSSNKAKSQRSRERALLQKVHLNAAGIDIGADAHWVAVPEDRDASPVRSFGVFTRDLVALCDWLKSCQVETIVMESTGVYWIPLYQMLERKGFEVRLVNAHHVKNVPGRKTDVKDCQWLQQLHTFGMLAGSFRPEAQMCVVRSYLRLRDTLSKDCNSLVQRMQKALTEMNVQIHRVISDITGVTGMSILRAILAGERDCLKLAQLKHPQIKSSAQDIAKALDGDYCQEHLFALGTALEFYDSYQLKIMACDRHVQDALSAFELKAKAPAPDVSRMRCAEKRLEALRRHHLEEMTGADLTKLPGLDLLAVERILSEIGLDMSRWPSEKHFCAWLNVAPNNRVSGGKILSSKPRKNANRAAAALRLAAQSAMQSKSAIGAFIRRIKSRLGAPTAINAGAHKLARLVYRMLKFGKAYVEIGQEAYEKFFKERILRNLQRKAHQLGFQVTPITVTVPVS

SEQ ID NO: 493843 - protein, 370 aa, unidentified
MSVRRILAKTINTDLEYEAIGIDLAKNCVSVALLTTDGEVVCIDRLDYSELEKSAQVLCPTTFAMEPCTEMNYLVQKLEAWGHRCLVIGGKNVQNYVENHYSGQKTDLNDAQALAFLAQDTQLRTIKAKDMEQQKYASLTTLREQYIKQYRQTIVSLKGICQAWGLNISKGISGKARLKDLIENHAAFPEELKESLVDMVTHAQTAQKALNKITKTLELLAKNDKVCQLIQTIPGLGPICSCRLRATIGDIQRFKNPKDFPAYYGLVPRSIATGHNEKKGRITHRGDKTMRSLMVQGAGSVVNMATKGKLKSKQLTKWILKKQKEKMPWGKLVCAVAAKLLRIVRAVLISRKPYNPKIAGVAKCSLPKGT

SEQ ID NO: 493844 - protein, 408 aa, unidentified
MNAVGIDVSKGKSMVAALRPMGEAALLPQEFLHTEVGLEQMAYAIIALGEDTRVVMEATGRYHEPVAAALHEYGIYVCVLNPLYIKQRGGGSIRKVKTDKADAMKIAKYGLDNWVDLREYTPMDTVRQQLKLCSRQYNLYMKTVVSLQNNLISLTDKTFPGVNELFSSSERADGHQKWVDFVMTFWHCDCICRVSEKAFTERYRKWCKRKGYHFSAEKALDVYAGSCGHFTTLPKNDNTRLLITTAAQQLLAGKTTLAALRAEMTRLAKQLPEYDTVYSMYGVGETTAAQLMAEIGDVRRFPRRSSIVGFAGVDPAVDQSGKHEAQSTPTTKRGSPHLRKTLYQIVYTYLRKAPEGEPVYQFLDKKRAEGKPYFVYMTASQNKFLRIYYARVKECLEAFDARQSLAQS

SEQ ID NO: 493845 - protein, 449 aa, unidentified
MREPQLIDDQEHERIFERVAAVDVAKASGMVCTRTPHPSRPGGRRSTVWMVTATMGAVRALAAQLVAGGIEKVTLESTSDYWRIWFYVLEEAGLDVQLVNASQAKQLTGRPKTDRADAMWLARLTGKGLLRASFVPPAEIRVLRHYARARTHLVQDRARCWQRLEKLLEDALIKVPAVASTLTTVSAQDMIAAPIADQRDPQVLAGLARGRMKARQAALAEALSGMFEDHHGELAQLLTEQIAFLDTRISRLTGRVSAQLAAIRDAWGIDPGGATGPGAGLGSDSVVLAAAARLDEIPGISAELAASIIAETGLDMTRFPTASHLVSWAGLCPPTSQSGPRTRHGKTGNGSSYLRGYLGQAAIGAARTQTFLGERYRRIARRRGAAKAQVAIARSLLVIIWHLLAGPTAPYTDLGPSHYETRIDKNRETRSHIRQLEALGYTVTLTQTA

SEQ ID NO: 493846 - protein, 349 aa, unidentified
MSILGGLDVHRAQITFDWVDRDSGEARRGRIAPATRAGVRAWLGELPSAEGGFAVEGCTGWRFVVEELQAAGFLAHLAEPAETSSLRGPKRRAKTDRSDARLLRELLEQDRLPSSWIPPAWILDLRTTVRLRKTLVDQRTAWQQRIHAALFHHGLPRPTQELLSRATRGWLEQVTLPPASRQALAVALRQIDGLDAELAPIDQWLRTLARRQPGCQALMTRHYGIGAITAPTILAELGDARRFVGGDQVVRATGLDITVYASDGKRSPGHLSRQGPEVLRWALFEAAKAAARPSSPDYPYYQQVKARQGGNRATLAVARKLARRVRHTLVSLGDAALAPVQDLPVAEAA

SEQ ID NO: 493847 - protein, 353 aa, unidentified
MDKYIGIDVHAASCTIAVVDARGKQTGSHVVATNGQEIVECLRAIPGQRHVCFEEGTQSGWLYEILEPHAVEVVVAGVGAGSRGPKDDKRDAFGLAEDLRQGAIKTRVFKNGGPYKALRELARTHRMVVRDVVRTKNRIKSMYRSRGVAVAGKSVYSSAGREPWQEQLPEACRGPVRTLYAELDALEEVRNDAEKALVQEARKFPITKLLSTCPGLGPIRAAQLVPIVVSPHRFRTKRQFWPYCGLGIVMRSSSDWVRDKNGQWQRAQVQQTRGLNLTHNHHLKAIFKGAATTVIAQHPDEPLNLSYQRWLAAGTKPNLAKVSLARKIATIVLVMWKTEEEYDSSKHSKTVSP

SEQ ID NO: 493848 - protein, 452 aa, unidentified
MPIIRSNAIRIKRFRELKADLRTRRDRLLVGIDIAKAQHVAQVRLAHTRVLDKQLVIPNTQAGFDAFWAHVQRRQAETGCPELVCAVEPTGTYHEALAQFLEAHGADVVLVSNTVAHANRRTLDGTWGKSDPKDAHNLGDLLERGLVVFYSLPDSRTAALRRLVRLLRHARTDLAACKARFRNTLLPLLGPAGEPLPAARVASLPAPLQALLPRAQRTARGAGAAGPPALAFECTELAARLVSVRARIAQIEAELVRVAAPLPVSARLRTIPGIGPTVAAILLAEIGDIAWYTQFSQLRKLAGLDIQRVQTGQWAGTARISKAGRPLLRWALYQAALGAARTPTWRARREAMIAKRKGDPHAFFKATVELAAKLLRLVWGIWRSGRPYDPARVEGSPAARPAIAPRAARAGRRGAPPSPQGQAAIGEPRASQAGRSSATRPLSRGNGTSRRV

SEQ ID NO: 493849 - protein, 376 aa, unidentified
MEHDSTLYVGLDVHKDSITVAYALGSNEVELLGRIGTTQTDIDRLCKRLQSKAHCIRVVYEAGPCGYGLYRQLAKKGFDCMVCAPSLIPRKPGERVKTDRRDAVKLARLLRTGDLSAVYVPTIDDEAFRDLARAWVSAKDDMKRARQRLKAFLLSHGVRYTGRADWGPAHRRWLSAFSFDNLWQKLALDELRRAIEDRLAQCDRLEVALREAVVNWRFYPAVLGLQAMRGVQFTTAVGMLAELGDLSRFAHPRQLMAWIGVTPSEHSSGNKRRQGSITKTGNGYARKLLVEAAWSYRHPARVSPEIQRRHEGLPKPIIDRAWDAQIRLCRRYRKLVAHGKEKNIAVVAVARELGGFIWDISQLAMSLAVPREVHVA

SEQ ID NO: 493850 - protein, 339 aa, unidentified
MNNITILGIDLAKNVFQLHGSDATGKAVLRKKLTRSKLVETIAKLEPCTIVMEACGGSSYWCRKFNVLGHKTKLISPQFVKPFVKTNKSDRNDAEAICEAASRPTMRFVAPNTVEQQDIQAIHRIRSRLIGSRTAIVNQIRGLLAEYGIVVAQGVYKIRKLLPEILEDAENELTMLGRQIFFQLNEELRELDEKIKIYDQKIDGVFKSNEQCQRVGKMDGIGKITATAIVAAIGDPSTFKNGRHFSAYLGLVPRQSSSGGKERLLGISKRGDSYLRTLLIHGARSVVRHAKNKDDKRSLWIKNLVERRGTNRAAVAVANKNARIIWSLLAKGENYKKAA

SEQ ID NO: 493851 - protein, 338 aa, unidentified
MTIHTLGVDIAKNVFQLHGVDRSGTVVLKRRVMREGLMPVIAQLPACTIAVEACTGAFSWQRRFEEHGHTVKVISPQYVKPFVRRQKNDGNDAEAICTAAREPHMRFVPRKSIEQQDIQSLHRAPQRLVNHRTAVVSQIRGLLLDRGIAIGVSITRARRAIPEILSGQQPELTDLAREAIGELYDLFCDLDRRIRSFDQKIERVFRASEPCQRIARIKGVGPKTATALIAAIGDGSEFQNGRHLAAWLGLVPRQHSSGDRHVLMGISKRGSQPLRAMIVHGARSVVRTAPGKTDPANRWVNQIRERRGFNRATVAVANKTARVIWAVLRTGEPYRATA

SEQ ID NO: 493852 - protein, 366 aa, unidentified
MKKNITLVENTNEIFKSQQLTIGVDLGDRTSHYCVLDEAGNVILDQRVATTPKGIQQIFSKISRSRIALETGTHSPWLSRLLTQLGHEVIVAHARNVQLITESTRKDDRLDARTLARLARIDPQLLGPVRHRSAKAQIHLTEIRARATLVSARTALVNAARGLTKSFGERLAKCGTEQMNREIAKGLSPELRDVLEPLLREIESLKERIAEYDRRIEQIAKEVYPEVALLKQVKGVGTLIGLTYILTLDDPHRFRRSRDAGCFLGLRPGRRNSGMSEPQMHISKEGDAYLRTLMVQGAHYILGPFGQDSDLRRWGLKLAERGGKNAKKRAVIAVARKLAVLLHKLWVSGEVYEPLRNNHKVVSAVA

SEQ ID NO: 493853 - protein, 402 aa, unidentified
MNSVGIDISKGRSTIAVMRPFGEVVISPFEVRHTDSELSELARQLKSLDGETRVVMEATGNYHAPVAKLLHDAGLYVSVVNAKLVHGYGNNDLRRVKTDRKDAIKLANYGLDRWLTLPRYVPEEGTRLLLKNCYRQYRQYSKVQTVLKNNLISLLDTVFPNVNRLFSSPIREDGSEKWVDFVAEFWHCRCVSEKSQKAFTNKYQRWCRKHGYNFSEEKAHTIHAEASGHIGIMPKSETTKLLVEQAVAQLRATSAALTALKHEMQSLASMLPEYPVVMDMFGVGPTLGPQLIAEIGDVRRFYSKKALVAYAGLDAPPNDSGDVTGKHKSMSKIGASSLRRTLFLVMSVYLQNAPLDEPVYQFMDRKRAEGKPYRVYMMASANKFLRIYYATVKAYLELLERT

SEQ ID NO: 493854 - protein, 335 aa, unidentified
MSNYSLIIGCDVSKSVIDVSYQPIGVNTSTYLGQLANSKDGFKEAINLLKLKTKSPTSKWFFCFENTGSYSSNLFKWLVAQGIPCKQESPIQIKLSLGLRRGKDDKTDSISICQYAYEKRNVLVPSELEQSAITKLKKLLSRRELLVKHRVALKISLKEQKGNIDDDLFDLLSQDNIELINMYDIKIKSIEANIKTIIDADEKMENNSRLLNSVIGVGFITSSYMIAYTNNFKAFTDAKKFACYCGVAPFPNSSGTKRGRTQVSHMANKKIKSILSNCILSSINYDPEVKRYYKRKKEEGKATGIVLNAVKNKLLHRMFAVVKRGTPYVKLMSYA

SEQ ID NO: 493855 - protein, 392 aa, unidentified
MYIVGIDIGKNHHEASIVSPEGKQIGRSLRFATTHKGADSLMSFIFKNIGNSPCVFGMEATGHYWYPIYSFLKAKGYTIYVINPIQSDSLRKMYIRQTKNDSIDSFLIAEVIRFGQFGTTSMADENILAMRQLCRYRDSVISSRTEIKLRIGTIMEQIFPEYEKQFSSLWVSTSMGILEKYLTPENIENAPIDELFEIIKDKSHNRLTRAKAISIKEAAADTFGIKIAQDAFSFQLKQLIDRMNFLDKQIEALDCQILEYYEKFDCYLHTIPGIGMIAAAVILAEIGDISRFKNSSALVAFAGIDPTVRQSGEFNSTHNHMSKRGSPYLRHAIFLAATTCSFHNSPLNAYYKKKRDQGKHHLTATGAVARKLTTIIYAVLRDSKPYEPKKFC

SEQ ID NO: 493856 - protein, 423 aa, unidentified
MKIVYPVCCGVDVHKKFFVATLITTEGIEPKYKKRRFSTFNNQILEFKAWLLENDCRDVCMESTGKYWVPVSNLLEDSINVTIANPKWVRAVKGCKDDEKDSKWIGDLFRIGIVPGSFIPSKDIRILREHTRYRFKLVSCKSSEKNRYQNVFTVCNVALDAVVSDMFGKSASSITDYIVNSDTFDSEHCVSLLRGKLKKKAEDVVASIDGFQMEESQKNRARMVREHYDYLVGQIINIDNAIGELAKPFESAINLMCTSPGIKRVSAINVLSEIGADMSQFESSKKLCNWAGLAPGNNQSAGKKKSVHITRAGVYLKPALVEIAHAAVKDKKNPYYAIKYERLRKRRGKKRAIIAIARMILTAIYHMLSTGEVWNPVDLDQIDMPPDLKEKEVQKSLVRAVKLLIAHGLISPDAIKIPESVPA

SEQ ID NO: 493857 - protein, 312 aa, unidentified
MNDKKTSVYVGLDIAKASLQLHLQGKRYDLANTTAGHAQLIKRLAAIPDVHVVCEATGGYERAVVAALHVPAIPVSVLNPARVRQFARASGELAKTDPIDAAMLTAFGQAFAPEPTPPRTATELKMAALITRRVQLLELRVAETQRADTCADPDLRKLFTPWLAQMEKQIAKVEALIEALLKAQAPLADQVQRLDDIMGVGRITAVMVLATMPELGQLNRRQAAALAGLCPYNRDSGQWAGKRCISGGRAEVRRALYMAALSASRSNHLLKPFYDRLIAAGKPAKVALTAVMRKLIILMNHLLKNPNFSLAH

SEQ ID NO: 493858 - protein, 341 aa, unidentified
MDKVSTIGLDIAKSVFQVHGVDAAGAVLIRKRISRAKVLEYFGELPPCLVGIEACPSAHHWGRELQGLGHTVRLIPPSYVKAYLKRGKNDANDAAAICEAVTRPSMRFVPIKTKEQQTALMLHRARQLLVRQRTMLSNALRGHLAELGIVSAKGRNGTAELLRIIADGRVSPAVCGILKVLARQYGAIGTEIASIDKSIMALHRGCEASQRLAEIPGIGPIGATALVAEIGDWKTFSSGRSFAAWIGLVPKQHTTGGKDRLGSITKQGNRYLRWLLVVGAMAVIRYARKHGTQKRPWLGRLMERRPTKVAAVALANKIARMAWAIMVRGERYKEPKLLLVA

SEQ ID NO: 493859 - protein, 423 aa, unidentified
MSYRIAGIDVHKKMLAVVVSDVKVDGEYQFERVRYSSSPEHLRFLAEWLIAQKVEEVVMESTAQYWKPVWGALERYWKPICQEREGAGPMSGTLHLAQAQSNRGRRGRKKDFPDAERLVKRLVADELVLSFVPDTEQRLWRTVTRRKYQLTRNHVRLQNQLEGLLEECHIKLSSLVSDLLGASARRMLKALAEGETNPVALAAMADKNLRATQAQLCDALGAGTELRPIYRRLLKMFLEELQFIDQQISELDHELASLLSRHHDAVVHLAEIPGLGVDSAQQIIAEVGAGAATFPSAKQLSSWVGACPGEEESAEVSKSHRSPKGNRHMRRILNQAANAAAKSKGTIFEIVYRRLVSRLGHNQTIGAIAHRLCRLIWIILHRGVRYEERGPSVNAKTRRHRTNRMIRELRNLGYRVEPLVTTV

SEQ ID NO: 493860 - protein, 408 aa, unidentified
MEVVYRCCCGIDVHKKIIVACLDQGGEQSLREFGTTTSEIKSLATWLTESGCEIIAMESTGVFWKPLYNLFELMDLDAMVVNAAHMKALPGRKTDVKDAEWIADLLRHGLLKASYIPSREQRELREITRYRKSLTEERCRETNRLQKILEGANIKLDSVVKDINGKSARKLLEKIIEDDVPTSEEEVSKMVHGRMRSKLGQLVTAIEGITTPLQRKLLAQVIDHIDDLNRRIADLDRLVQDYMDEYAAAIAALCDIPCIARRSAEVILAEIGLDMSRFPSAAHLCSWAGVCPGNCQSAGRRKHGKTTKGNKPLKTILTQCAKSARSVKGSYFSAQYQRIAARRGKNRATLAVAHSMLIAIYHMLKNSVPFRDLGSDYYDSFNRDRKIHSYLKRLKALGWEPDALPGSA

SEQ ID NO: 493861 - protein, 355 aa, unidentified
MLLMEPLYVGIDLHKKFAYWIAVNGKREVVFEGKVPADRKATEAAVLKLPDSSSVQAVVEPVEHWGWYTDLLESLGIETKLADSLKVGLIAKNRLKHDKVDATALSELLRSGFLPEAYRAPKEIRDLRELLRWRICLVRTRARFKNRAHGVLAKQGLKTPWTDIFGTAGRRWIAALSLSSPYQEELDSLVSLYEVLGREVKTLDKEIRTRAVASPELLLLQTIPPIGPFTALLMKAEVGDFARFPSPGKLAAYAGLVSSSYSSGGKLRFGHITRAGSGYLRWIMVEAAQRVRPKDGHLYAFYRKIREKKGNATARVALARKLLCLAWTIVTKGEPYSEAKAAFRGDLGVQLAHRR

SEQ ID NO: 493862 - protein, 465 aa, unidentified
MEKKTKIPDTVSMAVIHSHAAGIDVGSREHYVAIGQQPGDVSTFGVYSKDNAALVTHLQQKGITTVAMESTGTYWQPLFACIQAAGIEVVLSNNYIKDPQKKTDAKDARWLQRLHTLGLLKTSFIPAAQIEQVRTYHRHRSSLVAQAASCIQKMQKSLRLMNIRLDIAISDITGVSGMAILEAIAAGQRDGTALASLVHYKVKKSKEEIAEALQGQWKTEQLYILIDELQSYKNYQLRMTSCDKQIEVLLQQMTAAIAVSNQSEQPASVNASEATAQIKPTKIKKNKNSAAYDVSKLSMEYFGVDLLEVEGIGSATVMTFIAEVGSDIIKFPSKKNFTSWLRLSPNNKITGGKVFSSRTPKGKNILSNAFRLAANTIAQRKEGVLKKIFSRIAFKKGRAAAITALARRLAEIFWIMTVRKVPYKAQNEMEYDEQTKKSIIKNIQHKMRKMNLTTQDIAMGGLATS

SEQ ID NO: 493863 - protein, 417 aa, unidentified
MFKVAIRSPGDKPWTRKTEIFEFRTFYGVLQQMARELRKRGVTHVVMEASGVYTEPVYYALAEQDFTEVAVINPAHAKALRGHKTDAKDCARLAELFECGLLRGSYIPVPELKEVRDLTRYRIKTVQARTSEIQRLGKALESAGIKLGSVASSITGTASTAMIEALIDGERRGGVLADLAIGRMRTAGKLADLSMALAGRFTDHHALLCRLHLDRIAVFDDAVDGLDKRIAGKAARWQREQGLLTSVPGFGDVVAQAWLGEIGPAPHRHFASCEKLASWVTLCPGNNISARKRKHGRTGDAGTYIKPMLVQAAWAAIRVRGRLQARYNRLVRRFGGDKNPGAKKKAITAIAHTLLKIAYQVLKSGVPYQEPGADFYTRRESPEHKQAWLERQLQKLHPGCTVTITITPPEAALPPGA

SEQ ID NO: 493864 - protein, 346 aa, unidentified
MTLGADCHKQTHTLVAVDEVGREVGSRTVAATPAGHLEVLKWAKRWRERRWALEDCRHVSRRLEYDLLSAREAVVRVSPKMMAGTRRSARQFGKSDPIDALAVARAALREPNLPLAQLEGPSRALRLLVDRRDDLVAERTREINRLHWHLHELAPGYRVPGRTFTQASTWKTVAEEVAKHQGLVAELATELLVAIQDLTAKADSLERRIAALTAQLAPSLLKLQGCGTLTAAKLVAETSEVSRFASRARFARDNGTAPIPASSGSRQRVRLNRGGNRQLNAALHRIAITQVRLNGRGKLYLDKQIAAGHSKTEALRALRRRISDEVYRRLWDDQRQTATHSSELAA

SEQ ID NO: 493865 - protein, 455 aa, unidentified
MPGKKTRGKSSGQLSTINPDAAGIDIGATFHVVAVPRDRDDRPVRTFRTFSGDLYQLADWLAQIGIKTVAMESTGVYWIPVFEILEARGFSVLLVNARHVKHVPGRKTDVNDAQWLQQLHQYGLLRGSFRPRDGVVRLRAYLRHRERLVEYAAAHIQHMQKALMQMNVQLHHVVTDITGVTGMRIIRAIVAGNHTPDQLAAFRDVRCSASIETIREALTGTYRPEHLFALRHALERYDVHQAKVAECDKAIEAVLQQLNADRPAPDGALPAVRHAKGRNEPQFEVRSALYTLLGADLSQIHGLGPYTVLRLVAECGDDMRKFPTAKNFTSWLSVAPGNKITGGRLLSSKTRRSTNRAAVLLRIAAVNIGRTQTALGAFYRRLAARIGKAKAVTATARKLAILFYNAMRFGMKYVDPGVAYYEERYRQRVIHNLHRRAQDLGFSLVPNSAGPTGVS

SEQ ID NO: 493866 - protein, 338 aa, unidentified
MIAVGVDTHKDRHHAVALDQVGRPLGELVPAADAAGYAELQLWAERIGGTEELVFGIEGAGSFGAGLCRYLQHAGHSVVEVERPRRADRRAGKSDRIDALAAARRVLEGSVSTPRRRGVLSAIRALLVARRSVVGERTRVLNQLHALNTTAPITLRERVGGGTGRQIERRILSMRSRSGVDLEERVTFAVMRDLAAHSRALGADAGRYEHELAELVAEVDPTLLRKPGVGPISAAKLLACDPARFKSEAAFARCNGTAPIPASSGKTVRHRLNRGGDRQVNNAIHTIAIVRAKYQPETRAYLDRRIHEGKSKREALRSLKRHISRELYRHLTAVPLTS

SEQ ID NO: 493867 - protein, 338 aa, unidentified
MSIVHVGVDLAKNVFAVHGVDESGKAALMRPSVSRAKLGELMAGLPPCTVAMEACTGAHHWARLFVSHGHTVRLIAPKFVTPYRMSGARGKTDAADAAAICEAAQRPAMRFVPLKSEQQQSQLMVHRARQGYVQARTACINRIRGFLAEFGHVLALRADTVRRQAAGLLEELPGWGNTVIGDLLSELHRLDERIAQYDRHVAQLAREDARARQLMQLPGIGATTATAVVAMIGNGHEFKCGRQFAAWLGLTPGQYSSGGKTRLGRITKTGDGYLRSLLILGARSVLALAKGRSDAISSWALALQQRRGYWKAVVAIAAKNARMAWAVLRRGENFKMPA

SEQ ID NO: 493868 - protein, 341 aa, unidentified
MNKFIRIGVDLAKNYFQVHALESEGGGVVSRKLTRAKMFTFFSACEPCLVGMEACGSAHYWARELTAMGHEVKLMPPSYVKPYVKRGKNDAVDAEACCEGVSRPTMRFVPVKSAEQQATLMLHRTREQLTKQRTMNVNALRGHLSELGLVVAKGIENVKELIAMAGDDDRLPKAAKACVTLIAGQIDAIDASIRNLEKEIRRANAQNQTSRLLDKIPGVGAIIASAISASLPDPGVFKSGRDFAAFLGLTPRQNSSGGKDKLGGISKQGDRYLRKQLVLGATSLLRVAAKHKGALADWIVAMLARKPRRHVSVALANKLARIIWAVASTGELFREESFARA

SEQ ID NO: 493869 - protein, 344 aa, unidentified
MENYAGIDVSLELSSVCVLDAQGKILKEAKVASEPGAFVEFFETLGFAVKRIGLEAGPLSPWLHAGLKRAGFETVLLETRHVKAALSAMTVKTDRKDARGIAQLIRMGWFRPVHAKSIGAQEIRALLVARKQLLGRLIDVELSIRGILRGFGLKVGPVTRRNFEARIRELVAGQATLERVATAMLSARLALKAEYGRLHKAVLAIVRDDAVCRRLMTVPGVGPLVAITYKSAIDDPHRIVKSKAAGPLFGLTPKKYQSGEKDVTGGITLAGDEIVRTALYEAANVLLSRITRFSKLKRWGMDVAKRRGSKRAKVALARKLAVILHRIWVDGTTYRWAEAGSIAA

SEQ ID NO: 493870 - protein, 317 aa, unidentified
MTQTSITTAGIDTSKAKLDIALYGRTERWQVANALPGWRALAARLTKAHVTRVGIEATGGYERGVVEYLRAAGLVVLVLQPIQVKAFGRVHLRRAKNDVLDAVLIAACAAALDQVRIKPDQRLAELAQHLTFLEQIEEDIRRCKTRLEHIDELRLRRLVLGDIARLKARRLAEIRRIAKQLRSHPDLAARLDLVLSIPGIGKRTALALLIRMPELGCISREEAAALAGLAPFDNDSGQHKGQRRIAGGRARLRRSLFAAALPAAFRWNKALIALYGRLTATGKAHNAALVACARKLLIYANTVVQRGTPWTERSLRV

SEQ ID NO: 493871 - protein, 326 aa, unidentified
MTASQSSDNTFIGIDIGGAVLDVAWHRGASAQYANRPDAIATLIQKLQSGPTITRIVIEPTGGYERPLRKALRQAGLPVEVIHPSRFKAYRTLVGTKAKSDTSDARLLAAYAAAPDDVRGCKAHHVELPEDAIREALNELANRREQLKHMIHAETCRLNTARLADVRLAIEAHREALVADDKQVHKMMLTLVRQRVDLRRDQRLLRTICGIGEKSALACIAMVPELGRIDNKAAAALIGAAPFVHQSGTKTSPARIYGGRSAVRNILYMAAVAASRHNPVLRPFYERLIAAGKPAKVALIAVLRRLVVFANAVLKSGQPWRGAVPA

SEQ ID NO: 493872 - protein, 430 aa, unidentified
MTELNPTPAPATLVAIDIAKHRHEVLIEAAGHQRRRRLTILSTRADYDRLVEILTAYGNSVVIGFEATGDYHRGLAYRLLSAGFELRLVSSVALARTREALHNGWDKNDPKDAQVILHMLRIGATQRYVDPLAAGINDLQELSKTHEAISKAKTETWHRILTHYLPLYFPEIERFAGNSRSDWFLALLERFPTPGSIMALDRESFVQEAWSLVGRKVSKPRLLNDIYETASSSTALPVEEGSAAITMFRMVLAETRSLIRQRDQIEGLAHAMLVDHNDYQLLRKIPGIGPIHALTILAEAGDLRRFGHHRQFLKFCGLDLATCKSGTLRGRTKLSKYGNARLRRALWMAAQVAARQRDNSFRDKLGRYTERDRQDADLRRKAVTALTAKMARVVHAVIKGGAEYRPFFERPVPGGRTSLCTGREGAQATL

SEQ ID NO: 493873 - protein, 346 aa, unidentified
MGKSIINLSSITTVGLDLAKHVFQVHGVDALGCVVVAKPIRRNKLLEFFASLPRCLVGLEASGSAHHWARELIKLGHEARMMPPAYVKPYIRRQKNDASDAAAICEAVTRPSMRFVGVRSLENQAALMRHKARETLVSQRTQLLNGLRGHLTEIGVIAAQGPRHARELAELIEACDETIPFVVCEALAPLVVQLRNLDEAIARLDRTIAKLALKDETARRLMSIPGFGPITASAMAATIQDTSSFAGPREFAAFLGLTPKQNSSGSKPKLGRISKMGNRNLRKLLVVGAHAVLFHRKPHTDPLRMWAKKLIEKKPFKLVAVALANKMARIAFAILRGKTVYREIPA

SEQ ID NO: 493874 - protein, 340 aa, unidentified
MKVVAQSLGIDVASKSLQVCFMIKNDQGQFKIKGQRKFDNAKSDFKMLIEWISKRHQAGLGLEVVMEATGVYYERIAYALAQQGFHVHVLLPNRIKGYLKFLNVKSKTDKIEANELAQLGLNHQLPKWEPACAQMYSLKRLCRERNMLIDEKTAISNRLHAEKSCQDPEPLTIKRLKKRIKLLVDQIKEVEQQIIKLSEEDTQLAQKIDNICKVKGLGPITVISIIAETNGFQLVENKSQLVSYAGYDVVERQSGSSIKGKTRISKKGNAHIRKALHFPALGVVKYHKEFTDFFNRIFERTKIKMKGYTAVQRKLLVLIYTLFKKNQPYDPQFAQNLNQI

SEQ ID NO: 493875 - protein, 322 aa, unidentified
MNENTNYFGIDISKDVFDVMGSDGLFHQFSNEVTGFKKFIKLMECNSHCVMESTGVYHLRLAYYLIEHNIKVSVENPLSVKRFIQMKLSKIKTDKSDSKMIYEYAILNNPNLWTGQTKSQIECSHLLSLSNLYTKEIIVLKNKLHSEEAQGSPVTRVIRSIKRSLSYYKKEIETLETTVLKLVKEEYQDLHSRIKSIPGLGAKASALLIVLTDGFERFNTASELCSFAGLTPIIRESGSSIRSRPRISKMGNRRLRKVLFICSFSASKHNKACKELYNRIVAKGKSKKLALVAVCNKLLKQAFAIAKSHLWYDENYSSFLVR

SEQ ID NO: 493876 - protein, 430 aa, unidentified
MDLIVPSDIDSEREEQPLPYDWFVGIDWGSRQHQVYVLDRDRRRVGERVVDHDGASLARLADWLWTLSAGQPQRVAVAIEVPRGAIVEGLLDRGFHLFAINPKQLDRFRDRHSVAGAKDDRRDAFVLADSVRTDQPSFRRVQLGEPQLLLLRELSRAEETLLEDFRRHANRLRDQLHRFYPQMLQLCAAADEPWLWALIDLAPPPAHTALLIEEQVQRVLKAHRIRRVTAQEVLTCLQALALPVAPGAAEAAQAHCQFLLPCLRVLAEQLQACSQQVSALLSTLAEAPGKGEGPSDVAIVLSLPGVGRKITAWLFAEAAQPLAERDYQRLRTHGGVAPVTKQSGKRRVVVMRRGCNPRLRHALYHMARVARHRDAHCNRVYTALRAKGQRHGQAVRNVGDRLLRILMAMLRHRTCYDASRIRREPVVQMG

SEQ ID NO: 493877 - protein, 368 aa, unidentified
MITERTSLGLDVHARSVSAAAIDTLTGEVIQRRLDGEYSHTIDLASRLAAEHGPLLITYEAGPTGFGLARELTAAGHRVQVAAPSKLARPAGQRVKTDRTDAMFLAECALNGTITPVRIPTLAQEGARDLVRSRDDARTDLMAARHRLSKMLLRRGWVYPGKTTWGPAHDAWLRALRREDVPALGAGATAAFDDAYDTVTHALARRDRLDTAIAALAADSEFTPVTARLSCLRGISTLTGFALAVEIGDWHRFTGATIASYLGLVPCEHSSGQTRTQGGITKTGNTHARRLLTEAAWQHKSPYRPGPALRAAWAKVPGDVATRADTGNRRLNRRWQTLASHHKRHTIANTAIARELAGWCWSLAVMDH

SEQ ID NO: 493878 - protein, 548 aa, unidentified
MIRLRDKMREDLELRGMSASTVTTYVCCARRFVEHFGLPPGKIGATDVRNYLLHLIHEVKAAPSTVNVYAGAIQFLYRVTLKRLDEPVAVQPETPRTTPVTGAAASRSIAPRLESSPRAGRRRGGEVTSLPPVAETTDTPTCSEAQDARRRGAQGRLVMRRIGLDLGVRHIAYCEVAQGKVVDRVTVKSLSELASRLGPDTEPAVVAFEACREGWFVHDTLKEWGHDPRMLDTTRVRQMGVGQHRRKNDPIDAEAIAMALDGGRIAEAHVLSPARRALRAQLSVRGALVETRAQYVTTIRGLARAAGVLLPTCDTASFVRKLDALEWDEATRSLVAPLVALLRTIEQELVGVEHTLAGLADQEPVLKLCATVPGVGLIVAATFVSVLDEAKRFKNAHAVGAYLGLVPSESTTGGPDKRKLGSITKQGNSMARTMLIQAAWTIFRSRDKSDPLKRWVEQVAGRRHKRVAVVALARKLAGVLWAMWRDGTVYDPRDHAEQSARGVRASAREQLGRAQALDRAAKKLARPATRAPVVSPKPRPKSSQRVAM

SEQ ID NO: 493879 - protein, 389 aa, unidentified
MKIYVGIDIAKLNHFAAAISSDGEILIEPFKFTNDADGFQLLVSKLESFDKNSIIIGLESTAHYGDNLVRYLVAEFYQVCVLNPIKTCQMRKNNVRKTKTDKVDTFVIAKTLMMQDDLRFITFFDLDMMDLKALGRFRQKTIKQRTRLKIQLTTYVDQVFPEIQYFFKSGLHQNAVYALLKEAPSPKEIASMHMTHLANLLKVNSHGHFTKEQAKELRVLAQKSVGANDSAISIQITQTIQQIELLDSQLEKIEVEMTDIMKFNDSVIMTIPGIGYINGGMILGEIGDIHRFSNPNKLLAFAGLDPSVYQSGNFQAKTTRMSKRGSRVLRYALVNAAWNVVRNNATFKAYYDAKRAEGRSHYNALGHCAGKLVRVIWKMLTDEVEFNLE

SEQ ID NO: 493880 - protein, 340 aa, unidentified
MGEITTIGLDLAKQVFQVHGIDADGTTVLRKQLRRSQVLSFFSRLAPCLVGMEACATAHYWARELAALGHEVRLMPAQYVKAYIKRNKNDAADAEAICEAVVRPTMRFVPAKTAEQQAALLLHRGRERLVRQRTGLVNALRGHLAEFGVIAPQGLRNVGKLIAVVRDPSDARLPDLARQVLEVLATQIEQLEGAVAAVEKQLMAWHKSNPVSQRLATIPGIGPIIASAIAASVAEPSGFRSSREFAAWLGLVPRQNSTGGKHRLGGISKRGNQYLRRLLINGASANLLRSKATKADPWVIGLRRRRPSLVVAVALANKTARIAWAVMQRNENYQRMAAAA

SEQ ID NO: 493881 - protein, 307 aa, unidentified
MKAPSTRPAAVLGLDVGKSSHWACLVDRDGEVLASAPVRNREAELDALFASAPAGTLVVVDQFRNIGSLAVRRARAAGLGVAHLPGLAASRAAGLFAGEAKTDERDAAVIARTALGVPDSLSGVPGRGEALEAARALSSQRDHVVACATRDKNRLRAVLLESCPALEAAVDLSDRRWLELLAGFGGAWGIARSGAEGPQAEAAGEAAAASTAPPPALVEAENRQVRFLAARISEALDEAGALEAETAGLLEGDETYACLLTVPGIGPRTAAQLAVSVDIARFPDHDHLASYCGIAPRVRSSGTSVRC

SEQ ID NO: 493882 - protein, 402 aa, unidentified
MNCVGIDISKGKSTIAVMRPFGEVVVSPFEVCHTASELSELARLLKSLDGETRVVMESTGNYHAPVAWLLHGAGLYVSVVNAMLVHDYGNNSLRRGKTDKKDAVKLANYGLDHWLTLPRYVPEEDTRLMLKTCYRQYQQYSKVQTMLKNNLISLLDTAFPDSNRLFTSPPRADGSEKWVDFVATFWHCECVCGRSEKAFTTQYQKWCRKHGYNFSEDKALDIYASACRHFGVIPKTDTAKLLVEQAISQLQTTSSALAALKQEMQSLAASLPEYPVVMEMFGVGPTLGPQLIAEIGDVRRFHSKKALVAFAGIDAPPYQSGQMDVRSRSISKRGSASLRRTLFLVMSVILQHAPMNEPVYQFMNKKRSEGKPYRVYMMASANKFLRIYYASVKAYLDSLEHD

SEQ ID NO: 493883 - protein, 359 aa, unidentified
MQRKELSFSGQKIFIGIDVHKDSWRVATVPEVGVVKGHSQKPSAKELLDFLKKHYPDGEYHAVYESGFSGFSTYYALQEVGIDCIVIHAADVPTTQYEETMKTDKVDAVKLVKSLKAGLLTGIYIHKRDDIDARAVVRLRKTIQKQLGGYKSRVKHLLHSNGVAFPERFSKPGTHWSKAFINWLKQEVSLLSSTRISLDLLIVQVESIRHTLLMATRKVRELSRSERYRHDYELLTSVPGIGISVAMALLTEIGDFNRFRNEREFASYLGLVPTSHSSGGKVAHGEKTFRGNKKLGPQIVEASWISIYRDRGLSCAYISYKKRMEPQEAIVRVARKLSNIIFSVLKTGKKYEPYQWNDK

SEQ ID NO: 493884 - protein, 484 aa, unidentified
MKTQKHTRTQRGSKASRQNKSKKQPWKVIHPHAAGIDIGATEHYVAVPPDAVPAGAGHVRKFGCFTEDLDALVEWLKACGVDTVAMQSTGVYWIVPFQKLEGAGITPVLVNAQRLKLVPGRKTDVQECQWIQQLHTYGLLAASFRPNDATCRLRTLVRHRANLVSSGAEHILHMQKALTQMNLQLHQVVSHLTGETGLRILKAILKGERDPAKLVALRDPQITRRTEEEMIKALRGDWRPELLFVLGQSLEAWEFYQEQMRTCDRQIEEQLKQMPSASPPPAQEAPSAPDPLAGSKPRAKAKQSRKRNDPEKDLGPELARLCGTDLTAAHGLRLLTVLTISSETGVDMSQWRSAKAFTSWLGLNPNNKISGGRILSSRTRKVVNRVAAALRMGAVGVAETETWLGSFHRRMRARLGPAGANTATARKIATVVYHLLKTKEPFVDRDLLAYEARVYRHKLSRLKKQAKTLGYELVQTSKQETVVE

SEQ ID NO: 493885 - protein, 388 aa, unidentified
MTQLPVACSVPAALDYDCTLVLAIELSNKSWVLAAQVPGLPRVKAKRTIEPTAEALLAAIQGYRERAKTAGRHIERVVATYEAGWSGFWLARWLATHGIETHVVQPSSVPVDRRARRAKSDGIDAEQLLRTLLAWLRGEPRVCSMVPVPAEADEDARRCVREREELVAERVALVNRIGAVLATLGVGEYNPLLRNRRERLDALRTALGTPLPPHAHAKISRMLDRLDLVRAQIANLEQERDAVLENEAPDRAGEMIQQLATLRGIGVQSATVLVREAFVREFANGKALGSYAGLCATPYSSGGTEREQGISKAGNRRLRTVMVELAWLWQRYQPGSAEVSWFRERVGGTGARMRKVMVVALARKLLIALWRFATQGVVPEGAVMKPAT

SEQ ID NO: 493886 - protein, 360 aa, unidentified
MAKIKSVLTPSVVGGVDTHKDLHVAAVVDENNRVLGSKFFATTRQGYRQMLTWMTSFGTVARIGVECTGSYGAGLLRYLQNAGITVLEVTAPDKMERRRRGKSDTIDAESAAHAAFSFIRTVTPKTRSGMIEALRVLKVCRKTAVAARRIALQMIQMNIVSAPDELRDQIRSLTRMQLIRTLTAWRPDVTAYRNVQDAYRIALKSLARRYLELHDEIADLDIMIASIVDELAPDLIKRNAIGYESASQLLITAGDNPQRLQSESGFAALCGVSPVPVSSGKTNRHRLNRGGDRAANSALHIIAIGRLRTDTKTQEYVAKRVSEGHSKMEALRCLKRYIAREVFTLLRNQNRQINSTQITT

SEQ ID NO: 493887 - protein, 342 aa, unidentified
MRYFAGLDVSLEETSICVVDEDGSVLREARAGSDPAAIAGWFARAGLAVFRLGLEAGPLSPWLHQGLVAAGLPAICIETRRMRSATQLMAVKTDRVDARAIAQAMRVGWYTAVHVKSAAAQELRVLLRNRKLVREQRVALDNEIRGTLKAFGIKLGKVSEGRFGERVMSALKEQRPVLLSMVEPLLSVRLTLRRSYAVLQRQVKAVVQASAVCQRFMTTPGVGSVVSLTYMTGVDDPRRFTRSRDVGPHLGLTPRKYASGQIDRNGAISKCGDEMVREALFQAAHTLLTRVKAWSALKAWGMQVAKRRGLRRATVAVARKLAIILHKMWVTGEDFHWTAATV

SEQ ID NO: 493888 - protein, 409 aa, unidentified
MKRFSTTDGRPVFVAIDVAKAKHHVLIELPDGKRTALSIGNTLAEFNKFADRLELASPRCEVALEPTGDYHRPLANFLVRRGHNVQFVSSIATHRTREALYNSWDKNDPKDAQVILHLLKGGVTQCYADPLQSGYQDLQELLGTYSQIVRRKTRVHNSLMTHFLPLYFPEAEPFLGKARAEWFLEVFLFAPCPAEVLKHSKATFLRKTVKNDEGRPTLRRRLVAEYYETAKESVGIPIEAGSIPMQMFRTILQEYIGLVRLRLQLEKQIHQRLEASADYQHLRTIPGIGPIVALTILSEAGDLRRFSHYRKFLKYCGFDLSTSQSGMQRGTPQLSKRGNARLRGAFWLAARAAIMTGRNGFRKKFDTYVRRDPQNKDLRRKAYSAVAAKMARVSYGLIKSGSEYRHLTA

SEQ ID NO: 493889 - protein, 347 aa, unidentified
MSQKTATPVAHTIGIDTGKNTLHLIGLDDKGAIVLREKIARGRIAARLANVPRCLIGIEAGMATHYVARELSALGHDVRQVPPAYAKPFRQGHKNDFRDAHAIAEAVQRPSTRCVPVKTDDQLDLQALHRVRSRLVGQRTAVINQIRGFLLEHGIAVRQGLRFLRQQLPDILAKRGDVLSPRMIRIIEDLSGDWRRLDERIQHVTEEIEVLAHGSESCRQLMTAPGIGPLIASAMVAAIGNGTAFAKGRDFAAWLGLVPKQMSTGDRTILGRISKRGNRYLRTLLMQGARVILLRPANWAKHSFGLWLTAAAQRLHHNVLATALANKLARIAWTVLAQGRSYEARVN

SEQ ID NO: 493890 - protein, 346 aa, unidentified
MNSMNYIGLDIHKKSISCCVRQADGTIIQESTITATRDALNEWMRQLPQPWIAGMEATLFTGWIYDHLVSGDAMVKVAHPAMLQAIAAGKKKNDRVDARKIADLLRCDYFPECHMAPREIRDRRRVLRYRNLLVRQAVQMKNKVSGLLMEAGVPYNQQKVHQKKYFAELLQKQKKEMPPSMPELLRLSRSTVEALTGMQRQLIRALERDALLAARVERLASIPGVGRVVALTWALEMGDISRFASVKKAVSYCGLCGAEKSSGGRTERTPISKQRNKHLQTILVEAAKLAPRWSTELALVYERAKQKGNRNRATLAVARKLVAYLMAVDREERPFDTQLTVAGNAA

SEQ ID NO: 493891 - protein, 450 aa, unidentified
MEILYTNCAGLDVHKKTVKVCLLTQPSNGQPHKEFRTYFTTTEELLKLGDWLKEQGCTHVAFEATGVYWKPVFNLLEGSFEMLVVNAQHIKAVPGRKTDVKDAEWIADLLQHGLLKASFIPSVPQRELRDLTRYRVRLTEEKAREVNRVQKTLEDTNLKLGDVGSSIMGKASRMILQAIADGESDAGRLAALAVGRVRADQGQLEAALKGNVTDHHRFLLQEHLTQIRHLEQAIERVTAEITRRFTAPAPPEETTPSQKEEGATQEISSDSASHLEAPSSEHPALSWAEAVVLLCSIPGISERTAIGILAEIGTNMQQFPTAGHMASWAGVCPGNHESAGKRLSGKTRKGNPWLRCLFVQAAHSASHQKQCYLAEQYRRIAKRRGAKRAAIAAHSILVIIYHLLSQQTTYQEKGETFFEEQERQGAEKRLVRQLSRLGYHVELQPAALAG

SEQ ID NO: 493892 - protein, 412 aa, unidentified
MSNPLLVGIDVHRKTNTVALMERSGREVAPPFTVTNNRPGTAALAQKLGAFAAEEGYDAIQVAAEATGWYWWHFFRTLDDDPFLKQRPLTLYPFNPRLTAHFKKTYADLDKTDLIDAFVIADRLRLGRDLPQPFAYDETGLALRFLTRHRFHLVHQTVREKAYFMAHLYLKASEYTHLKPFGDIFGATSRAILQGSPAMEAIAAIPFDDLVEIIDVQGKRRFADPADNARKMQAVAQDSYLLPEALQAPLNLILRQTLQQIDALQRQVQRTEAAIAEALQNWPHTLDTVPGLGFVFSAGIISEIGNLARFAYDEAKVAKFAGFKWRKTQSADFQAEETRLTHTGNRYLRYYLCEAANSVRMHDAEYRTYYERKYHEVRLHQHKRAIVLTARKLVRLVVRLPTTNQPYRPRRI

SEQ ID NO: 493893 - protein, 362 aa, unidentified
MRIIGCDLHARQQVLAMLDTVTGEVVIVTLKHEDDNVREFYSSLPRPVRVGIEATGSMQWFLNLMEELRIECRVGHPARIRACEPRKQKHDRRDAELILKLLAEDRFPAIWLPSKEVQDLRALLRHRHQWVRMRTRVQNALQSIALANGLRRGTALWSQDGQSRIAALPLAPHTAYRRSELQAMYEKFEAEIEKLNQRVEEQACGRAGARLLMTHPGVGPITALATEVFLGDPARFADSKALASYVGMIPREYSSGPRQRLGGLSKQGNPLLRFLWGEAGAHAARKDPELQRFYRRKLVQKGLGKASVAVARKLGIRLWIMLRDQIEYNEFCRRGQKQQKSSDACAGMPETRYGAKSHRPVD

SEQ ID NO: 493894 - protein, 341 aa, unidentified
MDADGTRLASRRLPEGLAGIRGFHELVAAHADAPAQVVIGIETDRGLWVEALNAAGYQVYAVNPLAVARYRDRHQVSGAKSDAADAKLMADLVRTDRHNHRLLAGDTAAVEAIKVLARAHQNLIWARTRHTNTLRSALREYYPAALEAFDNLADRDTLAILGRAPTPADAARLSLAKIRSALKTAGRQRNLDTRALQIQEMLRREQLAAPAAVTAAFGATTRAAVGIIAELNRQIADLEAELATHFEAHPDADIYLSLPGLGVILGARVLGEFGDDPNRYTTAKSRKNYAGTSPLTIASGKKRAVLARHVRNRRLYNAIDQWAFCGHCHVSGRRGGSRSRS

SEQ ID NO: 493895 - protein, 306 aa, unidentified
MKAIKLYLGLDVHKDSITIAIAEAERSGEIRLFGNVSNDLGRLEIALNRIRKAHPGAQLELAYEAGPCGFVIARRLKQLKIPCIVAAPSLIPKQPGSPFKTDKRDARTIARLFRAGELTAVYVPEPTDEAIRDLCRSRTDAIDDQRRCRFRLKAFLLRRGYRYQGKANWSQAHMRYLRELVLPHPAMKTILEEYLQGIDAAHERVQRIEASMLTLLESWRLKSAVQALMAFRGFQTVAAMITVSELGDIHRFAHPRQLMTYLGLVSVEHSSGPRQRLGAISRCGNGHQRWLLTECAEHYVLPPKIS

SEQ ID NO: 493896 - protein, 410 aa, unidentified
MELLHRRCCGLDVHKETVVACLRLVSDGKVTTEVRTFKTTTADLLRLSEWLAANGCTHVAMEATGVYWKPVWHILDDGEFALVLANAAHVKNVPGRKTDVNDAMWLAELLAHGLIRASFVPDTQTQEMRNLLRTRKQLVREQSSHVQRVQKTLEDANIKLDSVLTDLMGKSGRAMIEALIAGETNPTKLASLAHPRAKASPEEFREALRGRVTKHHRFLLRLHLNQIDALGAAMATVDAQVEANLGPFRTAVELIMSTPGIKNLGAHVIVSEIGIDMSRFPSHAHLISWAGICPRNDESAGKRRSNRLRKGAPWLKTTLVQCAWAAVKKKGSYLQAQFYRIKARRGPKKAIMAVAASILTAIYHMLKDGTMYKDLGCNHFDRRSTDQQKQRLVKRLAELGYAVEIKPLAA

SEQ ID NO: 493897 - protein, 346 aa, unidentified
MLHAGLDLSRRKVDVCLLSGEGEIVDEWASPPDADGLRGLAARAAMWGPAVRGVIESMNGARFVHDRLEEHGWEVLIADATKVKGLAPLACKTDRIDARVLATLSARDLVPEIWLPDPSIRRERELARFRLHLVRHRTTLKNRIHAALIAFGHPCPVSDLFGHAGRELLDRLEIPDPWRRSIEVSLRLIDDLELQIAALTVQLRRQGAEHRYIPLLVTAPGFGWINAFTVASEIGDIARFASPAKLCGHTGLCPRVNQSGASDRRGPISKHGPKYLRWALFEAALNACKHPYYAERYQHTKRRLGRQRGPKVAQIELARKLTEATWHMLTNNQPFAPADAPFRLAA

SEQ ID NO: 493898 - protein, 466 aa, unidentified
MSDPYSIQEEPRPTRPVKTTKALPVINPNAAGIDVGATEVYGAVPQDRAAQPVRRFATFTQDLQALADWLQTCGVQTVAMESTGVYWIPLFQILESRGIEVCLVNSRHVKNVPGRKSDIADCQWLQYLHAVGLLHASFRPPQAVCAVRALLRHRDMLVTYAASHIQHMQKALTQMNLQLHHVISDLTGKTGLAILDAILAGEHDPHKLAQLRDFRIKAPAQTIAKALVGDWREEHLFTLRQALAAYRHYQHLIAECDQEIERLLAQFDSQVDPATTPLPPATTSHRQPQRNEIRLARTDLRTELYRILGVDLTQVPGLQTTTIHTLLTELGPELSAFPTAKHFASWLGLCPDNRVSGGRVLSAKTRKVRNRAADALRLAAQSLHHSHSVLGDFYRRMRARLGAPKAITATAHKLARLLYHLLTTGQAYDASVFAQYEARYQQRRLQRLHREAAALGFTLTPQGSVS

SEQ ID NO: 493899 - protein, 309 aa, unidentified
MKQSVVYIGVDVAKANLDVAWAAASRRFPNDPNGHAALVVWIKQSAAPVQLICEASGGYEQALLESLEQNNLAVTLVQAIRVRQYARAAGILAKTDTIDAKVLAAFGAAMQPKPTPPFSAEQKRLRQYEAQRRHLSKVLLAEQNRLAQVSCAELRSLSRSLISKIKKQIDTLDTGIANLIAQDQVLCVKAQKLTAISGVGARTAALLLAQMPELGQLNRGQAAALAGLAPFNHDSGSIRGKRAIFGGRRALRSGLYMAALSAARYNPILSSFYQRLRAKGKPHKLALTAVMRKLLLALNSSLKPEPILA

SEQ ID NO: 493900 - protein, 363 aa, unidentified
MIVIGTDTHKKSHTCAAVFAGTGQLASGLTASARKAGFAELLDWGRELDPERIWAIEDCRHVSRAFERFLLASGESVVRVAPKLMGQSRRGERTRGKSDPIDALAVARAALREGPETLPAAHLDEAVLELKLLLDHREDLVKARSEDQQRLRWHLHDLWPEFELPAGCLDRTVWLDRLARRLARAEQGARVRVSRELVRAIRERTKRASGLEREIGAMVRAQAPQLLELPGCGALTAAKLIAETAGAARFASDAKLARLAGIAPIPASSGNRTRLRLDRGGNRQLNCAVHRIAVTQSRVHPPAKDYLARKRAEGKSTREALRCLKRHLIRRVWRLLNESEIDRSMTTVDSQRGTLAPQFAAVA

SEQ ID NO: 493901 - protein, 400 aa, unidentified
MLLFFEVITMIFVGIDVAKDTHYAAVSDDSGAVLVKPFAFQNNAEGFCLLLKKLSEFDRSKLLIGLESTGIYSENLICFLYESGFRLAVINPIQTATLRKTAIRKTKTDKVDTMLIIKSLMVNSYRLYSQRDADSLKLRTLCRFRQNLKKSKARLKIQLAGYVNLVFPEFGKFFKSGIHIAASYALLKKYSSPKEIAALRTSTLCTLLSKASHGRFGKDTAEALKSLALSSVGVKNPYISIQIAQTIAQIELLEQQIKDLNSAIEEAMESINSVLMTVPGIGAVNAACILGEIGDIKRFSKPCKLLAYAGLDPTVRQSGQFTAKSTRMSKRGSALLRFALINSAWQLPLNDTTFKAYYDLKRSQGLNHYGALGHVAHKLTRVIFKLLTSDTPFNPAKLVA

SEQ ID NO: 493902 - protein, 370 aa, unidentified
MPEPTPLFVGLDVHKDSIVVAHASGERAEPPIFVGAIGTRQADLDKLIRRLQGKSARLVFAYEAGPTGYGVYRYLTGRGLECQVIAPSLIPKKPGDKVKTDRRNAEELARLLRSGDLTRVYVPTVEDEAIRDLCRARDAARLTMKNAKLRLKSLLLRLGLHYVGRADWNAAHQRYLAKVVCPTPAQQIVFQETLRAVDDEVERMQRLEAELRERAPEWRLYPVVEALQALRGVQWLVAITVVAELGDLTRFTSPRQLGAFVGLIPSEYSSGLSRRQGGITKAGNGRARRALIEGAWAYRHPAKVSQHLQTRIDRLPKPIQDLGWKAQVRLCKRYRRLVGRGKHPNVVVTSIARELIAFMWAIAKEVPLSA

SEQ ID NO: 493903 - protein, 377 aa, unidentified
MKRIKFVSLDVHAETIAVAVAEHDGEMRSLGVIPNREESIRKLVKKLGPVEQLRFCYEAGPTGYVVYWQLTVLGAKCEVVAPTLVPVKSGERVKTDRRDALKLARNYRAGELTAVWVPDAAHEALRDLVRAREAAKKDQLRAKHRLSKFLLRHGRRPPTGVKAWTLNYLAWVKKEVHFEQPAQEATLLDYLHEVEHAESRIDRLDLAIEEAVKSTPPKMRAVIEALQALRGIAQVAAVTIVAELGEISRFPGARQLMGYGGIVASEHSSGESTRRGGITKTGNAHLRRVVVEAAWASRHRPNVGGALRKRQELVSEEVREIAWKAQHRLHTRYRKLTARGKDKGKVVTAIGRELLGFIWAIGVKVEAAQKETERRAA

SEQ ID NO: 493904 - protein, 385 aa, unidentified
MQMILGQSRFVPFGLPYWGLKRFNEGEQNVTALYDYHIGVDYHKAYSHLVVQDSAGKTLRSGRVKNDRQSLASFLERYRDNSHAVVEATRNWMVIYDWLDDICDDVVLAHPLKVKAIADAKIKTDKIDATVLAHLLRADLVPEAYAPSDRARELRLALRERMFYVRLRTMVKNRIVTAFDRYPEQTAQLKKLGDLFGKVGRQQLATLDVSEIDRVQIDRSLAFIGDINERIKQAETTIRAMTKTNANVKLLKTIPGIGEFFARLIDAEIDDIGRFRNPKKLAAYAGLVPSTYSSGGKTYHGRIIKQGNKWLRWAFVEAVQPAVATDPHLRAQYEHLKLRGTNKARVAIARKLLTIAFQILRDQRPYERRDANAEEGASSTISRLS

SEQ ID NO: 493905 - protein, 370 aa, unidentified
MVQHSEAFVALDVAKLRNAVAVADGGRDGEVRYYGEIDNTEAATRKLVAKLSAKYARLTFCYEAGPTGYGLYRLIKSLGHDCIVVAPSLIPSKPGDRVKTNRRDAVHLVKLLRAGELTAVWVPDNRHEAMRDLARARDAGQKDYKGKRQNVSSFLLRLGRHYPGKKTWSQAHLNWLAAQKLDHREQRIAFEELLFAVRQAKERVERLEQAMRESVPDWSLAPVVEALQAMRGIDVVGAASFLAEIGDLSRFENPRQLMAFLGLTSSERSTGESIHRGGITKAGNSRARRLLVEAAWSYRHPPRVGKEKQAKVEAAPRVVREIAWKAQTRLCGRFRTLTRKGKRSTIVVTAIARELSGFIWAINREVMASS

SEQ ID NO: 493906 - protein, 390 aa, unidentified
MPKYQDLSRSLAAFDQNSTLVAVIEMGSEGWLVGALVPGLKKDPRKKLSPDKQSLLALLHRWCAEAAKAGHAIKRVCVAYEAGRDGVWLARWLREQDIDAYVIHPTSIPVSREHRRAKSDRLDLRLLLRAFLGWLRGEPGHCSMVAIPTVEEEDGKRPLRERETLTGDVTRLINRMKSLLVTHGIRNFKVTLKKAGEKLAELKTAWGEPLPPESLAELQRSFERLRQAKQQIAEIDKARRRRLEKAPEAGVHPMILILARVYGVGLMTAESLVREVLYRNLRDRRAVARYAGLTGSPDESGKKRREQGLAKAGNGRIRRALIQLAWRLLRHQPESALVKWYRARTGDGRRDTRKVMIVALARKLLVAFWELVTNGTVPEGMRLHPAKVAG

SEQ ID NO: 493907 - protein, 407 aa, unidentified
MKNLSPHLQVAVDVGCHEHYVVIGLSTGGILDEFPVTHAPSGFQYFFKRIEQQKYLHGDLPVDVAMEGYNGWARPLDQQVQMHGYQLYNVNNLKLARFKKIFPAPAKTDTVDARKMLELFQLQETLPLAKGVLQAVLPVPEANRHLKCLTRRRRQLVNEKVSVQNRIQPDCQAVCPTLLEITGSVDNLWFLTFLTCREELPKLLRLHSKSLLAIPGIGLKYVRLILDWQKQAEFSADVDDVGSMIQEDAQHLLGLIASIKMLDVKISQQLKNSVMAQHIDSIPGFGLVCSAELAGEIGTLARFPKQSSFSIYIGMSPLDNQSGTYQGTKSPKHVNTRARKAMMTAVCRHMAVVPESRTYYDKKRAEGKSHNKAVRALGRHMSRIIWSMLRHDRDYELPTRVPLKEAA

SEQ ID NO: 493908 - protein, 428 aa, unidentified
MMKNNLTSTLFVGIDVSSKTNVVCALDFEGNKLLKLSVGNNLPGADLIAKGIISCVNDNKLLHVVVALESTSFYGLHIANFLSSHEELLYFSPLVYCLNPKSIANYRKSFVDIDKTDPLDAFIIADFARVGRIQSKPWRGSQHLALQRLSRHRLHLIEAMTREKTYMVSNIYLKFSELAVLDKSERPFSNTFGVTSAAILMEYMSLEEITYASIEELVEFISLKGKNRFNDPLATAKVLQKAARDSYRLDKSLYEPLSTSIASSFNVIEAYSKEIKVIDKAIVKAVKGLNTNEYQSLVSIPGIGPVLASGILAEIGSITVFSSQDALAKYAGLTWRQNQSGNFKSDTTRMTKTGNKYLRYYLIEAANSVRNHVPEYSAFYQKKYGEVTTHNHKRALALTSRKLVRLIFGLLTKNQLYSNNIVGVQKTE

SEQ ID NO: 493909 - protein, 426 aa, unidentified
MKNYNVLDTLFVGIDVSSKSNVCTAINFDSELLFTLSVSNNQVGADELKSKLIDTICKHKFKTTIIALESTSFYGVHIANFLSADKELLAFNIYVYCLNPLTIHHYKKSFIGIGKTDPIDAFVIADFARVGRIDSDPWRGSQHLALQRLTRHRLHLVELITREKTYMLSNIFLKFSELAVLKNSERPFCSNYISTAEAILTEMLSLEDIANLSSEDLIDFICKHSNNKFSNPEEVSSLLKKAARDSYRLDKTLYEPLTISIASSFNCIKSYQSEIKKINKAIDKTLKGLNPNAITILESIPGIGPVFASGILAEIGDINSFHSADALAKYSGIYWNKHQSGDYSADDTPMSKAGNKYLRYYLIEATDSIRKHDSNFSTYYKKKFDESTTHKHKRALALTSRKTIRLIYGLLTKNQLYAPNGVSVTS

SEQ ID NO: 493910 - protein, 333 aa, unidentified
MNKITLIGIDTAKQTFHLVGVDARGHYVWRKQVSRARLLSTLAQIECCEVVLEACGASHHWARSIQALGHTVRLIAPQHVKPYRRGQKNDYRDAEAIISAALSPGMRFVGVKRVEQQAEQALHRVRSRLMSQRNAAANELRGLLGEYGVVFRRGLKPLRDGARCFAETDEAHTLGLVDLVNDVLEEISVLQARMDHYERLIEQRVQADETSRRLREELNGVGKLGASALRVKVGDVRDYGNGRHFAAYIGLAPGHSGTGGQVRIGHLKRGHDRYLRQLLIHGARSALRHLGDKQDAQSRWLRGLLERRGFNIASVALAHKNARQAWAIMAREQ

SEQ ID NO: 493911 - protein, 342 aa, unidentified
MSEVTIIGIDLAKRVFQVHGAYSDGSDAFRKKLSRGQVLAFFAQQPRCVVAMEACATAHGWGRELEKLGHSMRLIPPVYVKPFVKRQKNDVADAEAIVEAALRPTMRFVAVKTEDQQARAMLFRTRQMFVGQRTQLINALRGHLAEHGLVAATGTAQLKRLADAIEDNDTALPEGVRDLGQMYLAQIAGLNARVAELDMKMRSVAKEADLARRFQTMPGVGPITALAIETFAPDLTTFRRGRDFAAWLGLVPKQHSTGGKSRLGRTLKMGQRDIRTLLVSGAMAVLQAVERFGAPNNGWLTRMRARKPRMVVAIALANKMARGLWAMMTKQQDYRVPVAAMA

SEQ ID NO: 493912 - protein, 310 aa, unidentified
MTIPPLVVGIDISKHHLDVFDPAVGRAERFDNEPAAIAVLARRFAKAQATVVFEATGHYDSALRRGLADAGVACSRVNPARARHFARAAGFLAKTDAVDARMLTAMGQTLKPRITPPVEPDRERLALLNRRRDQLVANRQQERTRRKECQDAAIAASIASHLAWLDQEIETIEAAIAELIKANPAILSLTRLLRSVPGIGPVTATTLVAHAPELGHCSPKSIAALAGLAPFNNDTGLFRGKRSIRGGRKRLRDALYIAAVSASRSKSRFGRFYRILREAGKEPKQAFIAVARKLLVTLNAIARDGVPFHP

SEQ ID NO: 493913 - protein, 386 aa, unidentified
MKKNNITEQSPSNRANKGFRNVNKTGHKAGKQNGPVTIGLDLGDKSSRYCVLNEEGEVVLERSVGSTKKAMTQVFGAIPRCRIAMEVGTHSPWVSRLLERLGHEVIVANARQVKLISQSSRKNDRLDAEMLARLARVDPQLLRPIRHRSEQAQGHLMVIRVRAALVEARTRLVNAARGLAKSMGERLPKCDTDQMGEERLQTLPQGLRETLKPLLQEVKSLTEKIKECDVKLEQIARTEYPETCLLQQVSGVGTLIALTFVLTVEDKQRFVKSRDVGCFVGLRPKQSDSGESKPQLPITKEGDRYLRKLLVQGAHCILSHRGPDTDLKRWGLQLSDRGGKNAKKRAIVAVARKLGILLHRLWVTGEVYEPLRNSQAVAKQKKTVAA

SEQ ID NO: 493914 - protein, 337 aa, unidentified
MMYSGIDLHSNNSVIAVIDDSDRVVAQKRLPNDIAKIIGFLARWQDELAGVVVESTYNWYWLVDGLQDTGFHVHLANTAAIKQYEGLKHSGDETDAQHLAHLLRLGILPTGTILPREHRVVRDLARKRMQLVQSCTTHVLSVENIMARQLGGRMTSNQIKRLTADTVDSLPLGEDVGLAIKASVAVIATLQSQIEVLEKRLQERVKPRPQYALLTSVPGIGQALATVIVLETGPIDRFADVGNYASYARCVDSVRTSNRKKKGEGNVKNGNKYLAWAFVEAANFARRFCPEAKRFHERKKARTNNIVATKALAHKLARASYHILKESKPFDVARCFA

SEQ ID NO: 493915 - protein, 331 aa, unidentified
MLGIDVSKASLACTFLDPQSLQSLWQLEVANSASGVQQLLQRTPRDSPWVVEPTGQYSRQVVGLAQAAGREVLLAPPREAKAFLMALSPRAKTDRLDSVGLARYALAMPLRSYPRKTVAVEQVEQLLAARKGISRSVASLRQQAQALPHASEPLERAIAALLGEQAAIDRRLAQQTRESPEWASVALLQSVPGIGPVTASAVAACLASREFGHPDQFVAYIGLDVRVRESGQRRGTRSLSRRGDAELRRLLYLCAQANLRSRDPANPFKQQYERERAKGLPSTAALCAVARKLARTCWSIAKYQTAYDPGRVNRQGGSSGSSATAAIDSEP

SEQ ID NO: 493916 - protein, 398 aa, unidentified
MSRIWAGIDCGKTHHHCVAMDADGKTLQSRRVANDEPDLLKLMGDVLDLADGREVTWAMDMTGGEPGLLIAVLVNHAQELLYIPGRMVNRASDAYRGEGKTDARDARVIADQARMRRDLQTIRPDDETTIELRLHTSHRIDLVADRTRTINRLRGTLLSMFPALERSLELTNAGPLVLLTGYQTPAALRRIGVSRLTTWLRNRRVRGAEALAKAAVDAAERQHTAVAGEQVIAKMVHTLAREVMALNEKIAEIDKLIEGRFREHELAEVILSMPGMGPKLGAEFLVAIGGSLDGFPTADRLAAFGGVAPAPRDSGKTSGNLRRPQRYHRRLQRVFYTSALVSSWSDPNSKRFYDRKRAEGKSHVQAVLALARRRVNVLWALIRDRRCYQVTPPVTEAA

SEQ ID NO: 493917 - protein, 339 aa, unidentified
MAWTVAIGVDTHKEAHVAVACDRLGRQLDACELPAGAGGYARLLEWAEGLGSPAFAIEGCGSFGAGLARFLQASGAAVFECERPRRRERRRGKSDLIDAALAARRLVAGEGLARPRGGGRREELRLLLLERRGLVQARTAALNQLQAVLVSAPERLRVRLGSLRGTRLARAAQALRAGSDEERVLVGVLRRLARRVQQLEAELAELEAELEAIVSELVPELLAECGVGPVCAAQLVASSGDPARMRSEAAFAALAGTSPVDASSGRQRRHRLNRGGDRQLNRTLHVIALARVRHDRETAAYHQRLLGSGKTDREARRCIKRALARHFYHRLSANSALTT

SEQ ID NO: 493918 - protein, 349 aa, unidentified
MSQNLNSAVAVIGIDIGKNSFHVVGLDDRGAIVLRQKWSRGQIEARLANLPPCLIGMEACVGAHHLSRKLKALGHDARLMPAKYVRPYSKGQKNDFRDAEAIAEAVQRPTMKFVATKTAEQLDLQALHRVRERLVSQRTGIINQIRAFLLERGVAIRQGLRFLRAELPRILATSPDVLSARMVRVIRDLAQDWRRLDERIDQLSSEIAVLARQDAGCERLMSVPGIGPIISSAMVAAIGTGEAFSKGRDFAAWLGLIPKQISTGDRTILGKISKRGNRYLRVLFVQAAWVVLIKPMSWERHGLRSWIEAAKKRLHRNVLAIALANKLARIAWGVLAGGRIFEASKLQAA

SEQ ID NO: 493919 - protein, 343 aa, unidentified
MEYAAIDLHSRRSQIRIVDAEGTVVLDCRIDTTRAAFASTFGARASMRILLEASTEAEWVAQCLEGLGHTVVIGDPNYTLMYGQRSRRIKTDKRDAAALAEACRCGIYRPTHRVSTVQWRERQRQTVRFQLVRQRTALINLTRALLRQEGHRLPSGAPECMEARLDRLALSTTVLAILTPLRRTMRALNTTLRSIDRAIEARAQGDPIVRLLMTAPGVGPVVALNFRAVLDDPARFGGEAQRVAAFIGVVPRENSSAERRHKGRITKVGPATLRSLLVQASWAVCRSHRADTAALRAWAQSLAARRGKRIAIVALARRLARMLFAMWRDGTPFRPVMRATVAA

SEQ ID NO: 493920 - protein, 318 aa, unidentified
MNAEYRGGFVGIDVSKRQLDVAVGEAGVEWSVGNEAEGIAQLVERLRRLEPSLIVIEATGGLERPAWLALGRADLPVALVNPRRVREFARAIGWLAKTDRLDARLLARFGRDAKPARTVLPSPADQHLSALLARRKQLLDMLTAEHNRLGTASPELQALIREHIEWLTQHLHDLEREIDAFSRQDPQRQEKHALLQSVKGIGPVNAATLTADLPELGRLDRKQIAALAGVAPFNDDSGRRRGKRRIKGGRASVRQVLYMAAVCAARWNPVIRAFYRSLLARGKEKKVALVACMHKLLTILNAMVRDHQPWREPAVQPV

SEQ ID NO: 493921 - protein, 344 aa, unidentified
MTITTIGLDLAKSVFQVHGVDVKGAVVVRKTLRRGQVLSFFSQLAPCLVGIEACGTSHYWAREIARLGHEVRLMPPAYVKPYVKRNKTDANDAEAICEAVTRPTMRFVAIKSPEQQAALSMHRTRDLLVKQRTQLVNMIRGLLAEFGVDIPRGLERALFIARRILEGEALDIPDGGAKIVVMLSQQAFDTHSRIKDVDRDLQRWHRSNELSQRLATIPGIGPIGASALVASVTDPGQFRSGREFAAWLGLTPRQTSSGGKERLGRITKMGDRYLRKLLFVGMISLVRRAKYKPESVDPRLADLLARKPTRLAAIALANKTARIVWAIMTRGDTYRAGHVPALAA

SEQ ID NO: 493922 - protein, 391 aa, unidentified
MIYIGIDVAKDKHDCFITNSDSEVLFKAFTIFNNLDGFNDLYQKIESVMDDVTKVKVGLEATGHYSYNLLGYLIDKGLPTYVINPLHTNLYRKSLSLRQTKTDKVDARTIASMLMSDVNLKSYSDTSYHNEELKSLTRYRFDKVKERAKLKTSVSRLVCILFPELEKLVPTLHMASVYALLSKFPSAKHVATAHLTRLTNLLSESSKGRYCKDTAITFRDAARASIGSNMPAKSLELKHTIKLIQELDSEIDEIENEIKIIMDGINSPILSIPGINYRMGAMIIAEICDFNRFDSPDKILAYAGFSPSTYQSGQLDGAYAHMEKRGSRYLRYALYNATKYVCHWDPTFAAYLAKKRAEGKHYNVAISHAVKKLVRVIYHLEKTKQQYIKAS

SEQ ID NO: 493923 - protein, 438 aa, unidentified
MSNKVIFNLDELFISVGIDVGADFSWMSIALPNQQFVGKPYKILHNSIDSLTTAVSKIKEAEELYSLESRIFLESTGIYHYPLFCYLRDKGFNCSVINPIITKNSTNINIRKVHNDRFDSKKAALVGLKPDLKVSLMPSDLALNCRNLCREYYDLMDSRNAYVNKLIGELRMVFPQYLGIFSKVTIDTSLILLETYTSPSAFINADKQEIIDLIRSTARFGLTYACNKYNAIIQAANDADEFGYILDSNIKRIRLYIGFIRKYDEEINSILESMHELVAANEDTDFVKQIRLIETFKGAGFLSAMSLMGEIGDFSAFSKPKQLFAYFGLDPAVKQSGKFEGTKIQMSKRGSAIARRVIHTLTLQSISASRTGESKNPVLRDYYLKKCESKPKLVAMGAVSHKVCNMIFAILRDSKPFEIITPQEHIKKYNAAKCDVAA

SEQ ID NO: 493924 - protein, 316 aa, unidentified
MHSENIAAYIGLDVHKETLAVAIAAPERLGEVRYYGTINNEAQAVRRLFQKLQGLYGNILSCYEAGPCGFGLYHQLTAMNIKFQVIAPSRIPKSPTDRIKNDHRDAISLARLLRAGELTPVWIPDLTHEAMRDLIRARAAAKRDSRVARQRILSMLLRTDKRYAGKHWTGKHRTWLANQSFSQPSQQIAFQHYCQSLEQIEDRILQLDQEISRLLPEWSLCNLVCQLQALKGVGQLIAITLVAELGDFSRFSNPKQLMAFLGLVPGEYSSGNSIRPRGITKVGNSELRHLLYGYQINSDYLTVKPHLCDESHKKAK

SEQ ID NO: 493925 - protein, 389 aa, unidentified
MLLDHPSDGPTAIRTHIGAIFVSLELSRSTWLVTSLSPGKGEKMSKHSVAAGDMAELLTLFAELRRKAEVRTGQSYPIITIQEAGLDGFWLHRVLQQNGIESHVVDPASIATPRRRRRAKTDRLDGEMLLRALLAYKRGEPRVCAMVVAPSPEEEDRRRICRERATLIAERIVHVNRIKGLLFAQGISDYGPLRRDRRARLDALRTGDGRELPSHLKAQIGRELDRIELLLKQIKSVEAAQEALLAAARKPASEKAVPDPVTTLLALKGMGANFAAVLWSEAFYRSFSNRRQVAAYAGLAATPWQSGGIRHEQGVSKAGNPRLRTTMIQLAWLWIRHQPQSALTRWFKERSQQGRKRAIVALARKLLVALWKYVTQGVVIEGAVMKPAA

SEQ ID NO: 493926 - protein, 408 aa, unidentified
MEVIYERCAGLDVHKDSVVACIRIAEGGRARCAVRTFGTTTSQLLLLGDWLSSEAVTHVAMESTGVYWRPVWHVLEGQFALVLGNAMHIRNVPGRKSDVNDATWIADLLAHGLIRGSFVPPQEIQELRDLTRTRKELIREVTQHVQRLQSVLQDCNIKLDSVASNIMGKSGRAMLDALVRGETDPVKLAEMALGMLRKKHDALVEALRGKVRPHHSFLLKLHLGQIDALGLGIAELEAKIEEMLRPFAEAVAHLVTMPGISDTAAHVLVAEIGLDMSRFATAGHLLSWAGLCPRMDESAGKHRSTRLRKGGNWLKTTLVQCAWAAARAKGTYLQAQFLRLKARRGPRKAIMAVAASMLTSAYHMLRDGEEYAEPKVQQLDVRERRRAAKRLIGRLGELGFDLQLPEAA

SEQ ID NO: 493927 - protein, 412 aa, unidentified
MQDILTCAMGLDIHRDVIVACLAKGELGTDPEIEIRSFSTLIPEMRKLRDWVLEAECRYVAMESTGIYWQPIYKMLEPCFDGQISILVVNARHMKNVPGRKTDMRDAQWIATLLRAGLLKGSFIPDKTFRELRHLTRYRKSIVRDITAQKNRIDKFLQSSGFRFTAFLSDAFGASGRNIIRHLMEYGNISREALDRCLKTQTRKRIDEILIALNGSLSEHQRGFLRMIFGHLEALEQHRHTVEDAITKEITKHEEALSLLCSIPGIDVTAAAAIIAEIGTDMSAFPDSQHICSWAGLSPGNNESAGKRKSAHINKGNPYLKSMLCEVGWVISGKRSLYLSGWYWRIKQRKGAKRATIALARKLLALIYTMLKTGSPYNEDCFEIRRKQSERKRASRMVNELQKLGYFVVAPG

SEQ ID NO: 493928 - protein, 425 aa, unidentified
MSSSDVLSSPLDASGFASVVGIDVGSQACVYTVLQPDKRIIVKPTEVANRDTGFVQVHASLSHLGVPPQRILIGLEATSRSSENWYQFLAAQGYVLCLLHPRQTHQFAQQRGLRAKTDRLDAATIARVLLSGEARPGSVPDELIATYRELERLHSQLTDDGARYQNQIQALLVVLFPEFVQVFADPCRPTALALLKGYPSARALVKAGVEAVAATLREVAPRRYGRKTAQQLVALATQSSASGLATDARALSLKILCDQLQHTLANLAQVEHELDQVLDRDTGATGLKSTPEFGRNTVAVLRAELGDVTRFQRVDQVVAYAGLDLEVKQSGKWKGEVKLSKRGSGRLRRVLSLAALRSICLPASAFGAYYQRLVARGLKARDALTAVMRKMLIVAYHLLRSNETYDPTKVCAVAGPPPHTPSSGS

SEQ ID NO: 493929 - protein, 411 aa, unidentified
MDVTYERCCGIDVHKRSIVACLRCGKKQEIRTFGTTSKEIRALAKWLWDEKCQMAAMESTGSYWKPVYNLFETSHLGVMIVNARNMKNVPGRKTDVKDAEWIADLLQHGLLSASYIPKREQRELRELSRYRKSLIAERARELNRLQKMLEGGNIKLSSVVSNINGKSSRSLLQKLLKKDAPLQKDEVEESLHGALRHKVEDVMQALDGFLTPLQKQLILQVVDHIDDMTKRIGQMDKLVKQYSSGYEDAIEKLDEIPGIGRQSAETILAETGLDMSRFATEKHLSSWAGLSPGNNESAGKRQSGRTTKGNATLKTTLIQCAKEAIKKKDSFLSAQYDRLVVRRGAKRATVAVAHTMLIAIYHILKLGEPFIDLGADYYNKFNKERKINSYLTKLKKLGWQPETATFSAAST

SEQ ID NO: 493930 - protein, 347 aa, unidentified
MITIGIDPHKSSHTAVALDQTGVLLGELRVLADSSTLAALSAWAARWPQRLWAIEGAGGLGRLLAQQLVAAGETVVDVPSALAARARVLQRGHGRKSDGIDARSVAIVAHNRNDLSTVRIDDHCAVLRLISDRRDELTSERRRTVNRLHRLLRELRPGGAPRQLSAERASRLLATIKPSGAVDTERKAIARQLIADVRRIDRALLDNRRRCAEAVAASGTTLTQIFGISEVLAAKILAHTGDITRFANADHYASYTGTAPIEVSSGEQRRHRLSRAGNRSLNHALHLAARVQTMHPGPGRAHYQRKQAEHKTPAEALRSLKRQLAKVVYRHLRDDHTLQTSPTPELT

SEQ ID NO: 493931 - protein, 397 aa, unidentified
MYIVGIDIAKRKHEAAVIDGEGTVIIKPFSFTNNCSGYNRLLAMLTKAKLPLDEVSFAMEATGHYWLALFTRLQKEGFRVQVINPVQTNSIRSFYIRQVKTDPRDALLIAEVIRFGHFSESTLHPENIYELRELCRGRHAIVSMQADVKRKVVALLDQVFPEYETAFTNLFGDTSMAILQTCPTPKELSETPLEELCHLIEVSSHKRFRMAKAQELQALARNSFGFAMAGDVFSTMIRLYAKHLDFLKQQVREMDRKIAEIMDTLDTPITTITGIGPTLGAYILSEIGDISRFSSAAKLAAYAGIDPTMRQSGEYNGVRNRMSKRGSPYLRHAIWLAASSAVLHDPALKLYFQKKRDEGKPYMASVGHACRKMVSIIYAVMRDNKAYTPYIPNEISA

SEQ ID NO: 493932 - protein, 342 aa, unidentified
MENIALIGIDLGKNSFHIHCQDRRGKAVYRKKFTRPKLIEFLATCPATTIAMEACGGSHFMARKLEELGHSPKLISPQFVRPFVKSNKNDFVDAEAICEAASRPSMRFVQPRTESQQAMRALHRVRESLVQDKVKTTNQMHAFLLEFGISVPRGAAVISRLSTILEDNSLPLYLSQLLLKLQQHYHYLVEQIKDLESQLKRKLDEDEVGQRLLSIPCVGTLTASTISTEIGDGKQYASSRDFAAATGLVPRQYSTGGRTTLLGISKRGNKKIRTLLVQCARVFIQKLEHQSGKLADWVRDLLCRKSNFVVTCALANKLARIGVSLDIENYCTISLFFEQTYL

SEQ ID NO: 493933 - protein, 451 aa, unidentified
MKTKKGIKPSNTMISVPVVNPHAAGIDLGSKSHFVCVAQDNVKEFGVFTTDLHVIAHHLQDHQVLTVAIESTGFYWRPLYLMLLDYGFEVTLVNARHLKNVKGHKTDVVDSKWLQFLQSIGLLSNSFQPDAFTHELRVLTRHRKSLIEDASRFIAKMNKILVLMNIQLHVVLRDITGQSGLKVIEAILKGERDAKKLTALVSVRVKATRENIEKALTGDFRKEYLFELSQCYQLYMVYWQKIEETDIQIEELLKLSVGQTPVNNKYKSPKNKQYQKNDPNFNVGRYAYQMSGGVELLAINGVGSATILTLISETGLDLSMFKTAKHFASWLGFAPNRKITGGKVISSHTRKKTNPLAKVIRDAANAAGNSKSRLGDFFRHLAFRKGRMVAIGATSRKIAVIIYKMLMEGNEFSYEYDEQETQHVRNNKIKNIVKTLKKYSISKNELELALG

SEQ ID NO: 493934 - protein, 371 aa, unidentified
MAEYSEAFVGIDVAKGRNAIAVADGERGGEVRYLGEVDASPASMTRIVRRLADKYDRVQFCYEAGPTGYGLYRLITALGHACAVVAPSLIPRKPGERVKTNRRDAVGLAKLLRAGELTAVWVPDTGHEAMRDLVRARSAAVETLRVHKQQVSAFMLKHGRHYPRKKPWSMRYLRWLQEQQFDHPAHQIVLQEMVEAVRLAKERVERLERTIEEFLPAWSLAPIVEALRALRGVDLIVAVTFVSEVGDVGRFENPRQLMAYLGLVPSERSSGDTVRRGGITKAGNRRVRHMLVESAWTYRHPPRLGAHKLYILEKLPAKVREIAWKAQMRLTARYRALAGRGKRTTVVCTAIARELVGFMWSVAHEVEVRSA

SEQ ID NO: 493935 - protein, 352 aa, unidentified
MERYIGLDVHAHSCTITVMGPSGKRLRSLVVETNGAAVVEAILSVAGQRHVCFEEGTQSAWLHELLRPHVVEIVVMVPPKHNGPKDDLRDAWACADAIRTGATGTRVYKAPEHLAALRNAVRAYGFAVRDVVRAKNRLKSVFLSRGIVADSVVYDADRRGKWLKKLPPAHRRLADWLGRQLDELHSLREEADGWLAKEARTHPIIRTLSTAPGLGPIRCAQLVAIVVTPERFRTSRQFWSYSGLSIVTRSSANWKPNGAGKMVRVEHQQTLGLTRKRHPLLKAVFKGAATTVIEQMPKHPLHEDYQRMLASGRKPNLAKLTLSRRIAAIVLSMWKHKEEYDPKRHAGVTVKA

SEQ ID NO: 493936 - protein, 343 aa, unidentified
MVAIGVDTHKASLAACAIDEAGRVVAERSFANSPAGHRAFGRWLRALPLPRRVGIEGSGSFGAALSSCLLAAGEEVREVPAILTHRERRRTGRPGKCDPADALAIARVVLREQELPLVRGPHGYRDLKLLVDYREQLICEQTRVRNRLHSDLQVLMPGYGAGLGDVRHASGISAVRHLLAPLSGVAVELLELRLVRLEALAAEIAQNKLRVEGVLAGEHAALTAICGVGPLTAARLLGETGDARRFRSAAAFAMACGVAPIPASSGKTQRVRLNRRGNRQLNRALFIVAFTQMREHAPARAYMERKRLEGKTWKEAMRRLKRQLADVVYRAMLEDSRSEALTT

SEQ ID NO: 493937 - protein, 343 aa, unidentified
MLTKNVIAIDLAKNVLQACHISVHGEMLSNKPLSRQKMKEFLAKVKPSIVAMEGCCGCHYWGQLAQKFGHEVRIINPKKVKGYLEGHKTDHNDALAIANAAIQIGIKYSRPKSLEQQSMHSLETSRRFLSRSVVSLGLHIRGTILVYGIANPRGEKGLKASVQTVLDGETSIPANVVSVLSMLWEQYKELKAKLIAFEKEKNALTRQIEPCQRLMEIEGVGETTAAMLYTTLGDGKQFKNGRQASAFVGLTPKQHSSGGKVFMIGIDKCGGVKELRSLLYLGAMSYVGRLPEKPKTQKDAWLRSIIDRIGFKKACIALANKVVRTAWAMLRYETEYKPVLLTN

SEQ ID NO: 493938 - protein, 370 aa, unidentified
MSQSSTLFIGMDVHKDSIAVAYVAQDHGAEVTYLGSIGTRQCDLDQLIRKMQSKAKHLLFVYEAGPCGYWLYRYLTNKGYDCWVVAPSLIPKKPGDRVKTDRRDAVQLARLARSGDLTVVYVPKVEDEAIRDLTRAREDTLRDLKSAKFRLKAFLLRHDIRYTGRATWGPAHLRWLAEVLCPTPAQQIVFQEYVRAINEHTERLQRLEQELQGHVKTWRLQPVVEALQALRGVQFTAAVTMVAEVGDLTRFESPRELMKFLGLIPSEYTSAERRRQGSITKAGNTHARRVLVEGAWAYRYPAKVSRHLQLRLENQPKLIQDISWKAQVRLCKRYRHLIARGKHANVVTVAIARELTGFMWAIAKQVPVTA

SEQ ID NO: 493939 - protein, 339 aa, unidentified
MEVTTIGLDLAKNVFQVHRINEDEEVAFNRPLRRAQLLRFFSKLDPCLIGMDACSSAHQWVRELTAFGHEVRLIPPIYVKPYVKRGKSDAIDAEAICEAVTRPTMRFVAIKTVEQQILLSLHRARSLLVRQRTQLINGLRGMIAEFGVYIAKSLARVIGFAEDILTGDVLDLPDIAYEVIHNLCEHLMALHTRIRWYEDRLKQVAKEDARVRLLRTIPGVGAVTASAIIASIGDGHQFSNGHEFAAWLGLTPANKSSGGKEKLGRITKTGDQYLRSLLVVGMISLVQQTKSHPERASKWMISLLERKPARLATVAMANKTARIVWAVLTRNQPYTPHTA

SEQ ID NO: 493940 - protein, 387 aa, unidentified
MATPASLELRVGIDVGSRCHSVAIGLSDGRLLEEFEIAHTAAGFQDFFRRVEASGLRHAAPIAVAMEGYNGHVRPLDSLVKARGWQLYNVNNLKLARFKEIFPAAAKNDRIDTRKTLELFQLRDHLPMAGDVLQEIAATPEENNVLKRLSRRRRRLVDERTRLGNALGADLQAVCPGLLEITREVNNYWFLNFLTCRKGLPKLARLRRASLLKVTGIGHKYAGLIQAWQSEAFFSHDVDLVGDMIQQDAERMLELREQIKALKDQMARVANDSAIARQLNTIPGFGLICTAELAGEIGTIERFQKETSLAVYLGMANLDHSSLGSSRVLLPFGSVYPTGDAFSWHQPMEQAWEESVSSEKSSCCYPDQSNQRWMALNIRNGMLGNDW

SEQ ID NO: 493941 - protein, 289 aa, unidentified
MCEGKDIILVADYHAENIEFRWFNEATGEERRGKYPTTRTGILGQVEQAYRELAPGGRVVWIMESTTGWARVKELLGERVEFVLANVLQMPLPPKARRRKTDKIDTARLLREYMHGSLPRSFQPSRWWRQVRRVVDCRQDLVERQTALKNWVGSLLHHETWEDRANLWSAKGQRRLAAMKLSASDRLLVELKVRQIEQVTEEIRQVEEVMKAIYDQWPEAQWVDAMRGIGMVTAVSLLAHIGPIERFATAEKLISYAGLAPGMWESDGTCHHGRIGGGGTDGHIRYLLI

SEQ ID NO: 493942 - protein, 348 aa, unidentified
MGYFAGLDVSLEETAICIVDDEGRILREARVASERYALVAFFNALGMTMERVGLEACSLTAWLHQGLSEAGIPAVCIDARQAKAAIGAMPNKTDRNDARGLAQIMRTGWYRAVHVKSPSCRSWRALLTARRMLLNKRRDIENGVRALLREAGLKVGAPSRKDFPARLRELASGDDVLTGLVESLLSVIKVTTDEVARLTKRVLDEVRVEPTCRHLMTVPGVGPLTALAFRATVDRPDRFRKSRDVGAHLGLTPRRYQSGETDVQGRISRCGDELARTALYEAAHSLLIRSRKWSALRAWGMQVAKRRGIARARVAVARKLAVILHRMWVDKSEFRWGKQAATAAKAAR

SEQ ID NO: 493943 - protein, 338 aa, unidentified
MTTGLAAGTYELFVGIDIAATTAEVSTQRPGAKAGRSFKIDQTPEGFHRLVHTLQATDNEPSHVLVVMEATGSYWMSLATRLVHEGFRVSVIHPSQAHHFAKALLKRAKTDAIDAQTLAQLAMVLQPEPWMPPPQIYYELQQRLAQRDDLLNLRQQVRNQLHALDQHPEVMASVRTRMERLLVLFQSQIDEVEGEIAAALNQDSAWAAAAERLQSIKGVGWVTAAWTLVTTLNFTTCDTVDALTAYAGLAPMPRQSGSSVWHRPSIGHSGNGRLRTAFYMATLTAARFNPAIKAFYNRLLEAGKPEKVARCAAARKLLHMAWAVVKKDQPFDPNYAQG

SEQ ID NO: 493944 - protein, 400 aa, unidentified
MISVGIDVSKGKSTVCILKPYGEIVSKPFNITHTHKDLSELSSMLFRLNDEVKIVMEATGIYYLPVLTYLQEKGFFVSVINPYLMKSYRNESLRKAKTDKIDSRIIANYGIDHWFKMKEFQTSGEIYEELKLLGQQYRHYMKLHLLSLAELTHLLDLTMPGIKNLLASWNETNRKDKRSDFVERFWHYDVITSMSEQEFTEEYILWAKEKKYVPSQEKAKVIYTLAQESIPTLPSETSSVKMLVTEAVRVLKEVDATLGLILSRMQEIAKTLPEYSVVREMGGVGNTLAPKLISEIGDVRRFRNGKALVAFAGIDPPPYESGQFVGCNRKISKRGSASLRKVGYETMRSLKMRSRPEDPVYRYVVKKESEGKSKKSAKIAGLNKFLRIYYARVTELYKNI

SEQ ID NO: 493945 - protein, 359 aa, unidentified
MDGGDSLLAKLSDYTPDSIQIGMEATGHYWLSLYSFLLDAGYSVHVVNPIQTDGWRKGTEIRKRKTDIIDSLLIADLIRYGDFLETSLANEDTLALRNLSRFRGYLVSSIGDLKRKTIALLDQVFPEYQSVFSDVFGQTSKELLLHFQTADDFVAISADQLEGVLDKMTKKSFARRKVQEISQLAGHSFGLSFCKDSFSLQIRMLLEQIQFIEEQVHDVEQEISQIMDKMDSPILTIPGIGLVNGAVILGEIGDISRFSSPVKLVAYAGIDASVSQSGQYQSTNNKMSKRGSPYLRKAFFQAALVAAFNDPTFSAFYQKKRAEGKHHLTAIGAVARKLCYVTHAILKNNTPYVVQTPKE

SEQ ID NO: 493946 - protein, 438 aa, unidentified
MFTKLQSIIFAGIDWGSQLHQVCVMNLEGTVLGERAFPHSGEGLGQLLDWVLACAGCAAAHIGVAIEIPHGPVVDSLLDRGFRVFSINPKQLDRFRDRFSPAGAKDDRRDARVLADALRTDPACLRELDPLDAHIVQLREWSRMHEELTHQRTRLTHQVRDQLWRYFPQFLKLGFSLSSPVMMALWTLIPTPTRARRVRLSSVEKVLKAHRIRRLNAEQVLQCLRTRPVTTAAGVLEAATTRVKLLLQQLALIEQHISEAKQAMEALLASLSTEQRPAPASSGEEETDPGCEPTSSGGTLRDVEILSSMPGVGTTVLATLLSEASSLFKNRDYRGLRCLCGVAPVTRRSGKSWRVGRRRACQARLVNAVYHWSRVAVQHDPISKAKYKALRARGHSHGRALRSIADRLLAVACAMLRDQTCFDRSRATAAAKLLQPAG

SEQ ID NO: 493947 - protein, 381 aa, unidentified
MNTETTLTNQYNRFEPYLFLAFELSQNLWKLGFTIGVAQRPRIRNISARDLPALQHEIQAAKNRFGLPANAPVLSCYEAGRDGFWIHRYLEENGIQNLVVDSASIEVSRRARRRKTDKLDVNKLLAMLIRFHSGEQKVWRVVRVPTKEAEDARQLHRELMTLKSERTRHTNRIKGLLTSQGISISVKPDLPDRLETLRLWDGSRLSEALVMRLQREYQRWMLVNQQIDQLTAYRKELLKTSQQPSVEQVRRLMHLKGIGINSAWLFVMEFFSWRDFRNRREVGACAGLTNAPYQSGDTSRDQGIEKAGNRFIRAIAIEIAWSWLRYQPRSKLSQWYQRRFGQGGKRQRKIGIVALARKLLIALWRYLETGTVPEGALLKAS

SEQ ID NO: 493948 - protein, 309 aa, unidentified
MNEIYVGIDVSKDSLDVTALPSKEKWRYANDEVGIGKLVARLKKLSTSLIVMEPTGGLEAMVAAALAAEGINVAIVNARQIRDYARATGKLAKTDKLDALVMAEFASVIKPQPRQLRDEESEEIKATVSRRRQLLGMLTAEKNRMAIARKNLKPNILAHIEWLKKEIADLDRDLRRRIEGSPIWRVKDDLLQSIPGVGRVLSATLLAELPELGKLNRRQIAALVGVAPFNRDSGIMKGKRSVWGGRASIRAVLYMATLASTRYNPVIRSFYQQLLVRGKAKKVALVACMRRLLTIMNAILKYQRAWRYV

SEQ ID NO: 493949 - protein, 422 aa, unidentified
MLGAGIDWAEEFHVVALGRPGEGVIEVLRVEHRPQAVAALVERIAGLEADPAEVRVVIETRHGLLVEALVEAGYTVLPVNPELVSRRRGPARKKDDAEDARICCLLALDRHAGLRRLIPHGQVAGELRSIARDDERACRDERRLLNRLRADLLVTFPAALAIAGEDLGATRILRLLERWPTAAALAAASREEIIEFGRAQRTGYLQRFADRIAAALAEDHFTAPEHLARAKVDTIRLTARQLLLIDAQRRAWEKRMGELLLGTPGQHEAEDQPGNAFPGGEIYLSFPGLGRRLAARIAGEIGEHIEQFTTPNSLQCYAGRAPVTRRSGKRDLVVAHRLACNRYLADAVHKWAFASLRRSGWARDFYDAQRARGKSHHAALRALGNRWLEVLWHCLTHDVRYDEAVHVANRDRALAAIAASAA

SEQ ID NO: 493950 - protein, 387 aa, unidentified
MQPAHIQDFTLDDQTLTASLELASKNWKMALQDGMHRSPSEHKAEQEGAAARLEEAIGLIETTRREWGLPPSCRVVIVYEAGQDGFWISRALQKRGYEVVIVDPASIPVERQARRAKTDRLDAIRLLCCLRGWLRGERDRLHAVRVPEVEAEEMRHLMRDRGLLQKEVGQHRDRIRKLLRTVGCWVRVGPAFAGQLERGEVVCHDGAALPPCLRQRLMRECERLDLVTRQLKELEAALPEQLPEATARSVATLQRLRGVGQIGAHRLVLELFWRRFDNARQVGSCVGLVPQPYDSGQSRVDQGISKQGNRRVRALLIEMAWMWLRYQPDSALTHWFARRTTTGAGDPSAGKRGKRVAIVAVARKLVIALWRYLKDGVIPDGAELKYG

SEQ ID NO: 493951 - protein, 363 aa, unidentified
MTKVTIGVDLGDQYSQLYVVDAAGTCVETGRVRTTRAGLERWFAGQAPARVVLEAGTHSPWASRALQALGHEVLVANPRKLRGLYENDSKDDRVDAEYLARVGRLDPALLKPITHRGAAAQADLAVLHARDALVRTRTQLISHTRGVVKALGGRLPRCSAEAFARRASGDVPAELQPALAPVLAQVQQVTAAIRAFDRELERRCAEQYPATARLRQVSGVGPVTALAYVLVLEDPRRFARSRAVGAYLGLRPRRSQSGERDPQLGITKGGQSIPPPPPGAGGPVYPRPAWAGLRPAAARRTDCRARGQECEEAGRDRRGPEAGGAAAPSLDQWGGVRAAAPQHGAGAGELRRPPGTEATSRSS

SEQ ID NO: 493952 - protein, 402 aa, unidentified
MNAVGIDVSKGKSMVAVMRPFGEVVLSPFEVSHSSSELSKLARLLKSLDGESRVILESTGNYHAPVAKVLHDAGVYVSVVNAMLVHGYGNNSLRRAKTDKKDAVKLANFGLDHWLSLPRYVPDEDTRLLLKSCYRQYQQCAKVQTMMKNNLISLLDMIFPAVNRLFSSPVRTDGSEKWVDFVDAFWHVQCVSGLSANAFSTKYLKWCRKHGYKFSEEKALEIHQTARDHVAVMPKTDTTKLLVRQAITQLRTISSAKAALQNEMETLAASLPEYPVVMDMFGVGPKLGPQLMAEIGDVRRFHSKKALVAYAGIDAPPYQSGQVNVHSRSISKRGSPALRRTLFLVMSVYLKNSPEDEPIYQYMAMKRAEGKPYLVYMMASANKFLRRYYATVKAYLNALEQG

SEQ ID NO: 493953 - protein, 377 aa, unidentified
MNRIIKIGMDVHSKNFTLCAMEPVIGQEDRIFATIRVTADFKNILLFIEDLKWKLGLHDEYDITCGYEAGCLGYSLYNQLTAAGVKCVILAPTTMLSQQGKRVKTDVRDAKMIAQCLAYGGYRAVHIPTQEDDSVKEYLRMRDDHKLTLKKIKQQINAFCLRHGYHYDGTKWTAKHILWLRKLELPLFYQETLDEYMLSYEEQTDKIERFDKRIEEIAAQERYRENVKKLGCFLGIKPHTALSLIVETGDFMRFAKGNIYAAFLGLTPGEKSSGEKVNRTGISKAGNGHLRMLLIEASKGICKGAVGHKSKELRARQAGNRAEVIAYADKANTRLRSRYYKMIRHGKKKNIAVAATARELACFVWGMMTDQISIQRT

SEQ ID NO: 493954 - protein, 416 aa, unidentified
MNAVGIDVSSRKSTVAVLRPLGEVVCLPFDVTHDIAGLASLAEKLKAIDGETRVVMEHTGRYYEAVAKALHEAGLFVCAVNPLLIKEYGANSLRRVKTDKADAIKIARYALDNWADLRDFTPMDAIRYDLKTLNRQFQLASKQRTASANNLIALLEQSFPGIRKCFDSPVRSDGTQKWVDFAHSFWHVDCVRKQPFPAFCERYRKWCKLHAYFFKLRNAEKVYALAKSAVVLTPKSKVVKVLVQEAANQLISISRSVEVYRAEMDRLAAMLPEYPVVMAMYGVGKSYGPQLMAEIGDVRRFERKQALVAFAGIDPMPNQSGDKNVRSNKSSKRGSPYLRKTLFNVIRTYLQCAPQDEPVFQFLNRKRAEGKPFYVYMLAAANKFLRRYYAKLRDYFASLDTLQPVDPIPATLKASL

SEQ ID NO: 493955 - protein, 470 aa, unidentified
MKSTAKKNKAQLKSHLSSEEIAAMSKKAFEEATAITWRLAEVRRCLTQNDKISLVDDKTLVIGADIGSEKHDIRAFDNRGREFSRKAFEFTNDEAGFVLAKEWMVTIRKTYHLHKIMVGMEPTGHYWFNLAAWLIKEGITVVMVNPHHVKKSKELDDNLNRKTDKKDPKVIAGLVHEGRYSIPYLPEEVYAELRNLNTLRSMNTEEKTRFINRLDRWLSIYFPEFRTVFKDVTGTGSLFLLEKAPLPEDIVSLGADGINKLWREAKLRGVGYSRALKIISAAERSIGCREGLNTARQEIRWILDGLKRYLEYDRDYLAQIEALSKQIPYVDNMLEIKGLGIRTIVGIFAEIGDISRFASVKPIQKLAGLALVEDSSGKHNGQTIISRRGRKRLRYHLYQAALSLIGHNAEFKEVYKYYLTRKENPLKKMQALMVIACKLLRVLYTMVTKGIKYDPGKLLGDIHRTQETAA

SEQ ID NO: 493956 - protein, 432 aa, unidentified
MEKIRENAAGIDIGAKKVFVAIEGQEVRYFFTFTEDFEKLRDYLLGYKIKTVAMEATGVYWNILYEILEEAGIDVWLVDGRQTKQVPGRKTDVKDCQWIQQLHSYGLLNRCFVAEADIKELRAYQRLREDHIRSASMHINHMQKALTEMNIRLTEVLSQIHGVSGMAIIGAILKGERNKETLLKMCDRKIIKHKKEDVLKSLNGRYTKHGIFALKQAFDSYMFYQHQIEQCDQMLSEVIEKIGKGKPDQYPQGPRKPIRHNKPDINNLGISLLKIFDGKDATALSGITDYSWMQLMSETGTNLSRWPSEKAYTSWLGLAPGQHTSGKMKRTKRKNGHPKAGQIFRQIAQSILTSKHIALGAFGRRLRARKGSQIAIKSVARKLAILYWRIMVKGMTFVEEGIKKYEQQLLVQKHKSLERLAKDLNIQIAYNV

SEQ ID NO: 493957 - protein, 513 aa, unidentified
MRYTGERQRCDDRQTNGARSRHAGRGVSPLKSMVRDSSATVVSGASRIPFMRSSQFRRFPLRCRSLTILEQAMAMRKREEDEVFPNAAGIDVGGSSHWVAVPRQADDEPVREFGAMTDDLNAMADWLLSCGVDTVALESTGVYWIPVYEVLERRGLAVWLVDARQMKYVPGRKSDVQDCQWLQKLMSLGLLRAAWRPGDEVCVVRAVVRQREVLLAEQATWVQRMQKALVQMNLQLTEVLTDVMGMTGQAIVRAIVAGERDPKVLARHRNGRVKASAADIERALTGNWREEHLFVLGQALAMVDTLAQRVLECDAKTEALLAPLGRHDVELDGPGKRRGKNTPGFDARTALARWAGVDLTRINGLAVTTVMTILSEIGPDLSRFVNVKHFCSWLGLCPGTKVSGGKVLSARTRRSTNRVRQALKLAAMSLSRNDSALGAFYRRLCSRMDKPRANTAVAHKLARMVYFMLTRGEAFVDQGQQHYEEQQRQRSIDALRRRATALGFQITPAAQTP

SEQ ID NO: 493958 - protein, 356 aa, unidentified
MTTQITKPDFTGQHLFVGIDVSKNSWKVCILTQHVEHKTFTQPPKPEVLVGYLQRHFPGAQYHCAYEAGYCGFWIHDGLKALGVDCIVVNPADVPTIHKERTFKTDRIDARKLAPALRNGELTPIYVPHRAALEDRSLVRTRYSLVRKQTRCKNQIKGLLSFFGVPLPQEPSTVNWSKRFVVWLEQLTMQSPSGTQALKALIQELKYLRQMIAETTKQIRTLANEPPYCSYTVHLITIPGVSSLAAMIFLTELVTLSRFRTLDQLSSYVGLVPDEYSSGEREITTGISQRRNPFLRGLIIECAWVAVRKDPALVLAFNKLCTRMPKHQAIIRIAHKLLNRIRFVLKHQTSYVPAVV

SEQ ID NO: 493959 - protein, 374 aa, unidentified
MGDYSEAFVGIDSSKLRNAVAIAEAGRGGEVRFLGEIENTAAVTAKLVRKLAAKYKRLTFCYEAGPTGYGLHRQIKGLGFECAVIAPSLIPKRRGDKVKTNRRDALSLAKLLRADELTSVWVPDGGHEAMRDLTRARETAMLDLRTKRQHVSAFLLRLGRPYPEGKKTWTRAHVSWIASQKLEHPQQRLVLEEMMLAIRQAQERLARLEQAIAAAVPEWSLAPVVTALMAMRGIDLISATTLLAEIGDLSRFRTPTELMAYLGLVPSENSTGDTVKRGAITKAGNRRARRMLVECSWSYQHPPRVGQAKQPKVDAAPPAVREIAWKAQCRLYRRYRTLIRKGKLKTVAIVAIARELAGFIWAVARAARVAAAPA

SEQ ID NO: 493960 - protein, 339 aa, unidentified
MTTFVALDVSLEKTAICIMLADGQVAAEVVAASDPEAIAAELARQEAVGPDALIGLEAGLLSEWIARGLADLGAPVVLMETRQVRAALSSMVVKTDRNDARGMAQLLRMGWFRPVHLKSMDAREQRALLSARETLARRLMDVENSVRGLLRGFGLKLGAVPRSRWERRVRDVMAGNATLAAIFEPLVAARAALLEQLDRLHERLLAVVRDDPACRLLMSAPGVGAVVALTFRAAVDDPSRFGSSRTIGPCFGLTPRRYQSGETDRSLGISKAGDPSGRRALYNAAHVIMHQVRRGFALKSWAAALAARAGLRRAKVALARRLGVILHRMWADGTEFRFA

SEQ ID NO: 493961 - protein, 417 aa, unidentified
MEEEQKASPCRYIALDIHKYYSVVAGVDREGKEILAACRVEHLDLENWLPKHLLPTDRVVIESTTNAWHVYDLLEPLVAEVLVANPIKVKQIACARVKTDKKDTFILARLLAANLVPTVWVPPQHVRELRQLISHRRRMASMHTQVVNRMHSVAHRHHLSHPKGKDFQAKNTGWQQDGSLSRLEKMQLELDMETREHLEKQIECMTRELGRMSHEEPWASEMLYLMQIPGCGVVTGMTMLAAIGDITRFETPKALASYSGLTPGVEQSGVKLRGKGITKEGRRELRWVMVEVAWRAVKADPHWKKYFEELKRRMHPNQAIVAIARHLLTMVWYVLTRHEPYSHYSPERIAYKYLTWSWALDEEQRQGMTRPQFARYYLMRLGIGNELKRVALNPKFPYKLASMEEVLALRPELRPPE

SEQ ID NO: 493962 - protein, 344 aa, unidentified
METITTVGIDLAKSVFQIHAIGAKGEVVIAKAFRRRDFLTAMGKMSPCLVGMEACASSHHWARQLKAMGHEVRLIPPAYVKAYVRRQKNDAADAAAICEAVGRPSMRFVPVKTEAQQAALMTHRVRALLVNQRTALICALRGHMAEFGLVTPTGPRHLAPLLEVLADKGDESLLSEARQALSPLVEQLHSLEAQIERLDRQVLEQHRANEVSLRLASIPGIGPLTASALAASVTDPTMFASGREFAAFLGLAPKQASSGGKERLGRISKMGDRYLRTLLVVGAASVLRHPGTSPSNMKTWAVGLLEKKPFKLAAVALANKMARIAWAIMTRGETFRGGVPAMAA

SEQ ID NO: 493963 - protein, 342 aa, unidentified
MYYIGLDVHKKTISYCVKDASGQVHQEGKVGATRWELDDWIKTLPQPWTVAMEATIFTGWIYDHLLPHAQQVKVAHPLMLRAIAAAKKKNDRIDAGKIADCLRCDFLPECHMASTAIRDRRRTLRYRHLLVRQMVQMKNRISGLLMETGVSHNKRRLHKVGYFRELLASNEEVNESIRPLLRVSRDTIVRLQKTEYALVSSLQRDPLLAERIKRLRTVPGVGPITALTWALEMGEVSRFPSIRQAISYCGLCGDEKSSADKVTRTPLSKQRNKHIQRVLVEAAKLAPRQDHNLALVYEREKQKGNANRATLAVARKMVAYLLAVDRGQRDFIPFADSQSAAA

SEQ ID NO: 493964 - protein, 393 aa, unidentified
MICVGIDVAKDKHDCFILSSEGEALADVFTIQNNAEGFDTLLQAILRCVCPGDKIKVGLEATGHYSYNILGFLLDKGLDTYVINPLHTNLYRKSLSLRKTKTDRVDARTIAAMLLSDVDLKSYTDTVYHNEELKSLTRYRFDKVRERAKLKQSVSRLVTILFPELEKLVPTLHMVSVYALLSEFPGAKQVAEAHLTHLKAVLYDASKGRYGRDMAIALREVARRSIGSVMPAKSLELRHTIRLIHELDAEIEDIEAAIQSMMDEMQSPITTIPGIGVRMGAMILAEIGDFSRFDSPDKILAYAGMSPSTYQSGQLSLSGAYSHMEKRGSRYLRYALYNATKYVCLWEPTFAAYLAKKRAEGKHYNVALSHAAKKLVRLIYALEKSKRPYSTAA

SEQ ID NO: 493965 - protein, 359 aa, unidentified
MMVLGIDPHKKSHTVVALEAATGEPVAELTVAADRRGHERLIAWARRLTPERRFAIEDCRHVSGHLERALIAAGERCVRVPPKLMAQTRRSARRRGKSDAIDAACVARAALREPGLPEARLAGPERALRLLVDHRSDLVGERTRIQNRLRWHLHDLGLGLEVPPKALGRACWLARLEEELAPLPGVQARIARELVARCRTLSAEISGLGREIAVLTEELAPELLALPGCGALSAASLVGETAGAERFASAARFAMHAGVAPLPVSSGQSNRHRLNRRGNRQLNAALHRIALTQLRMHEPAQAFVARKRAEGKSTREALRCLKRHLARIVWRELRNAEARRELLPVCGDPPARAALPLAS

SEQ ID NO: 493966 - protein, 406 aa, unidentified
MIFVGIDIAKRSHVASAVDEDGGTVVESFKFNNTASGFAKLLKRLRKADATPENSLVGMEATGRYWVALFDFLISHGYEAAVINPIQTDAFRGVWTVRKVKTDALDAAMIADLVRYKRYSPSALGDEATEELRNLARYRMSLVERSTALKNRATAILDRTFPELAGLFSNAYCPTHRELLQHCATPDQVLGTDVGTLERILREASRGRCGRAKAERLKALAKESVGVGFGSKTLAFEVRLLMEELDFVQGQIKEVEGELESLLERTRGKWLVTIPGIDVPLASVIAGEIGDPDGFDDPHRLMGYAGMDPTRSESGETVRSDGHMSKRGPGALRWAFMQAADCARKNDPYFGDYYDRKKGEDKKHHYVALSGVARKLMGVALAVMKEERPYEPTPPKNHRPGHLRGA

SEQ ID NO: 493967 - protein, 317 aa, unidentified
MEQRKTITAVAGVDVGKLWLDAAINGGEAGMRFANDRKGIAELIGWLKAREVGRVGLEATGGYEREARQACAGAGLEVVVHQPAEVRLFARLKRLRAKTDAIDARLIAAATAQVDTVRAAADPRLTELAERLTAYEQIVDHAAGLKTFLEQVRLKDLTRTLKGQIAALERLKARLCADILARIRAQPDLQARFDLLTSLPGVGPVVAMSLLIRMPELGAMKRGQPAALLGVAPFDRQSGQFKGKTPIGGGRRRPRRMLYLAALAAKRFDPGFKAFATRLANAGKPPKLIIVAVMRKLVEAANLILARDQPWIKAMTT

SEQ ID NO: 493968 - protein, 387 aa, unidentified
MNERDVLKLLIGVDPHKETHTAVGVVTGSGELFGELTVVARPSGYEELLIWAVAAGGERLWALEDVRGVSRGLEQFLLGHGERVVRVPPKLMAGARKSGRTFGKSDSIDALAIARAAIAHPDLPAAAPDEAARDLGLLANHREALVRQRSEAQDRLRWLLHDIDPDLKIPAGALDRKVWLERVTRRLGRGEQTVQVRIARDLVRRCKALTRDANELEREIGVRVARYAPQLLSLKGCGALIAAKIISETGGIGRFRNDAQFACLAGVAPIEASSGRQRRHRLSRHGNRQLNSALHKIAVVQGRWALAPACTSNAGRPRARPAAKLSAPSNATSPASSSGCCAKNTGCRQSESRCAGERSAFRRSPEAAVVVLMLSQSQPEGLPKLAG

SEQ ID NO: 493969 - protein, 418 aa, unidentified
MTDDIRWFVGFDWATEEHHVCLFDAEGNRVAERKVKHGGAGLQELCSWLIERTGARAQEIAVAIETPRGPVVEVLLERGFQVFALNPKQLDRFRDRFSMSGAKDDSRDAQVLGDSLRTDRRAFRRLTIDDPLVIELREWSHIYEELKQEQSRLSNRVRDQLWRYYPQAGELGDPAANWFLDLWDQVPTPAKAARVAEKTIARILKNHRIRRFDAAEVLRILRQQPLTVASGTIAAATAHIGTLAARLRLVNQQIKQAEQRLDELCAAIEAAAETTPGQICEQRDMAILRSMPGLGRITIAALLAEACAPLRRRDYHALRVLSGQAPVSRRSGKRRIVLRRYACNPRLQSALHHWARVAVQHDPISKQRYAELRRRGCGHARALRTVGDRLLGVLCTLLERQTLFDADYKNSQIAAAAA

SEQ ID NO: 493970 - protein, 460 aa, unidentified
MTERKKSAVNVPTLDVLEQINLNAAGLDIGAEEIWVCVPAGRDNESVRVFPTFTVDLHALANWLKACQIETVAMESTGVYWIPVYEILESRGFEVYLVNARHIKNVPGRKTDILDCQWIQQLHTYGLLHASFRPPEEICALRALARHRDTLIHYRSAHIQHMQKALHLMNVKLTTVVSDITGVTGLSIIRAIVAGERDPHQLARFRQTGCAKSEQEIAKALQGNYKLEHLFVLKQALAQYDFYLHQIQECDAEMETLYAALPPSNPEDWVSPPPKPKRGKPRKNQAHFDLATSLHQVVGVDLTAIDGIDALIAQAIITETGIDMSPWPTVKHFTSWLCLSPHNDKSGGKILRSHTKKTQNRANLAFRLAAQSLSRSQSAVGAFHRRMTAKLGPAKATTATAHKLARIVYFMLKNRTAYVDPGVTYYEQQYRDRTIRNLKRRAAALGLQLVPASAQSATVS

SEQ ID NO: 493971 - protein, 402 aa, unidentified
MNCVGIDISKGKSMIAVMRPFGEVVVSPFEVLHTDSELSKLAKLLKSLDGETRVVMESTGNYHAPVAWLLHDAGLYVSVVNAMLVHDYGNNSLRRAKTDKKDAVKLANYGLDHWLTLPRYVPEEDTRLMLKSCYRQYQQYSKVRTMLKNNLISLLDTAFPDANRLFTSPPRADGSEKWVDFVAAFWHCECVCGLSEKAFTAKYQKWCKKHGYNFSEDKALDIYASACGHFGVMPKTDTAKLLVEQAISQLRATSAALAALKQEMQSLAASLPEYPVVMEMFGVGPALGPQLMAEIGDVRRFHSKKSLVAFAGIDAPPYQSGQMDIRSRSISKRGSASLRRTLFLVMGVLLQCAPMDEPVYQFMNKKRSEGKPYRVYMMASANKFLRIYYASVKAYLDSLEHN

SEQ ID NO: 493972 - protein, 310 aa, unidentified
MDMRFVGIDVSRDWLDVHVVPEGESFRSPNNSDGIDQLAARLGELSPERVALEASGGLEMLAVAELSAAGLPVVVVNPAQVRSFANALGKRAKTDTIDAAVIAAFAAAMKPPVRQLPDEATRLLADLVSRRRQIIAMIVAEENRARRATARQTLKSIRRLLLALRRELESLDEEMDDHIRKSPIWLVRQKLLTSMPGVGEVTARTLLAELPELGRLDRRQIASLVGLAPFTRQSGKWRGKSFIGGGRSGVRASLFMAALTAIRFNPQLKAFRDRLVAAGKPKLVALVATMRKLVTILNAMIRDNQPWKSA

SEQ ID NO: 493973 - protein, 362 aa, unidentified
MHTITIGVDLAKQVFSLCSVDAGGRVQERRELRRDAFIQWLPSVPAGTTVAMEACSGAHHWARRCQEHGLQPRLMAAQFVAPFRKSRTAKNDRNDAEAIATAARQGNMRFVSIKTVDQQVRLSWHRVREGYKAEALATSNRLRGLLAEFGVTMAQSDGALRRTLADLDALSLPSSLVELVRDVDAHWLQLRERIAQSDRRIQAHAKGDEACTRLRAIIGVGPITADAVVATIGSAQSFANGRQFAAWLGLVPMQHSSGGRSRLGRISCRGDGYLRTLLIQGARSSLQRAKAVVWEKATPEQRWIQDIERRLPFGKVLVAIANKHARQLWAMLARSEQYDADAWLKHPMVQRPTSRRAPPATN

SEQ ID NO: 493974 - protein, 382 aa, unidentified
MKPLYRCVAGLDVHRLLYVLTVLMEQADGSLSKQQRQFTGFQRDVRELVAWLQSLGVQLVIMESTGIYWKSIYAALEAAGIPAHVVNARHVKNVPGRKTDIADSEWLAQLGRFGLVRPSFIPPKDLRELRLVSRYRQKLSQMQASEKNRLHKLLDDAGIKLGAVVADIDGVSARAMIEGLIAGKPIEQLAEMAKGVMRKKREVLEFSLEGELTARHRLVLEHVQAHNRYLEAELAKLDAYLIEAMALYREYWQLLQTIPGIDQISAAMILIEIGDDLSAFANAKHLASWVALCPGNHESAGKRKTGTSRKGYHAIRYLLCEAANAARRTKSALHQKYQSLVARRGHKKPIIAVAHQIIRTIYVLFTRRQAYRDSGFDYQAAL

SEQ ID NO: 493975 - protein, 381 aa, unidentified
MKTLNKYVGLDVHKDTTVVAVADGGRAGEVRLYGEISSDLGALERVLRKLGGAGITLHVVYEAGPTGFVVYRRLQQLNIECIVVAPTKTPQEKGLRQKTDRRDALLLARLHRAGELTAIHVPDAVDESVRDLTRARADAVHDLTRARQRLKSFLLRQGYRYSGKANWSEAHQCYLRELVLPLPALKAVLEEYLLAIDQATQRVVRLEELLAVQVPLWRMYPAVAALMTLRGFQLTAAAVLVAELGDVRRFAHPRHVMAFLGLVPRENSTGNTRRQGSITKAGNAHARWILIEAVQHAFLPPKVSAPLALRQQGQPAAFRALSWKAQVRLHKRGWHLLHRGVMKAKVTVALARELSGFVWDLLRQVPPPKDPAGSHATLTPG

SEQ ID NO: 493976 - protein, 327 aa, unidentified
MKQLYLGIDVGKESFTVALLGGEQTHQGSFKNDLAGFERLGRWLQKREGQPVHACLEATNRYWEALALFLHDQGLEVSVVNPKLIKRHSQSVMQRNKTDRQDALTIADYCRKQQPEHWQPPPVAYRELREMVRHVSALKSDRTRALNRQQSGLATAAVLKAVAAQIEFLNQQIADLEQQIVDHIDQDPDLKRDKALLLSIPGIGDTTAAVFLAEVPDVSRFSQARQLDAYAGLTPGQRESGSSVHGRPHLVKWGNAQLRTAFYMPALSAYRWNPVIAALHQRMQERGKSRMTIVTACMRKLLHLCYGVLKTRKPFDPDHTLKIRFSA

SEQ ID NO: 493977 - protein, 321 aa, unidentified
MSAPCAVTVGIDVAKAHVDVSVLGANLDIRRFNNDAEGHSALAVALQPLNVQLVVMEATGGCETELACALQGAGLPVAVVNPRQARDFARSMGRLAKTDAIDARMLAELASVLLRRDDLSRLLRPVPDERQQWLAALVTPRRQLLTMLLSERQRLQITPVGLHPSLLAIIAAIQAQLDDIDAQMVAHVRQHFGELDRLLQSTHGIGPVSSARLIAELPELGRLNRRQIAALVGVAPIACDSGLRNGRRRVQGGRFAIRRVLYMATLTATRYNPAIRAFYQRLKAAGKLSKVALVACMRKLLTMLNAMVKTNTPWDDSLHRA

SEQ ID NO: 493978 - protein, 351 aa, unidentified
MSEGITVGMDMGDKNHSVCVLDAAGDVQSRAQVTNTRPAILKYFKDFEPCLVALEAGTHSAWVSRILEEMGHEVLVGNPRKLRAIWDSDDKGDDRDAELLARIARLDPKLMHPIRHRSEEAQMDLGIIKARDILVKTRTTLTAHVRAAVKSVGKRISKCNTECFHVRATEEMPPELAPVLEPVIKSIEDITMRIRHYENLIEKISTDKYPETQVLRGIRGVGPITALAFVLTLEDASRFKKSRNVGPFLGLTRKRDQSGETDKQLPITKAGNAHLRRLLVGCAHYILGPFGGDCELRRFGLKLAERGGKNAKKRAVVAVARKLAVLMHRLWVTDGVYDPFYLTTQKTQKAA

SEQ ID NO: 493979 - protein, 348 aa, unidentified
MLHAGLDLSRRRLDYCLLRGDGVVVETGAVAPDRDGLRGLARLVALRHARQPVAAVIESMNGARFVHDTLERAGWDVQVADAARVKGFAPLACKTDRIDAWVLAELSRRDMVPAIWLPDFEQRAARHRARFRLYLVRQRTSLKNHVHAQLMAFGHTCPVSDLFGARGRELLATLDFPEPWRAGVLSAVELIDELERQITTIERDLKRLGAEHRYAARLVTVPGIAWVLGYTIAAEIGDIERFRTPTKLIGYTGLCPRVYQSGDSDRRGKLSKQGPKYLRWALMEAATNAAKHTLYRERYQHTKRRLGTQRGAKVAQVQLARTLAEAIWHMLTRDEDFAPAGAAFPLAA

SEQ ID NO: 493980 - protein, 341 aa, unidentified
MQITTIGLDIAKNVFQVHGIDAAEKVVVRKQLRRGQVLKFFAALPPCLVGMEACASAHYWARELTKLGHEVRLMPSKDVKAYVKRNKHDAADAEAICEAVRRPTMRFVAVKSAEQQGQLMQHRTRDLLIRQRTQTINALRAHLAELGIVAAQGRDGLKQLLTIIADEKDARLPIDARASLIVLAAQLQALQTMIGSIERRLLVQHRANEASKRLESVPGIGTIGASAIAATVTDPNAFRSGRDFAAWIGLVPRQDSTGGKQKLGPISKQGDRYLRRILVVGAHSLLRRAKQNPEKYPWLAQLLARRPFKVVAIALANKMARVAWALLARGGTYRVPALAAA

SEQ ID NO: 493981 - protein, 422 aa, unidentified
MLAESHDEEQIIARVAALDIAKAELVCCVRVPSPAGGKRRLQEVTTHSTMTQALTELANRLVEMGVQRVVMEATSSYWKPVFYLLEAHGLDPWLVNARDVKHLPGRPKTDVLDAVWLCKVAERQMLRPSFVPPWPIRRLRDLTRYRTDLVAARTAEKNRVEKLLEDACIKLSVVASDIFGVSGRAMLAALVAGERDPKVLAQLARARMRGKIDRLEQAFDGHFADHHRFLLSRMLSRIEGLDADIAALDAQIDVQLAPFAEAAAHLDEIPGIGSVAAAAIIAEIGVDMSRFPTAGHLCSWAKFAPGINSSAGKTKRSASSGHGNPYLARVLGEAAVGTTKTNTFLAARYRRIARRRGQPRAVVAVGRSILVIIWHLLHDPDARYQDLGADHYNRHVDPSAKKRSHIRQLEALGYTVTLTPAA

SEQ ID NO: 493982 - protein, 338 aa, unidentified
MIAVGVDTHKQRHSAAALDELGHVLGELAFAATAVGYADLQRWAQSHGNPDELVFGIEGAGSWGAGLCQHLQHAGHVVVEVERPRRSERRAGKTDHIDALAAAKHVLVGEVSTPRRRGILSALRALLNVRRSTIAERTRLLNQLQALNVTAPVALRERIGDGTGKQLERRLLSMRSRAASDIEERAVFGVMRDLAARSRTLATDARRYEKQLAELVRSLDDTLLDEPGIGPISAAKLFACDPARFKHEAAFARCNGTAPIPASSGKTIRHRLNRGGDRQVNNAIHTIAIIRAKHQPETRAYLDRRIREGKTKREALRALKRHISRELFKRLAEVPLTS

SEQ ID NO: 493983 - protein, 359 aa, unidentified
MNSVKYVGVDVDQATLVVVIEDAKGKFLMDAFVPCRSGDIRGFFKTLKGTIHVVFEESAQAAWLYDLIQPLVAKVVVCDPRRNKLIQSGKKNDRIDARKLAKLLRLGELHEVYHGEQTTRGLKELVRAYECFVEDTARTKNRLKGAFRGRGIRCAGKKVYQPAERKEWLAKVDIEALGMRVRGLYEQLDYLSKLREESKKAMLAEARKHPANKLLMTVAGLGPVRSAQILATVGTPHRFRTKRQFWPYCGLGVVSEASGEYEIVDNKPRRRKKPAQTRGLNKNFNRRLKAVFKGAAKSAIVGEPFKQYHQRLVDNNMRAELALLTVARKIAAITLSVWKKGEKFDSNRVNQAAQGTGNE

SEQ ID NO: 493984 - protein, 422 aa, unidentified
MLEETQDSDQIIQRVAALDIGKAELTCCVRVPGARGSGRRLQEVTTYQTMTRWLLVMADRLGELGVTRVVMEATSDYWKGVFYLLEAHGFEVWLVNARDVKHLPGRPKTDTLDAVWLCKLAERQMLRPSFVPPRPIRQLRDLTRYRADLVAARTAEKQRVEKLLEDAQIKLSVVASDIFGVSGRAMLAALLAGERDPKRLAQLARARLRAKLGPLAEAFTGFFTDQHAFLLAKMLARVDALDADLADLDAKLAELIGPLAGAVDRLDEIPGVGQLAARLLLAEIGTDMTRFPTAGQLVSWAKFAPGVKESAGKRKGRGSTGRGNPYLARVLGEAAVAASKTDTFLGERYRRIARRRGKKRAIVAVGRSILVIAWHLLSDPEAHFHDLGAGFYDTRIGPERAKRNHLRQLEALGYKVTLDPAA

SEQ ID NO: 493985 - protein, 408 aa, unidentified
MEVLHRICAGIDVHKASLTACVRVVEGKSARHEVREFSTTVRALEELHEWLREREVQAVVMEATGVYWKPVWHILEADFQLTLANAGHVKNVPGRKTDVKDAVWLADLHAHGLIRGSFVPPQPIEELRQLTRTRKQLVREVGQHTNRLHKVLEDTNIKIGNVVSDLLGQSGRAILRKLISGVTEPEELAKEARGRLQQKRAELVEALRGRVTEHHRFLLKLHLDTLESIEQRIGEVDQRLGRALDPFREAVQHLESIPGVSTITAQVIIAEIGLDMSRFPTHRHLLSWAGLCPRSDESAGKQRSTQIRKGAPWLKAVIVQAAWGATHKKNSYLRAQYWRLKARRGAKKAAVAVAASILTSAYYLLQRGTTYADLGSEYFSHRNLARTVHRHCRQLEQLGYKVTLERAA

SEQ ID NO: 493986 - protein, 418 aa, unidentified
MDIRPLFSYQATVGIDWADQKHDVFVRFANGNSYRRKIDSRPEAIQEWLLELRSACAEGKIAIALEQRRGALFYQLCTHLNWIDLYPVNPHSLSSFRLTFFSSRAKDDPIDSQLLEELVRTHPDRLRPYRPESVTERKLDQYCRHRRSLLDLATKTELKLISTLKQYFPLAVNLFAAVGMKSDIALSFLSRWPTLSELQRAKAHTVRSFFYAHHSRSRSRIEKRLQQIGHAHNVTDDLALIEPLVLTTKCLVGQLRQFNHAIKEFDHKIKELFKSHPDHFLFENFPGAGEQLAPRLLSLFGSDRARWNDATDLQKYSGIAPVIERSGKSVWVHRRLSRPKFICQTFHEFAQQSVQHSSWANQFYQRQRDSGKSHHSAIRALAFKWIRIICACWKANKPYDEAFYLKALAGKNTPLSST

SEQ ID NO: 493987 - protein, 365 aa, unidentified
MSQDIKKSAGETRRYVGIDLGDKKSRVCILDERGEIVSQEWVVTTPEAFFKRFRGEARMDITMEVGTHSRWASDLLGRCGHKVVVADPRQLGLITQNDAKSDKRDARTLAQLLRADPRLLSPVEHRAEELQMDLTVIRMRDNLIETRTRLVTSVRGVVKATGGRLPSGETSSFPHQVADLIPEPLRPAVAPVLEVIDRLNEATYEYDCLLEHWARTRYEESGRLTQVKGVGTLTALMFLLTVGDKERFSRTRDIGAFLGLRPRLGQSGDNEPQLRITKAGDGLLRKTLVECAQYMVGPFGQDSDLRRWGLKMIEAGNGSKRARQRAVVGVARRLAVLLMSLWKSGETYDPLHHSRARERSAEVAA

SEQ ID NO: 493988 - protein, 448 aa, unidentified
MSNGSGVSRGDRNRNARLARLRSAVPVSNAIVGIDLADRKQMVVVTDHDSKVLARRTFRCKAWDLGAALDWAAERAAKAGFGGVTVACEPTGHRWRVLGQLADQRGMTLVCVQPAASAWARKCEDLTTDKTDDKDAVLIARLVAQLRCYLPEPIDETWGRLRHLGTRREQLIEEHVRCVQQVRDLLECVWPAALDAAKHPFKSTTWVAAMTVVMARDGGDLERTRRLGPARFERAVRKEVIRRGKQRPCLRIVRHLFAALSDPAGVLPHRPAAFERIAWVMDDWDHAKAKVVDTEERMTAVLDELELTELACSIDGLSPVGAAAILAETGDLNRFTSARAVVKHAGLAPRERKSGTFTGRARVTGAGRPLLRAAAWRAVWGCLQTNRVYAARYRHLTGREANKLTPTQAQTAIAAAILRQLHFVVTHRQVWDPVVAAHGTRTVEVTAA

SEQ ID NO: 493989 - protein, 354 aa, unidentified
MMVLGADTHKRSHTIAAVSAATGEMRGEKTVAVGARGFAALLIWARGLDGGRVWALEDCRHVAGSFERFLIARGERVLRVPTKLMADSRRAARTRGKSDSIDAIAVARAALREGIDTLPAAQLDGPELDLRLLVDHRERLVRQRVGLNNTLQWHLHDLWPELELPGGALFSTKWSAKIGRRLARAEQTMRVRIARDELRRLRELTQSIRALEAEIAQLVARVAPQLLSEPGFGPLTAAKLVGEIAGAARFATDAKLARAAGIAPDPGQLGQDQPPPARPRRQPPDQRRDPPDRHHPRPLPPRDPRLHRPPPRRRQDHPRSHPLPQALPRPPRLATPPAAPPARRNTAITINFLT

SEQ ID NO: 493990 - protein, 422 aa, unidentified
MLEETNDTEEIIGRVAALDIGKAQLVCCVRVPSPEAPGKRLQEVKTYQTMTRSLLVLADRLAELGVTRVVMEATSDYWRSPFYLLEAHGFEVWLVNARDVKHLPGRPKTDRLDAVWLCKVAERQMLRPSFVPPPPIRRLRDLTRYRADLVAVRTAEKQRVEKLLEDAQIKLSVVASDIFGVSGRDMLAALIAGERDPKVLAQLARRRLRAKLSLLEEAFYGRLSDHHGFLLQTMLARIDQASADIAELDRKIEEEIAPFAAAADQLDEITGVGWAAAQVIIAEIGVDMGRFPTAGHLVSWARFAPGVKESAGKKKGKATTGHGNPYLARVLGEAAVSAGKTNTFLGERYRRIARRRGTKKAIVAVGRSILIIIWHLLSDPDARFHDLGPGYYDTRTNADRQKRNHIRQLEALGYKVTLQPAA

SEQ ID NO: 493991 - protein, 345 aa, unidentified
MQPMYYIGLDVHKQKISYCVKDSSGKIYAEGWIPATRFDLDRWMKTLPQPWSAALEATMFSGWIYDHLKPHAAALKVAHPLMLRAIAAAKKKNDRIDANKICDCLRCDFLPECYLAPTAIRERRRTLRYRNLLVRQMVQMKIKISTLLMEAGVSYNKQKLHKAGYFRELLATNPDIDESLRVLLRQCREMVVRLGKTESALIHSLQQDRLLVERVERLMSIPAIGPITALTWALEIGEVQRISSIKKAISYCGLCGDEQRSANTAQRTPLSKQRNKHLQTTLIEAAKMAPRYSPTLALLYDREKQKGNANRATLAVARKLVAYLMAVDRGQCHFLVIDQETRTAS

SEQ ID NO: 493992 - protein, 341 aa, unidentified
MQITTIGLDIAKNVFQVHGIDAAEKVVVRKQLRRGQVIAFFAALPPCLIGMEACATAHYWARELTKLGHEVRLMPAKDVKAYVKRNKNDAADAEAICEAVGRPTMRFVRAKSAEQQGRLMQHRARDLLLRQQTQTINALRAHLAELGIVAAQGREGLKQLLAIIADEGDERVPIDARASLIVLVAQLQALHTMIGSIEKRLTVQHRANEASKRLESIPGIGLIGASAIAATVTDPKAFRSGRDFAAWIGLVPRQDSTGGKQKLGPISKQGDRYLRRILVVGAHSVLRRAKQSPEKYPWLTQLLARRPFKVVAIALANKMARIAWALLASGGRYRAPRLAAA

SEQ ID NO: 493993 - protein, 330 aa, unidentified
MKNYVDVIGIDVSKLTIDAYIHKKGVHRLFSNNTKGFKELLSWSKKHLDMLCIFYCFENTGNYSVNLSIYLEERAIDYVEENPLLIKRSAGIVRGKTDKLDSAMIARYAWLHREELSLSSAKNNEYLELGRLLAFRDQLVRNRTGLLSSLKEIKNLLSSPSTDICCKSLQRSISYITKQILVLENRMKTIIKSKKSLDTNFTLLNTMRGVGLILSCQLLYHTSNFKRFNNWRQFSSYCGTAPFAYSSGTSINRNNKCHHVGDRKMKTLLSLASVSAIQHDSELKLYYKKKIAEGKPKLVALNNVRNKILARAFAVIKRGTPYVELQQYAA

SEQ ID NO: 493994 - protein, 318 aa, unidentified
MRESIVVGIDVSKAEFCVAIDPSGETWTSATTPAAIDALVDRLGATAPQLIVLEATGGYELALAGACATAGLPVAIVNPRQVRAFAQALGRTAKTDAIDAAVLARFGARVRPEPRAVPDVATQALAGLITRRRQLIEMLVAERQRLAQAPPTGPVTRDLRTHIRWLQRRLLDVDDDIGHAIQASPVWRVHEDLLRTVPGIGPTTARTLLAELPELGRLDRRAIAALVGVAPFNCDSGQQRGRRRIAGGRASVRASLYMAALTASRRNPILTAFYTRLRAHGKPAKVALVAVMRKLLTILNAMIKQRTPWTPDAPCVNA

SEQ ID NO: 493995 - protein, 341 aa, unidentified
MEEYIGLDVSKKETAVSIRRAGERIWRGKCASDPRIIAKLIRKRAPSVKRVVFETGPLSVWFYHSLRTEGLPAICIDARHAKAALDMAANKTDANDADGLAQLAEVGFFREVRVKEFDSMLTRTLVAARTRLVRITTELSNQIRGVMKTFGLLVPAGKGSTFEKNVRSLLADQDRLTSIVLPMLEARRGIRVRAAELGRQLVRDARQSRACRILMSIPGIGAITATSFTAAIEEPDNFRKSRSVGAWIGLTTRRYQSGEVDYDGHISRRGDRPLRGLLYEAAAVILTRSSTDSTLRTWGLKLRERIGFKRAAVAVARKLAVIMHTMLKTGELFNPNAGAAA

SEQ ID NO: 493996 - protein, 354 aa, unidentified
MTKGNTLTIGIDLGDEYSEVCVLDLEGEVSEEGRVKTSEAAFHRRFARLEPCRTVLEVGTHSPWVSRLLQSLGHECLVANPSALHKKGRKKSDKVDAEKLARWGRSDPEMLAPIQHAGAEIQADMAIVHSRRSLVEARTKLINRARGLVKSYGGRLPKCDADYFAGKVRPYVPSELEPAVEPLLQSIALLTEQVKTLEEQIEALATDKHGHATAPMRQVKGVGPITSLTYALTIRDPERFSRSRQVGPYLGLTRRQDQSGDSDREHSISKAGNVYLRRLLVQSAHHILERGPDTDLKRWGLGKAAGGQRAKRRAVVAVARKLAVLLHHLWLTGEVYEPLRQREVKASSPTPEAA

SEQ ID NO: 493997 - protein, 348 aa, unidentified
MNTTTIGLDIAKRIFQAHGVDIRGKTTMTRRLKRSEVLRYFANLQSCLIGMEACASAHHWARKVAELGHTVKLIAPQFVKPYVKTNKNDARDAEAICEAVSRPNMRFVPMKSVEQQATLALHRARQGFVMARTAQSNQLRGLLSEFGIVMPKGISNLKRQMPEILEDAENGLPNASRELFARLYAHFKELDRQVGELERQIKVCQRENPASRRLEAIPGIGPLSASALAASIGDAKAFRNGRQLAAWLGLVPRQHSSGGKEQLLGISKRGDTYLRTLLIHGARSVLLSLKRHGGQTDGWLTRLAARRNANIAAVALANKNARIVWALLAHERDYEAAYVAPSVRGAAA

SEQ ID NO: 493998 - protein, 347 aa, unidentified
MAVTIVETRAITGGVDTHADMHVAAALDPIGGLLGVREFPVTPAGYAQLLAWLGGFGNVCLVGIEGTGSYGAGLSRHVTAAGVRVVEVDRSDRQDRRRAGKSDPLDAVSAARAAQSGRARGAPKGRDGAVEAIRALMVAKRSARSERIQTINQARSLIFTGPDDLRTRFTGHTADALVADLAALRPRPGSTVGYATRLALRELGRRTEFLDAQMERLDELIVPLVTAHAPGLLTLYGVGPDTAALLLIAAGDHPERLRSEATWAHLCAAAPIPASSGKVTRHRLNPGGDRQANHALWRIVITRMSSHPPTRAYAERRSNEGLSKKEIIRCLKRYVAREVYPHLRRAD

SEQ ID NO: 493999 - protein, 341 aa, unidentified
MDYYAGIDVSLEQSSVCVVDASGKIVRESKIASEPEALIAWFASLDFGVARVGLEAGPLSQWLFAAMKSAGLAMELLETRHVRKALETMPVKSDRNDARGIAQLMRLGWFRPVHCKSIGAQETRAALTARKLVQSKLQDIENGLRGILRGFGLKVGKTTDRSFAGRIRELVAGHPSLETVVDALLAVRTVLLREFKAFEKQVRSMARLDAKAKLLMSTPAVGPIVALTYASAIDDPARFKSSKRVGAHFGLTPRKYQSGETDYTGRISKIGDGSVRTALYEAAHIMLTKPLKGCSPLKSWAMRLARRAGMKKAKVALARRLAVIMHRMLADGTPFNAAVAA

SEQ ID NO: 494000 - protein, 465 aa, unidentified
MGKRSGGNGMTRGDRRRNARRERLRGLLPRGGAVIGIDLAEDKQALAVIDHDVRVLARKTVMVKAFRLGEALDWAAAQAKVRGFERVTVACEPTGPRWMQVQRLCAERGLPLVCVQPLVSHIAREQQDYTPHKTDESDCVLIGRLATELHCYIPEELDETWAHLRYLGRRRAQLITAATASVQRIRDFLSVAWPTVTEACAGPFESVTWLAALQVVTARGGGDPARLAVLGLEEFTALVRGAVPGWGGKKGWGRICRRVFAALTDTEGVVTWSRRGLLRRVADELGDLQRTRAQLRAVAADMVVVLGELGLSRLGDIPGLTAVGAAAILAETGDPRRYDSSSSLVKHAGLSPSENASGAFEGQAHISRRGRPGLRLTAWRAVWPMLQFNPVMAAKYAAMTHPADAAADAGSQQARPAAAAARARRAKARVACAASLLRWIYSMVVHGTSWDAAVASGAACQQEAA

SEQ ID NO: 494001 - protein, 360 aa, unidentified
MAKTKSVRPPFVVGGVDTHKDLHVAAIVDENNRVLGSDFFATTRQGYRQMLTWMASFGTVARIGVECTGSYGAGLLRHLQNAGITVLEVTAPDKMERRRRGKSDTIDAESAAHAAFSLIRTVTPKTRSGMIEALRVLKVCRKTAVAARRIALQMIQMNIVSSPDELRDQLRNLTRMQLIRTLAAWRPDVTAYRNVQDAYRIALKSLARRYLELHDEIADLDIMIASIVDELAPELIKRNAIGYESASQLLITAGDNPQRLQSEPGFAALCGVSPAPVSSGKTNRHRLNRGGDRAANSALHIIAIGRLRTDTKTQEYVAKRVAEGHSKMEALRCLKRYIAREVFTLLRNQNRQINSTQITT

SEQ ID NO: 494002 - protein, 400 aa, unidentified
MISVGIDVSKEKSTVCILKPYGEIVSKPFEVYHVEQELSELATMLLRLNDEVRIIMEATGIYHLPVLSYFKERGFFVAVINPFEMKEYRCQGLRRVKTDKQDAIAISHYGIDHWYRLKEYKAQENIYTELKLLGRQYCHYMRMRVESVLELTHLLDYTMPGIKTLLQGWNERNGKDKLGDFAEEYWHYDNITKKSEKQFIDSYLKWAKKKGYHQNQDKAIKIYALAKEGIPTVSSNTPSTKMLVQEAVRVLREVDHTLMTILTQMRSLAKSLPEYPIVRAMGGVGDVLAPKLIAEIGDVRRFHSGKALIAYAGIDAPPYQSGRLVGTERKISKRGSSNLRKIGYEVMRSLKTHKAPEDAAVYEFILKKEREGKSKRAAKIAGLNKFLRIYYARVMEVYRK

SEQ ID NO: 494003 - protein, 402 aa, unidentified
MSERENKKACIGIDVSKGSSHFQAFYSAGVPASEPTYIEHTKRGFSHLYSIVSDLEKELGYAPYVIFENTGTYSKPVEVFCQRNNLRHYIIAPLLSAKMRKSEIRPTKTDKIDCATIANVYYLKRLRVAGKDNELYSELKYLCSYYNYITGVMVSMKVKYREYLDLVYPRIDTLFGVYTESFLKLMTRYPNPHKLNRKSKKDLASFFHKSDYCGLRKAERLAILVKGYFKETEIPVLENDILITLFSKHLKDLIKVMNENQEILDQIILLGMKTKEYPYLISIPGIQKNTAARIAAEIQGIERFESASKLCAYAGIDPTVHSSGKYDGQHLSITKKGNKRLRSLLYLVVAGTSKSKAPNNPVRDFVQKKKSDGLAPKAAIIAGCTKLTRIIFAVCSNETYFV

SEQ ID NO: 494004 - protein, 340 aa, unidentified
MTVIIGIDPHKASHTAVAIGRDEQKLAEVKVRATCQQTAKLLAWAEPLGERTWAVESAGGMGYLLSQQLVGAGELVLDVPATLASRVRVLGTGKSDKNDPNDALSVAIAALRSPGLRSVEPANHREVLRLLAKRNNEIGRLRNIIVSRLHAALINLSPGGISKELNASDAMRLLNDFDPMTPVEQIRYDLAHELLDDVERLDAQLKVSHRRIKEAVQASGTSMTDLYGVGPILACALIGYTGDVRRFGNRDQFASYAGVAPIEHSSGGRVVHRLSRRGNRQLNHAIHMVAICQIRQKDSEGRVYFERKVAEGKTKRESIRSLKRQVSNAVYRQLLIDAHK

SEQ ID NO: 494005 - protein, 375 aa, unidentified
MVLGADTHKRSHTVGAVGELTGRVIADTTVRATQRAFEQLLVWARGLEDPDRVWAIEDCRHVSGALERFLLARGERVLRVQPKLMAGARTSGRERGKSDVIDAVAIARAAIREGVDTLPVAQLAGAELDVRLLVDHRERLVGQRTRLINDLRWGLHDLWPELEIPPRALIGPTWQDRVGRRLTRAEQSARVRIARDELRRIRELTRSIQALEAELAPLVAQLAPGLLAERGCGVLTAAKLIGEIAAIGRFATDAKLARLAGTAPIPASSGRTDRHRLDRGGNRQLNCALHRLAISKGRLDPETAAYLARKQAEGKTRREALRCLKRHLARRVFKLLQPSASMPQAAPAIGERPPAIAKPGQMIHCNPPAGTPALT

SEQ ID NO: 494006 - protein, 401 aa, unidentified
MHAVIGIDVSKATSQVAVAVDGKVVQNFKITHDVFGFNQLNSVIMQFNTFPDIVFEATGVYSRRLKTFLEAHNYPYTYLNPLTAKKQLDKLRPNKNDLNDAKHLAETQFILKRAKSYVQNPIYIELQDMSRFYQQLNHDIVSAKNRLHRLLQLTFPEIETLFSTTDSQQYWEIVSLIPHATMAKHSRQTLSDTIQSSVSRQIGVARLTRLVDKLVALGSLSAPAVAVASYNVTEVRYYAQRLIALSQSKANVLATMVDQTKDLPEYDIYQSIPGFSDKTVVSLIAELGDLHRFATSNKLNAFVGIDLRFNDSGDYKSSGFITKRGNTIARKVLFKAISNIASTATYGHQNHINDWYQKKKQSSMSKGTKKIAIGAMSRLLRTMHYLVLNNQLYDYDTASKR

SEQ ID NO: 494007 - protein, 372 aa, unidentified
MKVQRTSVGLDVHARSVVACGLDGETGEVLQRRLTPDHAEIVAWLGDLPGPVAVTYEAGPTGFGLARALTTAGISCEVAAPSKLIRPSGDRVKTDARDAAHLARLLHLGQITAVTVPSASQEAARDLVRAREVAKQDQLRARNRLSKFLLRHGRRAPAGIRAWTQKFQQWIKEQVHFEQPAQEFTLLDYLHEVEHMADRIRRLEQAIAEAVKLAPPQMQEVIQSLQALRGIAQISAITLVAELGEISRFEGARQLMGYSGAVPSEDSSGKRIQRGPITKTGNTHLRRIAIEAAWAYRHRPAIGMALRKRQEGLSEEVKEIACKAQHRLNKRYRTLTAAGKEKQKVVTAVGRELLGFIWAIGVQVERNHKRVA

SEQ ID NO: 494008 - protein, 411 aa, unidentified
MDIVNARCAGLDVHKATVVAGVRVPGPRPGERRGETKTFATTTRGLRELTDWLIGHGVTDVAMESTGVYWRPVYAALEGLVQVVLVNARHVKMVPGRKTDVKDCEWLAQLLECGLLRGSFVPPRAVRDLRDLTRLRKALIRERGHHVNRIEKTLELAQIKIGGVVTDLMGKTGRAILEALSAGLDDPDQLAEYAQGLLRKKRAALREALVGRLTPHYAFLLQQHLSLIDALDAHLATLQARIETAMVPFADTAALVQTMPGVAARAAQAILAETGVDMSCFPTPAHFASWARLCPGNHESAGKRQNTTTGKGATWLRATLQETAWAAVRSKKSYYRTLYHRLKARRGAKKAIVAVQHAMIVALWHMLKHRVAHHDLGADYFERRNTARIRRHHIRRLERLGYDVVITERAA

SEQ ID NO: 494009 - protein, 400 aa, unidentified
MASMTSSIPTAQPDRVLFGGIDTHKDTHTAALTDSAGMVLGSAEFPTTRAGYRQLQAWMHRFGTLARVGVEGTGSYGAGICRQLSAAGVEVAEVNRPDRSQRRRRGKSDALDAAAAAEAARTGQRSAVPKSRDGQVEALRVLRLTRASAVKARTKALQQLDQLLVTGPERLRDQLRELTRMDLIRRCAAWRPDRHQAADPAVATRIGLQQLARRYLHLGAEISDSDALLEHMVTELAPQLIAVTGIGPETAGQILVTVGDNPDRVHSEAAFAMLCGVAPLPASSGKTQRHRLNRGGDRQANRAIHVIATTRKRCDPRTQAYMKKKEAEQHTRREATRSLKRLIAREVYYLLHPAPHTPPVPPSRPPGRRADAVKVEPPTRGTTLTAPSTGTPSKMEEPAP

SEQ ID NO: 494010 - protein, 397 aa, unidentified
MAKLFVGIDISKEYSTAQGLDSSSKKIFYLRFSMDAKGFSELINAIKTGLADINEVTVAIESTGCYHINLFSFLCSEGIRCVVVNPLLITNFSRLSLRKTKTDKKDALTIAQFLLANEHSLNEIAFSQSAQDLKDLARERESLTWLISGMKNDIKRLLQNTFPELESLCKPYSETMLHFLYRFPSARLIREAKTREIEKALIFPNEKRKRVLITAQEIIEAAKISVASAGVAKELILSEKVSTVLYLKEKCEKITEALIESCEALKIEDLDIIRSVDGVDDITGSTFLAELGDLSNFGSYKHVIAFAGLDPSINQSGQHEGKSRISKRGNRHLRRIIFMMTMCSVRGNNVFRAYYHRRKQEGLAPMKALMATAHKLIRVIFSMLANKTFFKKEAAGV

SEQ ID NO: 494011 - protein, 348 aa, unidentified
MNRIAKIVGLDIAKSVFAIVGIDVHGKVAFKQTLKRDQVLERFANMAVTSVAIEACAGSHYWARELKKLGHQVRLIAAQHTKRYVSGNKNDLNDAQAIAEARSREKTKYVPINTEAQQELQMLHRTREALMHDRTAIICRMRAFAGEYGQVFPVGVAKFRAQFDEWIKEGNNSLPGSAVETFLDLRSQLNEREARINRYDERLTQAVKDDPRAGRLMEVPGVGKITATAILAALGDPRHYANGRDFAANLGLVPREHSSGGKQRLYGISKRGDTYLRTLLIHGARSALRCAGDKPDKMLCWASKLAQRSQYNLAAVALANKMARTVWAILAHERSYVPVWSKSMTTPA

SEQ ID NO: 494012 - protein, 344 aa, unidentified
MEEYVGFDVSKEETAFCVMDKAGKILSQGKALSDPQSLFEALREHTLCPDRIVLETGTMSGWLARGLRGLGLAVDVIDARQAHAVMKLQHNKTDANDAVLLAEIARTGFCRPVSVNSETAQVQRMLVKARTHLVRQRRDTENAIRGFLRALGIRFAKGSGKLAGRVRAALEERPDLKPMIEPLLASVETLKAQIKRLDEDVITEAHASPASQLLMTVGGVGPVTALSFAATIDDASRFAKSRDVGAYLGLTSRRFQSGEMDYSGRISKHGDAMLRSLLYEAANSMLTVVRRPHPLKDWARRIRKRSSHKKACVALARKLAVIMHRMLITGEPFRWPQKEAAATA

SEQ ID NO: 494013 - protein, 346 aa, unidentified
MNFYKGQHKFYCGIDLHARKMYLCILDEKGEIKLHRNMDTDREIFLKAIEPYREDVVVAVECMFAWYWIADLCKRESIPFVLGHALYMKAIHGGKAKNDKIDSQKIAVLLRGGMIPQSYVYPEKMRATRDLMRRRNYLMRKRAELLAHIQNTNSQYNLDETFGCIAVPSRRGDIVGSFGNPAVQKSMEADLKVITVYDATLHDLEKTILRLAQYHDPVSYALLDSIYGIGKIGALTILYEIEDIRRFPRVKDFVSYARLVKCSHESNGKKYGNGGSKIGNAHLKWAFSEAALLFLKGNEPAKKWFEKLTKKHGKGKALSILAHKLGRAVYFILKNKEAFDEKRFLR

SEQ ID NO: 494014 - protein, 370 aa, unidentified
MKKHSTTPKSPKQASACKGGPITIGLDLGDKTSRYCVLGDNGEVMSEGSVATTRKAMAKKFAQMRRCRVALEVGTHSPWLSRWLSSLGFEVIVANARQVQLISASSRKNDRLDARLLARLARVDPQLLRPIRHRSESAQADLMRIRVRAALVEARTGLVNATRGFAKAMGERLPACDTDSMGVERMESLPEALRDTLKPLLEQVESLTEKIKESDAKIEQIARTQYPETELLRQVSGVGTLIALTFVLTVEDRERFRKSRDVGCYVGLRPKQSESGQSQPQLRISKEGDVYLRTLLVQAAHCILSRRGPDTDLKRWGLKLASRGGKNAKKRAVVAVARKLAVLLHRLWVCGEVYEPLRNSQAAGSSQKAA

SEQ ID NO: 494015 - protein, 366 aa, unidentified
MKQVTTYVGIDAHKKDLFVAMLSGQAATPVTWQLANEPTAVRRLVRKLEREASGPVHVFYEAGPCGYALQRQMATARVRCDVIAPALMPRKPGERVKTNRRDARKLAELGRAGLLTVVQPPTPADEAVRDLARARDDAREDLQRCRHRLGKLLLRRGLHYAGKNWTQAHRRWVDSLTWTHAAERAVVEDYQLAIDHTEARLVELDARLAELATQAPYREPVGWLRCFRGIDTLTAMLILAELHDFRRFGSARALMAFLGLVPGEDSSGEKHRRGRITKMGNGLVRRILVEASWHYQHRPGVGRSLQARRAGQPARVIAIADKAQQRLCRRFRRMLAEHKPAPKVAVAVARELAGFIWAALQPPVAA

SEQ ID NO: 494016 - protein, 389 aa, unidentified
MSTCTATASTIQNTASARVLLLAFELGETGWLLGFSPGFGEKVLRRKIASRDIAALMREILRAKAHFQLGDEVAVRSCYEAGRDGFWLHRFLEAQGIDNVVIDSASIEVNRRKRRAKTDRLDVVGLLDLLARHWAGSHKPPFSVVSVPSPADEDLRHLGRELKLVKKDRTRISNRIKGLLANAGLVLDGRKDMKGQIERLRLWDGDSLPPLLRARLLRYAADFELHSARIRELDEERRTLLRSEEAGTSMAKVWRMLELKGVGIETAWCYGMEFFGWRSFENRRQVGSLAGLTPTPHDSGTQEREQGIGKDGSRWVRGVAIEQAWAWLRFQPESALSQWYRSRFGGGSKRMRKIGIVALARKLLIALWRFVEFGELPEGAVRTLRVRLV

SEQ ID NO: 494017 - protein, 403 aa, unidentified
MNSVGIDISKGRSTIAVMRPFGEVVISPFEVRHTGSELSKLAKQLKSLDGETRVVMEATGNYHAPVAKLLHDAGLYVSVINAKLVHGYGNNDLRRVKTDRKDAVKLANYGLDRWLTLPRYIPEEDTRLLLKNCYRQYRQYSKVQTVLKNNLISLLDTVFPNANRLFSSPIRGDGSEKWVDFVAEFWHCRCVSEKSERAFTSKYLRWCRKHGYNFSEEKAHTIHAETCGHIGVMPKSETTKLLVKQAVSQLRATSTALAALKQEMQSLASVLPEYPVVMDLFDVGPTLGPQLIAEIGDVRRFYSKKALVAYAGLDAPPNDSGDVTGRHKSMSKIGASSLRRTLFLVMSVYLQTAPLDEPVCQFMDRKRAEGKLYRVYMMASANKFLRIYYATVKAYLESLEHTA

SEQ ID NO: 494018 - protein, 403 aa, unidentified
MQIIHPRCCGMDIHKKSITACCITPNGKEIRTFGTMTEDILELAQWVKSKGCTQAAMESTGVYWKPIYNVMELEEIQTLVVNAAHIKAVPGRKTDVKDAEWIADLLRHGLLQGSYIPDKDQRELRELVRYRKSLVNERSREVNRLDKVLQGANIKLSSVATDIMGVSGRAMLEAMLNDEEDTKVLAGLAKGKLKSKIKDLERALKGIIGNHQRLLISTQLKHIDFLTQQIESLNREIGQRMLPFEEDLEILDSIPGIARRGAEEILAEIGTDMSRFPSAAHLSSWAGMSPGNHESAGKRKSGRTNKGNKALRTALVEAANAASHTKDTYLSAKYHRLAARRGKKRAAVAVGHSILVTIYYLLKTHQMYKDLGANYIDYSKKQATIRRHLKSLESLGVNVQIVS

SEQ ID NO: 494019 - protein, 344 aa, unidentified
MEQYVALDVSLKEISVCVIDGKGAVTYEGKVAAEPAALISLIRGKAPQLARVGLETGATSPWLYHTLKAADLPVVLMDARHANAALSMRPTKSDRSDARGLAEMLRMGWYRAVTAKSFTAHERLALLAARHRLVEIRVDLDGQIRGLLKTFGLILGPGNTDALIRRAEALAEGNPTISGLVAKLAEVRRHVVEQIAALDRDIRRLVRSEPVLKRFMTVPGVGPITALAFLSTIDDPERFKHARDVGPYLGLTPTRYQSGETDRHGRISKCGDAFTRTCLYEAANVLLTKVRRFSPLKAWGTRLVGRIGAKKARVAVARKIAVILRCIWTDGTEFWWTREEAKMA

SEQ ID NO: 494020 - protein, 366 aa, unidentified
MGKSSTVFVGMDVHKESIELATADEGEARHYARIGGEAAAVDRAVRKLRSVHRELVFVYEAGPCGFWIYRRLRAQGLACRVVSPSMTPRRAGDRVKTDRRDCLMLARLARAGELEPIYVPDAKDEAMRDLVRTREDAVSMQRQARQRLQALLLRNEIRYVGKTAWSAAHRRWIAHLKLPDAAQQIAFEEYVTAIEEAGARLERLGQAIGAQLEHWRWRPLVCALQALRGISVIHAVRIVAELGDLTRFVSPRKLMGYLGMIPSEDSSGSRRRQGSITKAGNSSARRALIEAAWAYAHPARVSWVIARRQTGLSKSTTDLAWKAQLRLCARFRRLAARGVNRNKIVVAIARELSGFVWAIGQSVKPT

SEQ ID NO: 494021 - protein, 343 aa, unidentified
MDYFAGLDLSVKETSVCIVDDTGKIVREARVASEPEALLQVLTNAIYRFKRIGLEAGPLSQWLFSALAEAGLPVICVETRHMRAVLKAQINKTDRNDARGIAQMMRVGLYRPVHVKTLRSQKLRMLLMHRKLLQSKAISIENDLRASLRNFGLKMGLVGTVRFEARIKELVENLPDLAALVEPLLIDRRVLREQIGILHRRVLAVVRDDEVCQRLMTIPGVGPVVALTYRVTVDVPARFRNSKSVGAVFGLTPAKDQSDERDRSGAISRCGDEMMRVMLYEAAQIMLVRSAKWSWLKAWAMKIARHRGMKKAIVALARRLAVIMHRMWVDGADFRWTRELAAA

SEQ ID NO: 494022 - protein, 342 aa, unidentified
MAIVAGFDVHRRQITFDALETDTGEVMRGRIAATPAAVTVWAKRFSGRELHVAVEACTGWLFVCDALTAAGAVAHLAEPVETRALRGRKRRAKTDREDARWLRELLAEGRLPEAWIPPEHVREWRSRARLRHTLIGERTQWMQRIQATLYHHGVSGTPEKLRTDEGRAFLAALRLPIDARERIEVALTMIDAIESQIAPLERDLRQLARRQTGCRALMGLYGMGELTSLVTLCELGDVARLSASRKAVRLAGIDIGVHRSDRRARTGKLTRQGSPQLRWALYEAALAACRPSSPDHADYLALKARGLSHTRASLTIARKLARRSYHVLRELGPSALDRVATA

SEQ ID NO: 494023 - protein, 355 aa, unidentified
MKRGSSAVPKLTTGLDVGDRWTALCAVDETGAAIERGRIATTPAGVERRFRQGPVQRIVLEAGKQSPWMSRLLASWGHEVIVANPRRVKLIAAAANKDDPRDAETLARLGRLDPQLLRPITHRSAEAQQDLAVVRARDALVRSRTLLINHVRGVVKSLGSRVPRCSAHAFARQADRVVPDALRPALAPMIAIIEQLTGEIRRQTRAIEALVQTRYPEALPLQQVKGVGPITALAYVLVLEDPTRFATARSVGPYLGLVPRRRQSSRADPQLRITKTGDGLLRRLLVQSAHYILGPFGPDCDLRRYGERISARGGKNAKKRAVVAVARKLSAVLYHLWVTGDVYEPVHRAASQVAA

SEQ ID NO: 494024 - protein, 415 aa, unidentified
MQDVASTVYAGVDTHKDKHVLCLLDGLGRRTFVGEFPADADGYDALARAIGDPGTCPVVGVEGTASFGAGLTDRLQSLGFNVLEVLRPKRDRRRRGADKNDAVDAELAARHAAAGDGTSVPKSRDGWVEAVRPLVRARDIAVRITTETSNAAKSLVNTAPERIRARYSGMGTKDMMRALSRKREESGDPVADALMLSLRAIARTWREQDLRAAELETQIVELVRRNAPALLEVEGCGPLSVAELAIAAGDNPDRMDSEAAFASLCGACPIEASSGKTVRHRLNRGGNRRANHALHVIVLNRMKYDGRTKAYVERRTRDGKSKREIMRCLKRYVAREVYRALLHPSDARHQSGDVLKAGRTAAGLTQREVGAMLNVESVRISEIERDVRKHFETRDRYAHLLKELAKDPESSLDTQ

SEQ ID NO: 494025 - protein, 354 aa, unidentified
MHAGCSSTVGKFGHPPDFPCVLNGYEGFEARMTSKGFGMPTIRNDQTIGVDISKDTIDVYMHPKGLRTRVPNSKSGFRALSEWLSTSEISQIIYEPTGQYHLAFEAYFLRLGVPLGKVNPRQARRFADAIGVQAKTDPIDAELLAQYGAMITIRPVAKRATKFNEMRELQSARRALIKDRIAASNRAASRICSLLKRQAKERISQIEQQLRAINAALREHVCSDELLKARFDILLTIPGVGETTAITLLVEMPELGELDHKAAASLAGLAPIARDSGTFRGRRFIQGGRAHLRQALYMPALVSIRHNPEFRAKYDLLISAGKAPKLAITVVMRKLLILANSLLRDGRLWTPSAT

SEQ ID NO: 494026 - protein, 411 aa, unidentified
MQVVYEHCAAIDVHQETAVTTILMTQANGHAQKETRTFTTMTSDLLRLDDWPQERGVTVVAMESTGVFWHPIFNILEEGREIILVNAQHMKAVPGRKTDVKDSEWLADLLRHGLLQASFIPPKPIRELRELTRYRKMLVQERNREVNRLQKVLEGANIKLAIVATDVLGKSGRDMLEAVVDGEQDAEVLAALARGRLRAKLADLRLALEGRVQPHHRFLLQRILAHIDFLDQSIAHIEQEIEQRLRPFEEAVKLVQTIMGLQATTTAGILAEIGIDMTCFPSDKHLASWAGVCPGNKQSAGKRLSGKTTQGNTHLRALLGEAAWAAARTKGSYLSAFYHRLARRRGKKKALVALEHKLLIIIHHVLRTKKPYNDLGAEYFDHLEKGRLERQHIHRLEQLGYTVTLTPKEAA

SEQ ID NO: 494027 - protein, 344 aa, unidentified
MTDILKQVIGMDVAQKELVVSLGRMNSNLEPEIYAFKTFANKPSGFVALLTWVKKHSSPDLPVRFVMEATGVYHENLAYYLSDLGHQVSVVLPNKISNYIKTLEIQTITDKTASQAICQFGLEKKVNLWERPKEIFREMKQLTRERDQIIAERTVAKNQLHAEKTEAFPNPSSISRLKQRIQLFNTQEKEIKSEIAVIVKKDKELKERMDNVTTIPGVGHLTVAIVLGEASGFNLVKNKKQLVGYSGMGVREKQSGTSVKGKPRISKKGNRHLRKAMHMPSLTAIRVDEHFKAIFTRLVSKHGIKMKALVAVQRKLLELIFTLWNTNTKYDKDYFKKVAQQAAA

SEQ ID NO: 494028 - protein, 325 aa, unidentified
MSSHEVVGIDVAAKTLVAVGEEVALLAEYENSADGRLSLIKALRRSKRPIRIVLEATGIYFLDLACELVAAGCETMVLNPKAAHHFAEAILQRRKDDPVDAAMLREYGRRMDFVPWTPPRPELFALRALTREAQAQTKAVAAIKNRLHALSATKLTPRRLIRAIERQIEQSEALIDELVAAAVKLIEVDPHLARKFAQVDSIPGFAAKAAVMVMGELAVLPPMAARQWVAQAGLDVREVRSGTSLARKPKISKRGNKRLREALFFPALTAARCCPEAAAFVDRLVARGKTTLQADVALMRKLLHAIHAMWRNDEDFNAKKLFAQT

SEQ ID NO: 494029 - protein, 318 aa, unidentified
MTQIICGVDICSASLQACIGRSGAAANFANNPEGIALLADFCRAHQVDLVAMEATGGYERQAFAQLSEQGLPVAILNPRAVRQFAQSMGRLEKTDPIDAGMIAFFAEVKRARPTQLSGPGQLQLRGLVTRLRQLTELRTAQLNQQRLIADPRLQSGFDQLLSLLAQQIDALATDIAARIAADPLWVELDRAFRSIKGVADRTVARLMAEMPEIGTLSNKAVSKLAGLAPLAQDSGRHQGKRTVRGGRASVREILFIVASVVGRYEQDFLAFRQRLLAAGKPPKVIRIALAHKLLVRLNAKAREVRNRLQTKNQLLPQS

SEQ ID NO: 494030 - protein, 399 aa, unidentified
MLAVGIDISKSKSVAAILNQDGSMHTSPFEFHHTQPELDAFIKYILNSNQSATILMENTGHYHYPVLKAFREAGLPVCMVNAYQIKKFGDMDLRKAKTDKKDAVRIARYALEKSYSLVPYTSMEQKYEDLRFLARQYNQRMLTLKNNKVFLLNLLDETMPGITNILPLTTRTPETSLSVLFINRFKSYDRIKKMGKSRFLDAFEKIARKSRNRQTKTYGLAIYEAALRNITTRGENEYTLAAQDQCLELVCESQKAADSIIPKMQTLAETLPEYAVLRSMAGVGDRLGPLILAEIGDIRRFHSGKALNAYAGNDAPPYQSGTFESHNRHISKRGNAALRKYCFEVMQALKLTRPQNDPVYLFLLKKEQEGKPYNVAKMAGVNKFLRIYYARAMETLKQQ

SEQ ID NO: 494031 - protein, 382 aa, unidentified
MNRIIKIGMDVHSTNYTLCAMEPVLDGEDRIFTNIQVTPDYENVIQFIDNLKERLGSSDSYSIECGYEAGCLGYSLYHQLTKAGVKCTILAPTTMLTQQGKRVKTDKRDAVMIAQCLSYGGYHAVHVPTDQDASVKEYLRMRDDHKLALKKIKQQINAFCLRHGYIYGGHKWTIRHLDWLKKLDLSELNRETLNEYMTSYEEQTAKIERFDKRIEELAADSDYHENVRKLSCLLGIQTYTALSLIVETGDFKRFRKGNTYAAFLGLAPGESSSGEKISRTGITKAGNSRLRTLLIEAATGICKGQVGHKSKALCARQAGNPAEVIAYADRGNIRMRSKYKRMIRHEKKRNVAVAAIARELACYVWGIMTNHIEPREEGKKAA

SEQ ID NO: 494032 - protein, 348 aa, unidentified
MENPTTIAIDLSKNVFEIAVERQGRICQRKRLNRRQMVEFFSQCPSATVLMEACGSSHYWGRVLQRLGHDVRLLPPQHVKPYVLGNKTDRRDVEAILSARHRESIVPVPVKSIEQQSVVFLHRLRATWMKTRTSRLNALRGILRELGVTIPEGASRVLPAVSAALSDPSAPVPEVLHSVLMSAMAEVRELDERIEGVKRQLEAVAGTVPLVERLETIPGVGLLNATALAAMVGEFSRFPSGRRFASSLGLTPKEHSSGARRQLGAISKRGDTYLRTLLIGGARSVLLWAHRTKKPHRLQEWALNVERRRGRNRAAIAVANKLARIVWAVSTRGVPFHPIPLAPQNVPA

SEQ ID NO: 494033 - protein, 372 aa, unidentified
MNYNTVYVGMDVHKESFTFCAYTIDAEKGSHFQRTEADYKNVLRYLEFLRTVYGNDANFICGYEAGCLGYTLYHQLTEHHVNCVILAPTTMLEQRSKKRIKTDKRDAEIIAKCLAQHNYSPVHIPTAADEETKEFLRMRDDHKLALKKVKQQILAFCLRHNYRYDGNSHWTAAHIKWLKSLKPEALYKEILDEYLLTYTALSDKLERLDKRIEELASKDEYRESVKKLCCFIGVKTHTALSVLVEVGDFHRFASAQNFASYLGLVPGEDSSGDGQTRLGITKAGNRHVRMLLTEASQCYARGQIGFKSKELKSRQAGNSPQVIAYADKANERLRRRYYKMVLGKSKKPNVAKTAIARELACFMWGMMTDHVA

SEQ ID NO: 494034 - protein, 401 aa, unidentified
MNAVGIDVSKGKSTVCVMRPFGEVVLEPFEVLHTTQNLNDLAGKLKALDGETRVVLEATGNYHKPVAFVLHDAGLFVSVVNPVLIHDYDNNSLRRVKTDRKDAVKIANYTLDKWTRLRQYLPEDDTRLALKNCYRQYQQAVAIRTMLKNNLISSLDLTFPDANKLFSSPAKSNGCEKWVDFIGDFWHSECVSSLSADAFTKKYLKWCQKHGYYFNRSKSDEIYACAVHAASLPKSATSKLLIQQQVAQLKVVSQSMAAFQQEMLHLSQQLPEFDTVMEMYGVGSSLGPQLMAEIGDVRRFSSKKSLIAFAGIEPQPNDSGKVVGNDKGISKVGSAVLRRTLFLIMTVILQTQPQDEPVFQFMNKKRSEGKPYKVYMMASANKFLRIYYARVKAVMDSERSQ

SEQ ID NO: 494035 - protein, 345 aa, unidentified
MERYIGIDTHRDSSTLCVLSATGKRMTREVVETNGHALVSTVRKLRGALHVCIEEGTWSEWLYEILSPHVVELVVCQNEWRPGAKSDAIDAYGLAEKLRLGQAGPGVFKSPKRYQKLREWARVYQALSVDTTRAKNRLKSQFGRRGIRCTGTSVYDPHQRGRWLDQLPAAMRPAATLLGIELDGLTELKAEAEAALVAESHRHQISKVLETAPGIGPIRAALLLAIVVTPHRFRSKRQFWSYCGFAVVTRSSADWLPTPGGWIKAQAVRTRGLNRNHNPALKGIFKSAAVVVIHQTKAGHPLKKAYERLCESGTKPPMATLTIARKIAATVLAMWKNEEVYKAIT

SEQ ID NO: 494036 - protein, 320 aa, unidentified
MTTFVGVDIASQKFDVAVLYEKSKYKHKTFPDSTQGFCKFVDWLQPYNNVHVCMEATGAYSTPLATHLHESDITVSVENPARIHAFAQSELARNKTDRNDAKMIARYCCLYQPPLWKPAPPDIRQLLALMTRLDALKEMRRMELNRILVADPIITNSLQKNIDSLSVQIKEIQQTVKEHVNNNKALKRNKELLKSIPGVGDILSYTFLAYTGDVSRFSNNKKLVAWVGLSPMLQESGLWKGRSKISKKGNIELRKALYMPAVAALTHNSVFIAFKKRLQQNGKSGKSIVCAGMKKLLQIMYGVLKSGVPFDEKYSLPNKF

SEQ ID NO: 494037 - protein, 410 aa, unidentified
MEVLYRRCAGVDVSKRDAKVCVRIQGSGRRATSSEVTTWGSTTNQILALRDYLKAAGVEAVVIESTGAYWKPFYYLLEDELNLILVNAREAKTVPGRKTDVADAAWLADLGAHGLVHASFVPPPPIRQLRDLTRLRTTVLRDRGREWQRLEKLLEDAQIKLSSIVTDLAGVSSRDILQAMIGGQTDPHQLARLARGRLKVKHDQLVEALTGRFTDHHRFLAGLHLARIDAHSADAAKLEAAIEEAMAPFQAARELICSIPGIKTVIADVIIAETGGDMTVFPTAAHLCSWAGTSPGLHQSAGKITPVATRHGNTHLKAALGMAAFNIAKQHDTYFSARYRRLAIRRGKKRAIVAIERALLTAIWHMLTNGDFYQDPGPDYYLKHNPARRANRAIKELTSLGYHVTLTTAA

SEQ ID NO: 494038 - protein, 359 aa, unidentified
MYTVGVDFHKHTSSYRVLDEHGKSIKRRKLVNDPEVIKEFICSVPGPKQLAMEATRSWGLYYECVKEHVNQFHLGHPKKMKAITESETKNDNTDADLIARLAHSGFLPKAHVSSSTMRELRSLVRFRGYLVNQRRSVRNQIHTLIDRNVWPCHKPGSFKDIFCKRGRLWLKELKLPERERFILDRCLDKFDTLNKEISVVEHYIVSQQHELVGLRYLRTTPGFRTGKVNAYVVLVEAGDITRFNKAKGFAFYAGLVPSENSSGDKHRKGRLVKGANMHLRTALIESTFSAMRTDKGLRAYYLSVKARRGSGSAVIATARKLSYAIYHVLKEQRPYRAHIIQPPAADCHPFSTQHAKQRA

SEQ ID NO: 494039 - protein, 365 aa, unidentified
MASISRGVPIHLGLDVHKDTISVGILPTDQQVPDVERITHDEASIRRLVGRFGNPRMLRACYEAGPTGFELARLLAGMGVGCDVIAPSLIPKAPGDKVKTDRRDCRRLARLHRAGELVCVRIPTVQEEAVRDLCRTRADMVEDLTRARNRLGKFLLRHGRVWRGGATWTLKHQAWLGSQRFDQPAMAQTFGHYLAVVEVRNTQLDAVEADLAGWCDRPPFAWQVARLAAYRGVTRLGALTLAAEVADWRRFASASQFMGFCGLVPSEYSSGNTVHRGRLTKAGNAHLRAQLVEAAWAYQHRPTVGVQIARRQQGLPPAVTARAWAAQQRLCARFRALAARKNIKSIVAAAIARELAGFLWAEMTA

SEQ ID NO: 494040 - protein, 374 aa, unidentified
MTEDSRFVGLDVHAETIAVAVAEADGTVRSLGTIPNTPEAVRRVVTKLEPREGLRVCYEAGPTGYVLYRQLTALAVPCVVVAPTLVPVKPGDRVKTDRRDAEKLARSYRSGDLTPVWVPDAAHEALRDLVRAREAAKQDQLRARHRLSKFLLRHGRRAPAGIKAWGAKHSAWLLTVRFDAPAQEATCVDYRHEVDHATERIARLERALTAVVAAAPAPLRAVIAALQALRGIAALGAVTIVTEVGQLSRFAHAGQLMGYSGAVPSEDSSGPRTRRGAITKTGNAHLRRVLMEAAHAYRHRPAVGYTLRARQRGLSEEVKAIAWKAQHRLHARYRHLSGKGKPIPKVITAVGRELLGFLWAIGVHVEREAVSHAA

SEQ ID NO: 494041 - protein, 400 aa, unidentified
MLSIGIDVSKGKSTVCGMKPGGEIVYTPFEVQHTREGMSELVSLLRSSGEEVRAVLESTGSYHCPVVTALLENGIFVSVVNSLRMKRFCSQSIRKVKTDRIDAMQIALYGLAYWQELQPARLPEDTYRELQLLARQYYQMTSLLIKAKVDFNAICDQVLPGMQELMSDHAGRHKLSDFVLRYCHTTHILEMGETRFRKDYCKWAEKKGYRNCERMAVLIFATAQNGIPVLPNAPSTQIVITEAIRVLHTVEASRDAILTQMQALAKTLPEYSLVREMPCIGDTLAPRLIAEIGDVRRFHSKRALIAYAGIDAPPYQSGKFRANNRHISKRGNRYLRRTGYEVMQSYVMHKPANDPIFTFIEKKRGEGKSGKLAMVAGLNKFLRVYYGKVTELYRSLPAIE

SEQ ID NO: 494042 - protein, 370 aa, unidentified
MKEDTTIGMDLGNRNHKAVAIDGGGKEVERIEVANTPEAVREFLSRHAKATLAIETGTPCRWVSELAKGLGLRVVVANARKTRAIWQSSRKNDWNDAEMLARIARTDKSLLHPVALRGAGDQRLMRMAKARETLVRNRTAIVNEIRGFCKSEGSQLMKCSTRAFARLKGDLPGEVADVAGLLFEQLDALNATIRSYDGALSAALMRMRGAEAALVMQIPGVGPVTAAVFLAAIGDVAAFKGRPRDAGPFLGLAPRQSQSGDSDPQMRISKEGNAMARKLLVVAANHIMRPSGKDSDLRRHGERIAGHGGKNARKRAKVAVARKLAVTMLAMLMKKTDYRPLAEGAPPEEAGAPDGGVAAAATGGHEGERA

SEQ ID NO: 494043 - protein, 375 aa, unidentified
MAEFIMVACDLHDKTMLLKIARGRQAAEKVTLRNTSACRRRLIEQLHERARAAGGARVIFAYEASGQGFGLYDELTAAHIECHVLAPTKIARSTQQRQRKTDEQDADQILQLLRGHVLAGNPLPTVWIPDVQTRDDRELVRARLDAAEKGVTIKVQIQSLLKRNRLTRPEHLKCAWTKKASGWLRMLTRDPAVGVGTRATLASLLRQWEFLQEEIERLDEALERLARSPRYSATIDELVKMQGVGLLTALVFLTEMGDLARFANRRQIGAYLGLVPRSYESGAAGDRKGHITRQGPSRVRRALCQAVWTRIRQEGPDHVAYQRLVERNPKHKKIAVVAAMRRLGVRMWHRARAARPEATPWSKGRRADAPAPASG

SEQ ID NO: 494044 - protein, 417 aa, unidentified
MGGNSCFNHAMMGGGSEMDKTQQFRWFLGVDVSKETFDACCINSKGEKVFSLSTSMNRKGFEELIKQFSSLSIPQESLLVGMESTACYHINLYSFLVSSGYTVIVINPLLISNFVKLQLRKTKTDKKDASVIAQFLLLNRDSLSQTIVSSDISDLRDLSRQRESLVDQMSSIKTEIKRLLSITFPELEQIAGVFTKSMLRLLCQYPSAASMRQVKRSLIAKILIPGSYGKQTAASVDRILKAAQGSVGTSSPTKEILLKQKASILIQLEGHLQELTEALKELCQAKIHEDMDILTSMKGIGEKSAMNFLIEMGGDIKQFESHQKLIAMAGLDPALYQSGKMDRKGKISKRGNRHLRRIIWLMTTKVIQFNERFKQYYLKRIKDGLPYKMAVLATAHKLIRVMFAMLTNRTLFNARMN

SEQ ID NO: 494045 - protein, 366 aa, unidentified
MKKVSTAALKQSRNFSQPQLSIGLDLGDRSSCYCVLDETGRIVMEQKVATTPKALQAAFGAMPRSRIARETGMHSPWVSRLLAELGHEGIVAHARNVRLIGESRKKDDRLDAQTLARLARIDPGLVSPVKHRSAQAQADLTVIRARAGLVRARTARVNTARGLAKSYGERLRGCNVRHRNPEKAEGLSPELRSALEPLLAGIESLSERIHECTERIENLAREKYPQAARLQPIKGVGTLIALTYMLTLQDPHRFRKSRDVGGYLGLQPGRRNSGQSEPQMHISKAGDPYLRTLLVQGAQHILGPFGVDCDLRRWGLKLAERGGKSGKKRAIIAVARKLAVLLHRLWVSGEAYEPLHNGRTPMPVAA

SEQ ID NO: 494046 - protein, 349 aa, unidentified
MIIIGADYHPGFQQIAFVDTNTGELQERRLEHREEAEKFYRDLAAPGMKVRVGMEASGHARWFERLLSELQFELWIGDAAEIRTKRVRKQKTDRQDAELILRLLLEDRFPQVWVPNWENRDLRQLLWHRHRMVQARTRIMNQLQAVALNEGLRCKKRLWRDAGREQLESFPLAPWASRRRRDLLELLDRLTPTIAELTQAIEQEVEKCPEARRLQTHPGVGALTALAFVLIIGRADRFQCGKQIASYLGLVPLEESSGQRRRLGHITKQGNSLLRFLLVEAAQVTVRSDQEWRSKYFHLAMRRGRKIAKVAMARKLAVRLYWMWRKGWNYEQLKKFGSHAGQPGNREGV

SEQ ID NO: 494047 - protein, 500 aa, unidentified
MKTKTTTKAAGSIYRNQNELLRTLFERAADPRKVLCVALDYAKRKHMALCCDGNGEILRAPFPVDNTVEGVTFLIEQISTTARRRKIAKCNIFLGGEDEPSYVANFTAALRARQYLVLRVNAAEAKENRENQIASTDVLDLLGIAKTLLSRRARSTGEIRSKGQKPTQDIYFHIRQINRCRSGLVRQQTAASNRIHAFVDQLFPGFLEQSKSGLTPFCEASIALMMDRFSAPEIARRRPHTLAAFLARRSVRQPDEIAAKLIALASGALSPAPQRLASLQGTLSATVDLRQCLTRNANQLRCQAAILLASTPYAMLTSIPGIGFTLASGMAGELGDPSHLSGVDSLCAFAGIVPHTFQSGGPDQPASQGHSTTRCNHILKNWTVQSAQKIHLYGPPELKDRITRWNANGQHGIFAGARRYLRLLRSLVLNQVPYLDPTGRSSTASDQDRRDAALHAWLILMRKWRTIPNGPALIADKSTPLGFWRRVVMESRNVNLPLKP

SEQ ID NO: 494048 - protein, 346 aa, unidentified
MKILALDLGKYKTVGCAYESESGAHQFKRGLTTAAGLAGMVQAVRPDRVVIEICSIAGWVCDLMWGLGIEVQVANTSDDAWRWRKVKQKDDRRDALKAARLSAVNQIREVYVPAHEVRQWRALITYRQQLVRRRTKIKNHIRDLLLREGQSLRRGSGCWSEAGLKQLEEQAQPFSECGPAELWRGELQLELEQLREMQRQLATVTAQLDKLGAGDARVQLLRTVPGVGPRLAEAIVALLDQPQRFRKASQVSGYIGMVPKAMDSGETERRGHITRQGSRLVRSLLVEVAWAGLRHNAWVRQTYQRLSGGKQARKKIAIVAVGRKLLVKCWAMLRDNRAWDWQPQIT

SEQ ID NO: 494049 - protein, 400 aa, unidentified
MDPVIGLDVAKGESQVQAFLQRKKTYKKSFKFAHDLQGLGVFYEFFREVKQVSGQSPAVIFESTGHYHEPVLQYLEEHGITYYLINPMVAHKAKQTSLRKVKTDKMDAFHLGELYYKEDLEAFQKKTVKTLNLRQLTRQHSALTESYVEIKLQCQTILDQVFPEYHHVFSNLYGNISLKTLFQYSTSFDVKNTTQEQLATDMYQIGAKRSYAWFLDKARQLKDAAERNPFQDRIYHGHLISLRMYIQMILQYQEHLSKMREEIDALAETFEDYKLIQSIPGVGGKIAATIISEIGEIDQFPHPKKVAAYAGIDPEVFESGKFKATINCITKRGSSRLRQALYSAVQCGIAKNRNTKLRAFYDRKREEGKPHKVAVIACANKLIHWIHAMLKRKEAFVDQL

SEQ ID NO: 494050 - protein, 433 aa, unidentified
MTRYIGMDVHKRFIEVCIIDAAGKVVFRGQVVCERKQLERFCRGKFKKTDRAALEATGNTWSVVAIVQPFVKQVVVSNPLKTKAIAEAKIKTDKVDALVLAQLLRCDYLPLVWQPDAETQHFRGLMTHRTGLMTQRSRIKNRIQSLLARWLLSPPCKVLWTKTGMAWLKSIIPSLPAHEQLAMESNCRQLDSVDRELVLLDQKLAGEAYNDPRVQLLMTLPGINYAVAMGLLAALGDISRFRDGDHAASYLGLVPSTRQSANHCYHGHITKAGSGTVRSLLTQAAQHVSRHPGPLGAFFRRLAKRKNRNVAITATARKLVLVALLMLKNNEPYRYARPALMRQKFSHLGETATGKRSPVLRGRPKPCLSEIYEAVKLPAVKQPHELPRGERRMLEERKLVEFVEELYHPASPQRKAKPAVKAAKHLAARKGGK

SEQ ID NO: 494051 - protein, 343 aa, unidentified
MQVSTIGVDLAKNVFQVHGVDNAGKVVITRQLRRKQVIDFLSKIPACLVGMEACGTAHYWAREISKLGHTVRLMPPSYVKGYVKRSKNDAADAAAICEAVTRPSMRFVPIKSADQQALLMLHRTRDLLIRQRTQLINALRAHLAEFGLVAETGREGLAQLAEIITDECNREALPSAMKQALQAIVDQLAALELQIGALDRAIHAHHRANDMSCRLETVPGIGVIGATAIASTVTDPSNFKSGRDFAAWIGLVPRQHSTGGKERLGGISKQGDRYLRRLLVIGATSVVQHARRHPQKHPWIIRLLARKPAKLVAVAVANKMARIAWAIMAKGGHYRAPELAAAA

SEQ ID NO: 494052 - protein, 374 aa, unidentified
MKVYVGIDAHTTNFTLATAITFDKPPVYVNSYSPKVSNIVAYCKDLRKLFGKDTEVITGYEAGTLGFSLRRDLEKHGVTCIVMAPSTIPGTELNRKRSKKNDKRDAKAIAKALLTHDYSEVHMPDEEDEAVRDYIRFRQDIKLEQKRVKQQIGALCHRHGFHYEDGNYWTKKHIAWLRSLPVEGYLKETMDGYIRTLDYYTDRISECDIRIYEIAETDKYRESVHKLICFKGIRVLTALALIVEIGDFTRFIKAKSFAAFLGLVSGENSSSDGQHLLGITKHGNRFLRRLLTEAAQCFSRSAARKSKELLRRQSGNTEEIIAYADKANERLRKRYYRLVNHNMKCANKANTAVARELACFVWGMMTGNTHTVMA

SEQ ID NO: 494053 - protein, 435 aa, unidentified
MKRFIGLDVHKTVVEVCVINEAGKILFRRRIDCTRQKLLEFAQELTSDDAVALEVTTNAWAVADLLEPYVGRVVVSNPMKTKAIAEAKVKTDKVDAEVLAQLLRCDYLPSVWVPDATTRVMRQLTSRRERLVSEQTRLMNRIQSVLAGLLVVVPVKTLFSQEGHRWLSECELPAHERALIESDLRLIHSVRQEIEGVEKSLRKEAWKMPHVRLLMTIPGFDYCTAVTLMAALGDLSRFKDGDQAASYLGLVPSIKQSANTCSYGSITKQGNSHARWMLTQAAQNMARHPGPLGVSFRRLAKRKCWNVAVCATARKLVTIAWLMLKNNEPYRYASPTTTQHKLTRLRVAVTGQQRKAKHKGRRPGVKNGQNPPTRQVPSLNQVCEQEALPPAHGFEQLPAGEQRILRNLGVIEYVQEIQSERRIPRTRRSKKKTPQ

SEQ ID NO: 494054 - protein, 315 aa, unidentified
MTRIICGVDVSSESLEARIGPEGAEASFANNVEGITGLAEFCGQHEVELVAMEATGGYEQMAYAQLSEQDLGVAILNPRSVRKFAESMGRLEKTDRIDAGMIAWYAEVRKSPAVSLAPQRQQHLRALVTRLRQLTDIRTAQRNQRRLVIDGVVQGSFTQLLALVECQIKELAESIAALIGEDPLWKELDRSFRTIKGVADRTVSRLMAEMPEMGTLSNKTISKLAGVAPLARDSGKFQGKRTVRGGRSSVRELLFIVASVVGRHEPDFIAFQQRLKDAGKPPKVVRIALAHKLLVRLNAKAREVRGRMHPSLQTC

SEQ ID NO: 494055 - protein, 433 aa, unidentified
MNLNRLQVGIDFSRQRADFCLLFPDGQPLVSHRAFANSQPGYQQARQLLLDSLQRYAFDGLDISGEATSYYWFPFFWQLAHDRELESQHLDLFLLNPRWVHWFKKSLPPDDKADSTDPFYIAERTRTRRPKGPWDPQDDWLPLRFYTRLRFHLAQTLTREKNYYLVHLFLLHNTYRRNQPFSDPFGVTSQQVLGGEQSLDELLHLPIEELAERLDDWSSGKLDDPLETAQQLQQVAQDSFPLEEPLLTPVQHILELTLQHIRFLENQIEQVEGWIASEIHARHPEALFLESVPGVGLVLAAGIVAEIGNLDRFFETPKWDKKHNRSRQRTLREVEDAVAKLAGLWWPKADSGGFVAEDRRLAKTGNRYLRYYLVQAANGMRRHIPAYTSFYHRKFQEATRHKHKRALILTARKSVGLFVGLLHRKEPYRSMEV

SEQ ID NO: 494056 - protein, 443 aa, unidentified
MHTQEQTSPMSRTIQSAARARKSENTMNTECYAAELAFDWGDQTHAFALQGAGAKIETGSLGASPESLHGWMEQLGERFKGQPVTLAVEAGRNALMHALLAYPWLVIYPVHPATSQHFREAFVPSGAKDDLPDALVLLNILTQHRNLLRPLKCDTAETRKLHALVTARRAAVDRRTQLGNELRSLLKGFYPQALELCGDDMASPLALDFLARWPQLKSLQAARPSTLRDFYFAHNVRRPDVVASRLERIAGARALTADPAVIQPSVLQVQLFVAVLRPMQKHIAVLDDHIAEAFAVHPDAAIFRSLPGAGPALAPRLLVGFGADRSRYPLATSIQKFSGIAPVTVRSGKQLWIHWRWNAPVFLRQTFVEWAGQTVVHCPWAKAFYRQQRDAGKRHQAALRALAFKWIRIVWRCWQSRIPYNEATYIDALARRHSPIINTLSSS

SEQ ID NO: 494057 - protein, 415 aa, unidentified
MALKIVYKICCGIDVHKTFVVACIASTDSKGVTTYECHRFSTYTKGLKDLLQWLLKHNCKDVCMESTGKYWIPVYNVLENDCTIVLAHPKYVKAIRGKKTDKKDAKWIADLFKHDLVAGSFMPPADIRQLRDLMRYRFKLTCFMSSEKNRLQNCLTVSNIQLGNVVSDTFGKSALAILDKLLENPADTSFDLEPLVYKSLKKKLPELRDAIDGYITLEQAGKLKVIKAHYENLESRKAELEELILALAAPYQQELAILQTAPGIRSDFTAIGIISEIGTNMEAFPSAKHLCSWAGLTPTNNESAGKKKSVRVSKAGCYIKPLLVQCANAVVTSKKHPEIRNRYLRLKKRRGHKKAIIAIARMLLTALYHMLKNGENYNAELYRKSDLPPADREITVEQAIIIARNQGYKIKSATA

SEQ ID NO: 494058 - protein, 354 aa, unidentified
MGIKYIGMDVHQATIVIAVLNESGKCVMETIIETKTCTIVDFICGLRGTLYVTLEEGTYAAWLHDVLSPHVEKVVVCDPRKNKLLPSGHKSDKVDARKLAEWLRTGQLSPVYQGRQSLRTLKELARSYRGLVEDSTRVMNRLKALFRGRGIACSGPAVYQARQREQWLQQLTQPGARRRADWLYQQLDQLQPLRKAAHQALLAESRRQAGQPILCQIPGLGPTRAALLQAIVETPHRFRSKRQFWTYVGLAVVTHSSADYQLVQGRVRRSNKRVATRGLNRNHNRVLKDVFKSATTGAIQRDPVFKLLYFRLTERGVAPEMARLTLTRKLAALTLALWKKGAHYDPEQLKAQAA

SEQ ID NO: 494059 - protein, 429 aa, unidentified
MNYTQNEKIEQVTDSTMVVGIDIGSQIHYARAFDNRGRELTKRIFSFHNDLEGFNSFKLWAETLKTENKKTAVLIGCEPTGHYWFAFAKYVNDHQKRLVMVNPFSVKKIKELDDNSPKKTDSKDPKTIAKLVVDGRYSIPYMPEGIYAEIRDLVYSRDRIMKQHNISANRIQRWLAIHFPEYLGLYTRFDAISGLAVLEKAPLPKDVIALGVNGIRKIWHDKKMRGRGVTEDRAKTLVEAAHNSVGLDGGIGTKSELYMLLEEHRLWTSQLEAVNKVLEEMILKVPHMEKLFAIKGVGSITIAGFIAEVGDIRRFDSPKQIQKYAGLELVENSSGKHKGRTRISKRGRRKLRKILYQVMVPLLARNKEFRGIYDYYVTRVKNPLKRRQAMVAVSCKLIRVFYAVLTKGVEYDRFKMMSDIHRKSDIIAA

SEQ ID NO: 494060 - protein, 416 aa, unidentified
MEVLYRRCAGLDVHKDIVVAGLRLAEAGSVITEIRSFATTTPGLLALSAWLGEHGCTHVAMEATGIYWKPVWHILSDGDFTLILANAAHVKNVPGRKTDVADAIWLADLLAHGLIRASFVPPPATQELRALLRTRKQLVREQASHVQRLQKTLEDANLKLASVLTDILGVSGRAILEALIGGECDPDALLGLVRRGVKASPDMLRAALTGRVSERHRFLLRLHLRQIEALDGAIAEIDREVDRDLAPFYDAVRLLRSIPGVSDLTARVIVSEIGTDMTRFPTAGHLISWAGLCPRNDESAGKRRSTRLRKGAPWLKTTLVQCAWAASRKKDSYLQAQFRRLRHRRGPKKAICAVAASILTAVYHMLRDGTFYHNLGTGHFHRISPEAQANRLAKLITKLGFTCTLAPIQSNSSVSV

SEQ ID NO: 494061 - protein, 348 aa, unidentified
MTMTIVEAARAVTGGVDTHLDVHVAAALDPLGALLGTERFETDPGGYKALLTWLESFGQVTKVGVEGTGSYGAGLARFLRRADVEVIEVDRPNRAERRRSGKSDPLDAVEAARAALGGRATSISKSKDGAVEAIRVLVVAKRSARQARVKAVVQMRHLVITAPDQLRCRLKGLSVAGLVAESARLRPSRSGDPVMAAHKASLCSLARRIQGLEDEIAELDERIERLLVRTAPELLSRFGVGPDTAAALLVSAGDNPERLHSEAAWAHLCGVAPIPASSGKSNRHRLDRGGDRHANSALWRIVMVRIAHDPETTAYFERKVKEGRSKRDVIRLLKRYVARELYRYLPRG

SEQ ID NO: 494062 - protein, 447 aa, unidentified
MEILYTNCAGLDVHKKTVKVCLLIHMSDGKTHKEFRTYFTTTEELLKLGDWLKEQGCTHLAFEATGVYWKPVFNLLEGSFEVLVVNAQHIKAVPGRKTDVKDAEWIADLLQHGLLKASFIPSGPQRELRDLTRYRVRLTEEKAREVNRVQKTLEDTNLKLGDVVSDIMGKASRMILHAIADGETDPGRLAALAVGRVRAPQERLEAALRGHVTDHHRFLLSEHLTQIHHLEQAIERVTAEIVRRFTPEDTPASQKEEEVEQDLSPVSVSPQESPASSPPSLSWAEAVVLLCSIPGIGEHTAIGILAEIGINMQQFPTAGHLASWAGVCPGNHESAGKRLSGKTRKGNPWLRCLLVQAAHSASHQKQCYLAEQYRRIAKRRGAKRAAIAVAHSILVMIYYLLRNQTTYQEKGETFFEEQERQGAEKRLVRQLSRLGYHVELQPVALAG

SEQ ID NO: 494063 - protein, 392 aa, unidentified
MVVSVGIDVSKDKHDCFIVSSEGEVLADAFIIPNTMDGFHYLLQRILHCTAPQDKIKVGLEATGHYSYNLLGFLLDNGLTTYVLNPLRTNLYRKSLSLRKTKTDRVDARTVASMLLSDAGLKPYTDTAYHNEELKSLTRYRFDKVKERAKLKSSIARLVCILFPELEKLVPSLHIASVYALLEEFPGAKQVANTHLTRLKALLETASNGHYKRDMALEIRNAAKNSIGSQMPAKSLELQHTIRLIRELDREIDEIEEQIQSIMDELHSPITTIPGLGFRMAAMILAEVGDFTRFDSPDKLLAYAGMSPSTYQSGQLKNCYPHMEKRGSRYLRYALYNATKYVCHWDPTFADYLAKKRAEGKHYNIAISHAAKKLVRLIFAMEKSRQPYCSAA

SEQ ID NO: 494064 - protein, 322 aa, unidentified
MNHYAGIDVSLECSSVCVVDASGKIICEDKVASEPEALISWFASLGVSLARVGLEAGPLSQWLFAAMRQAGLAVELLETRHVRDAFKAMPVKTDRKDARGIAQLMRLGWFRPVHCKSMAAQEMRAMLTARKLVQAKLHDVEMSLRGILRGFGLKVGKTTPRRFEGRIKELVAGHPSLEGVAAALLAVRAVLRREFDTLEKRVRSMAREDARAWLLTSVPGVGAIVALTFASAIDDPARFKSSKSVGAHFGMTPKKYQSGETDVSGRISKIGDGGVRTAVYEAANVILTRPVKGCASLKSWAMKLAKRAGMQKAKVALAASSP

SEQ ID NO: 494065 - protein, 358 aa, unidentified
MNKLAKVDNFFNNVDLTVDDQLYVGIDVHKRSYHVALYLNDAPALDFVMPAAKEQLSKKLKNASSAIKQVAYETGPTGYGLARHLRKNDLPVTVAATSRILRSSGDDKTDKLDSRKLAEDAAKGLLRPVSIPSLKQESDRQLYRMRHRQVHNLSRVKTQIKSFLLMHGIDEPVGLSKWSRKGVDQLRTMKLRETLRLSLDELLGNLDYYSSRVKALDKSLTEYLDKGLLARQIAILRTHPGVGVVVSCQFAVELFHFRNFSSTREVFKYLGLSPKIHQSGERSVSRPINKVSNARLRSNLVQAAWQWIRVDIEAKKTYLRLLNNCGGLKQKAIIAMARKLSGHLWTMLVNDQPYNPSK

SEQ ID NO: 494066 - protein, 446 aa, unidentified
MRKTAEVKKEFVGLEIIYPHSAGLDVGSMLMAVSYQNQQGECVVKEYGSFTEDLQIMGKDLAQAGVRHVAMEATGVYWMSAYAVLESYDIEVCLVNARMYKNVAAQKTDINDCQWLHRLMAHGLLRSSHIADESYRELRTYLHERGILQKQKSDTLNRIHKVLTQMNIKYQHLISDIEGVAGMEILSRIAAGVQDVEAILSGINISRLKAGKEDLCKALTGLYKPHYLKILNRHLEAYAFYKQQMQAYEQEIEVVLKELMPEEQEIKPKGKKTRKNQFGINLKGYLKAILGTDLTEVAGLEESTILTIVAITGTNMNKWPTAAHFTSWLNLAARPRISGGKVLGHEKRVSNNPATQAFRLAAQTMWQNKGPLGALYRRLASTKGSKKAIKAVARRLAVIFYTMVKNKTKYDPTKIGLDQEQMNARKIARLQREAEKLGCTLKKVAA

SEQ ID NO: 494067 - protein, 389 aa, unidentified
MKKNTRYVGLDVHKDSIAVAVAEAGRRGEVKFHGNIPNTLEAVKKLVKKLGPAETLQCCYEAGPCGYVLYWQLAKLGVACTVVAPSLIPKRAGDRVKTDRRDAENLARLHRSGELVAVWVPDRTHEALRDLVRARETAIEDQQRMRNRLSKFLLRRGLVKPQGWSSWTQKHLEWVEKQTKQLDQVVDQLTLADYLGEVRHVAERIARLDKAIEEAVTQAPDEMRAVVDALAALRGVGRLTAITVAVEVGSFERFESPRELMAYAGLVPREHSSGGPGNASRGGITKTGNTHLRRVLGEAAWHYTTSSPRVSSKLRRRQQNVSAEVKTISERAQHRLCRRYWKLTAAGKPASKAVIALARELLGFMWAIGIEVARQRQHLAESQVLRRAA

SEQ ID NO: 494068 - protein, 319 aa, unidentified
MTRIICGVDIASSSLAARIGRDGAASTFANTQQGIAELAAFCESQGVELVAMEATGGYEQRAFAQLSEHGLSVAVVNPRAVRQFAQSMGALEKTDAIDSGMIAWYAETKKSQPLCLAPKTQLELRARVTRLRQLTEMRTAQLNQQRLVIDPAVQQGFRKMLRFLAQQIGELEQAVAALIQSDPLWRELDQAFRTIKGVADRTVARIMAEMPEIGTLSNKTISKLAGLAPLANDSGKHQGRRAVRGGRSAVREILFIVGSVVARHEPDFIAFQQRLRAAGKPPKVVRIAVAHKLLVRLNAKAREVRRQGVALAPAALACA

SEQ ID NO: 494069 - protein, 316 aa, unidentified
MAPSVTALPRILGCDVGKQEIVVYDKARNRLTRLPNQADALEAFAASLGSDCFVVCEATGGYELALLSALLCAGVPAHRADARKVKAFIRSFGTLGKTDAIDARALARYAEERRRDLPLWRARDEDRVRLQSFVLARRDLVADRLAYANRRDAPNAGPLRAHYDSLLREFEARIQALDAEIKALIEGCEPIAKTVKALVAIPGIGLKTAAALVGLLPELGSASPKRIASLAGLAPHPNQSGAADRHRFVHGGRPEVKRTLFMAALTARKHNPNLRVFYERLVANGKKPIVAITAVMRKLLTFANAVIRDHQTIQVS

SEQ ID NO: 494070 - protein, 346 aa, unidentified
MQNDTLAAVDIAKEVFEVGVSDRPGHVARRRRLARYEFLEFFAQLPPATVVMEACGSAHYWARRIEELGHVVVLLPPQYVRPYVVRNKTDRKDVDGLLEAFRNERIKPVPIKSVTQQVLGTLHRLRSGWLADRTRAINALRGLLRELGFFIPEGRKHVLPDAWEIIQDPKSGLPDALKPSLGSLCEEIVSLSTRIEEIEAQLEALAKQIPVVARLRSVPGVGLLTATALYAFVGDALRFPSGRHMASFLGLTPREYSTGLHRRLGRISKRGDVYLRMLLIHGARSILWHAKHMKQPDRLRAWALRLERKLGHNKAAVALANKLARISWAVWKNDRNFAPMPEVQAA

SEQ ID NO: 494071 - protein, 356 aa, unidentified
MQTQVTKKIDFKDKQLFIGLDVHKKSWSVTIVVDGMEHRTFTQPPDPVTLNNYLQRMFPGGDYNSAYEAGFCGYGIHRELNSLGIKNIVINAADIPTSQKDKLQKRDPIDSRKIARALEKSSLRGIHIFDREQEELRSLNRTRFYLMRDLRRSKNRIKSFLQYYGESIPPEYDNNQWSLKYISWLKQIKMQTMSGQDAFTNLIRSYEYHREQLLTLSRQIRQRMREYDNELYTLLKTISGIGPLTSSALITELGDINRFPHIDHLSSFVGLIPRVRESGETVHTGGITFRCNSFLRTMLIEASWQAIRMDPAMMQYYQKHVINNKGHKVIIKVARKLLNRIRYVMKNRQPYVTGVA

SEQ ID NO: 494072 - protein, 341 aa, unidentified
MAQYIGLDVSLKDTFVSVREDGRRIWRGKCPSDPRLLSEVIRKRAPEAMRIVFETGPLSIWYYHELTAAGLPAICIDARQAKKGLDMARNKTDANDADGLAHLAEAAFYREVRVKGYDSMLVRTLVTARTQLLKMQLQPSNQIRGLMKTFGLIVPKGAGRVFDGHVCELTASHSTLEKIILPLLAVWRELRAKTASLTKQLADSARQSEQCELLMSIPGVGMVTACSFVAAIEDPNNFPRSRSVGAWLGLTTKRYQSGEVDYDGHISRRGDSHLRSLLYEAATVILTRAHADSELRRWGLKLREKIGFKRAATAVARKLSVIMHAMLKSGELFDRSPVAAA

SEQ ID NO: 494073 - protein, 344 aa, unidentified
MVACGLDGDTGELFERRLTPDHGEIVAWLGDLPGPVAATYEAGPTGFVLARSINAAGIRCSVAAPSKLQRPVGDRVKTDIRDARHLARLLHLGEIVEVEIPSVEQESARDLFRAREACRRDLMAARNRLSKLLLRRGIVYYGGAAWSRNHERWLRGQRFDDPALAIAYDTAFDTVLATTARRDRLDAAITAMAADSSFTAVMTRLGCLRGVSTLTAFGLATEIGDWHRLTGRSIGAYLGLVPCEYSSGANRAQGGLTRTGNTHARRLLIEAAWHHRPSYRPGEVMRRRWDAASPAARARGQAANRRLHARWLRFNERKKRPVVANAAIARELAGWCWSLAVMDD

SEQ ID NO: 494074 - protein, 414 aa, unidentified
MDVVYTQCAGLDVHKKTVVAAIIVPDGQGGLHKETRTFGTMTVDLLALSDWLMGHGVTHAAMESTGEYWKPPFNILESNFEVMLVNAQHVKAVPGRKTDINDAEWLADLLRHGLLRASFIPPVGQRELRELTRHRSNFVRERATLVNRVQKVLESANIKLASVASDVMGVSGRAMLAALIEGHASPAEMADLAKGKLREKREQLVKALEGRVKPHHRFILTELLCQIDNLEEAVSHFDEQIQLLCVPFEAAIALLDTIPGVARQTAEIIVSEIGIDMNRFPSAAHLAAWAGVAPGNNESAGKRRSGKTRKGNQALGVALNQAAHGAAHTKGTYLSAQYHRLAGRRGKKKAILAVAHSILVIAYHLIKRQEPYRELGGDYFDQRRPEATAKRLVKRLQQLGYEVVIQSQPANVAA

SEQ ID NO: 494075 - protein, 345 aa, unidentified
MEQISRIGMDTSKHFFQLHGVNAAEKVVLRKKLRRKEMVAFFKALTPTVIGIEACGASHYWARLLRSFGHEVKLIAPQLVKPYVKRGKNDGADAEALCEAMSRPTMRFVPVKTAEQQAALMLVGIRARLIRNRTQLANAIRGYAAEFGLTAAKGMAHLVPLLERIQADESLPALARELFSLQAKEYAQLLAQIDEVDAKLMAWHKADECSRRLAKIPGVGPIGAVLLKMKTPEPELFRSGRQFAAWIGLTPKDHSTAGKVRLGVITRAGDEGLRSVLVVGATAVIQQVRRGGRASPWLAELLKRKSPKLAAVALANKMARIAWKLMLTGETYTVKSAPAALASAV

SEQ ID NO: 494076 - protein, 351 aa, unidentified
MRKIAYLGMDVHVSNSVLGEMDAVGHFRGNKSFTTCEKNIIKALKDVKAKEKYLTIEEGALSYWVAQVAAPYVTEVISCNPIENALIYKSPHKRDKVDTQKLCRLLRMGELKRVYHPENDHRAVFKAAARHYMDLRGQHKALMQKIKAMYRYWGIVDVQGLGVYSSKGREDFLKRVKHRHVRNQLHRLYFLMDQAGSMREHALTTMKQMGRKYPEIKEFMKIHGIGEVGAHIFDALIQTPHRFPDKRKLWRYCRLGITDRSSDGKQLGYRRLDKSGVSELKAISYQAWMVSMKGENEVKQFYSESLKRTQVHVHARLNTQRKILSTMYGLWKNGGSYDPQKFLESPQNGAA

SEQ ID NO: 494077 - protein, 343 aa, unidentified
MSEVTTIGLDIAKNVFHAHGAAASGRALFSRKISRTKLLEFFAKQPRCLVALEACGGAHHWARELTLLGHEVKLIPPAYVKPFVKRHKNDAVDAEAICEAVQRPNMRFVAIKSEEQQASALVFRTRDLMVRQRTQLINAICGHLTEYGWVAPKGPSHVAVLGDLLDGEMGPSLPEAARPMFRTMLDLLDVLNTKIAELDKEIARRAREDAVARRLMTIPGVGPITATAIAALAPPAETFTKGRDFAAWLGLAPRQLSTGGKQKLGSITKMGERTLRRLIIIGCSAVVLQASKRGAPVGSWLEQMMARKPRMLVTVALANKTARIIWALLIKQEEYKAPVAAAA

SEQ ID NO: 494078 - protein, 206 aa, unidentified
MWAGVDIGKEHHHCVVINADGERLLSRRVLNGEAELLDPIGDVLAMSTDVLWAVDLNHGGAALLIGLPLGHDQPMACLTGLAVYRASATYKGGKGKTDAKDAFAIADRLAGFACLAPGPRDSGRVSGNLRRPKRYHRGLLRSMHLSAMVSTTTCPTSKACYQRKRAEGKGHKQALLALARRRLNVLWAMIHDGQCYQGSPPVTTAA

SEQ ID NO: 494079 - protein, 341 aa, unidentified
MDELYYVGLDVHKRTVSFCVKRANGGVVKQGTVPATRPSLQEWMAGLPERWSGAMEATMFTGWIYDVLRPRAVELKVAHPYMLRAIVAAKKKNDRVDAAKLADALRCDLLPTCWMAPSEMRELRRVLRYRNLLVREAVRMKNKTAGLLMEVGAEFNKQRLHGRRYFEELVESLEEVPESVKALLELTHTHLEIFERAQKRLLRALREHPLLAERVERLRSIPGVGEVTALTWALEIVDPNRFSSGKRAVSYCGLCSAQDESAGKSQRHPLSKQRNAHLQMMLVEAAQLAPRFNPELAQVYEQERERGANHNRAVLTVARKLVGYLLAVDKRGTAFQPRPPR

SEQ ID NO: 494080 - protein, 358 aa, unidentified
MWPAKPEVPAEPPYGSFGEWAQTQRLLELGSDAWKLELMHVAVGQPTQEAYRTPMNSVGLDVHKTRCVACVKTHEGEIVEEFAFQNTPHGHEELITHLKAYPQIQVAIESTGNLWIPIYNRLEDEHIHTILTNPKKTRLIAEAKIKTDKLDARILADLLRANLLSASYVPPPQIREQRSIVRERARLGQLRTIIKNRIHTLLDKHSIKTPYTDIAGKHSLEWLTKLELPPGDRILLDVNLEQLNSLNHSIDRLTETIAISAITNPEVKLLMGFTGIDYYSAMLLINEIGPVARFASPKKLVSYAGLAPSIRQSGNHTMHGHITKEGNSHIRWILVEAAQHAARHDPRLNQFYQLEDFG

SEQ ID NO: 494081 - protein, 337 aa, unidentified
MNYCGIDLSSKSSDISIIDETGNQLRRQAVATEAGDITEALAGYGQLLVIIEAHPLAETAARIVEEAGHRAVIIDARAAKNLMSAMKKTDRRDAQTLAEIGRCGWYIEVHRKSAAARQMRSILQARQALLKSSKALASSIRGLLRAHGIRLGKVSKGQFAAQVKKAAEQEVPGLLPALSGMLDAWVVAEERAEQIKQALAKACRQDEISTRLESVPGVGPLISTAYRATIDDPHRFKCGDEVSDYLGLVPRIYQSGEVEYRGSITKEGDGLLRSLLVEGAHVLLTRGQDCALKRWGLSLEKRKGSAKAKVAVARKLAVLLWRLWKEEKMFEAFPQAV

SEQ ID NO: 494082 - protein, 438 aa, unidentified
MSNNVIFNPDELFISVGIDVGADFSWMSIALPNQQLVGKPYKILHSSMNSLTTAVSKIKEAEELYSLESRIFLESTGIYHYPLFCYLRDKGFNCSVINPIITKNSTNINIRKVHNDRFDSKKAALVGLKPNLKVSLMPSDLALNCRNLSREYYDLMDNRSAYVNKLQGELRMAFPQYLGIFSKVTINTSLTLLETYTSPSAFLEADKQEIIDIIKSTARFGLTYAQNKYNAIIQAATDANQFGYIIDSNIKRIRLYISFIRKYDEAINSILESLHELVDANEDTDFVKQIHLIETFKGAGFLSAVSIMGEIGDFSAFSKPKQLFAYFGLDPAVKQSGKFEGTKVQMSKRGSAIARRVIHTLTLQSISISRNGEAKNPVLREYYIKKCDSKPKLVAMGAVSHKVCNMIFAILRDNKPFKIIAPQEHIKQYNAAKCDMTA

SEQ ID NO: 494083 - protein, 360 aa, unidentified
MLYLGIDQHRKQLTVSVRSEAGDAVLRRQVSTEWGRVRAFFDDLRRLAHPDGGFVAIVEVCGFNDWLLKMLTEYGCRETVLIQVEKRSKKKTDRRDAHQLSGLLWVNRSRLLAGQRVEGVRRVQPPTHAEAEDRQLTAVRQGLGRQRTRTINRIKHLLRKHNLEQQQPAKGLDTKRTRKWLAAMPLGAIDRLEMDLLLAQWKLWDEQIAKLELEMEKRQARSATAAVLATIPGCGAYGSLALASRIGSIERFPRPASLANYWGLTPGCRNSGEATDRLGSITKQGSAMARFVLGHMVLHVLRRDGRMKAWYGRIKRRRGSKIARVAVMRRLATIIWHMLKHNEPYTIGGPPRRKLCDQAA

SEQ ID NO: 494084 - protein, 354 aa, unidentified
MKRTTKYVALDVHQATTVASVREDSGRVIARSVLPTDGSAIMEFVRGMRGAVHVTFEEGTQAQWLHDLLAPLVDRIVVCDRRGAPRHGNKGDHVDADQLAELLRRGGLRAVYHGSAHRAGLKELTRTYQNLVEDSTRVMLRLKALFRARGIPTAGTAVYHRQQRARWLARLPDGGARFRADALYAELDVLRQLRPKAKAAMVTEARQDPAWPVLRTIPFLGPVRVALLLATMQTPWRFRTKRNLWAYAGLAVVTRSSADYALVAGQPVRRRRAPMTRGLNRNHNRVLKDVFKGAATAATARPGPLQDVYHNVIARGTREELARLTLTRKLAALTLRLWKKGERYDPTKLTTPAR

SEQ ID NO: 494085 - protein, 339 aa, unidentified
MEHLAIDLGGRKSQLCLRSSEGQILTEAKVVNEEIESWLKGLQPRRVVVETCTEAFAIADLAISLGHDVRVVPSRLVRMLGVGARGKKTDLLDARALSEASCRIDLPSVHVPSPWSRRVKSMCGMRDVLVQSRTMMVNSVRAWSRTQLKAPSRTTLKTLPQRLRDQAASRGEKLPDSVERLLVSIEQLTEQIKAATKELSGLAEESEVCRRLMTVPGVGAITALRFVAAIDEVGRFSHAHQLESYLGITPGENSSSERRRITSITKAGPAAVRWTLVQASWSALRCTPNDPMCRWAKQVMLRRGKRIAIVALARKLAGILYALWRDGSVYDSARNALAT

SEQ ID NO: 494086 - protein, 379 aa, unidentified
MRTVSGLDVHKDSIFMCILDEQGKKTEEKFGVTTREIKRLGRVMQSRYVSDVCMESTSIYWMPIWRLLESDFRLHLVNPLFLKQLPGRKSDVKDAEWIATALIKDLVKDSFVPDGNIQRLRQYGRRINEINRDLVRCEQRIDTVLQRCNIRLSNHVSRTKNKSYRKVVDALIAGETSCDVLIKLIHGRTVNRCGKSAVHDCLEGCIGQSDRDMLGQYTQMFDMYETQKQQCIEAMIQMCVELYREAFLFLLSIPGIKEISAAIIISEIGENMELFATAATLVSWAGLRPRNDESAGKIKSRKITHGNKYLRKALMECAWGAARTKGSVFYSRFFHLKGMKKHHNAIIVAIARQMLTIIWTLLTKKEHFDKEYHLKKKSV

SEQ ID NO: 494087 - protein, 406 aa, unidentified
MKPCSAGLDWASRNHALCIIDSSGTVVEQFEIAHDAAGLRELLTRLRRHAPTPAQLPIAIERPSGLLVDALVEAGYPVVPIHPNIVKATRPRYRSHGAKSDASDAYLLADLLRTDGARFNALQPQSDAVRALRALVRGRDDLVTTRVQLANQLRSLLESFWPGAAGIFAEIDSPIALAFVQRYPTPASAARCGEKRLATFLAQHRYCGRRSPAVLLERLRAAPDGHANELETDAKRTLVQALAATLTALVEQITQITARIEHTVAESPDGQLIMSLPRAGQVCAAQILAELGDVRDRFPSDAQLAAEAGVAPLTYQSGKSRSVTFRWACNHRLRRAITCFADNSRHASHWAARMYTAARARGCDHPHAIRILARAWIRVLWRIWTDRCSYDPARHRAALRLSAPGG

SEQ ID NO: 494088 - protein, 344 aa, unidentified
MGDVSTIGLDIAKSVFQVHGVDVAGAVLIRKRVSRAKVLEYFGELPPCLVGIEACPSAHHWGRELQALGHAVRLIPPSYVKAYLKRSKNDANDAAAICEAVTRPSMRFVPIKTKEQQTALMLHRTRQLLVRQRTMLSNALRGHLAELGIVSAKGRNGTAELIGIIADGADSRISAAVRGILDVLARQYSAIGTEIASIDKSIMALHRACEASRRLAEIPGIGPVGATALVAEIGDWNSFSSGRSLAAWIGLVPKQHTTGGKDRLGSITKQGNRYLRWLLVVGAMAVIRYARKHGTQRRPWLARLMERRPTKVAAVALANKIARMAWAIMVRGERYKEPKLLLAA

SEQ ID NO: 494089 - protein, 362 aa, unidentified
MPRSGRRCPVIRTIGGSIMMTHFVGLDVSQKMTAICVVDNAGRRLWRGQCPTTPEQIAAMVRRHAGDDSRIGIETGAMTPWLVHELRALGLEVICLDARHARAALKMQINKTDQNDAEGLAQIVRTGWFRSVHVKSFDSHRARALLGARAQLVGMTTRLSNHIRGVLKTFGLLPGAMRGLRFDRKVEVLLEDRSDVAPIVRPMLAAWRQLREQISAFDKAIRVLVRSNSPCRLLMSVPGIGVLSALAYVSTVEDPARFSQSRSVGAHLGLTPRQYQSGDVDRSGRISKCGDTLARTLLYEAAVVIMTRVKKASELKDWALAIAKRSGIGKARVALARKLSVILHSVWRSGKPFRWAEAAITA

SEQ ID NO: 494090 - protein, 430 aa, unidentified
MGLIVPTTIRPEREDQPLPYEWFVGIDWGSQQHQVCVLDRDRRRVGERAVDHDGASLARLADWLWGMAVGQPQRVAVAIEVPRGAIVEGLLERGFHLFALNPKQLDRFRDRHSVAGAKDDRRDAFVLADSLRTDQPSFRRLQLDAPQLLLLRELSRAEETLLEECRRSANRLRDQLHRFYPQMLQLCSAADAPWLWDLLDLAPTPAHAALLSAEQVQRVLKAHRLRRITAPEALACLQAPALPVAPGATEAAQAHCGFLLPCLRVLAEQLRACGQQVDALLRTMADEPGAGERPSDVAIVLSLPGVGRKITAWLLAEAAQPLAARDYQVLRTHSGVAPVTKQSGKRRLVVMRRGCNPRLRHALYHMARVAMQRDTHFSSVYTALRAKGQRHGQALRAISDRLLRILVAMLRNGTCYDASRIRRESAVQMG

SEQ ID NO: 494091 - protein, 383 aa, unidentified
MNFQEYLFVGVDTHKNNHSAVVINFFHQKIANLSVPNNAAKFGDFIDQLENLGHNDETLVFGLEDTQGLGRPLAQWLVNKGYTVKEVNPAITKRQRKHNPNPDKSDEVDAKAIANALLSEWEDLPVVEEDEVFQAIRQLHNQRKQFVKQRTAIKNRLHKLLHQQYPDYEQFFSNPFGKTARAFWQKFPHPSLLKNYGETRLNKFLKKQARSIPNDKASKILSLVDKDKSINTAVEARISIIKMLLDNLAMVESNLEKIDPKLEEAVNKSDYQLTTMPGIGFRLAALFISNIRNIDRFSSADKLARYAGLAPVEYSSGNSRNHTSRKYGCRALNHAFHLLAVQQVGEYRNGKIKSQIAYSYYQKKLAEGKIQKGSFNMSEKASC

SEQ ID NO: 494092 - protein, 412 aa, unidentified
MELIASRAAGIDIGKATLKATVRIQGGPKRATRREVRTFGTTTGQLLALRDWLVAEQVSLVGMESTGVFWKPIYYILEDAVECWLLNAQHLKKVPGRKTDVTDSEWIAELVAHGLVRPSFVPPPGIRRLRDLTRYRTALTEDKTREIQRLQNVLEDAGVKLDCVVSDIMGRSARAMLAALIAGERDPQVLAELALGRMRPKIGSLREALVGHFSDHHGRLCTKMLAHIDDLAATIAELTTEIGTEIEPFRRLRARLSTIPGISDRLAENLIAETGGDMSRFPTAQQLASWAGMCPGNNESAGKHFSGRTRKGSRWLRGSLGEAAAAASRSKGTYLSARFRRLAGRRGKKRALVAVGHDILIAAWYIMCDDVDYHDLGADYLDTHTMDPRRKATRLTQQLQALGYRVTLEHVA

SEQ ID NO: 494093 - protein, 468 aa, unidentified
MSEVRLGIDVACRADHRASLADERGEFIWSSWKFRTTTTDLERLWAKIPEEASVTVILEPTRNAWVPLSAWLQARGATVILVPPEQSADLRDYYNKHTKTDRLDSKVLARLPLLHPEGLRGIDNLGPAGSLRRAVRHRSSLVKRRSAASLRLDALVELLGPGWADSLGSATASKTALVILEKYADPRALKRLGRSRLAAMLIRSSAGLWREDKADELLAMANETLALWSGGGIDFTELAHDIASEVRVLRQLDDEIAAADKRIAALYDEADPKGIVASAPGLGPVLSAAILGNAGDFNRFANLAAVRSFTGFVPKIDQSGLVNGRKGITKAGDAGLRQALYMAADHARHIDPTLAQRYHRLVMVEGKHHNSALCSVSAVLITRIAACWRKGELYQLRDEDGEAITEAEGKAACADRFKIDPKIRAARRRNTPAKVFKNRVAGRGRKESTRKVAPATDPPGKEASENVA

SEQ ID NO: 494094 - protein, 363 aa, unidentified
MENVRFVGLDVHADSIAIAVAEPGRGEPEVLATIPNDTRKLLKRLRALGKVKCCYEAGPTGYGLHRDLTAAGIDCMVVAPSLVPRKGGERVKTDRRDAVRLARFLRSGDLTEVYVPDVDTEAMRDLERARDAAKRAERVARQQLTKFLLRHGRRFPEKKWSRAHLRWLHAQTFDHPAQQTVLEDYMNTAEALTARVNALTKRIAELVEGWHLGPLVKAFQAMRGISLVSAVTLAAEVCDFARFDSAPKFMSFVGLVPSEHSSGEGRHQGRVTRAGNGFVRRILVEAGWAYRHKARMSEAIRERNKGLPPEIQQIAWRAQERLCARYRKLTGRGKNRNKTVVAIARELAAYAWSMARHPALAAA

SEQ ID NO: 494095 - protein, 453 aa, unidentified
MAQRNRSVCLKPGNSRSALTITHPNAAGIDIGSASHYVAVPPDRDEQPVREFASFTVDLHALADWLKSCGVDTVAMESTGVYWIPLFELLESRGFTVLLVNARHVKNVSGRKSDVLDCQWLQQLMSYGLLSGAFRPADAVCALRSLWRQRGMHLRSQGRHVQHMQKALTQMNIQLTNVISDVAGETGQKILRAIVAGERDGHALAALKNARIRASQDEIAKSLQGTWRAEHLFALKQALEAFDFIGTQLAECDRHIEVQLQGLQAHDGEPAKGKKRSRPRNAPKFDLRTQLFKMCGVDLTRIDGIDVTTALAVISETGADMSRFATVGHFTSWLGLCPGTKITGGKVMSGKTKRVANRAAQALRLAAAALRSSKSALGAYFRRMCSRMDKPKAVTAAAHKLARLIYTMLTKGQEYTDQGQEYYEERYRQRVLWQLAQRAGKMGMKLVPSEQPA

SEQ ID NO: 494096 - protein, 321 aa, unidentified
MNKYTEIYGVDISKDVFDVINSEGAYSQYPNGSKGFERLSKKLPKGSLVVMEATGYYHYRLAQYLYEQGHCVSVVNPLSVKRFIQMKLSKVKTDKSDARAICEYACVNEVPLYTAKNKDQTECLQLLRLMDTYLKHSTAIKNKLHGERTLGIPSKTVYRSLSRSLKSLQKEICLLEARLLSLVKEHQQGQLTLLKSIPGMGSKTAMVLLVLTDGFTKFENAGQLCCYAGITPTIRESGSSVRGRSRISKVGNRKLRNLLFLCSFSACKHNRACREIYERITSKGKSKKLALIAVSNKLLKQSFAIAKSGLPYDEKYVSRLT

SEQ ID NO: 494097 - protein, 413 aa, unidentified
MSVTDVPEPPRPTAGVDWAKDDHAVSVVGPDGEQTHRFSITHDAAGLRSMIKRLLGAGVAEVGIERPDGPVVDALRAAGLVVYVIPPGQLRNLRSRYGSAGNKDDRFDAYVLADVVRTDRRRLRPLLVDTPATTALRQSVRARRDLVVHRVAVANQLRAHLQICFPGAVGLFRDIDSEITLRFLERFPTPERAAWLSVKRLTAWLASIGYCGRTPPETLYQRLTTAPAAATGADADTAAAVTAAFVAVLRTLTPQIEALAARISEQLDLHPDQAIFTSLPRSGRVRAARLLAEIGDARGRFPTADSLACLAGVAPSTRQSGKVEVVSFRWGADRQLRDAICDFAGDSRHANPWAADLYQRARNRGHDHPHAVRVLARAWVDIIWACWTSHSPYDPDRHGALQRILNQDQPAAA

SEQ ID NO: 494098 - protein, 386 aa, unidentified
MRTVCGLDVHKDSVYLCILCDTGEIFENVYGVLTHQLKDMCRTMKARGVTEVTMESTAVYWIPIWRVLEPHFHLKLVNPYFIKQLPGRKSDVKDAQWIAECTLKDLVRGSFVPPERIQQLRQYDRRIFDLDAEIVRKLSKLDAVLQRCNIRLSNYVSNTDTKSYKDVVDELCKGVTDPEELIRKVHGRIVNKHGREVILASLTGVVSQAEKDAMRQLRAEINLAEEHKQECQGKMLSICKTYYPKELKRLMTIPGIKERAATSLIAEIGVDMTKFQTAAHLASWSGLKPRNDESNKKIKSRRITHGNVFLRKTIIECAWGASRTRDCFFSRFSFHQTQVRKKNKMKVLVAVARKLLIAVWHVLHDGTDYKDFGANDCDASAVENNG

SEQ ID NO: 494099 - protein, 362 aa, unidentified
MKKLSKRGPQKEEGKDRATITVGLDLGDRFSHYCVLNEEGDVMEEGRTQSTDVALRRHFPAEPRLRMALECGTHSPWVSRLLKELGHEVIVANARKIPSITGSESKNDRNDAEKLARFAAYDPRLLSPVRHRSQARQLDLNLITVRATLVRARTMMINSLRGLVKSAGGRLPAGSAESAPARFKAAIPAALAQATGPLVVQIAQLNRQIKCLDQQIEKLPRKYPEIALLRTVPGVGPVVAAAYVLTLDRADAVADNRQAGAFLGLRPRQSQSGASDPQGRITKTGNSYLRSLLVQSAQYILGRFGPDSHLRRWGLKLAESGGKRGKKRALVAVARKLAVLMHSMWRSGCRFEPFPQTAGPAA

SEQ ID NO: 494100 - protein, 366 aa, unidentified
MLQNAGLSAEADPEHYLGGSSETMYFIGLDVHKKTISFCMKDAAGCVLQEGKIGATRQELYTWLWTLPKPRTFAIEATMFTGWIYDCLLPHAEKVKVAHPLMLRAIAAAKRKNDKIDASKIADCLRCDFLPECHMASREIRDRRRVLRYRNLVVKQAVQMKNRVSGLLMETGVSYNKAKLHRKGYFHDLMWTHPEVSDSIRPLLNFCRERIEHSHKLDLRLVSTLEQDPLLRDRLARLRTVPGVGPITALTWALEIGDYTRFPSVKDAISYCGLCSDERSSADKVMRMPLSKQRNKHIQRVLVEAAKLAVRQNHELAMVYDKQHQKGNDNCATLAVARKLVAYMLAVDRRKQGFMPAEEFKATTAA

SEQ ID NO: 494101 - protein, 319 aa, unidentified
MAQNDRVVVGIDVAKDKVDACIRSLSQRQTFPSGVEGRRKLIAWLRKHKVDKAVMEASGGYERDWAKALREACFEVRIVDPKRVRNFARSAGRLAKNDVIDADTIAWFAETFDEAPGQTHDAAREELAALVKARKAVIDLKTRLQSQNEHAVPGAVQKAHARVLKGLDAEIARLEDAIAVTVKATPAFAARAEIIESVPGLAETASAVLIAGLPELGTVREEVAAALLGAAPYDDDSGKRRGERHIKGGRRWVRNALYMPCLGAATRNNPVLKAFYERLVARGKEPKVALIACMRKLIVILNTMIARGEKWDPSRYALR

SEQ ID NO: 494102 - protein, 356 aa, unidentified
MLIIGCDYHPGFEQIAYVNTDTGELSEARLGHKERAEQFYYDLKTHGVPVRVGMEASGHARWFERLLADLQFELWIGDAAEIRTKRVRKQKTDRQDAQLLLRLMIEDRFPRIWVADAENRDLRQLLWHRHRLVQMRTRVMNQLHVVALNEGLRRKKALWRPAGRSELESLVLARWARRRRQDLLDLLDRLTPKIQELTRALEDEVEKRPVTRRLMTRPGVGPLTALAYELVIGTPERFHCGKQIASYVGLVPSEESSGDRRRLGHISKQGNTLLRFLLVEAAQVTVRSQPQWRSKFFHLALRRGRKIAKVAMARKLAVHLYWMWRQGWDYGQFEKFGSQGRKLSSHTAVVTEGSTR

SEQ ID NO: 494103 - protein, 410 aa, unidentified
MPAVLTHQQRTLDALACIHPNAAGLDIGSEEIVVAVPSDRDPQAVRAFPTFTTDLHALVTWLLACGIDTVAMESTGVFWIPIFELLEAAGITPYLVNARHVKTVPGRKSDWSDAQWLQKLHALGLLQASFRPDAEIRTLRTLARYRAELIERRAPHINHMIQALKHMNIQLNLVLTDITGVSGLAMLRAIIAGERDPHQLALFRQPGCKHSEAEIVKALTGTWDDAQIFILTQSVDMFDYYTTKLITCDRQLEQQYQAMESRWEKDAPLPDLPPAKGDSKSKNAMTFNARAQIARVIGVDLVAVMGLSAITVQTIISEIGTDMERFPTVKHFCSWLGLAPRNDISGGKVLRSRTMKVRSRANQAFRQAAHSVTRAHSSIERIIGRCVPDLARSRRLWQLRTRSRESSIIC

SEQ ID NO: 494104 - protein, 345 aa, unidentified
MEIKSIGIDLGKTTFHLIALGMRSQVVARKKFSRSQLLQYTANLPSSLIGMEAGVGSHFLGRALREQGHEVRLIPAQFVRPFVKSNKNDYRDAEAIAEAVERENMRFVPIKTEDQLDLQALHRVRDRLVARRTSVINQIRAFLLERGISFRKGPASLRRQMPEILEDADKKLSTRMRRLLDFLWQEWKGLQLQIETLNADLEQIASSDASCLRLQQIPGVGPLVSTAVVSAIGNGAAFKKGREFAAWLGLVPRQWSTGGKSKLLGISKRGNPYLRKMFIHGARAAVLRLKRNESTLGKWMSELETRAARNVVIVATANKLARISWAVLASGENYLPTHKALAFSN

SEQ ID NO: 494105 - protein, 419 aa, unidentified
MTKKSKNSTLIQIVHPICCGLDVHKDKISACLITVDDNGKEQHEIREFSSFTQDLQKMKTWLIGNNCPVVAMESTGVYWHPVYNTIEDTIKVVLVNARHIKNVPGRKTDICDSKWLAGLLRHGLVKGSFIPPEQVREWRELSRLRKIYTESLADYKRRVHKLFITANIKIDSVVSDLFGLTGLNLINLLCKNDEVTLEKVQECTKGSLKKKIPELYLSLHGYFKDHHRFQLIGMMEAIEMFQRQIEQINSRLEILTRDHENLLERIDEVPGIDKKSAQSVLGEVGVTLDEFKSMVAFVAWAGLCPGNNESAGKRKSGRNAVRNHPFKTILIQIAWAAIKTKGSYYKAKYYQLKARRGAKKAIVAIAHRIAKAIYNIIKNGDRYKDLGEEYLSKPNKQRMLKNLAKKADELGMKLVPCEG

SEQ ID NO: 494106 - protein, 429 aa, unidentified
MNYTQNNKIKQVDEKTLVVGVDIAKETHYARVFDNRGIELGKVIKFKSNIEGFRKLEEYIKEIKRKEKKEKIIIGIEPTGHYWYTLANYVNKRGMKLVQVNPYHVKQAKELDDNTPSKSDRKDPKTIAMLVKDGRYNIPYMPVGIYAELRKTNEIREVIKKKIYAIKNRIERWLDIYFPEYKKVFKGIYGKASMITLQTMATPTQVLNYTAEEILEIWKKDVKRAVGIKRANKLINIAKESVGITEGLLMAKYEILYLVKEYKKVEKELNEIEEKLKILVYKIPGIEKALTIKGIGIITISGFIAEVGNINRFSHPKQIIKLAGLNLKETSSGKHKGKTTITKRGRKRLRSLLFKAILPMVAKNNEFKLIHKYYTNRTKNPLKKKQSLIALMAKLIKIIYTLIKKNIEYDPSKLINDIHGNKKIQFLTV

SEQ ID NO: 494107 - protein, 383 aa, unidentified
MTQNKHAGKSTYENLQTIYVSIELSKKTWLITSISPGAGEKLSRHSVPGGDIAGLLARLAQLKQKARDRTGQDYPFVTIQEAGLDGFWVHRVLEAEGHESHVVDAASIATSRRRRRVKTDRLDGETMIRALLAFKRGEPRVCSMLSVPTPFEEDRRRIVRERKVLMEERIRHSNRIKGLLFSQGIRGYDPLRRDRRERLVTLRTGDGRELPMHLKSQVLRELDRMEMLLDQIKAVEAERDAMLAEEQRSAREVVMLTKVVGIGPEFAAVLWGEGLFRHFDNRRQVAAYAGLAPTPWQSGSIDREQGIGKSGNPRLRSTLLEMAWLWLRHQPASELSRWFNERVAQNGGRFKKVMITALARKLVVALWKYVTAGVVIEGARVRP

SEQ ID NO: 494108 - protein, 472 aa, unidentified
MWAGRCWVLGRAREPDEMFDRPLESLNWEALAGKWASPYLCMKPLAQNDAPGQAESESEVHMATSAVQSVRFLGLDMHKHYVMVGAVNKEQEVLLRPRKFTWPEFDRWQKQHIGPGDAIVIEASGNAWHVYDQLTAQGALVHVANPLLVKWIGSAPVKTDPHDTLKLAKLLAAGLLPTVWVPPAPVRALRTLVGQRQRWIKQRTQARNRLQGLLQDHNLRPPEGDLFAPEQRAWWLALDISAAEHLLVAQDLLALDQLAPLVAQVETAIQLQSTCEPWASEVPYLIQQTGVGLLTAMTLLAAIGDISRFEHPSQLVGYAGLGARVHASGETHTTGGITKQGRRELRAAMVEAAWVAVEHNAFWKAKFAHLARRIGDAKAIVAIARQMLVSVWYLWHNRTVDRHSDAVAIARKLWTWAEQGGKAMRHGLSCSHFVRFQLDQLGIGQELTELRYGSHVYRLPPTGSDAHLPATA

SEQ ID NO: 494109 - protein, 407 aa, unidentified
MDKVNPRCGGLDVHKDSVWACARADGRQSIEKFGTTTRELLRLGDWLAQQGVVIVAMESTGVYWKPVWNLLEDRFELLLVNAQHIKQVPGRKTDLKDCAWIAELLEHGLLKASFVPDRPQRELRDLTRQRTQLLGDRARVVNRIQKTLEDANIKLASVATDITGRSGRAILDALVQGHLAPEQMAELVHKKMEAKKPALREALRGNVTAHHRFMLRQLLGQIDDLDRMVDAFDAHIEEVMSPLERESVKRLDEVPGFDRRTGQNVLAEIGTDMSRFATPQHLASWAGLCPGNNESAGKRKTGRTRKANRWLKGALTQAAWGASRTHRSYYSAQHRRLTTRRGVKRATIAVAHSLLVTTHCLLSDPQPYTDLGAGYFASRETPEHKAQHLIRKLQRLGYTVEAKRAAA

SEQ ID NO: 494110 - protein, 385 aa, unidentified
MAPTRMPEAVIGLDVGKSSHWACVATRDGEVLLSAPVANREGDLDSLFGRFPDALVVVDQSRNIGALALARARVAGMSAAYLPGLAAHGAARLFAGDAKTDERDAMVIAKTALGIPDALLPVGDPGPTIAAARALAAQRNFLTCENTRNKNRLRSILLESCPAFEALVDLSDGPQLRLMASLGGAWSVADAGPRRAAALTRGAARGKIEALVRSTASSTRPDAAAIAAEDRAVRLLARRISENSAEIEAITAEISALLEGDDTYRCLLTVPGIGPKTASELAISIDIEDFPSHDRLASYCGLAPRNRQSGTSISSVTASRQGNKRLKNLLIFSCNCLTRTEGRWGDYYTRCRERGMSHGKALKALARKRLKVIYAVMRDRVPYAA

SEQ ID NO: 494111 - protein, 445 aa, unidentified
MYSLFFMEPYRKEHIMHNKNYFSVGIDVGSAFSFMTILAPDETVILKPFKITHNNKDSLERAVSEIKKAEELYSLESRTFLESTGIYHFPLFCYLVDCGFNASIINPIITHSTKNGNIRKVKNDKIDSKGIAKLGLSKDIPVSQFPAKLVLELRSLTRKYYDLTDERSAHINKLKGDLHTVFPQYLDVFCDVTGKTSTMILRQYGTPDKILRGHKKTMIEKISKASRKGLAKASERYEKLCAAANAAKTFGCQIDSIYFNIFLTLDLVEKLDSALDSILNRIRQLITFNKNEKFIQQIKLLNTIPGVGFLTAVTIMCEIGDFSAFRNPKQLFAYFGLDPEVNESGKFVGTQLHMSKRGSRIVCRAIFAVALASIRTKRNGEGINPYLRKYYELKSGQKPKMVAIGAVMHKVCNIVFAVLRDEKAFELRSPEEHCKQYQRPALAAA

SEQ ID NO: 494112 - protein, 331 aa, unidentified
MKIKQTIGIDISKLTFDVRIHSNQCYRVFDNTPKGFKELINWTDKNNPISKENTLFVLEYTGIYSEEISLFFTKNDISFSLIPGLEIKKSLGISRGKDDKVDATKIALYGHRLRDEIKPSKSPSTAISKIKRLLTLRERLVKQRAGHKTTIKEQKRVYLRKESKLLFEIQEKTILFLTKQIKSIELEMKNIIKENQELNQQYKLVVSVKGIGDQTALFMIVTTNGFTKFKTWRKYASYCGIAPFPNTSGTSIRGRTKVSNLANKKLKSLFDLCAKSAIQNNPEMKLYYHKRVESGKNKMSTINIIRCKLMARVFAAVNRQTPYVNTLKFVA

SEQ ID NO: 494113 - protein, 379 aa, unidentified
MMKKGHSNNGKVVTSSNTKTKPVKERPMKLIKYIGMDVHKAMTVIAVVDSAGKVLAESIIETKGSTILDFLKSQRGTLHVAFEEGTQASWLYDLIQPHVASVIVCDPRKIARQGNKADKVDARLLAERLRTGALKPIYHGEKSTRAVKELALSYISVIEDGTRIKNRVKALFRGRGIGCSGTAVYSPDQRNEWLAKLDSPALCARAARQWQELDLVTRLSEEAADDLVAEARKHADTRILRSVPGIGPIRAAVILGVAATPHRFRTKKQFWNYCGLAVVTITSAEYELVNGRVHKSKKRPLVRGLNYNYNRAMKSVFKGAAKTVADSVWKSHFQAMVAAGKPESLALVTLARKIASITLAVWKKGERYDHRKLKMTHAA

SEQ ID NO: 494114 - protein, 342 aa, unidentified
MEHYAGIDVSLECSSVCVVDGTGKIVREAKVSSEPEALIAWFGSLGFGLGRIGLEAGPLSQWLYAALKQTGLAMELLETRHVRDAFKAMPVKSDRNDARGIAQLMRLGWFRPVHCKSIGAQEVRAMLTARKLVQSKLFDVENSLRGILRGFGLKVGKATSRSFAGRIRELVAGHPSLQMIAEAMLAVHAVLLDQFKAFEKHVRSMARSDAKARLLMSTPAVGPIVALTYASAIDDPGRFKSSKQVGPHFGLTPKKYQSGQTDVSGRISKIGDASVRMVLYEAAHIMLTMPIKGCSQLKSWAMRIARRAGMKKAKVALARKLAVIMHRMLVNGTSFNAAAAAA

SEQ ID NO: 494115 - protein, 335 aa, unidentified
MKPFPFILGVDVSKRTLDVCLLESASHQIYCQTCIENTSKGVRSLIRLLKTHHIQTQDCIVCFESTGVYSTPLSVFCEQNHWNYCEVAALEIKRASGIKRAKTDTIDAKDIAFYSLRNADKLSLSHCAETTIQQLKLLSTERGKLIKAIMLFESTCEHYDFLAKDISKVVKQTNQRTLCMLKKNLCSIETSMRTLLGNNERLKKQSELLQTIPGIGEATAQYMIITTKGFTSFSNSRKFACYSGIAPFEHSSGSSIRGKTRVSPLANKKMKALLHMASLSAIRHDPELRLYYQRKKADGKHSMLVLNNVKFKLVQRAFAVIKRESPYVLACTFAA

SEQ ID NO: 494116 - protein, 381 aa, unidentified
MLRCERIGVCRRFRPTDKEMNEPMNYVGIDVHKQSFQAAVVDQTGSCLEEFRLRNNREGIEQLIERAGCYGSFQAVVESSANYWTKLFDVLEENGIPIRLSNPYKTKAIAEAKVKTDRIDARTLAQLLRADLVAECYVPSKENREKRALIRERASLTKIRTELRNKIHDLLAKYEHSHGFSDLFGKEGMTWLKTLKLSQYDQTILDTNLRLLESFDAEIEKLSIEIAKLAINHTDEKQQNQIRLLLGLKGIDYYGAMILLSEIGDIKRFPSPDKLVSWAGLAPRTHQSGETSYNGHITEKGSTRVRWILGQAAQTARLHDPKFKTFYERIASRKGHNKALVATMRKMLVVIWTILTRNEPYSGEDRELTERKIKRLIRIAS

SEQ ID NO: 494117 - protein, 341 aa, unidentified
MRIVGVTGGVDTHADTHVAAAIDDNGGLLGVESFPADASGFEGLLGWLVGFGEVEQVGVEGTGSWGVGLARFLHDQEVTVVEVDRPNRQTRRKQGKSDPTDAVSAARAALSGTATITPKSRNGQVEQMRVLMVARRSAREQRIQSLNQLRHLVFTAPESIRVRFKDRYKTGLVTEAANMRPNRVSDPILYTTNLVIRNLARRIKRLNNEIREIDQMLTELLTQTAPSLLDLHGVGTDTAASLLVAAGDNPERISSERSWAHLCGTTPLPASSGKTTRFRLNRGGDRNANAALHRIVLTRMSSHPETKTYVARRRAEGLNTAEIMRCLKRYVARQTYKHLTV

SEQ ID NO: 494118 - protein, 377 aa, unidentified
MSNVRYVGLDVHAASITVAVAEPSGEVRSAGQIPNGPEAVRRLVKRLGPAAGWRACYEAGPTGYVLYWQLTGLGVHCDVVAPTLVPVKPGDRVKTDRRDAAKLARSYRAGDLTPVWVPDAAHEALRDLVRAREAAKGDQLRARHRLAKFLLRHGCRPPTGVRAWTLKYWAWVQRDVHFAEPAQEATLLDYMHEVEHQAGRLERLAHALDEAVAAAPATMRAVIAGLQALRGIAQLSAVTIVVEVGELSRFATPRQLMSYSGVVASEYSTGARVRHGGITKTGNAHLRRIVVEAAWAYRHRPAVGYTLKRRQQELSPRVREIAWKAQHRLHARYYRLLGRGKLKQPVVTAVARELLGFIWAIGKQVEREQQATHERAA

SEQ ID NO: 494119 - protein, 356 aa, unidentified
MSREIKYIGMDVHKEATVITVLSGSGKLVMESIVETKASSVLQFIHGLRGELHVTWEEGTWAAWLYDLLQPQVTRVLVCDPRRNALLKEGSKSDKVDARKLADLLRTGMLRPVYHGEHGLRTLRELGRSYQTISQDLNRVMNRIKALYRGWSIPCGGTQVYAPRYREEWLHKIEHAGVRRRAELLYQQLDGLQALRRTLRPELLAESRKHKASKLLRQIPCIGPIRAARLLALMQTPHRFRSKRQLWTYSGLGIETHDSAQYRYVGGQLQHTKKPQQIRGLNQNHNHEMKEIFKGAATRASCGVGPLRDFYLALLAKGMKPEMARLTLARKIAAIALTLWKKEERFDAEQLKPQAA

SEQ ID NO: 494120 - protein, 463 aa, unidentified
MTLPPPAFAGLQTGNRGTRRRAPVSDRPGASLAAAGPSLPPPLQGVELSLALPEALFFTGIDWAAATHAVCVMDAAGKITAEFTIEHSADGIATLIRRLARYGDPAGMPIGIERPNGQLAGLLLEAGHPMVPVSPNAIKTWREGEVLSGAKSDAGDAAVIAEYLRLRQHRLRVAAPYSDQTKALRTVVHTRDDLVEMRVASINQLSALLEAHWPGAKAIFADVESPVSLAFLTRYPTPDAARHLGEKRIAAFCTAQGYSGKRPAAVLLARLRSAPAGTTGAALTRALRDAVLALVTVLTAQNAAIKSLSRCAAAHLSEHPDGAVFTSLPRSGQINAAQMLAEWGDCRQAYDGPDSVAALAGCTPVTKQSGKHRDVHFRWACNKRFRKAMTTFADNSRHASPWAAKIYNDARGNGKDHPHAVRILARAWIRVIWPCWLNTVPYDPARHGAAAALTTQATGQIAA

SEQ ID NO: 494121 - protein, 412 aa, unidentified
MQTLVERGCGLDVHQATVVACLLIVSANGNVRKQMRTFGTTTRELLSMRTWLLSEGCTQIAMESTGVDWKPVFAILEGELEIVVANAQHVKKVPGRKSDVKDAEWLAELLCHGLLRSSFVPPKPIRELRDLTRYRRKLVESQTAERNRLLKLLETANIKLSSVVCDVFGVSGQLMLKALLKGKASPPEMAQLAKGCLRKRIADLEPALRGKLEPHHRFLLKLQLDRLQAVEEDLTTLERHMQEKLQPYAAQLALLQEIPGVDWTLAAVIIAELGVDMSVFQSVSQLASWAGVCPGTNESAGKRKSSRVPKGNVYLKTGLVEAANAASRAQGTYLRDKFYRLKARRGYKRATMAVAHKILVAIYHMLSQQVSYNDLGDLYLDKLNKNHLTRNLVHRLERLGYVVTLTPQQQAA

SEQ ID NO: 494122 - protein, 369 aa, unidentified
MGNRSMFVGLDVHKDTIDVSITDGGRAGEVRHYGVIASDVEPLEKVRRALRAPGRVLHFVYEAGPCGFGIYRHLTGRGEDCVGVSPSMIPKRSGDRAKTDRRDSQMLARLHRAGELRAIYVPDDTDEAMRDLGRAREDAVAVGIQAKYRVKAFRLRQGRRYPGRDGWTLAYRRWLADLSFPSTPQHVALQEYRDTIDETERRLERLTEQRRHLVPTWRWAPVVAALPALRGGAFITAVGLVAELGDLRRFRQPRELMADLGLVPSEHSSGPSVRRGGITKAGNPHVRRLLAEAAWAYQGIPRIGRQQLYRQEALPKVVCDIAWAAQLRLTARFRRPVARRTAKPTVATAVARERTGFICAIAREVTPTR

SEQ ID NO: 494123 - protein, 351 aa, unidentified
MRKIAYLGMDVHSKHCVLGDMDFKGNFKGTQTFPTSEQNITKALEAIKAKNKYLTLEEGNLAYWAAQVAAPYVTEVIPCDPKENALIYRGPQKNDKVDTRKLCRLLRLGELKRVYHPETDERAIFKAAAQHYMDLRDQQIALKQKIKAMYHHWGVIDVAGEAVYSTAKRNDYLRQIKHIEIRNQVSRLYYVMDQTESMQASALKAMKQLGRKYPEIKQFKKIPGIGDILAHFFDAFIQTPHRFANKHRLWRYCRLGVTDRTSDGKPLGFKRLDRSGVAELKSLSYRAWMSALRGDNEVRRFYTTSLQRTFSRVHARLNTQRKIIATMYGMWKRGEPYNPKRFLDSPQSGAV

SEQ ID NO: 494124 - protein, 340 aa, unidentified
MRQLYTGIDLHSNNSHIGIIDQEDKRVYHKKLPNQKDVILAELEPFRGEMVSITIESTFNWYWIVDCLIDTGYTVHLANPAAMQQYSGLKFLDDKHDAFWLAHMDRLGILPQGYIYPKEIRPIRDLLRKRGHLIKLRTSLINSLQGIIARNCGHSLSGRKMKQTSTNHVEPLLADNEDLALSGEVSKQSIDYLSQQIVKIENICQERMKLNPQYSGLLTIPGVGKILALTIMLETGPIERFKKVGDYSSYCRKVPTSWTSNNKRKRKGNSKNGNKYLSWAFAEAAEFCRRYDDKAKAFFNRKSAKTKSTVAYAALSHKLARAAFYIMKDNVEFDSNKLFT

SEQ ID NO: 494125 - protein, 341 aa, unidentified
MHSHFVGLDVHKQVIAFCIKTADGSIVAEGKVKSTRAELDAWLKTVPEPWLGGMETTMFSHWIYYHLKQRGANVLIGHAARMKAICAGKKKSDKLDARTIADLLRCDMFPSCWVISPELGALRRQMRFRRRVVHEQTRFKNFTAGLLMQRGVEYERRCLHGKRYFADLMKTNAWAGEEMKPLLRFNRQQIETLGKMDKGLIGMLQKHPLRVQRVAALRKIDGVGPITALTWALEIGTPERFGSIGKAQSYAGLTSAFWESAGKQKHGPISKQRNAHLQSALIEAAKLAPMHNETLKAIYQKHRARGADDNVATLEVARKMVAYLLAADRAFHAQMAQTACA

SEQ ID NO: 494126 - protein, 449 aa, unidentified
MSRPQVIDDTEHERVHDRVAAIDVAKDTGMVCTRTPHPSRPGARRASVWTVKARMNAVRALGRHLRKDGIEIVTLESTSDYWRIWFFALEACGLAVQLVHAAQAKNLPGRPKTDKLDAMWLARLTEMGLLRASFVPPRAIRDLRDYTRARTRLVQERTRCWQRLEKLLEGALIKLSSVASKLTTVSAQDMIKAMIAGQRDPHQLAGLARGSMKAKHDDLVEALTGMFDDHHGELAGLLLDQIAFLDGRITQLTARAAELTAAIPAAWGINADGTTGPDAGAGPDAPVLPAAARLAQIPGVSEDLARAVIAETGLDMSRFPTAAHLVSWAGLCPSARQSGPRTRAGKKGQGDTWLRGSLGQAAIGASHTATFLGERYHRIARRRGKAKAQVATARSILVIIWHLLADPAARFTDLGPGYYQARTDTNRKLRNHIRQIQALGFAVTLTRAG

SEQ ID NO: 494127 - protein, 448 aa, unidentified
MVMCLYHRVYDDVKLATVAHRSLRVMNATSYFRRHATVTNDNDTASNSALVAIDIAKAKNDVVIERPGARQRQRMKVLNTRAEHQRLIDHLHALDCPVQIGFEATGNYHRPLAWRLLEAGFELRLISSVALARTREALHNGWDKNDLKDAQVILHMLKIGLTQCYYDPLTHGINDWQELSKTHEIVSKAKTEAMHRLQTHYLPLYFPEIERFRHNSRSEWFFIFLDRFPVPAAIMALSREQFIEAAWPVIGRKVAKARILGDIYETAKTSIGLPVTAESPAVAMYRLVIAHIRQLIQQRDEIERQAHALLAEHPDYQRLRQLPGIGPIIALTVLAEAGDLRRFRHYRQFLKFCGFDLATHQSGQFRGQSKLSKHGNARLRKAFWIAGQTAVRQRENSFRDKYQRYTARDRDDRDLNRKALTAVAAKMARVAHAVVTSETDYRPFYGMR

SEQ ID NO: 494128 - protein, 432 aa, unidentified
MSERKSLELRVSVDVGSRRHSVAIGLPDGQVLEEFEIAHRPEGFQEFFSRIEKHQKAQGCGVAVAMEGYNGYARPLDTLVRQRGYRLYNINNLKLARFKEIFPGAAKKDRIDARKGLELFQLRDHLPLAKGVLQEVTGTPKENEILKRLTRRRRRLVNERVRVVNNLQSDLQAVCPGLLEITTEASNQWFLNFLLSADSLPQLARLRKSTLLKIPAVGRKYASLIEQWQKRAHFSDEIEWVNEMVREDALRCLELDEKIRTLEAKIEEIAKSSKIAKILLSIPGFGPVCTSELAGEIGTVERFSKEGSLALYLGMSTLDNSSGDYHGSKQPKHVNTRAKAAMMIALDRHRKYVPEPQRYYEKKRTEGKKHNQTIRSLGRHLCRIIFRMLRDQRNYEIRPQQRNTKTKVRSRSCVKTKIRRPKISATHLKQKV

SEQ ID NO: 494129 - protein, 415 aa, unidentified
MTLICVGIDVSGGKSTVSAYGWGDTVLIKPHDVPHTASALRELADSLKALDGEVRVVLEHTGRYWLPVAQVLLRAGLFVCAVNPKLVRDFGDNKLRKVKNDKADSRKLARYGLKYWTDLIPYAPAEVTRQKLLEFSRQLNSSNKLLTGLKNNLQAITQVTFPGVRKLLTSPARDDGHIKWVDFICTFFHCDCVCKLGKEKFYDRYRKWCKRNGYKFTAKSAAKLYAASADQVPTLPCDGDIRLLISQTAKQLTSVSGAVETWRTKMNELAKTLPEYDCVMAMFGCGKTTGPQLMAEIGDVSRFCDKVVGGKKVKGKKTLVQFAGVAPGDNQSGNYSPKSVPASKKGSPHLRKTLFQIMSAYLQNSPEHEPVYQFLDRKRAEGKPFYVYMTAGANKFLRAYHAKVKEYLLSKQQSA

SEQ ID NO: 494130 - protein, 317 aa, unidentified
MDGIAFDQIVKRGCGIDIHRDEAVATIGGEGITTETRSFKTFTSSLTELKEWLIENGVTDVAMESTGVYWKPVMNVLEGPELRVWIVNARHIKYVPGHKTDKKDSAWICQLLLAGLLKKSYVPPREQRELRDLTRYRKKLIQNIASEKNRIIRILEDCNVKLDSVLSHLEGVTGTALIDLLISNGEVTMEDIDAVYHRKLNASKELLFEACKGKIGEHHKYMLQMIRKDIEQTQGLIDELTFRIAMVLAPYNSALDALSEIPGIDRKTAEDLVAEIGLDMEQFPTEKNLASWAGICPGNNESAGKKKAQRPTMGTSK

SEQ ID NO: 494131 - protein, 369 aa, unidentified
MEKTITFVGLDVHKASIAVALAEGGHRGEARFVGEIAQTETALRKLVAKLKQPGQELRFCYEAGPCGYGVHRYLTSAGHDCVVVAPSLIPRRAGERVKTDRRDALALAKLHRAGELTAVWVPEPAHEAMRDLVRARAAAVGALRRARQQVSGFLLRHDRIYPGKAWSLAHRRWLTTVRFEHPAHQIVLQESIHAIEDAEKRRDRLTQQIENLIPDWSLAPLVRSLQAMRGVALVVAVTLVAEVGDLTRFRSPRQLMAYLGLVPSEHSSGQTIRRGGITKAGNSHARRAMIEAAWSYRMQARVSRKLLDRLEGLPQAVRDIAWRGQLRMCARFRRLAMARKPTPIVVAAIAREMLGFAWAIAQEVRPTAA

SEQ ID NO: 494132 - protein, 398 aa, unidentified
MTESSDYESVQVFIGVDVGKDTHHAVAINRSGKRLFDKALPNDENKLRSLISDLKQHGQILLVVDQPATIGALPVAVARSEGVLVGHLPGLAMRRIADLHAGEAKTDARDAAIIAEAARTLPHALRTLKLADEQIAELSMLCGFDDDLAAQTTQASNRIRGLLTQIHPALERVLGPRLEHPAVLDLLQRYPSPEKLASLGEKKLAAQLCKLAPRLGKRLAADIAQALAEQTVVVPGTNAAAVVLPRLALQLITLRKQRDEVALEVEQRVLAHPLYPVLTSMPGVGVRTAARLLTEVACRAFASAAHLAAYAGLAPVTRRSGSSIRGEHPSRRGNKALKRALFLSAFAALRDPLSRAYYTRKMSQGKRHNQALIALARRRCDVLFAMMRDGTFYTPQGS

SEQ ID NO: 494133 - protein, 353 aa, unidentified
MEYIAFDAHKHYTLASVARADGQLVREGRIEHERGAIQAFLQRCESGSSVAVETIGNWYWIVDEIEAAGYVPKLVHARKAKLMMGEINKTDRLDARGLNRLQRNGTLPTVWIPPGELRDQRDLPRTRMVLVRQRTQLKNRIHATLAKYALHDLEVSDLFGAQGRALLRQRLDRLPPHTAYATHQLLEQVEELDRRVHGFEHRMQAVFKVTPEIQRLLTVPGVGPILAVVIALEVGAVARFPTAERLAAYAGTTPRVHASGGKTRFGRLRPDVNRYLKWAFIEAANAICLMRGRKPHRHVSRLYERIAQRKGHPKAIGAVARHLAEATYWILSKQEPYREPKPSAVSSTGDKRD

SEQ ID NO: 494134 - protein, 333 aa, unidentified
MSKFKHFLGIDVSKEYFDAVVILDGNKEKPVHSQFVNDYKGIKSLYKWLKEQGSTFENTLVCLEHTGMYGKLIIKYLMVYNFTLWVEMSLKIIKSIGIQRGKNDKVDAERIAFYAMKNVEEAITYNPPRTEIDKIKNLLSLREKLVDTKSCLLRNAKELKSFDLEVAKFSEKLQKNTIKGIDLDLKNIEKQLDKIIKEDEYLCRIYKIVTSVIGIGRVTTLFLICYTNEFTMYSTPRQLACYAGVVPFEHTSGKSIRAKPKVHYLANKKLKKQLHMCALSAIKHDPELKLYFNKKVEEGKSKMLVINNVRNKLVHRVCACIRENKIFEKRQVA

SEQ ID NO: 494135 - protein, 402 aa, unidentified
MFNTFVGIDISLNSFNASILDEKGNIITCLKLNQNLKDFQKLQSALTEVAKRNDIILGLESSSNYHINLLSFLISNNFTVVLINPILISNFHKSISLRKTKTDKIDATTIARFLIKNHDRIHQFIPDDSIKLLARERETIAQEIAKLKTQIKQLVFNLFKELGDAQNVLTKSMLEFLLQIPSARSAREIGIEGIENILNDINRKRGRKIKLTAHQVMEIARNTISINDVNREIILRSRIRRLLYLQEEIEDLTSSLLSKMQFFRPIEMEILTSIKGVGEISAATFLAEIQDIHRFMGSHKKLIAYAGLDPIILQSGKFKGKFRISKRGNPHLRRIIWSMTLGTIFSTQRFKNYYQRKRAQGMSHKKAVIATSNKLLRVIFFLLNSDTLFHDIHPSPLQIIHS

SEQ ID NO: 494136 - protein, 340 aa, unidentified
MTAHVCGIDLGKTVFHLVGLSKEGHVVAKKRFSRKQLTTFTANIPSCLIGMEACSGAHFLARVLRAQGHDVKLMPAEYVRPFVKSNKNDYIDAEAIAEAVQRPTMRFVPIKNEAQLDLQALHRVRDRWMGRRTAVINQIRGFLLEHGIAVSTGPIHLKRQLPSILEDATNILSPRMRELLAEIRLEWMKLEEQIDNVNRELAQFASKEESCRRLLTVPGIGPLTATALVAAIGKGTAFHKARDLAAWLGLVPKQHSTGGTPRLMGMSKRGSPYLRRMFIHGARAVVNSVNRADHRFGAWLDHLQTRAPYNVAVVAMANKMARIAWAVLMREQDYCAATSA

SEQ ID NO: 494137 - protein, 366 aa, unidentified
MSSVASPAGLVHVGMDTSKKTIMIATLWPGEQVPATERIANEEAAIRRFFGRLGDSSVLRSCYEAGPGGYDLYWLLESMGVACDVVAPSLIPKGGSDKVKTDRRDACRQARLLRAGELTAVRVPTRAEEAVRDLVRVRAALLADRKRAQQRLTAALMRHGCIWTQGSYWTAAHRAWIAAQRFGEPALAAAIAHYRGALDTRETELAAIEAALAPWALREPLAGPVARLGCYRGIAELNGLTLVSEIIDWRRFACARAFMSYTGLVPAEYSSGERTRRGHITKAGSEPVRTALTEAAWAYQHAPAIGATLRRRQAGADPGTLARSWKAQRRLYARYRALTGRGKAPAEAATAVARELAGFVWAEMTA

SEQ ID NO: 494138 - protein, 336 aa, unidentified
MEGTPVPSSAAPLPLAAARPVAFIGIDLAKESFQAAADSDESAARFNLPFTYDAKGIAALLERLKTIEVALIVMEATGGLERKLAAELSEAGYAVAVINPRQARDFAKAIGTLAKTDKVDAGVLAQLARILKPQARPLPSAEQIRLKDLSARRRQLIHMRTAELNRQQQATLKEVSKSIKHHLTMLDKEIAKIEKQIADLIDSNSDWKRKADLMDSVKGIAPDTAHAILAELPEIGTLSKREVGSLAGLAPHVFESGKFKGQSRIWGGRGSVRSAIYMATMAATRFNPAIKAFYDRLVKNGKKKIVALTACMRKLLTILNAIVRDGVVWNSQMGIV

SEQ ID NO: 494139 - protein, 488 aa, unidentified
MATRRKQKPAAVSGPVEIPDAEHELVIERVAAVDVAKATGKVCVRLPGKTRRFSRVWDVPARTGAIADLGDQLLALGIEKVTVESTSDYWRIWYYLLEAAGLSVQLVNARDVKNVPGRPKTDKLDAVWLAKLTEKGLLRPSFVPPPEIRRLRDYTRMREDLTRDRTRYWQRLEKLLEDALIKISSVASTMITLSTRDMVEALIAGQRDPYRLAELARGKMKAKRAELITALDGRFDAHHGELARMLLDQIDALDTQIDTLTRRIEELVNELPGHTEAVDHPDSEQGPGAGAGTDSAADPRTATAATKSSRVDPTVEADCAIEADRALSTVDRLDEIPGISVANAHDILAEIGTDMSRFPTPEHLVSWAKLCPRTIQSGPVTRAGKTGKGNPYLKGALGEAAAAAAKTDTFLGHRYRRIAKRRGKLKALVAVARSILVVIWHLLANPAARFRDLGADYHTNRIAIERRLRNHIAQLAAMGYHVTLEPAA

SEQ ID NO: 494140 - protein, 338 aa, unidentified
MVYGAIDLHMRYSQIRIVDAAGVVVREQRVVTCRERLVTVFDGWGPMRILLETGTESEWVAQALEAAGHTVIVADPNYAPMYGDLQRRVKTDRRDVAALAEANRRGWYRAAHRASAEQRATRQLLRARRQVVQMRSGSIALIRSLLKQDGYRLPRCGAERVPVRLQRLPLPAALAATLAPLARMVTTTTTEIAALDRHLQTRAAQDPAVQQLQTVPGVGLVVALTFRAQIDDVRRFRHAGQVSAAIGLVPREDSSAERRQRGHITKVGSRELRSLLVQAAWACWRSKQSATLRAWAEQLAARRGRRIAVVALARRLSRLLYALWRDGTTFEAKKLTAA

SEQ ID NO: 494141 - protein, 391 aa, unidentified
MDRAWAGIDAGKEMHWVHVLDASGEKLLSRKVKNDEADLSALIDEVLPLAEELVWAIDQPGGGATLLLGLLWEREQRVLYVPGLTVDRSRDTYPGESKTDARDAHVIADQARMRPGLQELTAGQEELAELEILLSRRRDLVTDQSRSVTRLRETLLAAFPALERALDLNRRGALTFVSHYQRPAQIRRAGRKRLAAYLRNRGVQGAEDIADKALKAARAQSVTLPAEDVTSRIVAELAEEVLSLKDRIESIDEELEQRFFARPEARILASLPGMGPILGAEFLVAVGDLSAFSGSDQLAAYAGLVPAAHDSGKRKGNNHRMRGGNKLLKRVFYQSSFASLRSAPASRAFYDRKRREGKKHTQALIALARRRVNVLWAMLRDGTTFEDRSAA

SEQ ID NO: 494142 - protein, 373 aa, unidentified
MPRYSTAFGMDVHLRSTTVCALDAETGETVTRRFRGNPWGEVAEWMSGFPGPSLAAYESGYLGFAPQRELSGLGVDCVVAAVSRVPRSAADFSSKNDRNDAARMAKAILSHDISPVWVPSPEIEGLRDLAGAHDAATARLAAAKQRLLAFLARRGYAYGGTTPAGNPRRYWTYDFLRWLDKVRPADDGGIRALAALRSEVEAAAETRDDLLAEYRAAVAAGPLSAEVEALQSIKGCGFALAAAFASEVGDFSRFRSGRQVTAYFGLAPKQRSSADSVRLGGISGAGNALVRRLAVEGSWSYVQASHQPKLMPKGSGVPLEVRMHGRKGSERLLRRREEMLARGMPQAKANAATAAELVRWLWALGAMCREATE

SEQ ID NO: 494143 - protein, 322 aa, unidentified
MTSSKLATRLIGIDVSKDKLDISDSEEKIRKEVKNSINNIVKQVVEKITEPGKTFVVCEATGGYERALVKALQDAGIAVCVANPWQVRQFAKGIGNLEKTDAIDAQLLRQFAQVVDLQPTPRKSPRHEAHDALVRRREQLMLLINQEQNRLAQTSDREVCQMIEKALRMLRRQLEDVDQRIEAFLKEEARTNQAVDVIQSVPGVGVVTTSTLIADLPELGTLNRAEIAKLVGVAPIAEQSGTREGKRSIFGGRSHVRRVLSMAALTATRFNPVIKKFYQRLLARGKQKKVAIVACMRKLLTILNEMVRHQAIWRQKEVVTGA

SEQ ID NO: 494144 - protein, 311 aa, unidentified
MDTQVVSIIAVDVSKDTLEVLIGPNSQAVSMSNCSEALRRLLKKIKALPNLHFICEATGGYERTLVNFLHENRITVSIVSPSRVRDFARSEGVKAKTDPIDAKMLLRFAQEKELRPTTPPTPQRQEILARMDRRSHLAEQLKREKTRLKNSPSAIHSSIRQMCDFIKLQLKEIEAQIKELIRSDQNLTFAYKVLTAVTGIGQVSAWTIIAYMPELGQLTRNEVVALAGLAPYNQDSGKTQKPRRIFGGRAKVRKCLYLAALTASTHNSVIKTYVEGLKKRGKHHKSALTAAMRKLIIHCHYLLKKHEIVIA

SEQ ID NO: 494145 - protein, 365 aa, unidentified
MARPFSPASDMMLVSEEERNGPMSIVILGVDLGKNSCSIVGVDAAGAVVVRRSMRRQTLIDYVLKLPACVVAMEACCGAHHLGRLFAARGHEIRLMSPEYVRPYVKAQKNDDRDAEGIAEAASRPTMRFVELKTEEQLDIQTLHRVRSRLVAERTNLINQLRAILLERGVIFPAGRRKLELCLDGMLADDDSALSRRVRELVSDLRAEWRELDTKIEALNGEFVELARTDPAARRLTSIPGVGVLNATALIAAVGNASAFAKARDLGAWLGLVPRQHTTGGKPRLMGISKRGNTYLRTLLIHGARAALPSLSESDTSLGRWLKAMIERGVHRNAVVVALANKLARIAWATLRRETTFERGYAAAV

SEQ ID NO: 494146 - protein, 457 aa, unidentified
MAQRTKKRKKRSSRKMSTLEIQNPNAAGIDIGSREHWVAVRPDQNEQPVRCFQSFTYDLNELADWLINCNVTTVAMESTGVYWIPLFQILDARGFEVLLVNAHKVKNVSGRKDDESDCEWIRKLHSYGLLQGSFQPEENIRALRIYLRDRDTLVSCSASHVQRMQKSLTQMNLQLHHVISDITGVTGMNIIRAIVDGERDPQVLAVYRDKRIKADEKTIVKALEGDYLNEHLSSLKRYLQLYDFYQSQIEECDRQIEALLKTFPSLDNFGPGIKDEDKPNKSRKKKAANAPNFDVEKYTRQITGVDLFAVDGFGANNLLGIIAETGIDMTRWKTEKYFTSWLRLSPNNKISGGKILSHHTQKTNNRANKLFRLAAQSLANSKCALGAFYRRLRYRIGPAKAIVATARKLAIIFYRMVRFKIEYHDIGAEQYEKKHRANQIKYLEKKAQALGLKLVQA

SEQ ID NO: 494147 - protein, 400 aa, unidentified
MNAVGIDVSKGKSTVAVLRPFGEVVASPFDVIHNDNDLKRLVKLIRSLPGESKVVMEYTGTYFEPIAQFLHNNGIFVSVVNALLVHDYGGNSLRKVKTDKKDALKLASYALDRWTELDEYVPADEQRKILKLLNRQYNQSIKIQTMMKNNLISLTDSVFPGINRLFTSLERQSDGHEKWVDFLHAFPHKDCVAKLYLSAFKAKYKSWCSRNKYRYSESKAEKIHSYAKSVIAVLPLNESVKLIVTQVVSQLNTILETAFSIRTEMNRIASSLPEYDTIMSMFGVGKVYGPQLIAEIGDTRRFRNRRAITAFAGLDAPPYQSGQLDVSSRHISKRGSAALRKVLFQITEIFILSKPENEPVYQFIIKKRSEGKHYYSYRIAAANKFLRIYYAKVNQILNAT

SEQ ID NO: 494148 - protein, 370 aa, unidentified
MAQGSTLFIGLDVHKETIAVAYVAEEREAEVLSLGTIGTRQCDIDKVIRKLQAKGKPLHFVYEAGPCGYWLYRYLTKKNLKCWVVAPSQIPKKAGDRVKTDRRDAMQLARLLRSGDLTPIYVPVVEDEAIRDLVRAREDVLRDSKAAKVRLKAFLLRQDIRYEGRANWGPAHLRWLAKVVCPTPAQQIVFQEYVRAVSEHTERLQRLEAELQTQVQTWRWAPVVEAIQALRGVQVTAAVTLIAELGDLTRFENPKQLLSYLGLIPSEHTTGERRRQGSLTKTGNSPARRALIEGAWAYRYPAKVSRHLQLRLEKVPKVIQDISWKAQVRLCKRYRRLVARGKQVNQVVVAIAREMAAFVWAIAREVKVTH

SEQ ID NO: 494149 - protein, 391 aa, unidentified
MVCVGIDVAKDKHDCCILDSDGTIRADCITIPNNMDGFKQLLQTIRDCTKKSDKIKVGLEATGHYSYNILGFLLDNDLAVYVMNPLHTNLYRKSLSLRKTKTDRVDARTIATMLLSDVDLKSYTDTAYHNEELKSLTRYRFDKVRERAKLKQSVSRLVTILFPELEKIVPSLHIASVYALLSEYPGAKQISEIHLTKLTNLLATASKGRYGKDKAIQIRDAARTSIGSVMPAKFLELKHTIKLIRELTSEIDEIEVSIQKIMDELNPPILSIPGVGIQSAAMILAEIGDFSNFESPDKILAYAGCSPSTYQSGKLTNCYAHMEKRGSRYLRYALYNATKYVCHWNPVFAEYLAKKRAEGKHYNVALSHATKKLVRLIYALQKSGKAYLVAA

SEQ ID NO: 494150 - protein, 309 aa, unidentified
MQAVTTIGLDIAKSVFQIHGVDAAGNVIVRRQLKRRYVLPFFQKLPACLIGMEACASSHHWSRELTALGHTVRLMPAAYVKPYVKRQKNDAADAEAICEAVSRANMQFVPTKTVEQQSCLLLHRTRHLFIRQQTAVINAIRAHLAEFGIVAPVGRNGVEQLLDVVADTSEKRLSEIARACVLALGAQLRTLKVQILNFDRQIMAWHRSNEASRRLDEIPGVGPALATALVASVADPKAFRSGRNFSAWIGLVPKQHSSGGKDKLGSISKQGRSLSARPVHGRRAGRHPLCQRSCPAEPRTRTSAISRNI

SEQ ID NO: 494151 - protein, 341 aa, unidentified
MGEVTTIGLDLAKTVFQAHGADASGAVVFRKKLRRDQLLAFFSGQPQCVVAMEACAGAHYWAREIGALGHETRLIPPAYVKPFVKRQKNDMADAEAICEAAQRPTMRFVAGKSAEAQAAGVIFRTRDLLVRQRTQLINALRGHLAEFGYVVRQGVGHVDKLIELVADPTTDLPDEARSVLALAAESLQGIQAQVSVLDRQIAARAKANVTAKRLMTIPGVGPIAATALVALAPAASTFRRGRDFAAWLGLTPRQHSSGGKERLGRTSKMGERSLRRLLIIGASSAIIAATRDPSRASPWLTRMLARKPRMLVTVALANKIARTVWALMAHGGTYRAPAVPA

SEQ ID NO: 494152 - protein, 343 aa, unidentified
MHTVATIGLDIAKSIFQVHGIDAGGNVVIRRQLRRRYVVALFQKLPACLVGIEACATSHHWSRELQALGHTVRLMPPAYVKPYVKRQKNDAADAEAICEAVTRTNMRFVETKTPEQQSCLMLHRIRHLFIRQQTAVINSIRAHLAEFGIVARVGRNGVEGLLDIVADPSDRRVPELARACLTALGAQLRMLKAQILEFDRRIMAWHRSNETSKRLDEIPGVGPALATALVAGVANPTAFRSARHFSAWVGLVPKQYSSGGKDKLGGISKQGDRYLRSLFTAGALAVIRYAKIHGSKHRPWLTALLARRPTKVAAVALANKIARMAWAIMAKGERYKEPVALAA

SEQ ID NO: 494153 - protein, 335 aa, unidentified
MKSFKTVVGIDVAKDTLAISTFDGKTHQIKELGYTKRIIKKELITAFKKVKESVVFVMESTGIYHTRLAYWLVDEGLHVSVINPLIIKRYSQMHLMRIKTDSADAKLIAEYGYEYQHKLSFFRTKDESQIAVDNLIKAIDDLLLQRTMTNNQYHALKKQANYSKEALDSYKRHLKFIKDEIKRLEKILQTLLENKFNQEYELLRSIPGVGLKVSAMIIAVFNGFENFGSAKQACSFAGIAPSPYESGTSVRGRGSISKRGNTFARKMLYMGALVATIHNPLIRQQYQRLVESGKSKMVAMVAAANKLLRQAFGVLKSGKPFDLNYTREYRVYINL

SEQ ID NO: 494154 - protein, 400 aa, unidentified
MMTPDDIDVWVGLDVGKSAHHAHALDHDGNTLYDKPLKQDEKAIRTMLGKLSKHGRVLLVVDQPNTIGSLPLTVARNMGIAVAYLPGTAMRRTAQLLPGDAKTDRRDAHVIAWAALKLPETLRDAGPDDEPLAALKLLAGHDEDLAHESTRHVNRLRSLLLQTHPAFERALKGERITRDATLALLERYGGPMGVKRAGIEDVKDWAKSNGLRAGRIIDDMFKAIGEQTVTVPGTLMAETIIPSIAHDIKTIRDRRREVGRQVEKLLEDHPLLTVPASMPGIGVRTASNILLGIGGDIANFKSSAHLAAYAGISPVTGQSGTSIKGERPSRRGNKRLKNALWQTAFVASTKHPPSVAYYKRKREQGKHHNAAIICLARRRCDVIYSMLKNGTLYQEPALVA

SEQ ID NO: 494155 - protein, 402 aa, unidentified
MNSVGIDISKGRSTVAVMRPFGEVVISPFEVRHTDSELSELARQLKSLDGETRVVMEATGNYHAPVAKLLHDAGLYVSVINAKLVHGYGNNDLRRVKTDKKDAVKLANYGLDRWLTLPRYVPEEDTRLLLKNCYRQYRQYSKVQTILKNNLISLLDTVFPNANRLFSSPIRVDGSEKWVDFVAEFWHCRCVSEKSQKAFTNKYQRWCRKHGYNFSEAKAHTIHAEACGHIDVIPKSETTKLLVEQAVAQLRATSAALAALKHEMQALASMLPEYPVVMDMFGVGPTLGPQLIAEIGDVRRFYSKKALVAYAGLDAPPNDSGDVTGKHKSMSKIGASSLRRTLFLVMSVYLQTAPLDEPVYQFMDRKRAEGKPYRVYMMASANKFLRIYYATVKAYLELLERT

SEQ ID NO: 494156 - protein, 438 aa, unidentified
MSNNVIFNLDELFISVGIDVGADFSWMSIALPNQQLVGKPYKILHNSMSSLTTAVSKIKEAEELYSLESRIFLESTGIYHYPLFCYLRDKGFNCSVINPIITKNSTNINIRKVHNDRFDSKKAALVGLKPDLKVSLMPSDLALNCRNLCREYYDLMDNRSAYVNKLQGELRMAFPQYLRIFSKVTINTSLTLLETYTSPEAFINAGKQEIIDLIKSTARFGLTYAENKYNAIIQAANDANEFGYIIDSNIKRIRLYISFIRKYDEEIASIMDALHELVDSNENTDFVKQIHLIETFKGAGFLSAVSLMGEIGDFSAFSKPKQLFAYFGLDPAVKQSGKFEGTKVQMSKRGSAIARRVIHVLTLQSISTSRNGDAKNPVLRDYYLKKCESKPKLVAMGAVTHKVCNMIFAILRDSKPFEIITPQEHIKQYNAAKCDEAA

SEQ ID NO: 494157 - protein, 451 aa, unidentified
MDVVQLDVEDDQEVLARVAAIDVAKASGMVCTRVPHETTPGRRVSKVWQVSATTNSIMDLADQLAGAGIERVVLESTSDYWRPFFYLLEARGVRVWLVNARDVKNVPGRPKTDKLDAIWLAKLNERGMLRPSFVPPAPIRRLRDYTRLRVDLTTERSRHVQRVEKLLEDALIKISSVATDIMGVSGRAMLEALIAGQRDPHALADLAKGRMRVKHDALVQALTGQFDQHHGELAQILLEQVDALSRQIERLTARIDQLIAAIPTAQGVDADGTTGPDAGTGPDAAVLSAITRLDQVPGIGARAAQIIIAEIGLDMDQFPTAGHLASWAKLCPRANQSGAKNRSGSTGKGNRYLKGVLGEVAAAAAKTNTFLGHRYRRLVKRCGKLKALVAVARSILIIIWHLLSDPPSRFHKRNHVRQLGTRLQSHPRARRLTPPHSPIHFPVRGRLDCDG

SEQ ID NO: 494158 - protein, 408 aa, unidentified
MQRRENLLYVGLDLHKQTHTAVLVNCWNEKLAAIVIENKPSAFKKLAEKVNKKANQLGLYPIYGLENACGYGRSLAVWLVEKGCIVKDVNASLAYNQRKSAPMMSKNDEYDAYAVATVLINQLHKLPDANPTDHYWTLAQLVNRRDIIVKDGIRLKNGIHEQLMSAYPNYHKFFSEIDGKCAMYFWKTYPSPSHLENKTAEELTEELKEISKSFRKDKAELILDCVRSDGNTYRDYQESRDFITRGLVKDLEHQKATIAEMDKEIERMLLCFDYKLTTMPGIGTAVASKLIAEIGDIRRFPNADKLARYAGVAPVKFSSAEKGKEQSSRQGNRQLHGLFYMLAITMVAVPKSGRPNHPVFHAYYMRKISEGKTKSQALFCIMRRLVNIVFGMMKNRTEYREPVTQEEH

SEQ ID NO: 494159 - protein, 378 aa, unidentified
MSKVRFIGLDVHADTIAVAVAEPNGEVRSLGVISNRLESVRKTIKKLGPVHQLRVCYEAGPTGYVLYWQLTQLGVTCEVVAPTLIPSKPGDRVKTDRRDAEKLARCYRAGDLTPVWVPDAAHEALRDLVRAREDAKQDQQRARQRLGKFLLRHGCKPPQTIKKNWTQKYMEWLQAHVHFDQAALEATLQDYVYEVDRAAERIQRLDKAIDEAIRVAPPEIRTVVESLQALRGIAQLAAVTIVSELGSLSRFNSPRQLMGYSGLVSSEYSSGNRVVRGKITKTGNAHLRRIVVESSWCYQHRPNICGYLLKRQKALQLDPEIKAIAWKAQCRLHKRYKHLAARGKNKPQIVTAIGRELLGFIWAVAVKTEAGLKTQTAK

SEQ ID NO: 494160 - protein, 410 aa, unidentified
MEVIYPRCAGLDVHKKTVVACVRIQHGPAVEQEVRTFETTTSGLLALSAWLSEKGCTLAAMEATGVYWKPVWHILANGEIELMLANAAHVKNVPGRKTDVNDATWLSELAAHGLIRGSFVPDRPTQELRSLLRTRKQLVRERSSHTQRLQKTLEDGNIKLDSVISDILGVSGRAMIEAMIAGQTDPAVLASLADRRIRATREELREALRGRLTAHHRFLLQLHLDQIDALDRAIARIDEQVNTDLDSFREAIEIVRTIPGLDDLSARTVLSEIGVDMSRYPSDNRLLSWACMCPRNDESAGKRRSTRMRKGSPWLKATLFQCAWAAARTKGSYFQAQFHRIKARRGVKKAIGAVAASLLRTIYHMLKDGTLYQDLGPDHFDRRHKTASTRRLVRRLQNLGFAVQLTPAAA

SEQ ID NO: 494161 - protein, 394 aa, unidentified
MFYLGIDIGKRTHVASVMNDEGKVLLKGFSFVNSLDGTHALLERLTSFSDSTEDFLVGMEATGHYWLALFSFLDEQQFLVHVINPIQTDGWRKGTEIRKRKNDSIDSVLIADLIRYGSFNETALADETMFSLRQLTRYRSYLVGTAGDFKRKVIAILDQIFPEYEKVFSKVGIFGKASKAVLSEFSSPDEFNQVSAETLAETLRVASRSRVGQSKAEALKTAAAHSFGVRFAQDAFVFQLRSMIDQLSFLEEQIKRTEEEIAQLMASLHSVIETVPGIGTVLGATILGEIGDIQKFSTPKKLVAYAGIDASVSKSGEYEATHNVMSKRGSPYLRKALFQAALIASRCDPVFKAFYDKKRAEGKHHLTAIGAVSRKLCYIIHAILTKNEPYEIRQ

SEQ ID NO: 494162 - protein, 455 aa, unidentified
MPKRTTGDRPELNPVNVGAAAIDIGSKMHMAAVDPTCADTPVRAFGTFTQDLHDLADWFKTCGVTSVAMESTGVYWIPAYEILEQRGFEVILVNARYAKNVPGRKTDVSDAAWLRQLHSYGLLRGSFRPDAEIATLRAYLRQRERLVEYAAAHIQHMQKALMEMNLQLHHVVSDITGATGMRIIRAIVAGERNPDVLATYRDVRCHSSVETIRAALVGNDRDEHVFALTQSLELCDTYQAKMLDCDRKLESSIATLTDRGAKPVSKLSRPRVKTKQVNTPSFDVRAALYGVLGVDVTEIHGLGPSLALKLIGECGTDLRAWPTAKHFTSWLCLAPGNKISGGKVLSSRTRRSSSRAAALLRLAATTIGRSDTALGAFYRRLSSRAGKAKAVTATARKIAVLFYNTLRHGMTYRDPGADHYEEQYRSRVLANLKRRAKSLGFVLQEVPCGAEVTVS

SEQ ID NO: 494163 - protein, 406 aa, unidentified
MEVVHERCCGLDVHKKTVVACVITPKDRQVRTFGTMTQDLLELGEWLVAEGVTHVAMESTGVYWKPVFNLLEGSELELLVVNARHIKAVPGRKTDVKDAEWIADLLRHGLLQASFVPNRDQRELRELVRYRRTLIEQRAHEVQRVQKVLEGANVKLSDVATDIMGVSGRAMLRALIEGEQSPQALAEMAQGRLKRKRGSLEKALRSSVGAHQRYMLGHLLEHIEFMEREIKELDQAIGERMRPFEAAIARIDEIWGIGRRTAEEILAEVGLDMSRWPTHKHFASWAKVSPGNNESAGKRHSGRTGKGNRWLHSTLVEAANNVSRNRASYYGAQYHRIARRRGRKRALVAVAHSLLTAVYHMLRDGTVHQDLGAEYFDSLDRERATHRAVQRLRRLGYEVTLRPVAA

SEQ ID NO: 494164 - protein, 331 aa, unidentified
MKKKDVIGIDVSKLTIDAYVKLAQVHAGFSNDNKGFRQLVKWIKKHTDCQIEELLICFETTGLYSLQLASFLSQINIDFVMENPIQIKRSMGLVRGKDDHVDSQRIAEYAYMRKENLKLTELPSEELIKMQNLLAMRERMIRQKAGYQASLGEYKRVLVQQQQKDLFSLLNNMISALKKQILKADKTLIEIIQSNKKLMNIYTLLTSIKGIGVILAANIMVTTICFTKFNDSRKYACYCGTAPFKYSSGTSIKGRTKVSQMANKKMKALFNLAALSAIRHDPELKLYFDKRKANGANGMSTINIIRNKIIHRVFAVIKRGTPYIVMAKYAA

SEQ ID NO: 494165 - protein, 316 aa, unidentified
MNEMIVEKFVGIDVSKSTLDVCIEPAAQALHVAYDEAGIAQIIGCLKEVSPTLIVIEATGGLEVRIATELASLGLPVAVINPRQARDFAKATGQLAKTDQVDAAVLAAFAKAIRPQARPLKDADTRALDDMVSRRRQLIDMRVQETLRLGTAASKPLQKSLNRHIAWLDKRIAEVDTDLTKRLRESDVWRTKDDLLRGIPGVGAVTTLTMLAKCPELGTLNRREIAALTGVAPLANDSGKHRGKRFVWGGRADVRAVLYMATVSAIRCNDAIKAFAERLKKAGKPPKVVIVACMRKLLTIMNAMLKNNAPWNPKNA

SEQ ID NO: 494166 - protein, 341 aa, unidentified
MPEVATVGLDLAKMVFQVHGADASGRVMIRKTLRRSKVLEFFGQQASCLVAMEACAGAHYWAREIGRLGHTVRLIPPSYVKPFAKRQKNDAADAEAICEAAQRPTMRFVAIKSEAAQASAMIFRARDLLVRQRTQNINAVRGHLAECGLIAPKGPANLPKLLALMEAPDRELPEDVRAVLDILTSMVAALDERIERLDRDISQRARTEDIPSRLMTIPGVGPISATALAALAPPPETFRTGRDFAAWLGLTPRQRSTGGKQKLGGVSKMGERTLRRLLIIGASALVRQTTRREPVSGSWLAGMLARKPRMLVIVALANKMARIVWALLAKNETYRVPAAAA

SEQ ID NO: 494167 - protein, 419 aa, unidentified
MSNHVAKHLASIQPGTLFAGVDLSLDDLVVVVLDPTAKRLDRFRSDNNAVGYADFRHRAQRVVEKHHAPGLLIGMEPTNYYWKQFGYDLEQHHLPFRLVNALTVKRHREGDQLDRSKDDWRDAFTIADLLRQGKFTETRLPHGVYAELQTGYVAYQRLRRDRGRQTTLLVNTVRQLFPEFDQVFKDVSGATAAAIIESGLLPRVISTGSEAVFLASVRSHFTGHRLSVRQVRQRYALAKEAYGCPEATTALRLMAQQHVEAIRLLDLQAKQLLDDLVRLFHTLPEAPYLLSIQGLTAPSALGLVAYIGDLMQYPHGGALIKLAGTQPTPNTSGRKTYSPTPFSHQGRSGLRTVLYFITLRLIRQNDAVVYHYRRLTTRAEHPLPKMQAIGACMNKLLWYCWHVVKRREMYEPHRWQTLS

SEQ ID NO: 494168 - protein, 346 aa, unidentified
MTIVEDTRAITGGVDTHADTHVAAALDPLGGLPGVREFPASAAGYADLLDWLDGFGTVALAGVEGTGSYGAGLARHLAAAGIKVVEVDRADRQDRHRPGKSDPLDAVSAARAAQSGRAAGAPKGRDGVVEAIRALMVARRSARAERTQAINQARSLILTGPDELRARFARHTPARLVAGLAAMRPRPGDAPGYATRVALRELGRRARFLDAQIKHLDELISPLVTARAPGLLGLHGVGADTAALLLIAAGDHPGRLRSEAARAHLCGAAPIPASSGKVTRWRLNRGGNREANHALWRIVICRMSSHPATRAYVARRSKEGLSKKEIIRCLKRYVAREVYPYLRPAR

SEQ ID NO: 494169 - protein, 330 aa, unidentified
MKFKYVIGMDMAKESFALAVHNHPYEKEYGNTAKSTRQMLKTISKVLKTPNDQCLFCLEHTGLYSLEMIKQLSVQQIPYVVISGLELKKSQGISRGKNDPMDARRIGEYAFLRQDKLKLHHLPSPALIKLKELLSLRALHVRNRAGYKARYNEQKKVLKQCENPFLFQSQKKLISVLDKQIDKLEDLIGKLIEENEKIKYYYDLICTVKGVGLVVASQIIVKTNCFTSFRDWRKFGCYSGTVPFPNESGKTKGPRRIHHTADKPMKVLLTLAAQTAILNDPEIKHYYNRRLKEGKTKKCVRNAVRNKLLARIFSVAKRGTPYVVLHKFAA

SEQ ID NO: 494170 - protein, 435 aa, unidentified
MSNSTKYDLFISVGIDVGADFSFMSIALPNQTFVGKPFKIIHSDFNSLSMAVSKIKEAEEMHSLESRIFLESTGIYHYPLFCYLSDKGFLVSIINPIISKNSTNINIRKVHNDKFDSKKLALIGLKPDLKVSIMPSELALDLRNLSREYYDLVDNRSAYINKLQGELRIAFPQYLKIFSKVTVNTSLTLLEKFTSPDGFLEASKDEIITSIRSTARFGITYAEKKYNAIIQAAKDAKTFSYSVNSNFKRILLYIRFIRQYNDEIDAILSEMRELVESNEDTDFVKQIRLIESIKGAGFLSAVTLMCEIGDFSAFKSPKQLLAYFGLDPAVNQSGNFKGTDVNMSKRGSPIARRAIHTIALVSIALNRNGTANNPVLREYYLKKCQSKPKMVALGAIMHKVCNIVFAILRDEKEFKIITPEEHQANYLKAKYGIAA

SEQ ID NO: 494171 - protein, 356 aa, unidentified
MTDGLVVGVDTHKDVHVAAVLDRLGRRLAVRQFPATDAGNTRLAGWLAGLGQVTDAGVEGTGSYGYRLARLLADRGVQVWEVNCPDRSRRRRKGKSDPVDAENAARAVLAGEATAVPKDRRGLAGELRLLVITRRSAVKARTQASNQIKALLVEADDELRARLHGLRKARFGRACAALEPADGLRRVLAALGRRWLALDAEARELEAQIAALISAHAPALLARHGVGAVTAAQLLVTAGGNADRLRGDAAPAALCGAGPVEASSGKTSRHRLNRGGDRAASRIQCSVYPDSAPVLAVDDAHVRMSITVPDADRVTADGVARGRELAAKVARYVAELERRAAATSDTAADPGAGQAA

SEQ ID NO: 494172 - protein, 429 aa, unidentified
MNIKPIAGIDVGKFFSEMVIISPSNELFARMRIHHDSNADMRRAIELLKKAEKDFASRPFIVIESTGHYHKILFHFLQKSGFEVSTINPIQTNCIKNFGIRKVKNDKVDARKIALLYRFHELKPTSISNEDIDCLRSLCRQYYKLSDELTAYKNRFISIVDQLMLNFKEVFPNVYSKTAIAVLEECPTPTAIIEADRDKLISIIQNNSRKSLEWATKKYELLVSKAREFEPLSINNAANVTMLGIHIAMIKTLQENLDKVLKAIHQLIADDLSKDLPVMALTIQLLQSIPGVGFLSAATIVAEIGDFNAFSKPKKLVAYFGIDPSVRQSGEFTGTHNKMSKRGSRLLRRVLYTIALANIRTKRNNEPCNPVLMEFYKKKSQNKPKKVAIGAVMHKLVFIIFAVLRDRKPFELRSPEQHAKILAKNRTVA

SEQ ID NO: 494173 - protein, 433 aa, unidentified
MGLIVPTTIQPEREDQPLPYEWFVGIDWGSQQHQVCVLDRDRHVVGERVVDHDGSSLAQLATWLWALSAGQPQRVAVAIEVPRGAIVEGLIERGFHVFAINPKQLARFRDRHTMSGAKDDRRDAFVLADSVRTDQPSFRRLHLDEPQLLLLRELSRAEETLLEEFRRSANRLRDQLHRFYPQMLHLCSGADESWLWDLIDLAPTPAHAALLSKEQRQRVLKAHRLRRVKATEVLTCLQASALPVAPGAAEAAQVHCAFLLPCLRVLAEQLQACSQRVSALLHTLAQEPGEGEGPSDVAIVQSLPGVGRKITAWLFAEAAQALAERDLQVVRTHGGVAPVTRQSGKRRQVVMRRGCNPRLRHALYHMARVAMQRDAHFSQVYTALRAKGQRHGQALRNIGDRLLRILMAMLRHRTCYDASRIRCEPVVQMGQKM

SEQ ID NO: 494174 - protein, 326 aa, unidentified
MNHYAGIDVSLKDSSVCVADANGKIVRESTVASEPEALITWFSELGFAVTRIGLEAGPLSQWLYAAMQKAGLAVELLETRHVRDAFKAMPVKTDRKDAQGIAQLMRLGWFRPVHCKSIEAQETRAILGARKLVQSKLHDVEMSLRGTLRGFGLKVGKTTPNRFAARIKELVERHPTLQIIATSLLAVHAALLREFKVFEKQIRIMARDDERARLLMSTPGVGVLVALTYVSAIDDPGRFTSSKRAGAHFGLTPKKYQSGETDITGRISKIGDKGVRTALYEAAHIILTKPVKGSALKSWAAARKLAVIMHRMLVDKTPFNPAAAAA

SEQ ID NO: 494175 - protein, 311 aa, unidentified
MGKSIINLSSVTTVGLDLAKHVFQVHGVDALGCVVVAKPIRRNKLLEFFASLPRCLVGLEASGSAHHWARELIKLGHDARMMPPAYVKPYIRRQKNDASDAAAICEAVTRPAMRFVGVRSLENQAALMRHKTREMLVSQRTQLLNALRGHLTEVGVIAAQGPRHGRELAELIEACDEIIPFEVCEALAPLVVQLRNLDEAIARLDRTIAKLAQKDETARRLMSIPGFGPITASAMAATIQDTSSFAGPREFAAFLGLTPKQNSSGGKQKLGRISKMGNRNLRKLLVVGAHAVLFHRKPHTDPLRMWAKRLL

SEQ ID NO: 494176 - protein, 348 aa, unidentified
MQVATLGIDLAKNVFCVHGCDANGKAVLRKQLSRRQLLSFIANLPRCLVAMEACASAHYWAREIEKLGHQVRLIAPRFVRPFVKANKNDASDAEAICEAASRPSMRFVAVKSTAQQDVQAVHRVRQQLIKTRTALVNQARGLLAEYGIVVAQGVGRLRRALPAMLEDRDNGLSGVMRELLAELGERLRFIDDRLCQYELIIQRLFRQDERCQRVAAVEGVGPLSATALVAAVGNAADFRSGRELAAYLGLVPRHRASGGRTVLLGISKRGDRYLRTLLVHGARSALYRIERHRGARAIWAARLKLRRGANVAAVALANKNARLLWALLSRGQSYRPAPFPARVPQAGG

SEQ ID NO: 494177 - protein, 369 aa, unidentified
MWYVGMDVHLDTTAVSIRNARGAITKRVVVPTSRSALRQSLRGIRGRARIICESGPLAMWVRDTLETRLRDVVVCDRRRTRLTTSGAKTDRIDADRLSDLVRRDQVFAVNVPYGDAALLRRYAFHYARMLRERSRIIQRLRSLFFEHGIRVQTHRSTPERVPLTRLTAPGAKYVARAYKRQLENASTLVSEARAELLHLAAQSPAFELLQTVPYVGEVRASELLAIVGDPSRFRSLRAFWSYSGLGVVQKLSSEHKVENGKAVREERTRGIRLRVGQPLLKTVLRDIALHASIGRGHFRAVFEAHVARGKTPAVARVALARKIAAVILAVWRSGVPFSEKKVKRCSRTRGEHRRISSASGVRAPRRSKN

SEQ ID NO: 494178 - protein, 428 aa, unidentified
MNEEDRTRLEEFRQFRREIRKSAEYLIVGIDVAKDKHHAFFGTATGKTLFKRLVFENDLEGFRKLLVQAEAMKVQGGLKKVVFGLEPTGNYHKPLGEHLMRCGQEVVLVSGVAAHENRKTLDGRWDSNDTRDAANVADLVSQGKCLFYEFPVESLQDLRNLLSLKRRLKRQEHGYRVRIRNHLVAKYFPELDRYFEQSEKTSLAVVRWCLDPSVIAGLEYPKFVEMVSSGQRRLSQERRLQAIWKMAVDSVGCEVGPAVAFEVQVMVEGLKQIRERIRDIEEKIYEICSQFPEYEFLLSIPGFGPDVSAKVLGAVGDPFRFQSGKQVLKMAGLDLSAERSGKTSQSAIPVISKKGKADLRYALYQAAFIASTKNQAFIVYYTHKLRGREREPGIKTKMRVKLSAKLLIIAWTLMKKKEPFNPDYLNIE

SEQ ID NO: 494179 - protein, 448 aa, unidentified
MIKKELRSYTWRDLETNGKFAKNDKLSFITDDMLIAGCDIGSETHYIRAIDVRGRELSSGAFEFSNTSEGFANAKAWVLALAAKNDKKQIVLGLEPTGHYWFALAAWMISNGISVVQVNPYAVKQSKEIEDNSQLKDDRKDPKLIANLVKDGNYGMPYLPEKVYADMRRLSMFRDQLTEDRIRNINRLHRELKIYFPEYMDAFGKIDGAFTLEVLKVSAIPSDITALGAEGIKNIWHNEKLRGRGYSRANEIVSYAEKSVGLTDGTDAGREAVKWYAEQILKLDEQLAVVESTLHEKCREIPCAENILEIKGVGENILAGILAEMGDISRFDDVKEIQKLSGMGLVACSSGKHKGQTKISHRGRKRLRYWLFQAAKSAVSHADEFKQLHEYYTTRTNNPLKKMQSLVVIACKILRVIYTILKTGTTYDPQKLLKDIKRPTASQAPMAA

SEQ ID NO: 494180 - protein, 340 aa, unidentified
MNEITLIGIDLGKHVFHLHAQDVKGHEVFRKKLTRSQLLPFFGNLKTVTVVMEACAGSHWLARQLIAMGHAAKLISPQYVRPFVKSNKNDYIDAEAICEAAARPSMRFVEPRSEAQQTLAALHRVREGLVVERTATINRIHGILLEFGISLPSSKAVLHRLSDALAVNELPRRLAELLHRLHEHYRYLDQQVHDIDKDLTLQLREDENAARLLSIPGIGVVTASLLASEIGSVSQYEGGRNFAASIGLVPKQHSTGGRNVLYGISKRGDKHLRHLLVQCARAVIQRVALRTDRLGEWIRSMLTRRHSNVVACAVANKLARIAWAVLTKHAAYDPSLGCRA

SEQ ID NO: 494181 - protein, 366 aa, unidentified
MIVIGTDTHKQSHTAAALDGATGGVIAEQTARAKRRSFEDLLLWARQLGPERVWAIEDCRHVSGALERFLLAHGEQVVRVPPKLTAGARSSARERGKSDSIDAVSIARAAIREGLDTLPVAQLAGPELDVRLLVDHRERLIAQRTQLSNDLRWSMHDMWPEFDVPARALTASGWQERVASRLARVEQSARVRIARDELRRIRELTRTINALEGELATLIATLAPRLLAEPGCGVLTAAKLIGEIAGISRFATEAQFARITGTAPIAASSGRTERHRLDRGGNRQLNCALHRLAVTRGRMDPDTSGYLARKQAEGKSRREALRSLKRHLARRIWLVLQPPGRDTPPTRHRPAVTIHCNTPYGSFSLT

SEQ ID NO: 494182 - protein, 375 aa, unidentified
MREKLRFLGLDVHAETIAVAVAEPDGEVRSLGTIANREDSIRKFIKKLGATEQLRACYEAGPTGFVLYWQLTQLGVECTVVAPTLVPKKSGDRVKTDRRDALKLARSHRSDDLTAVWVPDEGSEALRDLVRAREAAKQDQLRARHRLSKFLLRSGQRPAPGVKAWTQIYMAWIRQIRFAQMAQESTRLDYLHEVEHMGERVVRLEQAIAEAANLASPEVQEVINGLQALRGIAHISAVTIAAELGQISRFKSPRQLMGYSGAVPSEDSSGERTQRGSITRTGNAHLRRIAVEAAWSYRLPPGVGPALRKRQEGVPDEIKEIAWKAQHRLHRRYCRLAATRKDQRKIITALGRELLGFIWAIGIKAETAARQRIAA

SEQ ID NO: 494183 - protein, 426 aa, unidentified
MKNDLLTTLSVGIDVSSKSNSVCALNFRGEIVFRCKAPNNLPGAEYIAREIINHFTEDFESVTIALESTSYYNLHLASFLSTHESLLPLNPLVYNINAKNVSNYKKSYTDQDKTDPDDAFAIADYTRIGRIHTNPWKGTQFLALQRLTRHRLHLVETLTREKNYALTNIYLKFNQLNILPKDDRPFSNIFGATSRAVLSEFLSLEEITFMPLEDLVNYISKKSKNHFVDPKNTAKLLKKAARDSYRLDKTLYEPINTAIASSFSIIKSIEKQLKVTDQAIIKVIKGFNTTEYTSLRSIPGIGKVFAAGILAEIGSIKFFDSNDKLAKYAGITWRQKSSGNYKAEETHMTKTGNKYLRYYLIEAANLVRNYCSEYKDYYWKKYNEVPKHQHKRALALTARKLVRLIFALLSNNRIYSNEYVGSKTSK

SEQ ID NO: 494184 - protein, 345 aa, unidentified
MRNDTIIAVDLAKSIFEIAVSSEPGKVDERHRLSRQRFLDFFVNRPAATVLMEACSSAHYWARKIEGLGHRVMLLPPHQVRPYVLRNKTDRTDTKGMLEAYRNEDIRPVPIKTLEQQTVGSLHRLRSAWMDERTAKINTLRGLLRELGLVIPVGSQNVVPRAWSFIEDADSGIPDALRPLLAELGEEIRELERRTKMVEHQLEAVANSSPAIEGLRTIPGIGLLIATALFAFVGDPHRFPSGRHLASYLGLTPREYSSGSRRQLGRISKRGNAYLRTLLIHGARAILWHAKSMKQPDRLRVWALRLEATAGHNKAAVALANKLARIAWVVWKNERTYESVVVPAA

SEQ ID NO: 494185 - protein, 345 aa, unidentified
MSHFVGLDVSQKMTAICVVDKDGRRVWRGQCPSVPEQISAALRRYAGDDARIGIETGAMTPWIVHELRNLGFEVVCLDARHARAALKMQINKNDQNDAEGLAQIVRTGWYRSVHVKSFDSHRARAILGARTQLVGMTTRLSNHIRGVLKTFGLLPGAMRGLPFDRKVEVLLEGRSDVAPIVRPMLVAWRQLRVQIAAFDKAIRAMVRMSGASRLLMSVPGVGLLSALAYVSTVEDPSRFARSRSVGAHLGLTPRQYQTEEVDRSGRISRCGDTLTRTLMYEAAGVILTRVKKASGLGDWAAAIAKRSGPGKARVALARKLSVILHSIWRSGEPFRWSEPKHAVVA

SEQ ID NO: 494186 - protein, 475 aa, unidentified
MGKIQHIKASKRTEVQKQLRNIPYDKVLVVAIDPAKYSPKALICNYFGEILVNSFFFTINSKGLNLLLTKIKDTVNNISAQKVLIGIETTGHYHEIIVRYLQEFDYNVLLINAYTTSESRAENLNWSKTDDIDLFAIASALIDGKTTKSRLLDGNYEKLKNLCRYRRYEVQKRSAIKSRIRALMDKIWPTFQGKGKIIQGTSKVEKIFSDFWGKAPLFIMKNYPHPSLIKKLNKKDLREISKENNLKFRNSTIEKLLLTAENSYARPFEKLKVEIDLLTMTIADYENANQKINLLQNKIENILVQNPGLLLLSVPEIGIITAAEFSAEMGPVNQYDYAGQVIKTAGTNPLVKESGGKKARYGSISKQGNPSFRHIIYLAGRSLATGKTNPYFRTYANKLRKKNKSPNQIYIAVGNKFIKVAFAMLRDHKLFDPPIWEGKSLTSNIFDKINIQENKKIALNTLENYLGVNPSKLAG

SEQ ID NO: 494187 - protein, 429 aa, unidentified
MNSTQNKKIEQVKETTMIVGIDVGSEKHYFRAFNWRGIELTRKPVAFSNSMEGFNSFYNTIVELRQKSELEEALVGIEPTGHYWFDLGQFMGEKNIKFVMVNPHHVHKTKELDDNSPSKNDRKDPRVIAGLVRDGRYFYSYMPTGVYAELRNASNRRFVLVEEQTRAKNRLQKWIAVYFPEYKGTYTHIDAKGGLLVLKQAPTPEEIVRLGVEGIIKIWKDAKLRGNGHKKAMLILNAAMKSIGLKAGLTEARMEIQDLIEDYELQTKRLERVNDLIKELCQQIRYADKLLEIKGIGITTVAGFIAEVGDITRFDSTKELQKLAGLELVADSSGKHNGKTKISKRGRKRLRYLLFEAAISVVGKNEEFKEIHRYYTTREKNPLKKMQSLIAVACKLIRVFHVILTKGISYDALKMLKDIRHPGEQLKAA

SEQ ID NO: 494188 - protein, 361 aa, unidentified
MFNERTSVGLDVHARSVVAAAIDGDTGEVFRKRLTPGNDDVIGWVRSLPGPSAAVYEAGPTGFGLARAFAGAGIRCEVAAPSKIQRPAGDRVKTDARDALLLARLLRLDDIVSVTVPSVAREAARDLVRAREDVRGDLMRARHRVSKLLLRQGIVYYDGHAWTRTHLVWLRKQHFDVPGLQLAFDAEHEAVLQAEARRDRLDKAIEAMAAGSEYTPVVHRLGCLRGIATLTAFGLAVEVGDWDRLTGSSIGAYLGLVPTESSSGQSRSQGSITKTGNTHARRLLVEAAWHHLKAYRTPGATMRARWELAPTAARARGHAGNQRLHQRWVHFTQRKKDPVVANVAIARELAGWCWSLAVMDD

SEQ ID NO: 494189 - protein, 427 aa, unidentified
MRYLGLDVHKRVVQACIIDEHGQALGALRFDLTRETLTDFAKSHLDDDCAVALEATTNTWAIVDVLSPFCPRVVVSNPMRTKAIASARIKTDKVDAEVLAQLLRCDYLPTVWTPDPRTRDERALASRRSALTRQAISLKNRIHSVLHQRLIPAPADLFTAKGLAWLRQAELPVIARGEIDTLLRLLDALQTEQAALRAEVDRTAFASQDIKLLMTLPGIDATIAQALMAAIGSIDRFRSADKLAAYFGLVPSVYQSAEHCYHGRITKQGNTNVRWLLVQAAQIAGRHRGPLGYQFQRLMQRKNRSVAVVAIAHKLAVLAWHVLTRKAPYRYAVPATIETKLARLRVSQQGKRRTGVAKGQPRSANYGTGVGTRRKKALDATLTAEQLPATTPAPTAEQRLIDRWQLTQFASQLQAESRTRKCRSQAH

SEQ ID NO: 494190 - protein, 340 aa, unidentified
MVDIAVIGIDLAKSVFQVHGIDAEGEVVLRERLSRAKLLPFFAKLPRCLVGMETCASANHWARELIALGHEVRLMPPQYVKPYVKRSKNDASDAEAICEAVTRPTMRFVGVKSPEQQSVLVLHRTRLILTRQRTQIGNAMRAHLAEFGIVAPIGRQGLDRLMAVIGDKSDGRLPQPARACLAMLVDQYRLVLVHLLETDRAIRADSRATELGRRLQEIPGVGPLVASALVATVPDPHVFKSGRGLSAWLGLVPRQHSSGGKERLGGITKAGDTYLRRMLFVGAMAVIRHAERHGTRRPWLTKLLSRRHPRVAAIALANKIGRIAWALMTSGERYREPAVV

SEQ ID NO: 494191 - protein, 368 aa, unidentified
MKTVLFVGLDVDDKMFHATVINSRTGEISYFKTKPIGSKLVEKLLTYHSCPQDYQICYESTYIGFSLCRFLRKENFHCDVIASGLVPEISGHKVKTDRCDSEKLAKLYMKDMLTTLNVPAEEDEAERDLLRSRSLVSKQVIKTKNHIQSLLRRHGIDYRNEEKQLNLWTERYRKWLYGRASKLNDTLKINFNLLLSQLEFLESSLKTYNKEIENLAKTEKYESKVQALVCYRGIETLTAMKVITELGDIRRFDHPRKLMSFLGFDVIEYSSGGKERKFGITKYGNKIVRTALVEATQRCATPPKVSYNLRIRRGKTPPELIVVADKCMQRLYRKSNHLLSREKNRNKVKVACAREMCGFIWESLMRVS

SEQ ID NO: 494192 - protein, 318 aa, unidentified
MSHGYDKFVGIDVSKDGLDVHGLPDSSPSRFDNTAAGRAMLLSLLPPAGACLSVVEATGGYERDLVAEAVTAGHHLAVVNPQQVRDFAKALGLLAKTDRIDASVIARFAETTRPVPKGYDERQEQLRELIVRRRQLLDHRTSEKNRDEMTHSPLVRKSVLKHIETLTKDIQRIEKAILQLVESNDDWRGRFERLKGVPGVGEQTAATLMAELPELGQLNRQQVAALVGVAPFNRDSGQFRGRRVIWGGRQSVRNALYMAALSAKKHNPVIRAFAARLLAKGKPPKLVLTACMRKLLIILNAMLRSGDSWSPRLATLTP

SEQ ID NO: 494193 - protein, 378 aa, unidentified
MGHDEAIIFEKTYGVLTPDLRQMCHDMMERGVTEAAMESTAVYWVPVWNELCESMELKLVNPYFIKQLPGRKSDVKDAQWIAECLLKNLIRGSFVPEPIVQDMRKLNRRIFDLQEDITYYTNKLDAALHRCGFRLSNYVCKITGKSYRKAVASIAEGETDPETILKCIHGRVVNRHGRDTLLAAVTASFSQTDITVIRQYWELIAIYVRQSEECQSQLTALCESNFPTEYKRLQTIPGVKERAATAIIAETGVDMKMFATAAALVGWCGLKPRNDVSNGRYKSRKITHGNKYLRKILIEISWTASRTRNCFFSNFSYIQVTQKHKSKMKIQVAIARKILVAVWHMLSKGEDFIDIYLKRLEQQRLMEEKLKSLELKMA

SEQ ID NO: 494194 - protein, 338 aa, unidentified
MSKITTIGLDLAKNVFHVVCCDARGKVVRKRKLKRGQVLPFFGNLERCLVGMEACAGSHHWGRELEALGFEVKLIPARYVKAYVRGNKNDYNDALAIAEAVVRPEMRFVRSKSPEQQDIQALHRMRRGCIGARTALCNRMRGLAGEYGLVAPKGIATLRRRVPEWLEDGDNGLSALFRRLLCEGIEQLQELDGHIAFYTREVERLSEHNEACQRLQTLPGYGPIVASAFHGQIGHGEVFRRGRDASASLGLVPRQHSSGGKDTLLGISKRGDRYVRSLLVHGARAVVSRAAHKDDRLSLWINNIRAKRGFNKAVVALANKMARMGWAVLANKTVYRAA

SEQ ID NO: 494195 - protein, 415 aa, unidentified
MQPYLFVGVDTHKHSHTAAVFSSYFSLLTTITFANSYQGLDKLLEQLEKLSNGKILIFGLEDSQGLGNFLAEFLLKKGFDVVDIDPVTTDRGRRRTTHKDKSDSRDACLIAKTLISKKDSLHKVTINKTSLALRELVKSRELLVGESTRIKNRLHVLIFNQYMDISGIFSDLFSKCALAFFARYPDPSKLKGERLDSLTAFLKSNSKGRHGKERAMEILSLANTYNTPDILTVTRSSIIKKHIERLSAIQEELKDILGMLSELVLESPYRTLTSIPGVNIVTAAKIISQVIDIDRFSSPSKLAKFIGVAPVEKSSGRKIRYQKSKHGKRYLYSAIFFIALNHISRTRDQRDNNPISRAYYLKKISEGKTKKEAITCLARRLTDVIYAIMRDGSVYSFLKVKSVRDNCEILETVAS

SEQ ID NO: 494196 - protein, 343 aa, unidentified
MDHFAGLDVSVKETSACIVDDTGRIVLEVKVASEPEALLAVLTNPACHFKRIGLEAGPLSQWLFSALAEAGLPVICVETRHMRAVLKAQINKTDRNDARGIAQMMRVGLYRPVHVKTLRSQKQRMLLTHRKLMQSKAIAIENDLRATLRNFGLKVGVVGTVKFEARIKQLVENLPDLVVLVEPLLIIRRVLREQIGILHRRLLAIVRDDDVCRRLMTVPGVGPVVALTYRATVDVPSRFRNSKAVGAVFGLMPSKHQSGESNRTGGISRCGDEMMRMMLYEAAHIMLVRSAKWSWLKAWAMKIARHRGLKKAIVALARRLAVIMHRIWVDGTEFRWTREVAAA

SEQ ID NO: 494197 - protein, 355 aa, unidentified
MNQEKYIGMDVHQATISVAVMDSSGKLIMECILETKAATILEFIDGLRGTLSVTFEEGTSAAWLHDLLKPHVSHLVVCDPRRNALLKDGSKSDRIDARKLAELLHANKLHAVYHGEHGVRTLKELGRSYLTITKDLTRVMSRIKALYRSWAIPCSGTTVYAVRHRAEWLAKIPEPGVRLRAERLYQQLDLLQPVRQGARRDLMVESHKHHAVKLLRQIPSIGPIRAALLVALLQTPHRFRTKRQLWAYSGFAVETHDSGEYRFVRGKLRRNRERITVRGLNPNHNHDLKNLFKGAAISASTRPGPLCDFYVALVEKGMRPTMARLTLARKMAAITLTIWKKGVEFDAKQLNRQAA

SEQ ID NO: 494198 - protein, 426 aa, unidentified
MNRSPIHALVSSPLADVACDVGLDGLNLICSGVARPGFAASWEIANRTDAIRATLTEIGQLAEAAGYEGLRVIVEPTGINHKVLLRIARQLGCETIMVNAAHVSKMREVIYGDPGKTDRRDPRAIEGVARQGRVIVDRQLPETYQLLRHWTTLYASTEASIIDCKNKVHRVVKLLFPDFAFSTGFLYGDSGRAVLRCFGLNPHRIAAEQPKRMLARLRKASNIRPSSVERLRTQARSSISSAPAGRIADLLERELRMVWEELELHENRRRQAREALERLYDEARLDDPQLPEPQRGVISKVALARLVGELGPFRDFSSWRQLLKMSGLNLCERKSGKYIGQTKISRTGRAGARAVLNQVALPLVKRNELYGPYYHCKRDVEKMPGNKAMTAVARKVLKMIWGLYRSTTTFDRTRVFTCASQFRLAA

SEQ ID NO: 494199 - protein, 389 aa, unidentified
MAKSKKAKMIKSPDGNKLAIVNPDAAGIDIADKEMQVCVPEDRDGENNRCFGSFTSDLNMIVEWLQACRITTVAMEATGIYYLQLFLKLQDAGIEVLLCNPRDVKNLSGHKTDSADAEWLMLLHRYGLLKPCYQPGNAARQIRNLCRQRNNIIRSADKQIQYMQKAMEQMNIKLSTVIADITGMSGRDIINAILAGKRDPSELASLAQANCKTPREEIAKALEGTWDADLLFMLQQSVDAYDFFTKQMEECDKQIESLLAAYQARLDSDVNALVRHKRKKNARSKNAPEIDIEKYAFAIWGVNVFDIPGLKDLAVMQLIGELGHDFIDRFENAEKFCRWCNLTPENKISGGKILSSRVQKRKNPVGQVFRKAAAPMAREKSEMGNYSGV

SEQ ID NO: 494200 - protein, 438 aa, unidentified
MPNKVIFNPDDLFISVGIDVGADFSWMSIALPNQQFVGKPYKILHNKMSSLTTAVSKIKEAEELYSLESRIFLESTGIYHYPLFCYLRDKGFNCSVINPIITKNSTNINIRKVHNDRFDSKKAALVGLKPDLKVSLMPSDLALNCRNLCREYYDLMDNRSAYVNKLQGELRMAFPQYLDIFSKVTTNTSLTLLETYSSPSAFIEADKQEIIGIIKSAARFGLTYAQNKYNAIIQAAHEANEFGYIIDSNIKRIRLYISFIRKYDEEIANILHSMHELVDTNEDTDFVKQIHLIETFKGAGFLSAVSLMGEIGDFCAFSKPKQLFAYFGLDPAVKQSGKFEGSKVQMSKRGSAIARRVIHTLALQSISTSRTGEAKNPVLRDYYLGKCGAKPKLVAMGAVSHKVCNIIFAMLRDNKPFEIITPQEHIKQYNAAKCDIAA

SEQ ID NO: 494201 - protein, 339 aa, unidentified
MKITTFGLDLAKQVFQLHWVEVETGEVKRRRLKRDQVLAFFAQRSASVVAMEACGSAHYWARKLIGLGHEVRLIAPKFVRPFVTSNKSDAADAQAIWETVQRPGRRFVAVKSEAQQGVLMLHRMREQLVKMRTMQINQLRGLLYEFGATLPQGRHKGMAQVPQALAQLEGTLPAMVLDALREQRARIESLSREIEHIEAQLLAWKKEDEAVKRLMDIPGVGVLTATAAVATTGQASAFRSGREFAAFLGLVPRHSGTGGTVKLLNISKRGDSYLRKLLIHGARAVLTHSKVRSSWLEALSARRTWNTVVVALANKMARTIWALLAHGRTYDRGYAAGLA

SEQ ID NO: 494202 - protein, 354 aa, unidentified
MIIIGADYHPGFQQIAFVDTDSGEFQERRLQHREEAEKFYRDLAAQGMQVRVGMEASGQARWFERLLSELHFELWIGDAADIRTRRVRKQKTDRQDAQLILQLMLEDRFPKIWVPSWENRDLRQLLWHRHRMVQARTRIMNQLQAVALNEGLRCKKRLWRKHGREQLEAFRLAPWASRRRRDLLELLDRLNPTIAELSQAIEREAKKFPEARCLMTHPGVGALTALAFVLIIGRADRFQCGKQIASYLGLVPLEDSSGNRRRLGHITKQGSSTLRFLLVEAAQVTARSIPEWRSKYFHLAMRRGRKIAKVAMARRLAIALYWMWRKGWDYERVKKFGSHAGQLEPGHGVQSNTE

SEQ ID NO: 494203 - protein, 346 aa, unidentified
MKNISTVGVDLAKEVIQVCVVTRGKVISNTEMTPQGFRCFLAKMKACIIVFEACATSNYWKQVSISQGHDARLISAKLVSQIRQNQKTDKNDALAIVQASQLTGVRFIQGKQFSQQELQSISRMRELAIKQKVATSNQIGALLLEFNIRVSNRHGGINGVVKATLEDAENDFSPEFRDALYETWQGYLALVTRIAKYDEHLNVSVENTPACKKLMALEGVSTINAVNLYISLACAEDRVFSSSKDASASLGLTPIQYSSGGQVKLGGIGRRVKNALVRSNLVSGAMAVVRQVSQREPRTAKEKWLKALIERRGNKCAAVALANKTVRTAFAMLRDGTEYHAQALNA

SEQ ID NO: 494204 - protein, 376 aa, unidentified
MKQYSKYVGLDVHKADISVGIANADRTEASYYGTIENTAHACLTIAKKLSKDEGSILFCYEAGPCGYEVYRHLTKAGYDCVVIAPSLIPKKSGDRVKTDRRDAVSLARLLRAGELTPIWVPDKEQEAMRDLTRAREDMKTMERQSRQRLGGFLLRHGKNYPGQSKWTKTYFRWLEGLRFETAAQQIVFQEYIDIVKDAQQRVSAMEEEMRKALSGWTLKPIVDGLMALRGVDLIAAMTMIAELGDISRFESPRHLMAHLGLVPSEHSSGERQKRGGITKTGNGHVRRVLVEASWSYRLPARKTAHLQKKAEKASKTVQEIAWKAQKRLCSRYWYLVHKGKLPVESCTAVARELAGFIWAIACEITGKGAVPASVNG

SEQ ID NO: 494205 - protein, 361 aa, unidentified
MRPMSQATKENDNSNRIYIGMDVHKKHIDVTLMSQHIVLAQAHIRSNIMEEYIRKVKRKYPGKQLTAAYEAGFSGFALCKQLNALGVETIVVNAADIPTTNKERTTKSDRSDSMKICKALKSETLRKIYVPSDEQLGDRDLVRYRSRLRQEVSKHKTRIKMFIHRYGIHIPDELDTSHWSKPLRAWLGMRTLPSASAQTTFGIMLENLETSEIAYQKHLRRINELASSPRYADDMDLLCTIPGIGRLTAITILTELNPISRFRTIDHLASYVGLVPMRHQSGSSDRSMPMQHRAQQELRVALVQSAWMAARSSDRFRAAHIEKRKNRPSQVAIIYVARKLLNTIYTVLKNSQPYVEQSSKQ

SEQ ID NO: 494206 - protein, 400 aa, unidentified
MNPVVGLDVAKGESQVQAFLDQSKPYGKSFSMKHIKEELDHFLEFLKEIEEVTGQMPMVILESTGHYHSPVIQYLEEQGIPYILLNPIISYQAKKSSLRKVKTDAIDAYQLCVLYYKEDLEPHKIRGIQLLDLRNLSRQQEIVTNMYVEAKLQFHTILDQVFPEYRKVFGDLYSRVSLLILKEYPTSEAVLAAGESKLAESVIEFCPSRSGQWAWEKAKKIMDSASRNPFQINVYQSHVINLRMYIELLFHYQGHLSDLEDRIVALANEMEEYKIIQSIPGIGEKIAATIISEIGEIDRFNHPKKLVAFAGVDPSVHSSGKFTATINRITKRGSSRLRHSLYLAVLCGIRSSRNKKLKAFYDKKKSEGKPAKVSIVACMNKLLHWIYALLSRKEKFLDLA

SEQ ID NO: 494207 - protein, 366 aa, unidentified
MSKDIKMPAGATRRYVGIDLGDKRSRVCIVGEKGAIVSQEWVVTTPQTFLKRFHSEPAMLIAMEVGTHSRWASELLRRCGHDVRVADARQLALITNSNSKSDKRDARTLAQLLRADPGLLSPIEHRAEILQMDLTVIRMRDNLVETRTRLVSSVRGVVKATGGRLPSVETSSFPQHVADLIPEPLRPAVAPTLEVIDQVNEEIYEYDCQLEHWARTRYQESSRLTQVKGVATLTALTFMLTVGDKNRFSRTRDIGSFLGLRPRLDQSGDSAPQLRITKAGDGLLRKTLVECAQYMLGPFGEDSDLRRWGLKMIEAGNGSKRARQRAVVGVARRLAVLLMSLWKSGETYDPLRHSRGLLQSDQEVAA

SEQ ID NO: 494208 - protein, 336 aa, unidentified
MSQNYLGIDVHKKWCVFTQLDSAGKLMRQSKFRNTLEEVSTFASSLNSKIHLVLEPVLNYLWLLDQFEPYVGSVHVATPFKVRVIAESKSKTDKYDSRMLAELLRTNFLPESWVPPSEIRQLRGLIRQRYHLVKSNIMNKNRIRHLLFQHGIDLKVFNIASPKARLEIQNLCLPDITRQTIDQCLKIITVLDEQIEEVSKQICWSVKDNPTIELLQTIPGIGKIRSAVVYAEVGNVTRFHSAKALANYTGLTPTVRSSGDSVWTGGITRYGSKPLRHALVEATINVIRKSPDLSRMYHRILYRGNIQKARVAVARKLAVIIYAMLNRNEPFRMEAA

SEQ ID NO: 494209 - protein, 367 aa, unidentified
MSGYIWVGLDVHVESITAAILEGDGSEVEVVKLSSDLMKVRRLFRRLAKRGAVRACYEASGAGFVLQRVLSNDGFHIEVIAPSLIPRKPGDRRKTDSLDAIMLARLYRSGHLTPVHVPTADQEAIRRVIRLRLTYQEQCKSTKRRVYGMLLNAGYVYREGRSLWTKKHRIWLAKLRAQLQGPLHTALVSELEHMEYLEMQRDALDAEIERYAQSASFRERVEGLCCLRGIKTLTAMTLLSEIGDIRRFHSPRALMAYFGLVPSERSSGERQRRGPITKAGNSHARRILIEAAWNNRSRAAANLILNRRRQGQPPQIVAIAIKAQHRLSRKFYKLWQRKHPHVAITAVAREFCGFIWAILRETPQVQT

SEQ ID NO: 494210 - protein, 412 aa, unidentified
MELIVERPAALDVHKAQVTACVRVPDEHGHREEHVAEFATTVRGLLGLRDWLAAQRVQQVVMEATGVYWKAPWAILEDEFECLLVNARHVKQVPGRKTDVSDAAWLCRLAEAGLLKASFVPPKPIRQLRNLTRYRKTQIQERAREVNRLHKALEDAGIKLDCVAADVMGKSGRDMLDALVAGTTDPDVLAELARRQMRKKIPQLREALEGHFDAHHALWIGAILAHVDFLNEQIDRLTDAIEEQLRPFAPAVELLCTVVGIQRRGAQCILAEIGADMSRFPSARHLASWAGQCPGNDQSAGKRRSGKTRNGSKWLDFALEEAAMAAIRVKANYPAAQYHRLKPRRGHKRALGAVKHSLICAIWHMLATGETYRDLGPDYFINRDPARQTKRLIRQLERLGHHVTLTEEAAAA

SEQ ID NO: 494211 - protein, 423 aa, unidentified
MNYKQNEKINQVKESTLVVGIDIGSTTQYARAFDWRGIELGKVFTFSNSREGFESFKAWMQHLQDKYRKSDVIVGIEPTGHYWFDLGAYLEDEGILLVMVNPYAVKQTKELDDNSQSKNDRKDPKVIAKLVTEGRYSAPYTPDGVYADLRIMVANRKRLIREMTQIKNRFARWFAIYFPEYTDVFGDYEAQSSMLLLKKTCTPEAIVELGAEKINQIWRDAKIRAVGMKRATTLCETAKRSIGLKKGSSAAQYEMKLLLEDYEYKKAQLDAVMEEIEKLCRKIPESEQMLAIKGIGVITVAGFLAEVGDVRRFESPRQIQKLAGLSLRENSSGKHKGQTTISKRGRSKLRAVLFNAAIPLIAKNPEFKSLHEYYTTRANNPLKKKQSVIAISCKLIRVFYAILAKGVTYDAQKLISDIHRQPQ

SEQ ID NO: 494212 - protein, 336 aa, unidentified
MEIIYPKCCGLDVHKRSVAACVRLLEADGRLDQETRTFGTMTRDLLEMADWLAAAGVTHVAMEATGVYWKPIYNLLEERFTLLLVNARHVKHVPGRKTDVKDCQWLAQLLQAGLLQPSFIPARPQREFRELTRHRSQLVAEKARVANRLQQVLEDANIKLASVATDILGASGRDMLRALISGETDATKMADLARRQLRSKIPQLRPALEGKVTEHHRFLLGQLLAHVEHLEGQIEVLSRRIEELSGPFAPAREAMVSLPGIEQRAAENVLAEIGSDMSVFPSEHHLSSWAGVCPGNNESAGKRKSGKTTKGNRWLRAALVQAAWAASRKKDSYFQA

SEQ ID NO: 494213 - protein, 337 aa, unidentified
MKKIPVSVGLDYSMSGVQVCVQDANGKVLRNKKCDDSWRAVAGVIGKCETVGVAVIEACTGAADLAEELKAHAGWPMKIAMPGIVKKMKLNPDKTDWQDAHVLCDLGRVNYVPPVWLAPKPVRELRLVVRYRQQLVNQRRAAKLRMGAILREQRVVLQGRRWSKPWQAALAHHKDLSEQAGWVLQQHVRAVVKLTAEIDQVEAHLEAIAANDWMVRQLLTCKGIGLVTACVIRAEIGSFERFKSAKSLARYCALTPRNASSGARQADAGVIQAGNRMLRTILIEAGHRLARFEPRWKALADAMRARGKHGSVIAVAVANRWMRSLYHQGKQLEQAAA

SEQ ID NO: 494214 - protein, 318 aa, unidentified
MIDVSMVVAGIDIGKARLDVALHGASGRTAFDNSAAGHRRLVQWLRSAQVVRVGLESTGPYSQEVTGALREAGFEVAVLQPLQVRAFAQYRLQRAKSDPLDAALIATCTALLDKVHEAPDARLVPLAEHLRLIEQLEEDVVRAKTRLEAAHLAHARRFLRLEIARLERREAAERVLLMKSIAAEPDLLARLQLIQSVDGIGERTALSLLLLLPELGHLEREPIVSLAGLAPFVRTSGTWKGQSRIGGGRDRVRRALYAASLAAAFRWNPAIKALYQRLKAAGKPHRKIMVACARKMLIQVNAVVARGTPWISTRNAVA

SEQ ID NO: 494215 - protein, 348 aa, unidentified
MKVTRVGLDLAKQVFQVHGVDEKGRQVLSRQLKRGQVEGFFRGLEPCLVGMEACGGAQHWARVLGAMGHEVRLMAPQHVKPYVKGNKNDANDAQGICEAVGRPSMRFVALKTVEQQGLQALHRIRRTLVRNRTAAVNEIRGLLAEYGIVVAVGVAKLRARLPELVEEVDNGLPMSFRPLLADLRADLEHLDRRIRELDAAMLRAAQQASAGQALLGLRGVGPTTATALMASLGDGRQFDRGRQASAWVGIVPGQHSSGGKQRLLGISKRGDAYLRTLLIHGARAVVNSCQGKTDPLSVWVQQICARRNKNVAAVALANKTMRIAWALLRRGEQYDPDHELKRQAGQAA

SEQ ID NO: 494216 - protein, 351 aa, unidentified
MEEYISFDSHKRYTLVEREEISTKKTKQFRVDHSPGAIRRCLNGREKGTPVAVEATGNWYWIVNEIEQAGLKPQLVHPRKAKLMMGMINKTDKLDVHGLNRLQRNGVLPTVWIPPRELRDQREITRARMVMTAHRTRLKNRIQATLCKYGWTGTEASDPFGKKARIELMKAIHELPPQTALITEALIDQLDFVQRQIYQIEERIRELVQDTPEMNILRSLPGIGWILSAIVGLEIGEIQRFASAERYTSYSGTTPRVHASGDKIQYGRLRPDVNRYLRWAYIEAAHSVALHRRTYPSRHVTRLYERIRYRKGHSKAIGAVARHLAEATYHVLSRGEPYRDPFLNMGRSREV

SEQ ID NO: 494217 - protein, 326 aa, unidentified
MEHELHYIGIDTAKEKLDVDVLRPDGRHRTKKFANTTKGHDELVSWLKGHKIDHAHIYIEATGTYMEPVAECLYDAGYIVSVINPALGKAFAQSEGLRNKTDTVDARMLAEFCRQKRPAAWEAPHPLERALRALVVRHQALTDMHTQELNRTETAREVQRPSIDAHLLWLEAELKRLEKQIKDLTDDDPDMKHRRKLLESIPGIGEKTSAVLLAYIGLKDRFAHARQFAAFAGLTPRRYESGSSVRGASRMSKAGHVSLRRALYMPAMVATSKTEWGRAFRDRLAANGKKGKVILGAMMRKLAQVAYGVLKSGVPFDASRHNPVAA

SEQ ID NO: 494218 - protein, 406 aa, unidentified
MSIYIGIDWSQDKHDVAFMNAAGAIIARLTIPHQPDGFRKLETTRQQLAVTAADCLVGLETAHNLLLDFLWDHGYQHIYVIPPLVVKSSRGRYGHSGARDDTRDAQLLADLLRTDRARLYPWRPDSSLTRQIRARVGFLTFLKHAAIRVHNRLRAVLLRYYPQALELFSGLMVPTTLAFIAAFNTPQALTALSYEAFIAFAHQQGHWHRQGLLACYARLQQTPLQASPATVAAYQDEARLLAQQLRELILAKQEVQRALNALFVQHPDQAIFTSLPGTGDFLAPALLAKLGDDRDRFPSAASLQALAGTCPVTVASGKHKRVIFRHACDAEFRQIAQQWARCSLRKSVWAVAYWQQARPRSASDHDAYRRLANRWLAVLWKLWHSREPYDEAYHLQQRRLRSQPLA

SEQ ID NO: 494219 - protein, 334 aa, unidentified
MNTPIVGIDVSKRKLDVALLVDGKVKAKAVPNSQEGFAELEVWLNKQKISLLETHICLESTGVYSEPIALYWFDKGIKVSLVNPNCIKSFGSSENIRNKNDQIDAGLIARYCAAMAPPSWDAPSREQRQLRAWGNRLTALQDMRQQELNRLEVHETAKQQDVIPHVQAHIKWLDAQIAQIARDIDDHIDRHPGLKQDAELIESIPGLGRTTAVKVLGHVGDVRRFGNAKALAAFIGVTPRQRQSGTSIRGRTMMTRMGNKHLRAALFLPSLVAKRHNPILKQFGQRLEANGLSKMAVAGAIMRKLVHLIYGVVKSGKPFDPKYMEKGLAIQDGI

SEQ ID NO: 494220 - protein, 345 aa, unidentified
MDHFAGLDVSVKETSICIVDDAGKIVREVKVASEPEALLAVLKNLAYHFKRIGLEAGPLSQWLFSALAEAGLPVICVETRHMQAVLKAQINKTDRNDARGIAQMMRAGLYRPVHVKTIRSQKLRMLLTHRKLLQSKAIAIENDLRGTLRNFGLKVGMVGKVKFEARIRELVENLPDLAVLVEPMLIVRRTLREQIVILHRRLLAIVRDDEVCRRLMTTPGVGPVVALTYRATVDVPARFRKSKAVGAVFGLTCAKYQSGEVDRNGRISRCGDEMMRVMLYEAAQSMLRSKKWSWLKAWAMQIARRRGMKKAIVALARRLAVIMHRMWVDGTEFRWTREQATAAAA

SEQ ID NO: 494221 - protein, 308 aa, unidentified
MTTIYTGLDIAKLNLQLHLAGRIHDQPNTAAGHRRLLKLLASQPRVHVVCEATGGYERDVVAALHAAKVPVSVLNPARVRHFARATGQRAKTDDIDAAVLSAYGQALQPKPTAPRTEQEQQLAELIRRRVQVLEILVAQRQQAERLTVPALRRQAQSLVRRLERDVEQIEEQLQALRAQAATLNERVQKLEAITGVGTITALGVLAELPELGTLNRRQAAALAGLAPHPRESGQWHGRRSIGGGRAPVRRALYMAALVAAHANRQLKEFYQRLRAAGKPAKVALTAVMRKLIVLMNHILKNPNFALQN

SEQ ID NO: 494222 - protein, 359 aa, unidentified
MNEISQVAIVRVGVDLSKKFFQVHAVTQLGDVSMAKAYSRDRFFTWCAELPSGCIVAMESCGGAHHVARRLRAMGLDARLIAGSFVTPYRMAGKSGKNDANDAAAICEAAGRPQMRFVPTKSCEQQGQLAVHRLREGYKEERTACLNRIRGLLAEFGLVFPQSPEALRGVIQEVLEDASNELPSVARLALDRANSHYTELDKEIAWCDERISAHVKTDERAKKAAQLLGIGPLTASALVSTVGDFAQFNSARQFGAWLGLAPSQNSTGGKAKLGGITKRGDTYLRTLLIQGAKSAVMSAGKRSDRISKWLLQLKERIGWQKTVVALANKNARILWSVLTRGTTYDPEHVPTYPGAVSAA

SEQ ID NO: 494223 - protein, 370 aa, unidentified
MANSVTLFVGMDVHKESISVAYARGDENGPPHFVGKIGTRKSDIDKLIRRLHSKASRLVFAYEAGPCGYVLYRYLTSKGLECQVIAPSLIPKRPGDKVKTDRRDALELARLLRSGDLTPVYVPSVEDEAIRDLCRARDATRLTLKSAKLRLKSFLLRLGLNYTGRANWAAAHRRYLATVACPTPAQQIVFQESIRAVDEQVDRLQRLEEELIERGSQWRLAPVVLAVQALRGVQWVVALTVIAELGDITRFDNPRQLGAFVGLIPTEGSTGDKRRLGPITKTGNGRARRALVEGAWAYRYPAKMSPLIQKRNEALPKAIQDIGWKAQVRLCKRFRRLIARGKHSNLAVTAIARELLAFMWSIAKEVPIKA

SEQ ID NO: 494224 - protein, 343 aa, unidentified
MAIVNRIALDLAKDFIQVLALDESEQELFNKKLRSNKVLAKLATLKRTDDCEVAVESCGMSHHWRREIEKLGYKTVALPPRFVKAYLQGEKNDANDARAIAEAASRPNRKSVRIKSIEQQDLALMVNQRESYVQTRTEMSNRLRSVLAEYGIIMPQRISSILKGVPEILEDADNALTARSRNLVLRQYELLKTMDEEVKAMDKLLSAEANNTDDSRRLMTIPGIGPVTAVSLLALIGDVSDFKRGRNVSEYLGLVPRQNSSGGKDRLGSITKKGNTRLRTLLVHGAPSALRVAHKRNDKLSLWAQDVVKRRGNNIAAVALANKHARIIWAMLTHKEDYRMAAA

SEQ ID NO: 494225 - protein, 314 aa, unidentified
MESQEVKYVGVDCGKKSIEVVRINSENSLERRQFSTTESGINNLLQWLTLNDIVGLEAGSQSFRIAKSILNKGVQVIVLNPGNLATIYQSLKKTDKEDSLKIARLIQRHPIEELPTVPIPNDEEEDNRRLCSEHENWTKQLTQGKNRLHSLFTQAGLTQITKKHLRTKVSREASVTLLSDRYKKEAERILKVLDLVELNLKLIEEEIQEALKKNKAYVQTIMSMPGIGMITSLAIMSYMGDCKRFSSAKQAAYYAGLVPRVDISGDTVRYGRIINRGCHSIRRVIVQAAWSLVRCQHGGKVKEFYQRLYLKKRC

SEQ ID NO: 494226 - protein, 392 aa, unidentified
MEIQDETGRRLAKARLPEGISGIARLHQLVGRFLPEDGDAAGVKIGIETDRGAWVAALVASGYQVYAINPLQSARARQGHDVSGAKSDAGDAHVLADLVRTQSHQLRTVAGDSENAGATKVLTRMHQSLIWDRTRQVLRLRSALREFFPAALEAYEDLAFPDVLELLTKAPEPDSAARLTRAQITAALTRAGRRDREAKTTAIMLALRTKHLRQPPLIAAAYGATVRALAALITTSNEQITALEGQVEACFGQHPDAEIYLSQPGLGPVLGARVLAEFGDDSTRYDGARARKNYAGTSPITRASGKKKVVLARYVRNNRLADALHHQAFSALSGSPGARAYYDALRDRDISYNAALRQLGNRLVGILHGCLKTHTPYDEAVAWNQHTQQAAA

SEQ ID NO: 494227 - protein, 371 aa, unidentified
MEKSIMYVGLDVHKNSIKIAFAEGGRDDEVRHYGKIDSSLEALDRVIRKLMSKGCELSFVYEAGPCGYDIYRHLRSIGLDCTVVAPSLIPKQSGNRIKNDRRDAQMLARLHRAGELTKTYAPCLEDEAMRDLTRAREDAKGLEKRAKQRILAFLLRQGYRYSGRSPWSRAHFRWIANLKMPHPAQQIVLQESLEALSECRQRVAHLTEQIQALLPQWRLSPVVRALQLLRGVSLIVAATTVAEVGDLTRFDSPIELMSYLGLVPSEHSSGGKTRRGSITKTGNGHVRRVLIEAAWAYRLPARVSLKLQQRQEGLPQNICAISWQAQLRLCARHKRLLAKGKATQLITTAIARELCAFMWAIAIAIKTPETT

SEQ ID NO: 494228 - protein, 349 aa, unidentified
MDTTTQPLASIGIDIGKEVFHVIGFGADGKIAFRRKIKRLALVETFRRLPPSVVGMEACLSAHFVSRALRQLGHQPRIIPAIYVKPFVKGQKNDYNDAEAIAEAALRPNLRVVREKTQDQLDLQALHRVRSRLVSRRTATINQIRAFLIEQGIAVRTGARALRNSLLGILENRQDEISPRMRGLIAGLYEDWTSLDERIEALAGEIDQIGEKEANCRRLMSVPGIGPLISTAVVAAIGTGEAFKRGRDFAAWLGLVPRQYSTGGRSVLGRISKRGSKYLRTLFIQAANVILMRPHNWQRFSFGTWLQNAAPRLHRNKLATALANKLARIAWSVLRNENTFDARHQMMAI

SEQ ID NO: 494229 - protein, 346 aa, unidentified
MRFYTKPHKHYCGVDLHARTMFVCIVDGQGNILLQRNIPTSPEEFRRLIEPFREDLVVCAECVFCWYWLADFCTAEGIAFVLGHALYMRMIHGAKAKNDRIDAFKIASLLRGGNLPTSYVYPAAMRSTRDLLRRRLYMVRERGFLLAHVQNTHHQSNLPTPGAGLQWRSNRAGVAEHFTDESIRKTVEVDLSVVSHLDTVIRELELFLTNATKEQDSESFHLLRSIPGVGKVLAMTILYEVHDIARFPTVQDFSSYARLIRCARESAGKRSGTSGAKIGNPHLKWAISEAAVLMLRHGEVDKLRNRLHRKHGKGKAMGVLTHKLGRTIYYMLLRKKPFDLERFLAA

SEQ ID NO: 494230 - protein, 451 aa, unidentified
MANRGKTACGTTILGRPEMFGKKIDKGIWWTMGVDCGEECHRFVLVDDRGERQRACWVRNRRDKIEEAVAQMVLALPTGVRLRLVTEGVRSLGWVVAQVSGSLGMEVWQVNPKALNHYRDLEGQPRKDDDIDAYLAARMVVFGMEGCRIAVDPRPEERALCRLTRLRRQLSDRRTVVKNRFRSLLIELAPEVVSKDWEGPAHDGKGMRAVLKRWPTFEGLEKARASTIEKMLTSSTRYGARCGAMSVPLKEMANRVAMASMEREIVKMDISMAIAELDVLDGSIAKLEKEIKHRVMEHPVGKKLLDMPGEGPVTAGTDIGEVLPVARNVSEGKVATYAGLTPLSRRSGKGGKPSKLARGVNKHALRTNYLSAIAAIPASAIDAAYHQKQKDRHQGHPKPHVKATLALARQRFKIKYKLMTSDAVYDKEILISSHLERQRRVNANQNQSHAA

SEQ ID NO: 494231 - protein, 377 aa, unidentified
MSKVRFVGLDVHAATIAVAVAEPGGEVRALGTILNEPTTIRKLVTKLGAPETLRVCYEAGPTGYTLYWQLAALGVSCEVVAPTLVPTKAGDRVKTDRRDAEKLARSYRAGDLTPVWVPDAAQEALRDLVRAREVAKQDQLRAQHRVSKLLLRRGQRPPQGLRAWTHRYLDWVQHTVRFAEPALDAVRVDYVQEVLHARARVARLEEAVAVAVAAAPPRMRAVITALQALRGVALLTATTIVSEVGALSRFTGARQLMGYAGLGVAEASSGARTRRGGITKTGNAHLRRVVVEAMLPYRHPPAIGTALRRRQREVAEPLSALAWKAQHRLCARYRRLRARGKPEPQVRTAIARELLGFVWAIGIAAERAFDATLPVQA

SEQ ID NO: 494232 - protein, 407 aa, unidentified
MDLLYPRCAGVDVHKDMVMVRVRCVSEPRVDETRSFATTTGALTELQEWMSAQGVTHVAMEATGVYWKPVWHLLEEHFELILANAQHIKNVPGRKTDVNDAAWIADLLAHGLIRASFVPPAPIQELRDLTRTRKQLVREIAQHSLRIQKTLEDANLKLGSVLSNILGRSGRAILGALIAGERDPEKLADLAQGHARKKRAALIEALHGRITAHHRSLLKIHLNLIAALEQALEHVDTEVGKALAPIQEGARLLTTIPGVSDLTAHIVVAEIGVDMARFPTAGHLLSWATMCPRNDESAGKRRSTRTRKGAPWLKTALVTSAWAAVRVKGSYLQGQFLRLKARRGAKKAILAVAASMLTAVWHMLKNSAEYKDLGADHFARRDRSKAILRLVRRLNDLGCEVQIAQAA

SEQ ID NO: 494233 - protein, 393 aa, unidentified
MRKPEQQHKPLNDLSRSLTPFDSNRTLICVIELSKKNWLVAGMIPGVERQPLKKLAADEKELLKLLARWRAEAEKAGHKIDRIAVAFETGRDGFWLARWLRARGIEAHVIHAASVAVSREHRRAKTDRLDTQQLMRAFLGWLRGERQHCKMAAIPTLEEEDAKRPHRERETLVGERTTIINRLKATLARLGVRNFNPKLVKAPERLKHVRTPEAAPIPPNTQAELLRDMQRLRLVREHIVHIEKARLEHLKRNPNTGPNLMVSVLARVIGVGIETADMLVQEVLSRNLRDRRAVARYGGVTGSPDESGSRSREKGLARSGNARVRRGMIQLAWRFLEFQKGSALAKWFRARTENAPRSRKKMIVALARKLLIALWHLVRDGVVPEGVVLRPVH

SEQ ID NO: 494234 - protein, 450 aa, unidentified
MREPREIEDREDELAVARVAAVDVAKASAVVCTRVPREGGPGRFVTRVWPVGATTNEIIELAAHLAGQRVEKVVLESTSDYWRPFFYLMEAAGLHVELVNARDVKNAPGRPKTDRLDAVWLAKLAGWGMLRPSFVPPAEIRQLRDYTRLRTDLTRERTRHWQRLEKLLEDALIKVTAVASRIDTMSVRDMVEALIAGQRDPRKLADLARGRMKAKRAALIEALTGRFDAHHGELAAILLAQIDGLTAQIGALGARIEELIAAIPGAQGVDADGTTGPQAGRGPDAAALPAIDRLQEIPGISRHAAQVIIAEIGLDMTRFPTAGRLVSWARLCPRTIQSGASERPGKTAKGNPYLKGVLGDAAAAAGKTTTFPGQRYRRLARRRGKLKALVAVARTLLVIIWHLLADRAARFEDLGEDYYLTTIDTDRRARSHIRQLQALGFTVTITPAAA

SEQ ID NO: 494235 - protein, 379 aa, unidentified
MGKGIRFVGLDLHAETIAVAVAEEDGSELDFGVIANRPEAVRRLIKRLGPVEKLRVCYEAGPCGYVLYWQLTGLEVDCKVMAPGLIPQKPGDRVKTDRRDAKKLARMYRAGLLTAVWVPQADDEALRDLVRAREAAKKDELRARHRLGKFLLRRGCRAPQGVEAWTKRHCQWLRSLRLEQPAQEVVFIDYRHEVDHAQERLLRLERAIEEAVERVPASKRAVIEGLQALRGVSKVTAVTVYSEVGELSRFARPKLMMGYTGMVSREHSSASRIRRGAITKTGNAHLRRVLIQAAWAYCRRPNLSPALKRRQAGLSEEIKEISWKAQHRLYGRYQRLVSKGKTPQQAITAVSRELVGFIWAIGVHVEAQTRQESQGHAAA

SEQ ID NO: 494236 - protein, 403 aa, unidentified
MTVPDVVWVGIDAGKTSHHAAAIDADGEQLWSVKIVNGQQQIEELIARAGRSGGEVRWAVDLVSPVASLLLAVLLISGQNVVYVPGRMVARMAEALGGEGKTDAKDARIIADIARMRRDLTPITAGDELVVELARLTSHRADLMADWVRGVNRLRELPGSIFPALERSFDYSTRSALILLTGFCTPAEVRQAGHAGLAAYLSEHEAWRKGIGPMAATALQAAAGQTVVLPGEATTGVLIKQLARKLLNLDREIKDTGKLITSRFRAHPQAAIIESLPGMGPILGAEFLVAAGGNARAAFATPGRLASYAGLVPVPKDSGRVTGNWRRPRRYNRALRRVFYMAALSSLRANGPSKTFYQRKRAEHRIHTQALPALARRLVDVLWALLRDNRTFSQAPPPRAAAA

SEQ ID NO: 494237 - protein, 348 aa, unidentified
MIVLGADMHKGSHSIAAVAGETGELLDDKLVKVGERGFAAALDWARALGPERVWALEDCRHVSGAFERFLLVSGERVVRVATRLMAGERRGSRERGKSDLIDALAVARAALREGLERLPLAELAGVELDIRLLVDHRERLVRMRSALNNDLLWHLHDLWPEQTLPGSALLSRKWATRIGRRLQRHEQTARVRIARDELRQLRELSRTIDALEAEIAGLVAKVAPQLLEEPGFGPLTAGKLIGEIAGVERFASDAKLARAGGIAPIPVSSGKTSRHRLDRGGNRQINTAIHRVAVTRARCHPETRAYIERKRSEGKTNRDAIRCLKRHLARRVWLLLQPQDRRQSPSTA

SEQ ID NO: 494238 - protein, 341 aa, unidentified
MNGVTMIGLDLAKNVFQAHGSDSAGAVVFRKRLRRDKVLMFFAEQPRCQVRMEACGSAHYWGRELSRIGHDVRLIPPAYVKAFVKRQKNDAADAEAICEAALRPTMRFVAIKSEERQAAGAAFRARDLLVRQRTQVINALRGHLAEFGIVVAKGPAHVDRLLALALDKGNGLPTELRPVLDILVEVLRSLNERISTLDGVISQQTDEDPDAKRLLTIPGIGRMTAAAILAFAPPAHTFKRGRDFAAWVGLTPLQQSTGGKQSLGRTSKMGERTLRRLLIIGASAVVRWSARKGAPRGSWLERMLARKPRMLVTVALANKMARIVWALLTKGGVYQASAAVV

SEQ ID NO: 494239 - protein, 417 aa, unidentified
MASKANGRLPIKPGVMVVGIDVAKRRHVAAIRLPDGRFQRPFSFTNNQEGFAKLLERVGLARAAGHSEVRFGLEATGHYGHALQHFLLAHGDAVISVNPAHTRRVKELLDGSPEKSDPKDAMLVAELVAQGRGRLLTMPFGVYAELRRLGKLREQLATERIRHLNRYYGLVDLVFPELEGLVYDVRCPSIRRLLAAYPTAADVAAGSCEEICRLLWRESIGHLGAARGQQIYAAAQRSVGVREGLSALRLQMRLALASLDSVSAQMAQVEQAQREALTEIPYAAHLLTIPSLGPVTVATVLGETGDLRQYRSAEALIKLAGLNLYSLSSGTFQGRTRISKRGRPLLRHAVFLGALRMSKHGQPLHTFHDRLRNRLAGPQVAVAGCRKVLRLLYAIARDGVSYAPDRLAIMTSGQVAA

SEQ ID NO: 494240 - protein, 352 aa, unidentified
MRRSKHQVTGEEDLFVGIDLHKDRWHVTIRTMDLELFSASIPGTWEALQRVLARYHGHPLQAVYEAGYFGFRLHDRLVAHGIPCIVTPPSLIPQEYGNRVKTDRRDSSKLAYLLAKGMLKRVWVPSEEELYHRQVIRRRRQLVRDRVRTQSRIKAELRFYGVLIEEPRGKWTQIYFENLRRVNFGNRWMQESFNRLLEQYEFLSAQIDKQTQLLRELSETELYQKRVKILQSIPGVGVISAMELLLELQDVSRFRKAEQLAAYVGLTPSQYSSADKVRMGRITGIGKNTLRAILVEASWKLITKDQVMREKYDRIKIRSGGKRAIVAIARTLLLRMRRMLLDKRAYALQLAA

SEQ ID NO: 494241 - protein, 360 aa, unidentified
MTQAKTWAAFDVHVSGVVAATLDRDSGELSLRRLSGRSADVVEFAAGLPGPVRATYEAGPTGFVLARKLQAAGVDCLVCAPGLIGRGATDRVKTDLRDAQRLVRLLAAGELHRVAVPTVEEEALRDLVRAREDLRGDLMRARHRLAKLLLRHEVRFEGPQANWTQAHLGWLAGVSLSQPASQRALEDYRGAVSALMIRREQLESEIAQALPESSWAQTARRLMCLRGIDTLTAAGLCAEIGDFHRFRHPSQVMSYLGVVPSENSSGQRQRRGPITKSGSQHARRLLVEAAWHYRRPPRVAGSLARRQADGEPEIIALSWKAQRRLHHIWTRMDQRHKRRTIIAVAAARELAGFCWAVATA

SEQ ID NO: 494242 - protein, 377 aa, unidentified
MKAPSTRPAAVLGLDVGKSSHWACLIDRDGEVLSSAPVRNREAELDALFASAPAGTLVVVDQFRNIGSLAVRRARAAGLGVAHLPGLAASRAAGLFAGEAKTDERDAAVIARTALGVPDSLSGVPGRGEALEAARALSSQRDHVVACATRDKNRLRAVLLESCPALEAAVDLSDRRWLELLAGFGGAWGIARSGAEGPQAEAAGEAASASTAPPPALVEAENRQVRFLAARISEALDEAGALEAETAALLEGDETYACLLTVPGIGPRTAAQLAVSVDIARFPDHDHLASYCGIAPRVRSSGTSVRSVRASRRGDARLKSLLIFSCNSLVRSSGRYGEYYRACRARGMGHGRALKAVARKRLRAIYAVMRDRVPYRE

SEQ ID NO: 494243 - protein, 370 aa, unidentified
MARLHAVLGELAGDDADEVEVVVGIETDRGPWVGALVAAGYRVLAVNPLQAARFRDRLGVSGAKSDAGDAHVLADMVRTHAHQLRPVAGDSALAEAIKVVARTHKTLIWERTRHTQRLRHALRDYFPAALTAFEDLDAADTLELLAKAPSPDQAARLTIGRISAALRRAHRRDIAGKAAALQSALRTEHLDQPEVVTAAYAASVQALIAVLTVLNQQIKTMEKQVEAHFGQHPAAEIILSQPGLGQVLGARVLAEFGDDPDRYTSAKARKNYAGTSPITRASGKKKTALARFVHNDRLIDALLTQAYCALLRSPGARAYYDRQRARGSSHNAALRQLANRLVGILHGCLKTGTSYDETTAWSHHTENVAA

SEQ ID NO: 494244 - protein, 367 aa, unidentified
MSKAETGRLCVGVDLHKTQFTICALNEDGEYLLEKQYPTKEEGYSEFAREMHRFEEQGCSIELAVETTGNARFFKNRMESEFFAVKVVNTNRFKVITMSTKKTDANDAATLAYYLMKDMLPEAHLCSQTSEEIRRLLKTRSVLVQSMVKIKNQIHGMMLGYGIETKAAQLQSKRKRQELINDLEDHNFSAYTAPSLKVMLKILDDLSAEIKGIEKLLEEMVASNEDVALLMTVPGIGINTATVIAAYTAELERFEGNYKKFASYVGIIPSVHNSNETTHYGRITKHGPQELRTAFVQAALGMIRLTNVSSEWRLIKEYQRRKGDKGSGRAIIALARKITRIVFVMLSKREGFNPELMHCEEAIQQTA

SEQ ID NO: 494245 - protein, 310 aa, unidentified
MEPVFVGIDVSKDRLDVHVRPGGEVFVVSRDGRGLEELVGRLQELGPTLVAVEATGGFETIVAAAVAGAALPLAVVNPAQVRHFAQAVGKRAKTDPIDAGVIAHFAEAVRPVPRTLPDEAARLLAELVGRRRQIIDMIVAERQREKRATNVRVRKSLARHLAMLEKELDAIDQDINTLVRGSPLWRVKEDLLASVPGIGKTLARTLLAELPELGSLDRRHIASLAGLAPYTRQSGRWRGRSMIAGGRSAVRSASFMAALVASRHNPPLKDFYLRLICAGKPKMVALIAVARKLLTILNAILRDNRPWQSA

SEQ ID NO: 494246 - protein, 458 aa, unidentified
MSKGQRKQPKIRFDEGLTQIRHDAAGLDVGASEVWVDVGAENDADPVRRFETFTADLNGMGDWLKSCGITTVAMESTGVYWIPVVQILEAKGIKAILVNAAHVKNVSGRKSDMLDCQWLRTLHCYGLLAASFRPTKDIVVLRSYMRHRLMLIESAAAHVQHMQKAMTQMNMQLQHVISDITGATGMRIIRAIVAGQRDRQQLAAMRDIRTKADEQTIAKALEGDYRPEHVFALQQSLELFDFYQKQIGQTDQQMADHLRRMESKVEHSQQSLGPARRKSRKRRNQPQWNVREEAFRISGVDLTEIDSINESAALSLIAEIGVDMNAWRTEKHFASWLALCPNNKISGGKVLQRRTRKLASRARDILRLCAQSLKDSRSALGAFCRRMCARLGVPKGITATAHKLALLVYRMLKFGRHYVDIGQERYEQMYKERALKHLARKAKDFGFQLVPLPETRVP

SEQ ID NO: 494247 - protein, 325 aa, unidentified
MENIVGIDVGKAKLDVCVLKGEQVMEAQFDNNAKSFGKLRRWLKKNGLKAAAVCLEATGMYGDPVAEYLHESGYTVSIVNPARIKAFADSQLARNKTDKLDARRIAEFCKLHRPAPWTPPDPAIKELRAIVRHLDDLEKMRQQERNRLASGVDSDTVIDNLTAHIHFLDEQMEQVKQRIQDHIDHHPDLKRQQDLLVSIKGIGALTAARLLAEIRFEAFDSPRQIVAYAGLNPRWFTSGSSINKPTRISKMGRASIRAALYYPAISAKRHNPLIKPLCDRMTRDGHSAMSCVVAAMRKLLHLAFGVLKSGLPFDPNFTHIQAQIA

SEQ ID NO: 494248 - protein, 407 aa, unidentified
MNMNAVGIDVSKGKSMVAILRPFGEIVSTPFEVKHTVSGIRSLIEHIKAIDGESRIVMEHTGRYYEPLVRELSQADLFVSAVNPKLIKDFGDNSLRKVKSDKADAVKIARYTLDSWTELRQYSLMDEIRNQLKTMNRQFDFYMKHKTAMKNNLIGVLDQTYPGANTYFDSPAREDGSQKWVDFATTYWHVDCVRKLSLNAFINHYQKWCKRRKYNFSQSKAVEIYEASKEIVSVLPKDDLTELIIKQAVEQLNMASQTVEQLRTMMNDAASKLPEYPVVMAMKGVGKSLGPQLMAEIGDVTRFTHREALTAFAGVDPGKNDSGQRLRKSVRTSKKGSPILRKTLFQVMDSLVKRSPVDDPVYAFMDKKRAQGKPYYVYMTAGANKFLRIYYGRVKEYLSTLTGNGEM

SEQ ID NO: 494249 - protein, 370 aa, unidentified
MLDTTTFIGLDVHARSIKAVSLDVMTGEVRAATFGYDAGAVAEWVRSVDPRARCVYESGVTGFDLQKRLSGLGVDCVVGAVSKMIKPSADRRRKNDRNDAEFLARMLSVGNVVEVWVPDDECEAARDLTRALEDARDDLSRSKQRLSKFLLRHGLVFDERTPTGRRKGNWTRAHWSWIESIRFAERADNDVLAYYVDAVRRAAEEKARLEGLVEAEARKPRWRKRVDSLRCLKGVDTASAADLVFEAGEFSRFRNARSFAAWVGLTPSEHSSGESDRRGAITKAGNKHLRKALVEAAWHYLTCSGRPKDLARGQAPDRGARRHAAKGVRRLVERREALLARGVHGNKANVATARELACWVWAVGLMAEEA

SEQ ID NO: 494250 - protein, 419 aa, unidentified
MKQEAHEEFAAFVGLDWADAKHDVCLQAAGSAKREHFILEHTPEAIEAWVCALRQRFAGKPIALCLELNKGPIVFALRKYDFLVLFPVNPLTLARYREAFTPSRAKDDPTDAELQLELLCIHRDKLQSLTPQSPTMRALEQLVEHRRRVVGDKVRITNRLTSTLKNYFPHVLQWFQDKDTLLFCDFLSRWPTLKAVQLARRSTLETFFREHHVRSADVITQRIDAIKAATPLTTDEGIIAPHALLVQALISQLRVTLHAIQDFDHAIAQRAQSHPDFPLFQTLPGAGPVFAPRLLVAFGEQRERYASAAELQQFAGIAPVTERSGKKSWVHWRFQCPTFLRQTFVEWAAESIRHSFWAQVYYQQQREKGKAHQAAVRALAFKWLRILFRCWQDRTPYDESVYLKALNRRGSALIHNLAQ

SEQ ID NO: 494251 - protein, 408 aa, unidentified
MTDQQRIVYGGVDTHKDFHVAAAVDEVGRILGTETFPATASGYRRLERWLERHGQIAKVGIEGTGCYGLGLTRFLTSDGIEVIEVNRPNRQLRRRRGKSDTVDAEAAARAVLNGEATSIPKAADGIVEAIRALRMVFRSTRNHRTRIANQIRDLLVTAPDQLREVLEPLDTDDRVARAARFRCTGDQADPNEATKIALRTLARQHEALTVDLDALRARLDELTAQANPALRHAVGIGPDVASILLVAAGDNPERLTTNAGFAALCGASPVEASSGKHVSHRLNKGGNRDANHALWRIVMVRMTCHQPTKDYVARRRAEGKSQRFIIRCLKRYVAREVHQLLLHPQLATTGRDLRQARRRLGHTQAHIAEILGCDPSRISELENDRRCAHELNARYRTWIDSQTATCAA

SEQ ID NO: 494252 - protein, 340 aa, unidentified
MNLTTIGIDLAKTSFSLVGMDKHGKVVLRKTLKRAQLLAFVAQCPPCLIGMEACSGAHYWGREFRKLGHEVGIMACKFIAPFRKGGKNDNNDAEAICEAVSRSTIWFVPVKTADQQAALCVHRVRQGLIAERTALINQLRGLLSEFGFVLPKGRYPAQREIPLLLEDADNGLPALARQIILHLWERIKTASEQILAYDRELGKQARHHPVAKRLLTIPGVGEQVASGIVASVPDPTLFKNSRQFAAWLGLVPRQFTTGGNIRLGRITKQGDRYLRMCLVHGARAVIANLKDKQDKVSCWARELITRRGYLRAVVALAARNARLIWTLMVKQENYKVIPVT

SEQ ID NO: 494253 - protein, 358 aa, unidentified
MQIIGCDLHARQQTIAMLDTETGEVVEKILRHEAEKVREFYAALPGPVRVGIEATGSMHWFLKLMEELGIDCQVGHPAKIRAAEPRKQKHDRRDAALQLKLLVENRFPAIWIPSTELRDLRALLLHRHQWVRMRTRVQNTLQALALSHGLRRGSTLWSQAGQQVLTMLPLPPNAAHRRTQLQMLYRRLDRQISKLDERVRDQALRRPGAKLLLTHPGVGAVTALATDVFLGDPGRFTDGKAVASYVGMIPSEHSSGGRQRLGKLSKQGNPVLRFLWGEAAMPAVRLDPNLKHFYRRKLQQKGLGKARVAAARKLGIRLWIMLRDRIDYQEFCRRGQLRQKSGGAHAGMPARNSGPAVQ

SEQ ID NO: 494254 - protein, 304 aa, unidentified
MDVHEKSWNVSIFFEDMFIRSFTQQPSAEALMLLLKRDYPRANYLCGYESGYCGFSIQRRLNTLGIACQVMHAGDIPQTNKEKLSKRDPVDSKKIGEALATRKAKPIYIPDEESEQDRGLVRYRDRLQKDITRCKNRIRSTLYEFGIILPDAFKKGWSNRFIQWLNETEQIIGSTRTTLNHMIEQMVTLRGLLLKVNRDIRKLQNSPRYKQRVQYLTSISGIGPLSAMIILTELIDIRRFSSFRNLNSYVGFYPMEHSTSDKEHKGGIMIRHNKHLRKLLVEDAWVAMRHDPALTLASISGPLE

SEQ ID NO: 494255 - protein, 405 aa, unidentified
MAAVMIGVDPHKGSHTAVAIGADEVPVGLVRVRACAAQAERLLTWAKSWPERIWAVEGAAGLGHLLAQQLVAAGERVLDVQPKLAARVRLLATGAVNKNDPGDARSVAVAALRSAACLPVRPDDHAAVLKIWARRHRDLSRARTQVACRLHAVLCELVPGGLSKEICAAQAAAILDQAEPGGAVRQARLELAAEFTADMRRIDVQLRETRKKLAVAVRASGSTVTEVFGVGPFIAATMIGDVRDVSRFASRDRFAACDGTAPIEVSSGNRKVHRLSLRGNRRLNHAIHMAAITQIRYQHSDGRACYDKKIAEGKTPKEALRALKRQISDAIYQHLKADAARAAAAGAQGPGGQPGNDSAASAAGSHPGRQLFGQATPGPVTTLRHPADQQKRASSRARKKTARTS

SEQ ID NO: 494256 - protein, 384 aa, unidentified
MPSVSERPEAPTAIQTHLAASFVSLELSRSIWLITSLSPASGEKMSKHSVRAGDVAALLARFSELKRKASERTGKSFPIVVIQEAGLDGFWLHRVLQSEGVESHVVDPSSIATSRRRRRAKTDRIDGEALLRALLAYKRGEPRVCAMVKAPTPEEEDRRRLCRERKVLIAERVKHVNRVKGLLFSQGISGYEPLRRDRRQRLDELTTGDGRPLPVHLKTQIRRELDRLELLLDQIKQAEAERDALLAAPAPTGRMLLEFKGIGAELAAVLWLEALFRHFDNRRQLASYAGLAPTPWQSGSVDHEQGVSKAGNRRLRTSLIQLAWLWLRHQPQSALTLWFKERVSGNGGHFKKSTIVALARKLLVALWKYVTAGVVIDGAVMKDA

SEQ ID NO: 494257 - protein, 332 aa, unidentified
MPQYVGLDVHKKTCHATVMDERGKIVKQEKFLNEREEFERVFDGIDDAEVAMEASYCWQPAHELLESMGYEVKLAHPLKTRIIADAKIKTDASDSEALAHLLRTDLLPTSHVPSKEARELRELVRLRTYLVRERARFKNRIRAEFARRGIRVEESPFTKRGMTRTRELGVDSINECVEVIAALDERVNKVSKELERRAKVSDDAKLLMTIPGVGYFSALAVLAEISDISRFGDAEKLCSYAGLVPSTRQSGSTVIRGHITKQGSRLLRWVLQECMWMHLKNADDTHLARFFYRIARRKGRKIAAVATARKLLKVMYWMLKDKEVFHPNGFHA

SEQ ID NO: 494258 - protein, 418 aa, unidentified
MSFILAALRVLHGFCVFVRRASERLRFERSGVSARLVCLKTSILWDDGGSVTNRPRHDWKPVRVLAVRPRASSALQPYLPYPNSCQGTSPHQQGRGTKVSEPYYVGIDVSIDRLDVAIRPGGRGFCVTNDAAGWAELVARLPQGAIAAIGLEPSGGYERGIVRVLLAAGFSVRRINPNKLRQFARAAGALAKNDRIDARLIADYVAVIPTRVVERNPALEQLAETVTMRRQLCDEHIAVESQASHLEDALLQRIAKRRLTRIKADIVLLDKRLAELVAAQPDLVQRFRLLCSMPGVGATLAYTLLALLPELGQIGRKQIAALVGLAPYAFDSGRFRGQRHIYGGRTAVRNTLYMPALAAFRFNPALRTFHHRLVAAGKKPKVAIVAVMRKMLTTLNAMLRDGNSWTDGHTGRHTVLAI

SEQ ID NO: 494259 - protein, 407 aa, unidentified
MGITCGIDWSESHHDVALIDEHGTVVARTRIDTGATGFHILLALIAEHGGSVDDTPIALETDKNLLVVALAKAGFTVYPINPRAVARYRERYGQAGGKSDPGDAAVLAHILRTDRHLHRPLPAVSEEGRAVKALARQHQEAIWALHQTVSRLRSVLLEFYPQALQAFPNLKHKAALTVLAAAPTPAAGQRLTRGRVVALLRRSGRGNHPALVEQILTDLHTPALGQPPRVEEAYGHTVRGLVAIVIAMGQAVDDLETELAREFDQHPQAAILRSVPGLGPVLAARVLGEIGDDPARFDNPQGLRAYAGTAPVTIASGRLRYVKARKVRNKRFGDACHWWAYTMLTKSAGARAHYDRRRAAGDHHNAALRNLANKLLGRLWWCLVNNQPWDEHGAWPDHGHTENPTAA

SEQ ID NO: 494260 - protein, 429 aa, unidentified
MRDTFVFETALVVGVDPHRESLDAVGIRFPEVIVLDEVFDNTQAGHQSLWSKAQDLAVELGLTLVFGLEDGSNYGRSLSRYLVAAGSRVKEVNPLKTNRQRDFYGEDKTNHLDALATAAVVFRAYERLPDMVAVHEAVQATYDLSRYREKLVKQQTASINRLHSYLANQYPAYKDYFNEVNGVTALDFWATYPTTAHLRGASIEELAALFYEKSNHCLSAAACSDKAQQILTSLDDAPDHALDLLTKVQGEIISDLARRLLALKRSIKRMESRLAETLPQTGQKLESIEGMGTVLAAVFVGETRGTARFDYDQNKFARYNGSGPATKGTGPNLRQVQNRWCNRRLKTALVRLALGACHREPLSAVYYQACLDRGLQPHQARIRLMRRLSDVIFAMMRDKTAYDPEIHRLKQERNKTKKGESVAPASDDG

SEQ ID NO: 494261 - protein, 297 aa, unidentified
MEITTIGIDLAKNVFQVHGVDRHGKAVLRRQLRRDQVAPFSANLSACLIGMEACGSAHYWARKLQAMGHAVKLMAPQFVKPYVKSNKNDAADAEAICEAVGRPSMRFVPIKNIEQQSVLSLHRVRQGFVKARTAQANQIRGLLGEFGLIVPQGIAHIAQRVPELIEDACNELPGAFRLLIARLLDHLQMLHRQVDEIEDQIKAWHRNNEASQRLEKVPGIGPLTATALVATIGDAKNFGNGRQLAAWLGLVPRQHSSGGRQNLLGMSKRGDAYLRTMLIDPASFPRTADHAAIIAAS

SEQ ID NO: 494262 - protein, 311 aa, unidentified
MEHFVGIDISKRHFDLHLTPEDQSHPFDNSTSGITHAVKLLIELRPQLIVMEATGGYETNLAVTLHKAALPVVVVNPRQIRHFAKAVGQLAKTDKIDAQIIARFAAQVRPPLRDFLDDKARKLKALVARKNQLVAMHVAERNRLEHAVDKAIVRSIKRSLKNLQRQIEQLQQHLVDAIAQDDELQHKADLLDSAPGIGPATAALLVAHMPELGQLNRRQIAALAGVAPMNRDSGAYKGKRMTGGGRSQVRAGLYMPVVSAVRWNPTIRTFYQRLVAKGKTKMTALVAAMRKLLTILNLMIAKNEPWNPNYA

SEQ ID NO: 494263 - protein, 320 aa, unidentified
MNLAILGIDIAKATFHAALLHNGKLYHHRFDNTQSGFAQLQAWLAKHRVERLHACMEATACYGDDLALFLYKASHTVSIVNPARINGFAQSELQRNKTDKLDAAIIARFCQQKQPEAWTPPPPEIQQLQALVRRLEALQQMRQQEVNRLEQAGKQPLIRESLNTIIATLDAEMARLRQLIKDHIDRHPHLKRDRDLLLSIPGIGETTAAWLLSEVQVSAYQSARQVAAHAGLTPRHHQSGTSVHGPTHLSKTGNARLRRAMYMPAVVAKQYNPIIRAFCQRLQQRGKRPMEIIGAAMRKLLHIVYGVLKSGKAFDPSFAS

SEQ ID NO: 494264 - protein, 344 aa, unidentified
MDHYAGIDVSLECSSVCVVDANGKIVREVKVASEPEALIDWFRSLGLDLARIGLEAGPLSQWLYAAMKKAGLAVELLETRHASDAFKAMPVKSDRNDARNIAQLMRLGWFRPVHCKSMSAQEVRATLTARKLIQTKLRDIENSLRGILRGFGLKVGKTTTRSFAARIRELVAGHPALEAIAVATLAVHTVLAREFNGFEKRVRAMSLLDAKARLLMSTPAVGPIISLTYASAIDDPSRFTSSKRAGPLFGLTPKKYQSGETDYSGRISKNGDASVREALYEAAHIILTKPIKGCAQLKSWAMRIARRAGMNKAKVALARKLAVIMLRMLKDNVPFNSTAKAIAA

SEQ ID NO: 494265 - protein, 388 aa, unidentified
MSQSFDASKSLTAFEQDSTLVAVIEMSQSKWLVAAVIPGVERRPLKKLDADAGALLKLLRRWREEARKAGRTIRRIVCAYEAGRDGFWLARWLQARAIETYVIHAASIAVSREHRRAKSDRIDTELLMRSFLGWLRGEKRHCSMVTIPTMAEEDARRPSRERESLVSEQTRIVNRFKAVLALFGIGGFNPKLRNAAQKLKTLCTVEGTPLPENAHAELRHDLERLRLVRDQIRAIESERLRRLALAPMAATGPHAMVRLIARVFGVGIETADMLVNEALARNLRDRRAVARYAGLTGAPDESGQKRRERGLAKGGNARVRRAMIQLAWGHLVHQQNSPLAAWYRKRTADARGGTRKTMVVALARKLLIALWRLATSGVVPEGMALRAA

SEQ ID NO: 494266 - protein, 472 aa, unidentified
MEKEVFLGIDVSKGYADFIILNSKNEEMEALFQLDDTPKGHDELTKILSSFLGKNPHAEICCGVESTGGYEINWYRHLLSLSKTMPVKVAMLNPAGVKGVDKSLLRRTVTDGVSAENIAIYLMNYPEKVIYGKPEQLSFLKDGRSHQTYIKMLIKQKVQLGNQLDKLLYQHFSEMLTYCRHGVPTWLLRVLIKYLTAEHVKKAGIDKLAKITGVSKERAKSLIEKAKQNTQNTSDHIGYIIQNSCKEILHKEELIEENKLYLRNQFADDFFVQLLVSVKGIGIDSAIMILLEIEDINRFAMVKKLTSYFGVNPVYRQSGDGTWGIHLSKKGRGVMRATLYMVCLSAIRSSEPFKKKYTTLRAEGRCHLDVMGILMHKMLRTIYGILKNQIPYSPDIDLKNQQKASQVQGDKQEQKKKQIKEERKKKRRYQNQDMDESPISRRMVKRIKELEQPQDTIKSLCTGSTPVPAANI

SEQ ID NO: 494267 - protein, 350 aa, unidentified
MKILALDLGKYKTVGCAYEGASGQHRFQASFTTPTGLAQLVREVKPDRVVIEVCNIAGWVCDLLRGMGVEVQVANTSEDAWRWRKVKKKNDRCDALKIAQLSAVNQLREVHIPNIEVRQWRALIAFRQQLVRRRGKVKNHIRDLLVAEGQILPRGAKCWTQLGLAHLKALAKPFSEIGLNELWRGQLDIELRQLQELQRELEQVEEKLDRIAKADPRTALLRTIPGVGPRLSEAIVALLDQPERFHKAREVSAYVGMVPKELDSGETVRRGRITKHGSRLVRSLLVEVAWAGLRYNPWVRETFQRISGGKKSRKKIAIVAVGRRLLVRCWAMLRDGTSWRPPLTTHFAKS

SEQ ID NO: 494268 - protein, 339 aa, unidentified
MEFKRIAVDTSKSVFTLHGVDEHGRPVLRQDLTRARFEIETFLGKSSPTEIVLEACGSSHHWGRVAQALGHTVRLIPPQYVKPFVKRGKNNRNDAEAIGEAASRPTMRCVPVKSAETQAEAMDLSARDLLVRQRTQLVNAVRGHAAEFGVIAAKGIAQVEPLLKRVAASDMPQAAKETLAQRGRVIAQLDAQLAEIGQRLAAQHKANPVSQRLAAIPGVGPLTALTVAMKVDAGQFESARHFAAWLGLTPKERSTGSRQSLGGISRAGNERLRQLLVVGAMAVIRHAKPGSKTASPWLLQLLERRPRKVAAVALANKMARTLWAMMANDTAYRRTPQAT

SEQ ID NO: 494269 - protein, 383 aa, unidentified
MQTIQETLQSQGTTDHNTMYIAFELSNSTWRMAFSDGNKKRHVTIKARDLKQLSVEIDKAKRRFHLEDKIQIKSCYEAGRDGFWIHRYLLHKGIDNLVVDSSSIEVSRRKRRAKSDRLDAGNLLRLLMRYHGNERQVWKVVTAPTVEEEDARHLHREIETLLRERTRYRNRIKALLVQHGLDVKNPSRKNFLKVLNTLCSWDGQSLPESMKGRVVREYERLRMIEDHIKLLKKEREQKVESKETASLRQVAQLRELSGIGANSSWVFVMEFFGWRKFRNRREVAALAGLTPTPYDSGTSQREQGISKAGNKRIRTMAVEIGWCWLRFQPQSKLSRWFNERFTSGGKRMRRIGIVALARKLLISLWRYLEHGVIPEGATVKSSS

SEQ ID NO: 494270 - protein, 316 aa, unidentified
MSKMMIGIDVAKEWVDIAIAGASRVRRIENSEKAIDAWLAEIGPGSIGLVAFEPTGGYERVVRRCLNRAKADFAQVHPNEVVAFRRRRGIKAKTDRIDARLLADFASEELTRRGLAAVPEADELLRELTARRRQLQALLHAETCRRDVADSAVVRKSLRTIAVAVERSLAVVDAAIAERIAGSAHAEVRRRLQTFCGVGPVIAETLIAELPELGHLSGKQIAALCGLAPHRRDSGKRRGHAATGHGRPGVRKVIFNGARCAIQFNPVMKAFYRHLVDDNHRLGKVALTAVMRKILVTLNAMVRDGSDWKHAAHTAG

SEQ ID NO: 494271 - protein, 496 aa, unidentified
MKAKACKAKGKHSHSSKRGAEIAARRGAEGMEIVNPHAGGIDCGAQEHYVAVPPQSVEPGEPVVRCFSAFTEGLDALVEWLKACGVTTVAIESTGVYWIALCQKLEAAGIEVYLVNARHVRHVPGRKTDVKDCQWLQRLHSFGLLSASFRPEDMICRLRSLQRHRLNLVSTAGAEIQHMQKALQQMNLHLHHVVSDITGVSGLRIIEAILAGQRDAVQLAKLRDHRVYKSTLAQMQAALVGDYRPEHLFVLGQSLQAYRFYQARTQECDLEIESQLQQLAQRFESSSALGAELSQPEALDEADAPSQNPQPAKRKVKRKPQANEPKIDLADYLRRICGVDLTQVVGLNVLSVLLIVSEIGVDMSKWRSAKAFSAWLGLCPRNKISGRKVLDTRTCKVISRVATTLRLAAQSVGRTDTALGIFYRRKKGHLGPAKATTATARKLACLVYHLLKYKEQYREPDPNTYQLKVQKSILVKIQKQAATLGFKLLPTALVPA

SEQ ID NO: 494272 - protein, 337 aa, unidentified
MKITTIGLDLAKSVFHVVCFDERHQEVSKRMLRRGQVREYFAQREPCRVAMEACAGAHCWGRELEKLGHTVKLIPPQFVKPYVKGNKNDYNDARAIAEAATRPGMRFVSIKTVEQQDIQALHRLREQRVKERTALCNQLRALVAEYGIVMNKGVSTVRRGIPRLLEDAENELSAAFRALLARGYEQLIEIQAHIDYYTHRVDAHSRQNAQVRRLQTLPGYGPIVASVFASVVGDGSAFKRGRDVSASLGLVPRQHSSGGKEVLLGISKRGDKYLRSLLIHGARSVVLHAKHKEDALSRWVNRLRERRGTNKAAVALANKLARMGWALLRNETVYCPA

SEQ ID NO: 494273 - protein, 455 aa, unidentified
MPKTTTDNRPELRPVNFAAAAIDIGSKMHMAAVNPACADIPVRMFGTFTSDLYDLADWFKACGVTSVAMESTGVYWIPVYEILEQRGFDVILVNARFAKNVPGRKTDVSDAAWLRQLHSYGLLRGSFRPDAEIATLRAYLRQRERLVEYAAAHIQHMQKALMEMNLQLHHVVSDITGATGMRIIRAIVGGERNPDVLATYRDVRCHSSVETIRAALVGNDRDEHVFALAQSLELYDVYQAKMLDCDRRLEVLIAALSSKGAKPVGKLSKPRIKTKQVNTPTFDVRTALYGVLGVDLTEIHGLGPSLALKLIGECGTDLKAWPSAKHFTSWLCLAPGNKISGGKVLSSRTRRSSSRVAALLRLAATTVGRSDTALGAFYRRLSSRAGKAKAVTATARKIAVLFYNTLRHGMSYKDPGADHYEQQYRSRVLANLQRRAKSLGFVLQAIPGDAEPAVS

SEQ ID NO: 494274 - protein, 318 aa, unidentified
MDKSKFVGIDIAKASMEVAVHEGKTCDTYTNDENGLAKLIVEMKRLSPDLIVMESTGSYELPVAAELQSRGFHVAVMNPRLIRDFARSVGILAKTDEVDAMVIARYAATIQPSPRALPDEDTRKLGIIMARRRQVISILAAEKNRLYQADPLVKYRIEDHIKWLERELDDINKQLKGLVGENPEWKEKNDILRSVPGVGPNLAITLLADLPELGMLDRKQIAALSGLAPFNRDSGTMRGKRLIWGGRETVRKAVYMAAFVATRYNPVLKGFFQRLIEVGKPYKVAMVACMRKLLCILNSMLKTRTRWDRQPQLIGQLN

SEQ ID NO: 494275 - protein, 327 aa, unidentified
MAKRSTICAGIDTGKWKLDVAVDCSSEQLQVDNTAEGYKALLNWLRRHRVKRVGIEASGGYEQAVVAELRRKRFVVVVFQPAQVRAYAKFRLQRAKNDKIDAALIAACTAAVKTIHDPPDARLLPFAEHLTMIDQIGEDIARLKNRLETCRNPQFRQTWKEDIARLEKREKIELKALVAAIRKHGDLATRLDLIYSVDGIGLPTAVAILVRMPEIGRITREQAAALAGLAPYDDDSGTQVGARHIEGGRKRLRLALYTAALPASFRWNPQLIALYQRLTAAGKEHKRALIACARKLLIFANTVVARGKPWDRERPAAASTTVVPQAN

SEQ ID NO: 494276 - protein, 332 aa, unidentified
MQGRAPTAWASPGARPLTITPVVVGIDVAQAELVVAVRPTRDAWTVPNNEGGVADVVRRLRPLHPALVVLEATGGYERLVVATLAAAGFPLVVANPRQVRDFARATGELAKTDRVDAQTLALFGERLHPEPRPLPDAATEALDAVLTRRRQLGDMLTAERNRLAHASETVRGSLREHIRWLERRLSDLDRDLDQMIHASAVWRAKDNLLQSAPGVGPVVSRTLLGALPELGQLTHKQIAALAGVAPFARDSGTWRGQRHVRGGRAPVRRALYMAALVATRHNPIIKDFYQRLLAVGQPKKVALTACMRKLLTILNAMVRSNTVWRRTTAQTA

SEQ ID NO: 494277 - protein, 520 aa, unidentified
MATRRTRRRSSPRRPSASVGKPRGVLHPRVQQVGPEHFGIVCFDCAKARSKFLLADFYGRVLLPPTTVAHNRPDLDAAVAQVRQAFATHQLQDGLVAIERTGRYHRLVQRTFAAAGFETRILHPFVTKQYRQPVDPGNKTDDTDLAAIHRATVTGCALREATRDEAWTTLQLLIRHRRDLVGKGAALNCQIRDHLEAALPGYAACFDKLWESAIPWHLLRHFPTAAQLRTAGLTTLCHSLRQAGIRFQQRTVQAVLDWAERAAPGDVAAGQHRRIALALYDDRQRKTQEIQALERDIAGRLVQTPYVLLLSFPGINVVSAADYGGEAGPMEHYANAKSITGRAGLRPSRYQSDAVDKANGPLVRHCNRALRAALLSIADNLIVCNHHFQHLAMHWARQGKDPRDIRVRVAHRFCRIAFQMVAGRQVFRHPCLQGRHYILDKLVAFHREHDTPMPEVLQDLQAAIGQLPPREHAAEARPLHEELQRIQHGRRRGPQLLGDILPIVLARLGVGAVQSTESGE

SEQ ID NO: 494278 - protein, 376 aa, unidentified
MPDVISTAPADVRLWVALDVHKFSIVAATLPPVGGKPELARIETTPKAIRTFIAKLGGPEGLAVSYEAGPGGFALWRLLTGMGVACDVIAPSLVPVRAGDRVKTDRRDAKKLVNLFRAGLLRFCQPPSEETEGLRDLLRCRDDIRCARTAARHRVVKQLGRHHRIYREGTTAWTKMHVAWVKAQRLDDPLAQLALEQMIIHLEAIDTQLATLDARLEEIARDQRWAGQVQALVAFRGIKTLTALGLIAEIGDFARFSNPGELASWLGIVPSEYSSGDSQHRGHITKTGNRHARRLLVEAAWHYRHAPRRPSTGPEPSARAWQAQVRLNHRYRHLAQQGKRPTVITVAIARELAGFLWAELIDQPAREQQQEALTAA

SEQ ID NO: 494279 - protein, 451 aa, unidentified
MEKKKMELDIINPNCAGIDIGSKSHYVAVGQALEDVKEFRVYADDLTDICLHLKSYGITSVAMESTGNYWQNLYVELERHGMEVTLCNGKFTKHAKGKKTDVKDCRWIQKLHALGLLTSSFLPDQTTEELRTFCRQRNNMIDLAAQASHKMQKYLKLLNFRLDVVVNDICGLTGLTIIADICKGNLDPISLAKHRNGNCKKTEEEIAKALKGNNRTDFLFGLKQEYESYLFYQRQIESCDKQINTFLKHQINTDPQKNKLRTDDKKHKRVNKNALKGIDLNQASFQYFGGVDLMAIEGLSHATVLTIMSEVGPEGFEKFKTAKEFTSWLRLAPNNKISGGKILSSKTPKGSNRLKIALRHAANAIGNLKETHLSDFFRRVAYRKGRATAVSATARKLGVIIWTMITNKVAYKPPTEYLFIDQKRKLKLIQRMKKNIAKFEIKPEDFGFAST

SEQ ID NO: 494280 - protein, 372 aa, unidentified
MNYNTVYVGMDVHKESFTLCSCKYEDEKASHYQRTPASYKNVLRYLAFLRTIYGEYTRFVCGYEAGCLGYSLYHQLENFNVECVILAPTTMLEQRSKRRIKTDKRDAEIIARSLAQHNYSPVHIPTETDNQTKEFIRMRDDHKAELKKIKQQILSFCLRQGYQYDGSGNWTAKHVKWLRSLKPAGLYKEILDEYLLTYTILTDKLNRLDQRIEELASKEEYKESVSKLTCFLGIKTHTALSVIVEVGDFQRFVSARKFAGYLGLVPGQHSSGDDRNGLGITKAGNTHVRRLLVESAQSYTRGKIGYKSRVLRSRQAGNSPQIINYADRANERLRRRYYKMVLKDGKKYNIAKTAIARELACFIWGMMTDNIY

SEQ ID NO: 494281 - protein, 354 aa, unidentified
MIIIGADYHPGFQQIAFVDTDTGEFQERRLQHREEAEKFYRDLAAQGMQVRVGMEASGQARWFERLLSELHFELWIGDAAEMRTKRVGKQKTDRQDAQLILQWMLEDRFPKIWVPSGENRDLRQLLWHRHRMVQARTRIMNQLQAVALNEGLRCKKRLWREAGREQLESFALAPWANRRRHDLLELLDRLTPAIAELTQAIEQEVEKCPAARRLQTHPGVGALTGLAFVLIIGRAERFQCGKQIASYLGLVPLEDSSGQRRRLGHITKQGNSLLRFLLVEAAQVTVRSDPQWRSKYFHLAMRRGRKIAKVAMARKLAVRLDWMWRKGWDYEQWKNFGSHAGQPGNRDGVQSITE

SEQ ID NO: 494282 - protein, 339 aa, unidentified
MELYAGLDLHSRNTYIGIMDKTFNRVFKKRVPNHLEKILQTLDPFRDQIKGFVVESTYNWYWLVDGLMDAGYSSAHLANPSAIKQYEGLKHSDDQHDAFFLAQLLILGILPQGYIYPKKDRPVRDLARKRMFLVQHKTAHILSLQSLIQRNCAMKVSASDMRHLTVKELEEWLEEEYLVLSAQANLDSINFLKQKIKVLEKAIRKKVKLKKAFHNLKTVPGIGDILALTIMLEVGDINRFPEVGNFTSYCRCVPSRRLSDGKSKGSGNRKNGNRYLSWAFTEAVHLGRRYNERFRKYYNRKVAQANTSLATKALGNKLARICYYIMRDQVPFREELFCH

SEQ ID NO: 494283 - protein, 353 aa, unidentified
MVMLGIDVHKDTHTAVAVDEVGRQLGQRMVRATDAGHRQLVRWARTQWPGEPGQWTWAVEDCRHVSGRLERALLAAGEKVVRVPPKLMAGAREAARTRGKSDPIDALAIARAALREPDLPVAEHDGPSRELKLLVDHREDLVGERTRMQNRLRWHLHELDPELDVPARGLDRLTVLDRLTGWLAEQPVTVVVRLATELLGDIRASTMRINALEREIAERVAQLAPALLALPGCGALTAAKIVAETANVSRFRSEACFAMHAGVAPIPASSGRTQRYRLARGGNRQLNAALHRIAVTQIRLPDSLGQVYYQRRRATGDTAMEALRVLKRRLARVVFNLLQPTTTTATGALPSAA

SEQ ID NO: 494284 - protein, 343 aa, unidentified
MTLFVGLDVSLEKTAVCMISEHGKIVKEAQVASEPEALLRWINDQDGAIAAVGLEADPLSQWLHRGLSDAGQPVVLMETRQVKGALKAMPIKTDRRDAEGIARLLHLGWFRPVHCKSVSAQEVRAVLSARKAVQQGFITLEMSLRGLLRNFCLKVGTISRGRFEQRIRELAAGNPMLEAAAEPMLSARSALRRELAGPERHVRQLAQEDPVCRRLMSMPGIGAVVALTYRSAVDDPDRFTSSKKVGPWVGLTPSRNQSGERDISGGLTKAGDVNLRRALWQAATVMMHRGRASWLRTWAAKLARRRGAKRAMVALARRIAVILHRMWKDDIDFRFDTPVIHAD

SEQ ID NO: 494285 - protein, 433 aa, unidentified
MSKFFYSPTVGIDISADFSWVAILAPNGETYKKAFKINHDVNGFDHLINEIKKVEEEFNTKTGIFMESTGVYHLSLFHYLNKNFDNTFVINPLVTNCNKNGDIRKVKNDKKDALSIAKIGKFQDIKLSQSVSLDIFLLRSLIREYYKLTDNCSDFKKKLSADLRVTFPNYHTIFSDTTSNSSIAILNEYPTPQSILEAPKEVIIDILLSKSRKGLNWSEKIYLKLIAAAKDAIIIGLPLSGLSFKITSSITFIETFQQQISKLLKEIENLINATDFPDQIKKNIDLVDSIPGIGSLTAITLIAEIGDIDGFIKPKHLVAFFGIDCSVNESGKFKGNKNKISKRGTRIGRRALYAVALASIRSSRNGIPINKVLLEYFQTNLKGKKAKVALVAIMHKILNYIFAVLRNQTPFEQRDPKLHKQMFLENKALNKAA

SEQ ID NO: 494286 - protein, 454 aa, unidentified
MSTRVLSFEDWSISTTPCLRRVRTVTSRGERVQVLGVGIDWAEEFHLVALGRPAEGVFEVARVEHTPTAVAALITRVLGLEPDPAEVRVVIETRHGLLVEALVDAGVTVLPVNPDLVARRRGPARKKDDAKDARIACLLALDRFTDLRALVPHGELAGELRAIARDDVRAARDERRLLNRLRADLIATFPAALVIAGDDLGAPVMLKLLERWPTAAELAAADRDQVEAFARAARHGWPDRFAGRVADALAAEHFQARDYLVRAKAATIRLAATQLLLIRDQRRAWQHRMGELLLGAPRYGRNKQPGDDRGPAVPGGEVYLSFPGLGDRLAARIAGEIGDAIGQFTTPNALQCYAGKAPVTRRSGKSELVVATRLACNRFLADAVQHWAFTSLKNSGWAREFYDTQRHRGKTHNAALRALGNRWLEVLWHCLTRGVPYDENVHVANRDRALSKTA

SEQ ID NO: 494287 - protein, 330 aa, unidentified
MQGKVMSEHSAASQVSVGIDVCKAWLDVHIRPANTVLQVANTKKGHKQLVAALKGLAVRIVVIEATGKYHRSAHRTLHEAGYPVVVVNPLRARLFAESLGALAKTDKADARMLALFGEMAALVPTPPLPENLENLREIVRTREAAISTRIALGNQLDTLTLPCAVQAVKAQIKAAERTTDDLEAEAIKCVKADPAFARRLAILTSIPGVGDVTACMLIANLPELGSIDGKQAGMLAGLAPIACDSGQRNGKRHIRGGRQRVRTGTYMAAQSAARFNPDLKRFYNRLVENGKAKKLALTAVMRKIIVLANTLLRENRPWTQNPPIAKPLHA

SEQ ID NO: 494288 - protein, 389 aa, unidentified
MYSYFVGIDIAKNTHWASCLSSDGEIILEPFSFSNDNSGFQKFISKLESLDKTKILIGLESTAHYGENIISYLFNLDYNIGLINPIQTANLRRSNIWKTKNDKVDTKIIIKALTLGNYSLITSRDINNLKLKGLCRSRRNLVTMRSKAKIQLVSYLDQIFPELAQFFKGNLHLNVSYQLLKEYSSPKQISSLHLTKLSNILHDNSHGRYNKQDAIRLRELAKNSVGIDNPSLSLQIKHSILQIELYNEQIAEVEALYKQILDEMNTPILSIPGMSYNQAAVIIGCIGDINRFEHSCQLLAYAGLDPSVIQSGNFQARSTRMSKRGSGMLRYSLVYSAHNVVKNNKTFRDYYELKRSQGKSHYCALGHVAHKLVRIIFKMLKDNVAFNLD

SEQ ID NO: 494289 - protein, 373 aa, unidentified
MKTTITHVAMDTHKKQHQVAWVHPATGEIQEFGVPNTVRDIERMVKKIRKQATGEIHICYEAGLCGFVLQRRLEKLGCVAQVIAPSLVWRKPGDRVKTDRRDAKKLLTQFLAGQLTEVWVPDPEQEADRELTRCRESSQRDLKQARQRLNSLVVRHGYIYQEGNLWTDRHHRWLKSLTIEPARLRTVFDEYRSEIEHCVQRLESLDQQVQSLAQSERHRSAVGVLRCLWGIDTLTAITLLTEIFEFGRFDSPRALMAYLGVTPSEDSSGERRRPGAITKTGNRRVRRILTEAAWHYRHPYAVGKALKLRRKDQPAWAVDLADRAAKRLYRRYRHLTERGKAAPVAIIAVVRELAGFVWAMLRPLQQQTQSSSP

SEQ ID NO: 494290 - protein, 344 aa, unidentified
MTYYAGIDVSLRSVNICIVDDDGERVAEAKLSSDVQEIVAYLDELEYSIDIVGLEAGTLSQYLTYGLQAADFNVVCMEAQQVKAALSAMRNKTDKHDARGIAQLLRSGWYSQVHIKSMESHHIRMLLTSRRTVLDKCIDLENEIRGLFKIFGIKLPPKLGHGSFDRTVRAVIEADEKLSHALLPMLDARLVLYETFRVLDNRTRHLAWGDDICERLMTAPGVGYVTALTFKSGVDDPSRFKRSRTVAAHFGLTPRRSQSGEFDFDGRISKAGDAEVRRTLYVAANSVLTRSSRWSSLKAWGMKLKKNRGHKKAVVAVARKLAVILHRLWIDETQFQWGMERVRS

SEQ ID NO: 494291 - protein, 340 aa, unidentified
MPITTLGIDLAKSVFQLHGVDQAGRIIIRKKLRRNAVLDFLRGLESCLVGMEACASAHYWAREITALGHEVKLMPPAYVKPYVKRQKNDIADAEAICEAVTRPTMRFVPVKSADRQAVLMLHRTRDLLMRQRTMLLNAVRGHLAGFGIIAPQGARKALEMIDQLRESEHPALPGIARSVVLSLGTQLDELARDIHAMERRLLAWHRQDAASQRLETIPGVGIITATALAAGIPDPSVFRSGRQFVAFHGLTPRQNSSGGKERLGRISKMGDGYLRRLLVVGATSVIRRAETNPSATGAWVRSLLTRKPTRVATVAMANRSARIAWAVLAREVTYTSPAMA

SEQ ID NO: 494292 - protein, 338 aa, unidentified
MKVHILGIDLAKNVFQLHGVDRKGRPVLVRRVRREQLLKVLGELEPCLIGIEASTGAFYWQRQFEKLGHAVKIMAPQYVKPFVRRQKNDSNDAEAICTAVQQRNMRFVPKKTLEQQDIQALHRARQRLVNHRTALISQMRGLLLDRGIAIAVSATRARRLIPKILSAANDELTEMMREIVSSLYAFMLQIDERIKAFDRKIAEIFKASAVCQRIAKIRGIGPKTATAMIAAIGNGSDFKNGRHLAAWLGLVPRQHSSGDRTMMMGITKRGSQHLRTLLVHGARAVVRTAVRKTDSRSVWVNELRQRRGYNRATVAVANKNARVIWAVLTSGEPYRAAA

SEQ ID NO: 494293 - protein, 347 aa, unidentified
MKFYNKQHKYYCGIDLHARKKYICIMNQAGKILFHKNVETNPEVLFRVIFPYLDDIVIGVECMFAWYWIADVCEEHQIPFVLGHALYMKAIHGGKTKNDKIDSKKIAALLRGGNFPLAYAYPKKLRSTRDLLRRRMYLVHKRAELLAHIINTNTQYNLPLFEKRIKHKSNRAGVPDRFTDPSVKKTIEIDLSLIDVYDELIRDVELYLEKHAKAHDANTFYRLRSVPGIGKTLALVIIYEINDIHRFNRVQNFASYARLIRPQKESNGKFAGKGNKKIGNHHLKWAISEAVVLMKRTSEDAKKYLARLERKHSKGKALGIFSHKLGRAIYFMLKNNQAFDMNKFIQS

SEQ ID NO: 494294 - protein, 409 aa, unidentified
MERQLERCGGLDVHKETVAACVRVGGRTGKAEQHVQTFGTTVGDLLVLRDWLAAHGVTHVAMESTGVYWKPVFYALESDFTCLLVNAAHIKQVPGRKTDVKDCVWIAQLLEHGLLRGSFVPPAPIRDLRDLTRYRKALIHDRTRVANRLHKALEEAGMKLASVASDILGVSGRAMLAALVQGTTDPAVLADLARGRLRGKLPALRQALASRFRPHHAFVLGQLLAHLDYLEEAITTLSAEIERVMAPWAEPLRRLDTIPGINQRTAEVILAEVGADMRVFPSARHLASWAALCPGHHESGGKHKSGKTRKGNRWLRTALIEAAAGASRAKNSTLQARFRRVLRRRGPKKAVVAVAHALIRVVYHVLADGTVYREAGANSYDRHHSQRVTRRALQTLERQGYRVTLEPAA

SEQ ID NO: 494295 - protein, 405 aa, unidentified
MDITPIHRRVIGLDVHQNKITACALIEQADGSVAVQQREFGGFKRDRRALAAWVHGLAPDIVVMESTGIYWKSPYAALEKVGIAAWVVNARHVKNVPGRKTDISDAQWLATLARAGLVRASFIPPAEIRHLRLIARQRQKLGGMLAAEKNRLHKVLADAGIRLNVLLSDLHGQSARAMVKALLGDEPIHAILERAGRLRASREDLFEALQPEELSAKHRFVLNEIMAHIDYLEATMARFEQQLLVGLAPWEPQMRLLETVPGIDRLGAARLLVEIGTDMDSFGSAQRLASWVGICPGNNESAGKRKSGRTRKGNAWVRRLLCEFAQAASRTRCALKDKFSALAIRKGHKRSIVALAHKMLRIVHAMLANTTPYQDRTVDYEALMVGRNAPRWLKMLAKHGYIATA

SEQ ID NO: 494296 - protein, 417 aa, unidentified
MNSPPETTVIERYIGVDIHKHYVMVGGQNRSREWTLHPRQVQIGRFRDWAEKNFRKTDAVVIEATGSVWDIYDIIVPHVGKILVADARSMRQIAEARVKTDKRDIERMITQLLGGIVPEVWVPPVPVRELRSLISFRWRLTKQITMSKNRLHSVVQRFNLNAPEGGLLTEKNRSWWEEQQFSELTGFEVEHDLEIVETLEGQKEALDQKLAELSNSEPWASDMVFLMQIPGMGLILSMVVLSAIGDISRFSHPKELVSYAGLSPGVHISGETNRSKSITKEGRKELRWAMVEAAWRTKESDPYWKAQFKRLEKRMHRNQAIVAVARRMLVSIWHILTKRETYRHFDEEDIAYKMLIWAWAMDKRSRKGMTPQQFAKYGLLRLGIGQDLERIVRGGAPRRIAPTEEILALKPELVPPI

SEQ ID NO: 494297 - protein, 400 aa, unidentified
MLLFFEVITMIFVGIDVAKDTHYAAVSDDSGAVLVKPFAFQNNAEGFCLLLKKLSEFDRSKLLIGLESTGIYSENLICFLYESGFRLAVINPIQTATLRKTAIRKTKTDKVDTMLIIKSLMVNSYRLYSQRDADSLKLRTLCRFRQNLKKSKARLKIQLAGYVNLVFPEFGKFFKSGIHIAASYALLKKYSSPKEIAALRTSTLCTLLSKASHGRFGKDTAEALKSLALSSVGVKNPYISIQIAQTIAQIELLEQQIKDLNSAIEEAMESINSVLMTVPGIGAVNAACILGEIGDIKRFSRPCKLLAYAGLDPTVRQSGQFTAKSTRMSKRGSALLRYALINSAWQLTLNDTTFKAYYDLKRSQGLNHYGALGHVAHKLTRVIFKLLTSDTPFNPAKLVA

SEQ ID NO: 494298 - protein, 454 aa, unidentified
MARKRKNGTKSSPQPLVIHPNAAGVDIGATEIFAAVPADRDEQPVRSFPTFTQDLNALADWLQRCGIITVAMESTGVYWIPLFQILETRGMDVCLVNAHHAKNVPGRRTDVSDCQWLQYLHSVGLLRASFRPAQEVCAVRTLLRHREGLVQMASGHIQHMQKALDQMNLQIHHVLSDITGVTGLAIIEAILSGEREPQALAKLRDRRVRASEEIVAKSLVGDYRSEHLFTLRQSLVAYRQCQQLIAECDQEINRGLETLSSAADLIEAPLPPGKPASKKRRPGETGYDLRAQHYRILGVDLTQVPGISSLIVHTILTEVGPDFSKFRSASAFASWLGLCPDNDISGGKILWVGTRKVNNRAAKAFRLAAHTLHHSHSALGGHYRRMRAKLGSPQAITATAHKLARITYHLITTRQAYDESVFARDEEHYKKRSETRLKAQARALGFQLVPAENG

SEQ ID NO: 494299 - protein, 392 aa, unidentified
MFYIGIDIAKRSHQAAVTDISGNIIVKPFNFKNTAAGFTQFLSVLEANSVSKDNCVIGLESTGHYWYPLYFFLVEQKFSVKVFNPIQTAAFREITIRKVKNDNLDSIMIADFTRFGRYSETYIPSENMLALKNLSRFRLSVCDICGSLKKRTIVLLDLVFPEYASVFCDIFGTTSKQLLEKYSTPDEFSEISTTKLANFILKASRGRNGREKAELIKTAAQNSIGISYAIDTFSFEIKQLIEQIEFMENQLSEIDAEMAKLLAESEYSVITTISGVGPTLGSIIVSEIGDIERFETSSKLVAYAGLDASVKQSGEFNSSHNKISKRGSPYLRRALWMAAFMSLQCDPALYDYYSRLRARGKSHRLATTAVARKLCIIVWAIMKSKKPYSPHI

SEQ ID NO: 494300 - protein, 340 aa, unidentified
MVSVIGLDVAKSVFQVHGVDEDGKAVLRRKLRRSEVLALFSALEPAIVGIEACHTAHYWAREIARHGHDVRLMPPQFVKPYVKSQKNDAADAEAICEAVTRPNMRFVPVKSEAQQAALLLHRTRDLLIRQRSALVSAIRAHFAEFGVVAGARVRNVERLLELLGRRGAELPETARDMLRVLADQLRDVAARVAAVEVELMKWHRESPSSRRLETIPGVGPITASAIVATVGDARHFRSGRQFAAWLGLVPQQRSSGGKERLGGISKRGDGYIRRLLIHGARAVVGWRKRRPGVADGWLSGLLARRPVNIATVALANKIARIAWALLRGGMNYDRVRAYAA

SEQ ID NO: 494301 - protein, 392 aa, unidentified
MKTNAIKEGTVEGAEQGSKTHQLIKLGVDVHWHEYVVVRQIDGSSPQSAQRFSPEGFVAWAARQTQLAEQVWCCYEAGPFGFVLHKQLERLGVRNVVVRPRNWDEYGAKVKTDRRDALALCSSLDRYLAGNTQALAVVRVPTDEQEHSRSQTRQREQLVSERKRLGAQGLCAARYYGYDLPDQWWRPRRFAALQSQTPDFLLELLARWQRLLLAIDEELDSLGGLIESAQQQMLPTGLGALTAQILDREIGEWNRFKNRRQIASYTGLVPSEHSSGQTQVRGSITKHGNPRVRHILIEAGWRLRQFQPEYRAVKQRQAAFDSAKQKGNSPARKRLGVALSRQFIVDWWRIKTGRTTPAQLGLQMSWPTCPHLPSKPKPSAETSTQPATQPID

SEQ ID NO: 494302 - protein, 354 aa, unidentified
MVVSETHIEKEPSTMDITTLGIDLAKSVFQLHGVDAQGVIVLQKKLRRGAVVKFLSKLEPCLIGIEACATSHYWAREIAALGHDVKMIPPAYVKPYVKRQKNDAADAEAICEAVTRPNMRFVPVKTEEQQAVLVLHRSRDLLMRQRTMILNAIRSHCAEFGIIAAQGARKVSELVTKLRNDDTLGVPEVGVSALLSLASQLDCLEQEVRKIEHQLLAWHRQNAASQRLETIPGIGLITATALAASVPDPAVFKSGRQFAAYLGLVPRQNSSGGKDRLGRISKMGNGYLRRLLVVGATSVTRRAPTIDTRTGTWVRSLLEHKPTRVVTVAIANKTARTAWALLSKGESYKAVPAI

SEQ ID NO: 494303 - protein, 342 aa, unidentified
MGTIMTIGLNIAKSVFEVHGIDAAGEVVVRRRLSRGRVLAFFEKLPRCLVGMEACNTSHYWARELIALGHDVRLMPAQYVKPYVKRGKNDAADAEAICEAVARPTMRFVPVKTPEQQSIMMLHRVRLMLNRQRTQLSNAMRAHMAEFGVVGPVGRMGLERLMAVIADREDLRIPPDARVCLEMLAAQLAVVKEQILENDRRIRASARETEVGRRLMEIPGVGPLLASAFVASIADPTAFKSGRDVAAWIGLVPKQNSSGGKERLGGISRAGNRYLRQMLVVGAMAVIRHVERHGTKRRWLIQLLARRAKKVAAVALANKTARTIWALMTNGERYREPTVTLP

SEQ ID NO: 494304 - protein, 355 aa, unidentified
MVIVAGVDCHKDSHTIVFVDGAGHILKVLAIAATPQGYQMAIDAGRELGNIVWGLEGSGSYGRPFADALLAQGATVYEVPGAFTKRHRQHASHRGKSDALDAQAIAEAVLREADRLPRCEQYDEQVALRLLYDRRDRLVRQHTEALNRLRSTALRLALPPLPPQRLTPTVIEQLSVAAAPMRGTSYSTDALLDELEETIADLRRLHERIRVVEKQLAPFIRRLAPELTELRGASHVVAAGLVGHVGNLANCRNADAFAMRAGVAPIACSSGHRRSFRLNPSGRRQLNRCLHVIAITQLRDPQHPGHSYYERKRAEGKTHKGALRSLKRQLATVVYYRLQAMRLRLAGTRYLSSVA

SEQ ID NO: 494305 - protein, 365 aa, unidentified
MKKIANVGVDYHLNSLSIAVLAEGEKEFHQSIHLKNDDRLIAKYLKKLSKIFELRICYEACSSGYDFQRKLNAWGYHCDVIAPSLIPRKPGDRRKNDFRDARNLAQHYANGMLSVVHPPTEEEESVRSLIRCRLAFKEDARRTKHRINSFLLTQGYSWKKSTWTKQHRWWLSKLEMPYEYLHKVLDEHLGQLEYLESRLKHLDQQIEEVARSEIYAPSVNKLRAFKGIGTLTAMLLIAEITDFRRFPTPRALMAFLGLIPSEDSSGDKTKGGSITKAGNIRCRTSIVEAVQHYVKKPYISAQMKANLAEVDGKSANVALHCMYRLHKRFWALSMKGKIRPVAITAIAREFVGFIWAMMRPELVEA

SEQ ID NO: 494306 - protein, 349 aa, unidentified
MKGPIVSIDVSKGKSDYQAFKNLNVKYTGSRSIKHTKEGFDEIVNLVREMEKKLETEVCVVYEATGVYHRVLKKVLEDNNIKQFIINPLLSAKTRKNDSLRCPKTDKLDPKSIAKTYYSHSLHNSHKQETIYHELRELSRYYEDILVHIRKDKVAFRAQLDIVFPGYDALYDDLYGPVALAVIEKYPHPEMLQKKKINTVSKVIQSKTCHRQAVSDTMADKAIEYSKTIYSGCDKDDIEVLILQRIIKKLKEDMAEAERTIGEMIKLAQELPDFSIIKSIPGIGDNLAARIIAELGDMTRFKKKNELVAFAGLDPRISESGKNDGDHMHITKKGNKRSRCLLYLSLIHI

SEQ ID NO: 494307 - protein, 413 aa, unidentified
MKIFCGIDWASDHHDIALVDTDGTLVARARIADDAAGLQQLLDLLAEHGDTPETRIPAAIETSRGLLVACLRAAGRPVYAINPMAASRYRDRHTVARKKSDHLDAMVLANILRTDTAAHRTLPADTELAQAIAVLARAQQDAVWDRTQAANKLRSHLREYFPGYLAAVQPILGGLCSSVARALLAAAPTPARAARLTKTQLRAALKRAGRQRGIEAEVTRLQTVLRAPQMRQLPLVEDAMGHQALTLLRKLDAACTSADELAEAAVEAFETHPDAGIITSFPGLGSLTGARVLAEIGDDRSRFADARALKSYAGAAPVTRASGKSVSVKARRIKNQRLAAAGYVWSFASLTASAGARAHYDRRRNNGDRHIAALRNLFNRMIGCLHHCLDLRVHYDETIAFPTPPEPILAAAA

SEQ ID NO: 494308 - protein, 369 aa, unidentified
MEKGTTCVALDDSKRKIVAGILRSGETQPELRELPNEPHHIRRLFERLKQEGPVVACYEAGVSGYDLYRQITILAVPCQVIAPALTPRRPGQRVKTDRRDACKLVRLFRAGELTPIHVPDEAEEAVRDLVRCRDDIRRDVLRWRHRLLRVLARHGRVYHAGRNWSHRHWRWIREQRFDLPALQRAFEASLFALEQALTRLAELDTEIAALTTTAPYREPVGWLRCFRGIDTLSAMILLAEVVDFQRFGRPRQLMAYLGLVPSEYSSGDTQRRGALTKAGNTHVRRLLVEAAWQYRHRPSLGGALAGRSRGQPHEIVAHAWRAQQRLHRRYRHLVGHGKRPPVAVAAIARDLVGFIWAAMTQPHPTAVAA

SEQ ID NO: 494309 - protein, 384 aa, unidentified
MTKKNTLKSLPTDTEFRVVGLDLAKSDVSVAAIPVDDNTPSLVDRMTYADLLDWAGKISPTLFAMEPCNGYSLSCLQLENLGLEIKVISGSTVSMWINTHLSGQKTDLNDAIALARLAVSDAELTPIRHKSITEIRIQTVQAVRQQLMSQRSKSIVSFKALAQQWGIPCAAGHRNLKKLRESIEAKVDLITRPVANAMLFLLDAVKSLDRQIGQLNQTLQELVMSDERGRLLQSVLGVGTQISARVITVVGNVERFNSPRSLVAYVGVAPRNFITGHKNLTKKKHGNCPDLSHKGQGKISRRGDKLLRSLFIQGAACLYMQFCKDQLPECQLKRWILKQLAMQKPYGKLIVSLAAKLIRIVWACLNVRGKIQYSESRHDTLYVE

SEQ ID NO: 494310 - protein, 339 aa, unidentified
MNSTQVAVDLAKTVFQVAVSSTPGRIDKEHRLSRARFERFFREHEPVEVLMEACGTAHHWGRALEALGHTVSLLPAADVRRYRDGNKTDRADAKALLEAARNEAIDAVPVKTIDQQTITALHRLRSGYLQTRTARINAVRGLLREFGITIPVGARYLVPRVRAAIEEGAIPTDLVPLLEDALGETEELKRKAIDIERRLKGLVGHMPEAEILMSVPGIGVLTATALVAFVADVRRFRSGRHFAAYLGLTPREHSSGLSRRIGRISKRDTRYLRMLLIHGARSVLRAAKLTEHPDGLRIWALGIASRSGYNTAADRPRRTSARNRNASRVPRRIQPRAAA

SEQ ID NO: 494311 - protein, 350 aa, unidentified
MPRRNVPRPAAVYGIDIGKNIFHVVGLGSDGVPVQRVRFRRDTLLQFFERAAPTIVGMESCAGSQWIARKIQALGHKVRLIPAQFVKPYVKSNKSDIIDAEAIAEAATRPTMRFAALKSEEQADLQALHRVRDQMIGTRTRLINQMRAFCLEYGIALRQGAGLFKLDLPLVIEDQSNDLSSAMRKLLAELFTDLRLLEKRIGDVTREIEAIASREDAARRLMTIPGVGALGATALLAAIGNGRQFQKARDLAAWLGLVPREYSTGGKQRLLGISKRGNRYVRKLLVHGARSCFRHLDRTRDRLGSWLDGLQARMHPNKAVIALAAKMARIVWVVLTKPGALYERRDPAFN

SEQ ID NO: 494312 - protein, 440 aa, unidentified
MPFAALDIHLKSVEAVLLDDAGALQWRGQFPATRAALLAFARRYLTGRHRVALEATFHSWAIAELLQPFVAEVVVSNPLRTRAIAEAKIKTDRVDATVLAHLLRLDYLPRVWQPDADTRRLRRETTERAALVADRTRLKNRIHAVLHQRLIAAPAGDLFTPAGRRWLEALELDPPGRQSLDRHLRHLAFLEREIDLQRQTLCRQAYEDPRVKLLMTLPGVDFSVAQALLAALGDVNRFPTPEQAAAYLGLVPSTRQSAEHCYHGPITKQGRAHSRWLLVQAAQHLDRHPGPLGVFFRRLARKKNRNVAVVATAHKLVLIAWHMLRHNEPYRYAQPKTVEAKFTRLRVGATGRRKRGGIPKGAPRPAAYATGVRTRSVAGLDELYAGEQLPPLAPASEGERRMLAQTGTAAYAEAIRRRVRTPRGRGPASRSAPPPEGETA

SEQ ID NO: 494313 - protein, 344 aa, unidentified
MKIVGCDFHPSFQQIAVLDTVRGEIEQRRLCHGDGEAEQFYQSLEAAALIGMESVGNSLWFEQLMARLGHELWIGDAAQIRASYVRRQKTDRRDAGHILRLLVEQRFARIWVPSSAQRDVRQLLLHRHKLVQMRTRVKTELQHLAMNQGMQKKRHLWSVRGRADFKNLCLAPWAAQRREDLLSVLSLVESQVEKLDVAVEELAGGDRQARLLMSQPGVGPITALAFAVTIGDVSRFKRGKQVASYLGLIPAERSSGDKRRLGSISKQGNTFLRTMLVEAAQSACRYDEQFRREYRRRCHPKPKGVAKVAAARKLAVRLYWMRRTQTPYAPAVHNEGSSSHSVAG

SEQ ID NO: 494314 - protein, 343 aa, unidentified
MEKITTVGLDLAKSVFQVHAIDDAGVPIIRRALRRSQVLGFFSKLPPCVVGMEACASSHFWAREIRALGHDVRMMPPIYVKAYVKRGKTDAADAEAICEAVTRPTMRFVPIKTADQQGAGMILKARDLLVRQRSQAANALRAHLSELGIVASAGMASISKLIQLVREESDDRMPDIARRALMAMAEQIEALAVQVERLERQITTNVKDDEEARRLTSIPGVGPIIAATVKAAVPDPRGFRTGRDFAAWIGLTPRAHSSGGKERLGSISKRGNRQLRTLLIVGATSILKLGKRGLKLPRWVDALMLRRPFKVVAVALANKIARTIWALLVKGGMYQTPRAMIKA

SEQ ID NO: 494315 - protein, 386 aa, unidentified
MQKLNDLSRSLIPLELDCTLITVIEMSQSSWLVASIVPGVERQPLKKLTVDESALLKLLHRWRQEAEKAGHRIMRITVAFEAGRDGFWLARWLRARDIEVHVIHASSVAVSREHRRAKTDRLDTELLKRSFLGWLRGERDHCKMVAIPTIKDEDAKRPNRERESLVAEKSRIVNRMKATLIRLGIRGFNPKLKKAGERLEGLRTPEGEPIPPNTLAELLRDMERRRLVSAQIRRIEDARLERLEQASGDGSHAMVRLLARVIGVGIETADMLVQEVLSRNMRDRRAVARYAGLTGSPDESGRKRREKGLARSGNARVRRGMIQLAWRFLMFQKDSTLAQWFRARTENARGARKLMIVALARKLLIALWRLVREGVVPDGVVLRPAH

SEQ ID NO: 494316 - protein, 355 aa, unidentified
MDSIKYIGLDVHQSTISVAVLNADGKLVMQGVLATQASAILNFFQGLRGSLHVTCEEGTHSAWLYDLLVRRVAKLVVCNPRKNALLKAGSKSDAIDARKLAELLRAGLLSPVYHGQNSTAAVKQLGRSYAALTEDTTRIMGRLKALYRSQAIACAGQKPYGSRHREQWLAQLSENGLQRRARRLYQQLDLVQELRREARQDLILECRKHSETKLLRTIPWLGPIRVALLLGRVQTPHRFRTKRQFWAYCGLALETRSSADYHMVNGQMERRKKPVFIRGLNLNHNHDLKNLFKSAATTASASDGPFRPFYENLLIKGMKPELARLTLARKIAAITLHVWKKGEPFDAEYLKSQAA

SEQ ID NO: 494317 - protein, 363 aa, unidentified
MKNNIFVGCDSHEKTLVNKIAHNDGAVEGKRFSASRAGRQKLIEYLKERSRGVGGAQVVMAYEASGHGFILCDEAQAAGFICHVLAPTKIERSTKQKRNKNDDRDAERLLDIVRGHYLASTRMPAVWVPDPQTRDDREPVRGRHDLSEKQTTVKTQVQMLLKRHGLEKPEGMGKSWTKPYRRWLEVLSKEGPALQLGMRQALQSLLRQLQFLEHEIEQMNQALGELANTPRRKPIVDELMKEKGVGLTTALKYATDISDFKRFRRGRQVGAFFGLAPSSHESGENNDRKGHITREGSPSARKVLCQATWSRVQHDKREREVYNRLVSRNPKKKKIALVACMRRLAVRLWHIGLQAQLRMEAEG

SEQ ID NO: 494318 - protein, 338 aa, unidentified
MAIVMGLDHHRAQITAEWFDTETGEVSRGGIVPADRSGVRKFLARFVGRELEVALEATTGWRFVVEELHRVGARVRLAEPAETSALRGNKQRAKNDRADARHLRELLMAGRVPESWVPPGHLLDLRARVRLRHTLVDQRGEWQQRIQAVLYHHGLPKRAGLLTCENRAWLEQLPLPAAGREQITVALGMIDAGEARVAPLDKELRSYARRQPGCHALQALYGIGELTSVVILAELGDARRFSSSREAVRYAGMDVTVHASDKRRAPGHLSRQGPPALRWALYEAAQTARRKTSPDYVYYQQAAERLGGNRALLGVMRKLLKRSYHTLRELGEEGLRPA

SEQ ID NO: 494319 - protein, 339 aa, unidentified
MAKITIVGLDLAKNVFHVMCCDKQGKVVKKQMLRRGQVVAFFANLERVLIGMEGCASAHYWARQLMALGHEVKLVPAQYVKAYVRGNKNDYNDALAISEAVTRPQMRFVSVKTPEQQDVQALHRLRERCIQTRTGLCNQIRGLVGEYGLVCARGVATLRRQIPNWREDKNNGLSDFFRRLLSQSVQQLQMLDDQIDVYTQELKRHSRENDACQRLQTIPGYGPIVASVFYSQVGHGEAYRRGRDVSASLGLVPGQHSSGGKDTLLGISKRGDRYLRSLLVHGARAVVSRAANKDDRLSQWINRIRAARGMNKATVALANKMARMGWALLANKTVYQPAI

SEQ ID NO: 494320 - protein, 347 aa, unidentified
MNFYNNMHPYYCGIDLHARLLYVCIIDNTGLILVHKKIKDDPDALLKLLKPYVGDIVVGVECMHCWYWVADFCKEHTIDFILGHALYMKAIHGGKAKNDKIDSHKIAKLIRGGNFPLAYVYDKDMRATRDLLRRRTKIVRHGADLKAHVDNTASQYNLPAHNVNLKNVCDREKMRYYFPDPVVQRSINLNIAILDCYHKELKPLEHYIEKMAKQHNPVHLNILQTINGIGRILALTIIYEIGDINRFSSVQKFASYSRLVKCKAESAGKTYGTQGNKIGNAHLKWAFSEAAVLLLRHNHNANKYLEKLQKRMSKAKALSALAHKLGRCVYYMLKKETVFDEAKFLKS

SEQ ID NO: 494321 - protein, 319 aa, unidentified
MTQDDLVVVGIDVAKDKIDACIRTVTERKTCPTTAAGRRSLIAWLRKHQVGKAVMEASGGYERVWAKALRQAGLEVRIVDPKRVRHFAESAGRLAKNDKIDAEMISWFAETFGEAPSQVDNPAHEEMKALVKGRQGLLDVRARLEMQKEHEAPALVQKARARLLKKLADEIAALETAIAATIKTTPDFAKRAEIIQSVPGFAEGTAMALLGGLPELGQVSDEVAAALMGVAPYDDDSGKRRGERCIKGGRRWVRNALYMPCVGAATLNNPVFKAFYERLIAKGKPPKVAIVACMRKLIIILNTMIARGETWDPKKYRVA

SEQ ID NO: 494322 - protein, 422 aa, unidentified
MRSIGIDIHRDFMEVAIAEGGEIRSGPRLAMDIESLELFAASLDRGDQVALEVSGNAWEVVWILRPHVGRIVAVSPTDTGMRQARAKTDRLDARALARLLAAGQLETVWVPDEATQAMRRRLQRRSQLVRTRSAAKNEIHAALMRRLVPKPGFSDLFGEAGRKWLAELALPAAERESVDSAMRQVEFCESEIAAIEKVVASEALGSEEIRRLMSVPAVGAITAAAFMAAVGDIRRFPSAKKLVGYLGLDPIVRQSGSSEASYGRISKQGSAAGRYALVEASWSVVKAPGPLRAFYERTKGRRGASVAIVATARKLACLFSILLVRGEDYAYTQPSLTTKKLRRLELTAGARKCRGGAGVWKANAAVRDAERKMAEQAEAAYRRNVAEFKRVEALRAKQRKEAEKAPAEQHEERAGATSGRAS

SEQ ID NO: 494323 - protein, 386 aa, unidentified
MTHSTNILPRSVDYDQTLVLAIELSNKSWVLAAQVPGLSQTKAKRTIDPDKNGLLAAIDGYRTRAAAAGRSVKRVITSYEAGWCGFWLARWLMAHGIEVHVVQPSSVPVDRRMRRGKSDGIDAELLLRTLLAWLRGEPRVCSMVPIPDEADEDARRSVRERSELVSERVGLVNRIGAILATLGADDYNPLLQSRRRRLTELRTGLGDPIPPNALAKIMRLLTRLELVLAQIVELELERDAVARTDAPDQASKMIQQLISLRGIGVQSATVLVREAFVRRFANGKALGSYAGLTSTPYSSGGIDREQGIGKAGNRRLRTVMVELAWLWQRYQPGTAQVTWFRERVGSTGRRVRKVMLVALARKLLIALWRFVIDGVMPEGAVTKPSI

SEQ ID NO: 494324 - protein, 421 aa, unidentified
MEETSDLPELAGRVAALDLGKATLTACVRVPHADKPGRRCQEVREYRTTTRALLTLAADLRGHGVTLVAMEAASDYWKPVFYLLEAEGFTCWLLNARHVKNVPGRPKTDKLDAIWLAKVVERGMCSPSLVQPRGIRRLRDLTRYRRTLIRQRTAEKQRVEKLLEDAQIKLSAVVSDIFGMSGRAMLEAMIGGERNPRALAQLPVGRMRAKLVVLEEALTGHFDDHHAFICRMMLDRIDDITRQAAELTARIEEQIAPFAGAAARLDEIPGAGRTGAQELIAEIGVDMTRFPDAAHLVSRARFAPIDKNSAGKKKTASTGKGNPWPGATIGEIVSAAARTDTFLAERYQRIARRRGKRRAIVAVGNSVLTIIWHLLADPEASYRDLGPGYYESRISAQRRQRNLIRQLERLTGQKVALQPAA

SEQ ID NO: 494325 - protein, 389 aa, unidentified
MSEPFDATKSLTALDQESTIVAVIEMSRWKWLVAAVIPGIQRQPLKKLDADEATLLKLLHRWRNEAGQAGRQIKRIVVAYEAGRDGFWLARWLRVRGIEAYVIHPASIAVSREHRRPKTDRLDTELLMRAFLGWLRGEKRHCSMAPIPSVEEEDARRPNRERGNLVTEQTRIVNQIKAILARFGIRTFRPTLRKAEEKLEGLRTAEGAPLLENTRAELRRYLSRLRVVREQIHAIEQGRLRKLAAGATAQEGPHAMVRLIARVLGVGAETADMLVNEILLRHLRDRKAVARYAGLTGSPDESGRRRRERGLARAGNARVRCGMIQLAWRFLRFQKDSALAQWFRARTADGRGSTRKTMIVALARKLLIALWRLVTRGEVSDGIILRPAS

SEQ ID NO: 494326 - protein, 455 aa, unidentified
MARRHRAKGTPQQRALLTIHPYAAGIDIGSRFHVVAVPPDLTPEPVRTYQSFTEDLHRMADWLVELGITTVAMESPGIYWIPAFEILEARGVEVLLVNARHVKNVPGRKTDVHDALWLQQLHQHGLLRGSFRPANGLAALRAYLRHRERLLEYAAAHIQPMQKALMQMNVQLHHVVSDITGVTGMKIVRAIVAGNHDPALLASYRDIRCKASAETVQEALTGNYRPEPLFALRQALELYDSYQTKVVECDHAIEAVLASCEQADPATALPAARHRTRQPNEPTFNVRAALFQLLGTDLTQLHGFGAYTALMLVGECGTDMTKWPTVKHFTSWLTLAPGNKISGGKVLSTKTRRSANRAAKLLRLAAVNVGKTQTALGAFYRRLGARVGKAKAVTATARKLAVLFYNALRYGMAYQDPGAAYYEEQYRQRVLKGLSRRAKELGYTLQEATAVEGVS

SEQ ID NO: 494327 - protein, 443 aa, unidentified
MATLIDAERNTPAYAAWIGLDWADQKHFWTMRTADGKIQRGELRNTPEAVEMWAADLAQRFPGRSIAMALEQARGAVIGMLSKYAHLVLFPVHSTTLANYRKAFSPSGAKGDPSDADLILDLLLKHPDRLRRLQPDTVETCGLQFLTEERRKLVDQQTSELQRLTNWLKQVWPQMLVWFDDLASPLVGDLLLRWPSLQALQKASAKTLRTFFHQHNCRSEERIQQRLDQIRQAVMATTDAALRETATLCIAHSVRALAQMRSAIQTFDRRIAEIYHCHPDRAIMESFPGAGPALEPRLIAAVGSRRGRFDSAHNLACFTGIAPVQESSGNSSWTHWRWACPKFIRQTFHEWAACSIRSCDWARAFYQHQRGKGKGHHAAIRALAYKWIRIFFRCWRDGVPYSAERYQKALQVHAVAGVPPVAQRTLEVSWISCGGFFKLVKNS

SEQ ID NO: 494328 - protein, 421 aa, unidentified
MKVTYQICCGVDVHKSFLVATIVKTTGGIEPSYQKKRFSTFNNSILEFKQWLLDNHCHDVCMESTGKYWVPVFNLLEDEINVVIANPKWVKAVKGNKDDAKDSKWIGDLFRLGLVKGSYIPCKKVRILREYTRYRYKLVSCRSSEKNRYQNALTVCNVALDSVVSDIFGKSSTSIIDYLLEQSGTSINHEEIASKLLRSLKSKEDAVIHSIEGYQMTDAQKYRMRLVRAHMDYITAEINDVDKMIENMISSNPDFENAVQFLCTIPGVKRDSAITIISEIGIDMSQFSSSKRLCCWAGLTPGSNESAGKKKSVRITRAGVYLKPALVQCAHAAVKSDKSPYYKKKYESLVKRRGKKRAIIAIARMILTAIYQMLSTGEQWNPSDLYKIDIPVALVEKKRQKLSSRLRSCCNGKDYFLLMNH

SEQ ID NO: 494329 - protein, 344 aa, unidentified
MDITTIGLDLAKSIFQVHGVDVNGRVVIRKSLRRAQMLPFFARLPSCLVGVEACGTSHYWARELIKLGHEVRLMPPAYVKPYVKRSKTDAADAEAVCEAVTRPTMRFVPVKSPEQQAALSMHRARDLLVKQRTQLVNMIRGLLAEFGINIPKGLERALLMARRIVDDEAPDVPIEAAKIVGTLSQQALDIHVRLRQIDRDLLVWQRGNDVARRLMTIPGIGPVGATALAASVTDPHQFRSGRQFAAWLGLTPLQKSSGGKERLGRITKMGDKYLRKLLIVGMTSLVRRAKHNPPTIDPRLANLLVRKPVRVATVAMANKTARIIWAIMTRGETYRASHQPALAA

SEQ ID NO: 494330 - protein, 363 aa, unidentified
MEQQNRRFVGLDFGVRTYEMCMYDENGKIVRSNGLTTPEGRQKLYSKLKPTDRVGIEMCSLTMKVAREMKSAVGCDVLLLHAGKLAVIYKSLKKTDKEDALKLARLVKTHEDEELPIVPLPSEVDLKRRRMIREAKQLRSDRTKEVNRLHALFVECGITDIKKKNLATKTSREKTLQLLEETQRRQAERICQVIDLVETQIAEVKKEIAVEVENDSNIKNLQTVPGIGELTAVAYSGFVGDGSRFDNGAQVSNYLGLVPKLDISCDQVHYGNITKTGNPEVRSLLIMAAWSHVRFAKEDTVLKSKWQYLTLVRGMSKKKAIVCIARKMAEMMLAILKSGKPYSPKKFSVAQFSELAEKALKSA

SEQ ID NO: 494331 - protein, 345 aa, unidentified
MKYYIGCDAHKKYSVFVMRDERNKVSQPVRVEHEKEIYRRYLETLPAGSPIAVETTGNWYWIVDAMEQAGHHPALAHAAKSKLMMGHTNKTDKLDAGGLAALLRNGTLPTVWIPHGELRDQRELPRMRLTLVHMRTALKNRIHATFAKYGINFEEESDLFGKKGRRAMMDRLPELPPETRLTVEQELEILDRLGEQIDQAEKRIKELIAVTPDMKLLMSIPGVGPVLAISIALEVGDVNRFPDNQRLASYAGTVPRINASGGRTRFGKTRPDVNHYLKRAFVEAANTIVLHQTRWPDRHAVRLYQRIKANKGHGKAVVAVGRHLAESTYWVLKKQEPYKEPVAMK

SEQ ID NO: 494332 - protein, 401 aa, unidentified
MDPQIRVGIDVGCKAHRVGIANPDGKVLEEFDISHTAAGFCDFFRRIDHHKQELDLSVAVAMEGFNGYARPLDRMIQEHGYTLYNVNNLKLARFKEVFPGAAKTDAIDARKILELFHLKDHLPLAKDALQKVVSAPLVNDKLKRLSRRRRQLVNEKVRVASRIQSDMQAVCPELLAITNNASNLKFLRFLTYRDDLTQLARLQSTTLLKIAGVGQNYARIIQEWQRKASFSAEVEYVGPMIITDARRILELLDQVHILDEAMAALADQSELARRIGSIQGFGKTCIAELAGEIGTTERFAGERSLALYVGMSPLSKDSGQHHGSKCPRSVNHRAKAAMMTAVAHHIRCVPESRAYYDKKRADGKKHNQAIRALGRQLVRVLWSMLKNERDYELREVIPSVT

SEQ ID NO: 494333 - protein, 391 aa, unidentified
MIYVGIDVAKDKHDCFITNSDSEVLFKAFTIFNNLDGFNDLYQKIESVMDDVTKVKVGLEATGHYSYNLLGYLIDKGLPTYVINPLHTNLYRKSLSLRQTKTDKVDARTIASMLMSDVNLKSYSDISYHNEELKSLTRYRFDKVKERAKLKTSVSRLVCILFPELEKLVPTLHMASVYALLSEFPSAKHVATAHLTRLTNLLSESSKGRYGKDTAITFRDSARASIGSNMPAKSLELKHTIKLIQELDSEIDEIENEIKIIMDEINSPILSIPGINYRMGAMIIAEIGDFNRFDSPDKILAYAGFSPSTYQSGQLDGAYAHMEKRGSRYLRYALYNATKYVCHWDPTFAAYLAKKRAEGKHYNVAISHAVKKLVRVIYHLEKTKQQYIKAA

SEQ ID NO: 494334 - protein, 341 aa, unidentified
MHPTTIGLDLAKHVFQVHGVDAAGKVIIRKKLRRSEVKAFFEKLPPCLVGMEACGTAHYWGRELATLGHDVRLMPAAYVKPYVKRGKNDEVDAEAICEAVTRPTMRFVPVKSAEQQSILMPHRPRDLFVRQRTMLVNSLRGQLAEFGLIAPQGIWRIPELHALAQNTDNSVLPEPARACAELIMMQIEDLQAKIKAIERTLMARHRANEMSLRLATIPGIGVITATAMVATVVDASAFGSGRHFAAWIGLVPQQNGTGGKVHLGRISKKGEPYLRRLLVLGATAVVRYARNKPEFAGWVNALLARRPARVVTVAVANKLARIVWAIMRRGGPFRQRPLGIA

SEQ ID NO: 494335 - protein, 347 aa, unidentified
MNKKWFIGIDVSKKTLDASIFVAGEVINRFPHTQVRNEKAGFKELLRWAKAQGVDTKDTLFGLEFTGYYSDALEQFLTGKKLCYTMLPTTVVKHYQRGTRDKNDKTDSAKIADYLFRFNGTECIRLRVLPSKAMQELKALKSERKFYVQQRVACENRQKVAKSEQERKHLQKAIDLFNEQIELTERQMADVVTSDEEIYLTYTRLLTIPGIGPVNAINTIANTQNFTAFETARQYAKYVGVAPSEHSSGISVRWRGRPSPHADLQAKADLSMAALRAVEFSFEMSQCYERKLGNRKEDKDVQRKALNAIKFKLIRQMFSVAKQHKNFAVMQQGQAQAGTHSTEERVN

SEQ ID NO: 494336 - protein, 415 aa, unidentified
MTDERRWYAGVDWASESHHVLLTDGDGRKIGEKIFKHGGEGLAEMAAWLMAMSGVAEPRQIHIAIEVPHGPVVETLIERSFKVHAINPKQMDRFRDRFTLAGAKDDSRDAEVMASALRTDPRCFRLLAVADPVVIELREWSRIAEDLGAERNRLTNRLREQLWRYFPAMLDLESDLGAEWLLDLWETAPTPHKAIRIREATVAKVLKRNRVRRFDAAHVLDVLRKPPVRVAAGTTEAASAHITTLIARIRLVNQQLREAHRQLDALTARLIPSEETGLGQRKQHDVAILASLPGVGRIVLATLLAEAFDALQRRDYAALRSLTGVAPVTKRSGKSCIVVRRQACHDRLANAMYHWARVAVQHDPRSRSKYAALRSRGHSHGRALRSIADSLLNVACAMLKTGTTFNPSLATEKSP

SEQ ID NO: 494337 - protein, 358 aa, unidentified
MRRYIGLDAHAASCTLAIVAETGQRLRDFPVETNGAALVEAVRAIPSPRHLIFEEGTHSAWLYETLAPHVEEIVVIGVRTSRGPKSDARDAYALAEKLRTHAVDQSVFKAPKEFTVLRELARVHRMLVGDVVRVQARLKSIYRSRGIATAGATVYGPRQRQEWESRLPPATRHTTSKLYAHYDWLLALKKQAESELIAEAKRHPIARVLQTAPGLGPIRVARLLPIVVTPHRFRTKRQFWSYCGLGIVMRSSSDWVRGRDGGWQWAQVAKTRGLSRQHNHTLKETFKGAATSVVQQGKTVPIYADYARLVESGTKPNLAKLTLARKIAAIVLRMWKDKEVYRPDKPASTTTHAARSTT

SEQ ID NO: 494338 - protein, 516 aa, unidentified
MLINCADSQNPRARIVTRINSRGVAGVSLEVAGPITGMHPGREHQGRPLPPMREKLHSSLVLLLGRPVDSRLGFEPESVCITHCPKIHAPTSNQGECSMSEEVNARPSRRYIALDIHKYYCVVAGVNRDGQVVLQPVRVEHADLEGWLKKNLQKTDAVVIESTTNAWHVYDLLEPLAERVVVANPIKVKQIATARVKTDIRDTLILARLLAANLVPDVWVPPVHVRQMRQLLSQRRQLVETHTQILNRMHSVAHRHHLKHERGKRFNEQNTGWQKDPSLSKMEQFQLSLEMENRKYLEKQIERISLEVGKICHQKPWSSGMGYIMSLPGFGMITAMTVLAAIGEIERFETPKKLASYSGLTPGLEQSGTKNRGKGITKEGRRELRWALVEAALQAVKSDPLMKRRFNELQKRMHRNQAIVSIAHHLLELIWYVLTRRQPYRGFTQERIAYKYLSWSWHVKEEARNGLTHQQFARYYLMKIGLGKELTRIALDPKHPYRLASEAEVLALCPELRQTE

SEQ ID NO: 494339 - protein, 416 aa, unidentified
MKIVRPICCGMDVHKNIIVATIGITNKKTRITEYIQETFSTLNPDLLNLKQWLINHKCFDACMESTGKYWIPIFNILEDEINIYLTHPKYVKAIKGKKTDKKDSKWICDLFKHDLIKFSFIPPKEIRALREISRYRYKLVGMRSSERNRYQNCMTVSNIGIGSVFSDPFGKSAQAIMKEVLESDIIEDEKILKCIHGSCKNKDKILDSIKHCNIETDQRFKMNESMTHMEELQVHIDNCEIEMMKRAAPMFDRFMHITQLPGISTLSAILIISEIGVDMKQFESDKQLTCWAGLAPANNESANKKKSVRISKAGQYLKPLLVQCALGAIKDKEGYFGIKYSRIKKRRGHKKAIIAIARMMLVSIYHMILTGETFNPSDYESFRNPKPPIKQQDLTEESAIEFLKKSGFDVSKLTKP

SEQ ID NO: 494340 - protein, 377 aa, unidentified
MKKVRFLGLDVHAETIAIAIAEPDGEVRSLGIIPNREESVRKLIKKLGPPEQLQACYEAGPTGYVLYWQLTGLGVKCEVVAPTLVPVKAGDRVKTDRRDARKLARSYRAGDLTAVWVPDEAHEALRDLVRAREAAKQDQLRARHRLSKFLLRHGRRPPAKVRPWTLKYMDWVRQQVQFEQPAQDFTRMDYLHEVEHANDRVQRLEEAIGEAVKLAPSQMREVIQALQAMRGIAELSAVTIVSELGQISRFDGARQLMGYSGAVASEDSSGERVRRGAITKTGNAHLRRVVIEAAWAYRHRPAIGATLQKRQQGVSEEVKEIAWKAQHRLHKRYRSLAAAGKNQQKVVTAVGRELLGFIWAIGVNVESKRSQLTPLAA

SEQ ID NO: 494341 - protein, 352 aa, unidentified
MKPKTKTTASLAVVGVDIGKEVFHLVGLGTDGTIAFRRKIRRSSLRDVFEQLPPCVVGMEACLSAHFVSRTLRALGHEPRIIPAIYTKPFVKGQKNDYNDAEAVAEAALRPNLRVVQEKSQTQLDLQACHRVRSRLVSRRTATINQIRAFLIEQGITVRAGARALRNSLFTILENRKNEISPRMAKLIHGLYEDWCCLDQRIETVTGEIEELSRIEPKCQRLMSVPGIGPLISTALVAAIGTGEAFERGRDLGAWLGLVPRQYSTGGRSILGRISKRGSRYLRMLLVQAARVLLMRPHTWSRFSFGAWLKAASERLHRHKLAVALANKLARIAWSVLRHDKAFDTHLEIAAI

SEQ ID NO: 494342 - protein, 349 aa, unidentified
MTDTITIGMDLGDKFHIAVVFDEQGNELNIFKVINNKKEVTRFFESYKNAKVAIEAGTHSPWISRLLREMGIHVYVGNPRKLRCIWDSTDKSDERDARMLGMVCRLDPRLLHPLRHRGSQAQADLAMVKSRDILVKNRNQLINHARGLVKANGDRLPKCSSESFVKRCEPYVPEELKPALATVFESISNLTQQIKELDRKIDQLSKQRYPETQYLRQVPGVGPVTALAFVLTIEDPARFSKSRQVGPFLGLTPRRDQSGEIDKQLPITKAGDKYLRQLLVGCAHYIIGPFGPESHLRRHGLMVACRGGKNAKKRAAVAVARKLSVLLHRLWVTEQTYDPFYGIKKKQAA

SEQ ID NO: 494343 - protein, 338 aa, unidentified
MTQFSNFVGVDIASASFMACAGIAPWKLKVKPAYFDNHEGGYIIFMNWLKEHHLTPENTVVCMEATGVYGEGLAYFLAASGYPVAVEPPLNIARKFPVNASKTDELDCQYIAEYACRYVDKLALWQPRNEILEQVKVLLTTRQQFSVQITAHKNALHAVNRKKVLSTVAQQVHQEIIQQITKHLANIDAEIRRLIGSDPTFKTSLLLLLSVPGIGLQLAAHLIILMQETLDPRELAAFAGISPIQHQSGTTVYSTPTSRHYGPPALRKLLYLAACSVRTHRREFKLYFLRKTAEGKPGKLVLNNIQNKLLKIACAVVLSQKPFIPNYVSVNPLLLKNA

SEQ ID NO: 494344 - protein, 355 aa, unidentified
MRFYSGHHQFYCGIDLHARQMYVCMLDESGEILLHRNMSAGPAELSRAIAPYVQGDLVIAVECVFTWYWIADFCAERKIAFVLGHALYMKAIHGAKTKNDKIDSRKIAMLLRSGMLPQAYVYPARMRSTRDLLRRREYFMHQQSELLGHIENTNTQYNFSPFGKRIAHRSNRDGIAERFADPLVATSIEADIQLLDLYHEILLKLEGQILTAARVHDPVALQLLRSIPGVGKVLALVLLYEIHDITRFPAVGQFISYARLVKCPHESGGKRFGGKGNKIGNVHLKWAFGEAAVLFLRGNEAGQRYHEKLVSRYGKAKAIAIIAKKLGRVVYTILKKRRPFDPEKFYSDAAHESVA

SEQ ID NO: 494345 - protein, 349 aa, unidentified
MRSYIMPKRDASNIYVGVDVHLTSWHITIRSQDEVLSQASIGGDWEELRKVVSRWRREQVIILYEAGFSGFCLYDEVVKWGGQCIVVPPSRIPVESGNRIKTDRRDSAKLAYLASTGRVPRVWVPSLSQRYDREVLRERRRLIRQARQVQCQIKALLHCYGLKVSSRPGRWSQVFESRLWQLQFNNCYMQESFARLLERYHFLREQIAAQTKLIKALSEREDYRDKVTWLTSLPGVGILTAMELLVELGDISRFNRADHVAAYIGLTPSEYSSGTAIRRGHISRCGKAAIRSRLVEASWIAIRFDQELAEVYRRIRVRQGGKRAIVAVARRLLLRVRRLWLDGRCYERP

SEQ ID NO: 494346 - protein, 316 aa, unidentified
MNETIVEKFVGIDVSKSTLDVCIEPDEKTLHVAYDEAGIKQIVDRLKEVSPTLIVIEATGGLEIRIATELASKGLQVAVINPRQARDFAKATGRLAKTDQVDAAMLAAFAKAIRPQARPLRDEDTCALNDMVSRRRQLIDMRVQETLRLGTAASKPLQKNLSKHIAWLDKQIAEIDADLTKRLRNSDVWRIKDDLLRGIPGVGAVTTLTVLAKCPELGTLNRREIAALTGVAPLANDSGKHRGKRFIWGGRADVRAVLYMAAVSAIRCNEPIKAFAERLKKAGKPPKVVIVACMRKLLTIMNSMLKNNEPWSPNFA

SEQ ID NO: 494347 - protein, 371 aa, unidentified
MGKHRLAYVAFDSAKNKHAVAIADSGRGAEVRYLGEIDNSPDAVRKLVAKLTRQYERLHFCYEAGPTGYGLHRQLTELGHVCDVVAPTMIPKRSGDRVKTNRRDSVALVKLLRAGELRAIWVPDSVHEAVRDLTRARETAMVDLKTKRQQLLSFLLRHGRSLPDGRNWTKTYERWLAKQTFAHPAQQIVFQDQLEAITSAQARLAGLEQQLREIVPTWTMAPVVAAYQALRGVSFLVAITFVAEVGDIRRFATPQQLMAFLGLVPSERTTGDTVRRGSITKTGNHRARRVLIEGAWTYRFSARVGETLRTRLKDLPSSVRAIAWKAQVRLCGRYRRLIARGKKTPVVTTAIARELSAFLWAIGQQVAPKTG

SEQ ID NO: 494348 - protein, 340 aa, unidentified
MAILAGFDVHRAQITFDALNTETGEVLRGRFRADREAVGEWVGQFAGEQVQVAVEACTGWLFVYEVLAGAGVMVHLAEPAEASALRGKKRHAKTDRADARWLRTLLAEGRLPEAWIPPAHVREWRTQTRLRKTLIDERTCWLQRIQATLFHHGIVNVPDQLLRANGRAFLHTLTLPPASLQRIEVALAIIDELDRQLVPLERELARLARRQAGCQALMRQYGVGPVTATTVLCELGDVSRLSASRKAVRCSGLDIGVYRSDRRSRTGRITRQGSPALRWALYEAAQAACKPASPDHADYLALKARGLSHTRASLTIARKLARRSFHILRELGPDALAPTA

SEQ ID NO: 494349 - protein, 436 aa, unidentified
MASHCQFYNYKFQEVILLSFKILKFKCCGLDVHKTWIYACIGITDSNNRTEYKQARFSSFTKGLNELCDWLAKYNCTDVCMESTGKYWIPVFNILEQHNLWVTLSHPKYTKPMKGNKTDRKDAKWICDLYMCGMVKPSFIPPADIRELRDLVRYRYKLTCMITGEKNRAQNCLTVSNLKLDDVFSDVFGKSSRSITEQILQHPGEKFDVAPFVHGRCKTPIEEIQAAVDGAISKEQAVKLRQCLDHIDELNKHISELEQEILRLSDKYEAALNLIRTVPGFDKNPMTAVQILSEIGGDMSVFPTAKHLVSWAGCCPRNDQSNQKIKSTRISRAGSYFKPILVQVANALIKSKKHLEFTNRYKRIKARRGHKKAIIAICRMILTAIWHILSDLKPYTPEGFLESHPVKEGKVLFSSQALNFFKQRGYIIKDEPLAVS

SEQ ID NO: 494350 - protein, 346 aa, unidentified
MKILALDLGKYKSVACDYEAESGEHSFATIVTNPKALHDLIVDREPDRVVIEICSIAGWVGDLVRNLGIELQVANTADERWRWRKVKQKNDRRDALKAAQLSAVNQLSLVHVPQIEVRQWRALIAYRHHLVRRRTKIKNHIRDLLLREGQLLPRGRSAWTQVGMAALEMMVKPLAEMQINELWRGELGVELAQLKELQTQIIAVEAKLDELAAADYRVRLLRTVPGVGPRLAEAIVTMFDDPRRFRTAGQVSSYIGMVPKQFDSGETERAGRITRHGHRLVRSLLVEIAWAALRHNRWARECFQRISGGKKSRRKIAVVAVGRKLLVRCWAMLRHQTPWRVSGAAA

SEQ ID NO: 494351 - protein, 359 aa, unidentified
MEKDSKKTAEKTRRYVGIDLGDKKSRVCIVDEQGKIVSQEWVVTSPEAFLKRFGGEAPMLMAMEVGTHSRWASELLRRVADARQLALITNSDAKCDKRDARTLALLVRADPRLLSPIEHRAETLQQDLTAIRMRDNLIETRTRLVSSVRGVVKATGARLPHCETACFPTEVADGIPEPLRPALAPVLEVIDQLNEEVYEYDCRLEHWARTRYPDSTRLTQVKGVGTLTALTFMLTVGDKERFSRSRSIGGYLGLRPRLGDSGDSHPQLRITKAGDGLLRKTLVECAQYIVGPFGQDSDLRRWGLKVIEEGNGSKRARQRAVVGVARRLAVLLMSLWKSGQTYEPLRHSRARESNQEVAA

SEQ ID NO: 494352 - protein, 376 aa, unidentified
MPRYFGLDLHKRYVHGCEWQVDAQKGRHFRFPNSEAGWATFVEQLRADDEIALEVTGNAFNVHDLLSSYAGKVLLANPLELKRLGAGRHTDRVDAERLAKMLALGMVPAVWVPPREVRDVRCLLQYRDRLVRNRRRYLTQAKSVFQRHGLPIPRKVDPRQWLNREALSQLPQAERVILLNTLRQLEAVDADLQAVEAEIARQVAGQPGVQLLLTITGVGLITAATVWAYLGDPSRFRTAKQVTRYAGLDASVLQSGEQDHRGRISRNGSKLLRTALVEAAHSVARHDQGPLGAFYHRKQRQIGRHKAIVALARKLLIVAWRMLLTGQPYRAAKPQLVAQKQRRLREAAQAVVDWDAVAEALWPDILEEPHRRRRVA

SEQ ID NO: 494353 - protein, 355 aa, unidentified
MNQEKYIGMDVHQATISVAVRDSSGKLIMECILETKAATILEFIAGLRGALSVTFEEGTSAAWLHDLLKPHVSHLVVCDPRRNALLKDGSKSDRIDARKLAELLHGNKLHAVYHGEHGLRTLKELGRSYLTITKDLTRVMSRIKALYRSWAIPCSGATVYAPRHRAEWLAKILEPGVRLRAERLYQQLDLLQPVRQEARRDLLVESHKHHAVKLLRQIPSIGPIRAALLVALLQTPHRFRTKRQLWAYSGFAVETHDSGEYRFVRGKLVRNRERITVRGLNHNHNHDLKNLFKGAAISASTRPGPLCDFYIALVEKGMRPTMARLTLTRKVAAITLTIWKKGAQFDAKQLHRQAA

SEQ ID NO: 494354 - protein, 438 aa, unidentified
MSNKVIFNLDELFISVGIDVGADFSWMSIALPNQQFVGKPYKILHNSIDSLTTAVSKIKEAEELYSLESRIFLESTGIYHYPLFCYLRDKGFNCSVINPIITKNSTNINIRKVHNDRFDSKKTALVGLKPDLKVSLMPSDLALNCRNLCREYYDLMDNRSAYVNKLQGELRMAFPQYLGIFSKITINTSLTLLETYTSPSAFLEADKQEIIDIIKSTARFGLTYAQNKYNAIIQAATDANQFGYIIDSNIKRIRLYISFIRKYDEEINSILESLHELVDANEDADFVKQIHLIETFKGAGFLSAVSIMGEIGDFSAFSKPKQLFAYFGLDPAVKQSGKFEGTKVQMSKRGSAIARRVIHMLTLQSISISRNGEAKNPVLREYYLKKCDSKPKLVAMGAVSHKVCNMIFAILRDNKPFKIIAPQEHIKQYNAAKCDIAA

SEQ ID NO: 494355 - protein, 375 aa, unidentified
MSEATPRNRYVGLDVHKETITVAVAEEVGRPEAWGTIANDPQAVRRLVRQLARESRQLKLAYEAGPTGYVLHRQLTQLGVECQVVAPSLIPKSTSGRRVKTDARDAEQLAKLLRSGDLVAIWVPDEEHEAFREVVRARFVAKKDVERHRHQLVKLLLRWGLRPPVSVSRWSKSYRRWLAGLSHPLRDLQTVLDDYRSALWAAEERLVYLEKQMSEAARRRPQLALLVALQILHGIGELTSATVVAEVGDFRRFARAGGFMNFSGLTTSEHSSGEKQQRGPITKTGNSNLRHVFIQAAHNARHQPQPRARLRQRYEGAPADLVEMAARAQERLYHRYWHLARRIGREKAVVAVARELAGFVWAIGQRMSDPAQQAA

SEQ ID NO: 494356 - protein, 335 aa, unidentified
MEITTIGLDLAKHVFQVHGIAADGSIVLKKRLRRGQVHAFFAGLKPCLVGMEACATAHFWARELRALGHDVRLMPAQYVKAYLRRGKNDAADAAAICEAVTRPSMRFVPVKGEAQQAGLMLHRVRDLLVHQRTQLINAIRGHLAEFGIVEAQGPWHLPRLLAGMEEASLPELARGLVRLLGSQLAEVELRIAEIDARIRAWHKADPVGQRLATIPGIGPLAATAIAATVPDPAVFRSGREFAAWLGLVPRQNSTGGKTRLGRTSRMGDAYIRRLLVIGAQSALWCSKATKANPWVQALLAKRPRLVVAVALANKTARTAWAIMARQTTYRAAAAV

SEQ ID NO: 494357 - protein, 487 aa, unidentified
MHPRTTNKPTQTSDDCGISFEFAGVLALDNEYSGFAVLPAHYIAFAERKRARPESTIYHFGRDDVKPLPTQPFTAHVGIDWADTKHDICLQVAGNEQREFDCIAHQVGCIDEWARALHKRFGGTIAIALELTKGPIVYALQKYDFFVLFPINPSTLAKYREAFKPSRAKDDPTDAELALDLLLRHPERFTPLQPQSAAMRTLLSLTEHRRQLVGDKTRLTNRLTNTLKQYYPQALDWFEQRDTILFCDFLARWPTLAQVKRARQASLTAFFHAHNTRRPKVIGARLESIKAAVPLTEDPGVIVPCRLHALVLVEQLRVTLHVIDQFDREIAELAPTLPDYSLFQGLPGAGPHLAPRLLAAFGEDRQRFQAADELQKFSGIAPVTERSGKKSWVHWRWQCPTFLRQTFVEWAGQTINKSFWAGAFYQQQREKGCSHQAAVRALAFKWIRILYRCWKTRTSYDESTYLNALRKRGSPLLNNLTLNPQNT

SEQ ID NO: 494358 - protein, 400 aa, unidentified
MNAVGIDVSKGKSTVAVLRPFGEVVASPFDVIHNDNDLKQLVKLIRSLPGESKVVMEYTGTYFEPIAQFLHNNGIFVSVVNALLVHDYGGNSLRNVKTDKKDALKLASYALDRWTELNEYVPADEQRKTLKLLNRQYNQSIKIQTTMKNNLISLTDSVFPGINRLFTSLERQSDGHEKWVDFLHAFPHKDCVAKLYLSAFKAKYKSWCSRNKYRYSESKAEKIHSYAKSVIAVLPLNESVKLIVTQVVSQLNTILETAFSIRTEMNRIASSLPEYDTVMSMFGVGKVYGPQLIAEIGDTRRFRNRRAITAFAGLDAPPYQSGQLNVSSRHISKRGSAALRKVLFQITEVFILSKPENEPVYQFIIKKRSEGKHYYSYRIAAANKFLRIYYAKVNQILNAT

SEQ ID NO: 494359 - protein, 346 aa, unidentified
MYYCGLDVAMKSSYLYITDQTGRKLTAGEIPTTADALQQRLRRYRRGGLCVALEAGNQSAWLYDLLTELGAEVTVVNPTRLKLIAESRRKTDKIDAKILCELLRLDGLPEPVHMPGPETRSLRGLLVARRQLVAARTKLGNVARGMLRQEGIALAARQLNSFVSWQRLLARSFSAAHLEPILRSYYESFVALTRSIQQLDRQLAQRERSDGRAAQLQTMPKVGRIASLTFLAAVDQVARFETSRKLVSYSGLCPTVRSSGERTEYGSISREGRSELRAVWVQIAHLVAADRSRSTARLRRWYRKVASHRGKKTAIVALARKLLSIAYRLLRDGTVYRSSLVCRPAA

SEQ ID NO: 494360 - protein, 355 aa, unidentified
MNSEKYIGLDVHQATICVAVMDAKGKVVMESILETKATTILEFLAGLRGTLSVTFEEGTWAAWLYDLLKPHVANLVVCNPRKNALLKHGNKSDKIDARKLANLLRLNDLEPVYHGESGVRMLRELARSYLTIVKDVSRVMSRLKAIYRSWAIPCAGRDVYYTRHRGEWLGKIPEAGSRRRAEQLYQQLDMLQPLRQQARRELLAESRKHTITAKLRQIPSLGPIRSALAVALIQTPHRFRTKRQLWTYSGLGLETRDSGEYHYVQGQVRRRKKQVFIRGLNKDHNHDLKGLFKAAATRASVRPGPFQDFYQRSLAKGIQPTMARLTLARKIAAITLTLWKKGENFDAEKLKAQAA

SEQ ID NO: 494361 - protein, 330 aa, unidentified
MHKKKTVFVGIDVSKSTFNAHWQGVDAEYANNRRGWSKLLLDAPENSTFGMESTGNHHYRLAAFVHSKGYPVKVFNPYLARLWARSLGGIAANDKIDARNLSKYAATDQVAELSWEPLSPELARARAIVSVLSGLARLTSRSKQMKKAVAIIATGKNKDIPDVLGYVAAVCEEQVEALEKELCDIIADVYPAQFELIQSIPGIAAKTAAVLLVFTRGFEKFETHRQLVKYIGLAPTVHDSGVSVNVKGHISKTGNPYIRSLLFLCAFSAARHNTICEDLYSRLIARNKKPKVAFTAVMHRLLKIAFGVVRSGVPFHGGSLGVKVAKTGHA

SEQ ID NO: 494362 - protein, 370 aa, unidentified
MAHTSTLFIGLDVHKETIAVAYGSEEREAEVVFLGTIGTRQCDLDKLIRKLQGKGKKLHLVYEAGPCGYWLYRYLTKKKLLCWVVAPSCIPKKASDRVKTDRRDAVQLARLLRSGDLTPIYIPSVDDEAIRDLVRAREDVLKDLKAAKVRLKAFLLRQDIRYEGRATWGPAHLRWLADVVCPTPPQQIVFQEYVRAVSEQTERLQRLEAELQSLVPTWRWVPVVEAIQALRGVQFTAAVTLIAELGDLTRFANPRQLMSYLGLIPSEHTSGERRRQGSITKTGNSHARRVLVEGAWAYRYPAKVSRHLQLRLEKVPKVIQEISWKAQVRLCKRYRRLVARGKNVNQVVVAIAREMAAFVWASAREVTVAH

SEQ ID NO: 494363 - protein, 307 aa, unidentified
MRYIGIDISKSSFNVFIPPAGNYVFPNDASGFSELLRLLVPEDIVGMESTGNYHQKLALFLWKEHFCVKILNPIMVNQFIRSTVRKKKTDRSDAVIISKLVEQGEGYETTEKQLTNRIRKLTRTKQKLVQQRTSLKILLKTTETDTADCSCIKKSFIRLIKNYDAEIQKLEKEILKTTSTESNILKSIPGISALFACAIVGELGDISRFSRTKQIVAYAGLDPKISQSGHSVNRKGSLTKRGSSLLRQILFLAAFANITRDTVFSRYYRKKRVEGKHYYQAMTATSRKILEVCFVLLKKQEFFLDSP

SEQ ID NO: 494364 - protein, 344 aa, unidentified
MKTSKNAVRLGIDLGKNTFHVFGVDERGEQVVKRKLRRGQLLGFLANLPPTRIGMEACSGAHHWAREIEPLGHEVRLMAVQFVKPYVKGNKNDYNDAEAICEAVSRPGMRFVTVKSVEQQDMQALHRIRQGAVRARTALGNQIRGLLAEYGIVVAQQLGQLRRAIPQILEDAENGLTDFFRALLAQQYEQLVEWDRRIEGYDHQIESLFRSHEACGRIAAVEGVGAVGATALVAAFGDARQFASGRQFAAALGLVPRQHSTGGKSRLLGISKRGDRYIRTLLVHGARAVVQAVLAKDKTDARSLWIKRLVADRGKNRATVALANKNARIIWALLTRGETYRVAA

SEQ ID NO: 494365 - protein, 425 aa, unidentified
MEVFLERCAGLDVHQASVVCCVLIGAPGRKAQKLLRSFGTTTRELETLRAWLAEHGVTHVGMESTGVYWKPVYAVLEGHFDLIVGNAHHIKNVPGRKTDVKDAEWIAQLVRHGLVAKSFVPPPAIRDLRELVRHRRTLIETRTAVRNRVLKLLEGANIKLSGVASDVFGVSGMAMLEALAAGTNNASEMAGLARGRMRRKHAALEAALDGRMREHQCFLLGMQLRTLGTIDQDLEALDARIEAQLEPYQAQHRLLMQIPGVDWVTAAAIIAEIGTDMDVFASARRLAAWAGVAPGNYESAGKPKGAGTRRGNVFLKSALFAAASAAVRTKGSYYRDKYNRLRARRGPVRAIMAIAHKLLIAAFHMLSKGEAFRNLGESYLDQVARKRSTAKLVQRLSNLGYDVTLRANDNETSSAREFSLEGAEG

SEQ ID NO: 494366 - protein, 342 aa, unidentified
MEHYAGIDVSLERSSVCVVDATGRIIREAKVPSEPEALVAFFGQLGLRPTRIGLEAGPLSQWLHAGLAQVGFEVVLLETRHVKAALSAMVVKTDRKDARGIAQLLRMGWYRPVHRKSPPAQEIRALLVGRKLLQAKLRDVELSIRGILRGFGLKVGEVSKGRFAARVRELVAGHEMLEAVIAAMLQARDGLQTEFMRLHRRMLAIVRSDAICRRLMTVPGVGALVAVTFKTAVDDPGRFRTAKAVGAHFGLTPKRYQSGETDVTGGISKVGDAMVRTALYEAANVMLTRTTRVSTLKRWALEVTRRRGMKRAKVALARKLAGVLHRMWANATDFRWGKEVIA

SEQ ID NO: 494367 - protein, 343 aa, unidentified
MARFVGLDVSQKLTSICVVDDTGRRVWRGQCATDPEQIARLISQHAGIAAGIGIETGPMTPWLVHELRARGLNVTCLDARHASAALKMQMNKTDQNDAEGLAQIMRTGWYRSVHVKSLDAHRARALLGARAQLVGMTTRLSNHIRGVLKTFGLLPGAIRGLPFDRRVETLLADRGDLASIVRPMLSAWRQLREQIAAFDKEVRGLAKKDPICRQLMSVPGIGVVSVLAYVSTVEDPKRFARSRSVGAHMGLTPRQYQSGEVDRSGRISRCGDTLARTLMYEAAVVNLTRVKRTSSLKDWALAIAKRSGPGKARVALARKLSVILHSIWRSGEAFRWSEQPAVR

SEQ ID NO: 494368 - protein, 422 aa, unidentified
MDSVENTRPVKTENVRYVALDIHKHYSMIGAVNRDSELLVDPRRVEHSHLEAWLRKHLKPTDRVVIEATTNAWHIYDLIEPLVTEVVVANPMKIKQIASARIKTDKLDVLILARLLAANLIPTVWVPPMHVRELRSLVSQRRKQTQMHTQVINRMHSISHRHHLGHPKGKRFLPKDCAWQQAECLSNMEKLQLELDMSTKAHLRGQIDRLTQEMATLSTEEPWVTDALYLMQIPGFGVVTTMTVLAAIGDISRFSHPKKLTSYAGLAPGLHQSGVKLRGKGITKEGRKELRWAMVEVAWRCLKGNSYWKDRFETLKKRMHSNQAITAIARHLLVIVWHVLSKQEPYRQITEERIAYKFLTWSWQLNEQQRDGLSRPQFVRYNLLRLNIGHDLERITLNPKYPRRIAPVDEVLALRPELRPSS

SEQ ID NO: 494369 - protein, 347 aa, unidentified
MKRIAVDLAKSVYQVAESVQVGRVDRRKRLDAGAFARYVQEQIEPVEWVMEACGTAHHWGRLMQEKGHRVVLLHPRYVRPYRRRNKTDRNDCDAILEAARCQDIRPVPVKSVQQQQVQQLHKLREGWKKSRVQRINLLRGILRESGVEAPNGIKPFLRQACELIERPEVRALRGALQVVLAEINLYEQSMRECEEQLARWHADDEIVRKLDEVSGIGLLTASAFKTAVGKPERFASGRHLSAWLGMTPNEYSSGERRRLGRISCKGNVYVRTLLIHGARAALLAAKRCKARTPERLTQLQSWALQTAERIGHNKAAVALANKLVRICWAVWCHERRFSGNWHSTKPA

SEQ ID NO: 494370 - protein, 367 aa, unidentified
MVRKSRITKRDFTMNESTSPSVEHVHWVGVDVAKKTFDAALVRDGQKYPATPIASIPVRSFSRTPRGVCELVEWLDSLLSGEHPSCAVRAVMEATGRYSTELAVWMAECRPALAPAIQPPHHTAAFIKSMGLRSKTDKLEARALGFYGMERQPVAYKPANKQEAHLRDLTRHRDFLVRQRVAEANRAEEVKHCSFARKMADRRLAQTDRDIEKTEAQMHKVVDSTPELKGDIDQLRTIYGVGFIVAATVRAELGDLRRFEKARQLSAYAGLTPAIRESGTSVKGRPHLDKNGNPHVRQALYLAAMVIIRGKNNLQRDYLRLRENGQAPKSALGAVMRKLLVLMRAILISGKPFDPMWKTQPKCVRVQ

SEQ ID NO: 494371 - protein, 343 aa, unidentified
MRVSIGVDSHKGSLAAAGVDELGRVLGVKEFPNDPAGHLALLEWARCYGEPRMIGVEGSGVYGAGLCRILSSSGERVHEVPATLTFKERRHKGSQGKSDAVDAVAIARIVARGEDLPSPRRTPSLVNLKLLSDYRDQLVHTRTQLANRVHQDLVVLCPGYERRVPNLVGAKHVAKAALLVRGDPSVRAELARRRIGELRRLSKEIAGTTARIEDELAQSETTLTDLLGIGPILAARILGEVGDIGRIRSQAAFAMMAGAAPLVASSGMTNRHRLNRGGNRKLNFALHYIALVRYRTDEETRAYIERRRAEGKSFKEAMRCLKRHLSNVVYRRMIADSRAAEAA

SEQ ID NO: 494372 - protein, 310 aa, unidentified
MIITPGFIGIDVSKHHLDVFEGGSSRSERLANTEEGLAVLMARWKGSGAFVVFEATGHYDIRLRRALAAADVAFARVNPARARDFARAAGVLAKTDMIDARMLAAMAQYLSPARATDGDSDREALSLAHKRRDQLVHARQQERTRRSECSEAAILADIEAHLEWLDVRIAQWDEEIRRLLAQSERLNHIARLLRSIPGIGPVAATTLIALMPELGSLQPKKITAIAGLAPFNVDSGQFRGLRRIKGGRKRVRDALYMAAVAAARSHDRFRTMYLRLRAAGKPAKVALIAIARKLLITANAVLRDKTAFQS

SEQ ID NO: 494373 - protein, 410 aa, unidentified
MERMLERCAGLDVHKKTVTACVRVPGTHGDRTQHVRTFDTTTAGLLVLRDWLAAHAVTHVAMESTGVYWRPVYYVLEDAFACILANAAQIAQVPGRKTDVKDCVWIAQLLEHGLIRASFVPPAPIRELRDLTRYRKVLIQERTRHANRLHKVLEDAGIKLTSVASRLLGVSGRAMLDALVAGTTDPEVLADLARGRLRQKLPALRQALVGRFRSHHAFLVSQLLAHVDYLDEAIQTVGGHIDEVMVPFTDELARLDTIRGINKRTAEVIIAEIGVDMTVFPTAKHLASWAGLCPGHNESAGKHRSGKTRPANRWLRAALIEAALAASTRAAPGAFAARYRRIMPHRGHKKAIVAVAHAMLVTIYHQLTRQTTCHDPGTDYYDRRHAERLRRRALQTLERQGYRVTLEPAA

SEQ ID NO: 494374 - protein, 372 aa, unidentified
MMEVTTFVGLDVHKRSTSVAIAEAGRGGEVRFHGEISSTPEALRRLVKKLERPDRRLHFCYEAGPCGYGIHRLLRGLDQDCIVVAPSLIPRRPGDRVKTNRRDATALAKLHRAGELTAVWVPDDAHEAMRDLVRARSTARRVLGKARQHLQGFLLRHGRIYSGTRGWTRAFRRWLATVRFDHPAQQIVLQDYIHAVEDAEARLARLEGQIEELLPSWSMAPVVEAVQAMRGVGLIVAVTVVAEVGDFSRFAKPRQLMAYLGLVPSEHSSGASVRRGGITKAGSAHARRVLIEGAWTYRMQARVSSKLLDRIEHLPKEIRDIAWRAQLRLCNRYRRLAAAGKPKVVVTTAIAREMVGFIWAIACSVQPRPAPG

SEQ ID NO: 494375 - protein, 348 aa, unidentified
MDHVAIDLGSRESQVCVRAADGEILEERRVGTRSLGKYLAGRPKSRVVVEACAEAFSVADAALAAGHETVVVPASLAPALGVGERGIKNDVRDARNLSETSCRMRKLPQVHVPKQISRDRKAMCGMREGLVQARTKLVNTVRGWTRPQGMGVIRSGAPSTFPSRVSEHVSKRGGKVPKYVELVLKAIEALNAQIEAAEQLLEEMAATDPTCQLLMTAPGVGPTTAVRFTAAIDSVERFPNAHKLESYLGLTPGEDSSSQRKRKTAITKAGPSKVRWVLVQAAWAARRYYKDDPIVLWSKEVQERRGKHVAVMALARRLAGVLYAMWRDGRPYDKSQRDRVTRAASANT

SEQ ID NO: 494376 - protein, 355 aa, unidentified
MNEYIAFDSHKHYTLAERENVVDGRVVQQRIEHRRGAIAEYLKGGEPGTAVAVEATGNWYWIVSEIEQAGKTPRLVHPRKAKLMMGMINKTDKLDVHGMNRLQRNQSLPTVWIPPAELRDLRELTRTRMVLSQQRARLKNRLHATLAKYALGVEGFCDPFGKGARPVLEAQFRLFPEQTRWVSELLLKQLDFVQEQLDQQETRLVELIKQTPEMKRLRTLPGVGPILCGVMALEIGDVKRFASAERLASYAGTTPRVQASGDKVRYGKLRADVNRYLKWAFMEAANVAAMNHRRWGDRHVGRLYARLRQRKGHAKAIGAVARHLAEAAWHVLSREESYRDPCLGRVSEGVSAVSS

SEQ ID NO: 494377 - protein, 349 aa, unidentified
MIWIGVDAHKKLHQAIAISESGVVGERTIPNTAAAWAALLEWARQWPERIWAIEGAWYLGRGLAQYLAEQGERVHEVNGKWTAQRRRGMRRRGKSDRLDAHSVATLLREEADTLPRVYAQDDKLAAVQLWSRTHAAVTKDTTRLINRLHELLLLCESEYKGKLPELTTKAAIAALRAYTAPGSGAIAREREAVIRASAAQLALLDEQRNDLRRKLERAARSSFRPLMAVEGIAEINACASVAECGMPRPGFGEEQLAALGGLSPLEASSAGGVRHRLNRGGNRRLNMVFHQTVLTQGRMYAPARTYLARRLAEGKTAREARRALKRLVVRRVYRAWRACFESDAERVAA

SEQ ID NO: 494378 - protein, 481 aa, unidentified
MQGAAEGTMQTTIPGVVACGMDVHKDKIDVCVRTGDGSADGNVIIKTFSTMRNSLYELRDWLISLNCFKVLMESTGVFWMPIYWILEEVRGMNVGVGNSRDLKNAPGRPKTDKEDAKWLSRLCMFGLVLKSFVVERPFRALREYTRYHKKLVQERARQINRVEKLLQMNGFKLSSVLSSITGVSSMRILTKLAEKGKLSVSDVRAELDKRCKSTPEEIESAINGEMKPTSRLLLRFQLEKIRRCDDEIYEVYDFMLHLSQEHQWAIDIIETIPGMSTLSAVYVIAEIGTDLSSFKTANHLAAWAGLAPKDNRSADKARASKTQKANQYIKSLLVQCAWAATKTRGTRLSLWFWRNKTRLGDKKAITAVARKLLRYIYAMLKNGTYYDRSLDVAYADNIGAIKLEAAQKIVGSRKRKAPTFDKRSNDDSGEVSGIQNGSSGESESASDKADSGKPPTDGIESTNDKAPPKKRGRPKKAVAPD

SEQ ID NO: 494379 - protein, 412 aa, unidentified
MEGETVIAGVDTHKDVHVLCLLDGLGRKIWSGSFGADPEGYDRLAEAIGDPGSCMVVGVEGTASYGAGLTRRLAELGYNVVEVLRPKRDKARPGEGKSDPLDAERAARKAASGRGCSVPKSQDGWVEAVRQLYVARRLAVATSTSCVACAKSMLTTAPSALRERFRGRERPKDLMPLLARGRKAGDALEESVLASLRSVAAVWKEARSQVESLDERIRALLEANAPALLGVEGCGTTTAAALVVAAGDNPGRLKGEAAFSMLCGASPIPASSGKTERHRLNRGGNRQANWALYEIAIKRMAYDERTRRYVARRTSEGKSRREAIRCLKRYIAREVYRVLMDPNPDGAAPEGPELAKMRKAMRVTQKQAAAGLGMSAASLGHLEHGRRRSTKLERRYYELLCELERALPQTAY

SEQ ID NO: 494380 - protein, 350 aa, unidentified
MVVVGTDVHKRTHTFVAVDEVGRKLGQKVVAATTAGHLKALVWARAEFGDDLLWGIEDCRNLSARLERDLLSAGQSVVRVAPKLTAQTRACARTRGKSDPIDALAVAQAVLRNPDLPVAAHDEVSRELKLLVDRREDLVAQRTSTINRLRQRVHELDPAAEPKLGSLHRAKSCAVLGAWLDTQTGLLAELARDELADVMRLTEAIDALAARVGNRVHVVAPTLVALPGCGELTAAKLVAETAGVSRFRSEAAFARHSGVAPIPVWSGNTAGRVRLNRSGNRQLNAALHRIAITQIRLPDNPGQRYYRKRLAEGDSTKEALRCLKRRLSRAVYTRLNTDERTRQTLKPAAA

SEQ ID NO: 494381 - protein, 425 aa, unidentified
MHSKMNNKINQVTENTLVVGIDIAKHVHYACFVDERGRVIEKAFSVYQSKEGFESLYEKIRQTLLETQKTEVIVGIEPTGHYWMNLAYFLDQYDIPLVMVNPMHVKRSKELDDNLPTKNDKKDALVIARLLKDGRFSYPRILKEVEAELRIGSTLRSKLTEDLASIKNRIIRWLDRYFPEFTQVFPSFGKMALTALERTPMPQDIQGKTAEELVFLYRQVGGMRAPQLPKAKLLIEKASNSIGLTEGQKMAKHEIATLLRQFRLLEAEIEAVNDQLTEMAKTTMEYDLLASVPGLGDATIVDLLSEVGSFSLYENPRQLIKLAGLTLRENSSGQHKGQKHISKRGRKRLRHILFKVIVPLIRHNLAFKQLHEYYTTRNQNPLRGKQSMVVLCGKLLKILHGICKKKVYFNEQLMMKDLYCLGEAA

SEQ ID NO: 494382 - protein, 356 aa, unidentified
MSSVKYIGMDVHAATIIICVLNANGRLLKEDIIATGAEAILNFVASQRGSLHVTFEEGEQAAWLYDLLGDRVERVIVCDARRNAALRQSGHKDDRSDARHLAEWLRTGNLTAVYHGERSLRALQELKRVYTTLVEDCVRTMNRLKSLFRGRGIACSGRSVYRPSQRTEWLQRLPDDGVRQHADLLYQELEAQQQLRRRARHDLLAESRRRPAQRILLRIPGWGPLRVALLMAIVQTPYRFRSKRQLWTYACLALVTAATGEYLLQQGRVVRSRRPAQVRGLNQNGHRELKALFKGAVFTACHRDPVWQELWASRVARGQKPQNVHLTLSRKMAALVLHLWKKGETYDARQLKAQAV

SEQ ID NO: 494383 - protein, 367 aa, unidentified
MKKIIAEKTTRRIKQADGKLTIGLDLGDRSSSYCVVNKDGEVIKRGSVATTKKDLNRIFGALRHSRLALEAGTHSPWVSRHLKELGHEVIVANPRRVRLITASSNKNDRLDAEMLARLARVDPKMLSPIRHRGETAQADLTVIRTRASLVEARTRLINTVRGLTKSFGERLRKCDARYVNEEMAQGLPGPLKEAMGPLLKQIGQLSGRIKEFDEAIQKMARERYPEVELLTAIAGIGVLIALTFILTLEDPHRFQRSRDVGAYLGLRPRRRQSSQSDPQLGISKEGDVYLRKLLVQGAHVILGRSGEDSDLRRFGQKLAARGGKGAKKKARVAVARKLAVLMHHLWVTGEVYESLRKTQAPGEPVAA

SEQ ID NO: 494384 - protein, 409 aa, unidentified
MEKTEKRYIGLDVHKHYLIALGVDADLNVVLPARRVELSRLESWMKKILTKQDEVVLEMTTNTWQLYDELVAYAGSVMVVHPPHVALITRSQVMNDKIAASILARLLAKGLLVGIWIPPQEIRAARGLVAQRQKMVRLATQAKNRLHAVIQRHHLVPPAGNPFGASTKAWWQSLPLGKLEKLNLQSDLETLQFAEKQVKDMTEIMEGMAAEQEEIGRLLHLAGFGVVTAVTVWAAIGDIERFAEPRYLVGYAGLGTRVHDSGMTMRSGKITKAGRRDLRTVLIEAANVAANNHPHWKAELARLEPRLGRNKAIVAIARKLLIAVWYVLQGKTDKYAEPQALAQKMLRFAYTVGKANRPKGQTAAQFARVRMDALGLGGELTRIPWGSKKPIPLPPSALKTERSDVPNTK

SEQ ID NO: 494385 - protein, 325 aa, unidentified
MILGIDIAKKKFDVAFFSESTLLSSGTFTNDLAGYKKLLSWLSKQTEETIWSCMESTGSYGESLALFLFEAGHKVSIVNPSRIRKYADSKLVRNKTDLLDAKLIADFCRTQEPLLWQPEAHEKSELREISRRLNALLDERTREKNRLESGVKSKIVKESIESNIAFLSEQIKSLEEKTQEHIDQNPDLKEKQELLISIPGIGKKTATLILGELPSVDRFQHVGQVVAYAGLSPQQRSSGSSVRKKTRLTKIGNRNLKTALFFPAMTAMKHNPVIIALALRLQKKDKENMVILGAAMKKMLQIAYGVLKSGQPFDPNYAISSNISA

SEQ ID NO: 494386 - protein, 412 aa, unidentified
MEVVHRRCAGIDISKKDAKVCVRVQGSGRRAATASVTTWGAMSNEILALREHLIAEKVTCVVMESTGDYWKPFYYLLEDAVNMMLVNPRDARNRPGRKTDVSDAAWLADLGAHGLLRASLVPPPPIRRLRDLTRARTDLNRDRVRQIHRLEKILQDAGIKLSSVATDIMGQSSRAMLEALIEGKTDPAALADLAKRRLRSKIPALTEALTGRFTPHHGYLIRMYLDLIDSYTAALSDLDTQIVDALSPPIAAARDLLCSIPGWSTTVAEVFLAETGGDMTAFPTAGHLASWAGVCPGANESAGRVKSTKTRDGNRNLKGALGIAALSAARSRDTYFAAKYRRICAHRGPMKALVAVERAMVVAAHGMLTNGDFYRDPGAEYFTARRPGPIKANAIRQLQALGYAVTLEPATA

SEQ ID NO: 494387 - protein, 334 aa, unidentified
MSLELLAIDLGKRSFHLYGIDTDGVILSQKVSRAKLADLVGNLAPTAIAMEACASAHYWARCWLAAGREVRLINPRFVKPFVKGSKNDAVDAEAIFEAAMRPTMRFVPVKSTDQQDLQSLHRARDRLICQRTAVINHTRGLLAEYGVVLPQGPWRFMAQAPTAIAGADLSDLARAIFGELMGQLDDLDRRIQKLDAMIVTLCRTNETCRRLAKLPGVGPIIATAIVGSVNDGRQFRSGREMAAWIGLVPRQYTTGGKPRLGGIGRRANHYLRRQLIHGARAIVSRSAKHDDRQSTWLKALVARRGFNRTIVALANKTARVAWVLLSRKKEYAAP

SEQ ID NO: 494388 - protein, 342 aa, unidentified
MSEATFIGIDLAKRVFQLHGARDDGSVVFRKKLSRPQLIAFVSQHPRCVIAMEACATAHGWGREFEKLGHEIRLIPPIYVKPFVKRQKNDAADAEAIVEAATRPTMRFVALKSEAQQARAMLFRTRQMFVGQRTQLINALRGHLAEHGLVVARGPAHFKRLADAIEDDDTALLQDIRELGRMYLEQIEGLNARIADIDGKVKSAAKEDGLAQRAQTMPGVGPVTALALETFVPDLATFRRGRDFAAWLGLVPKQHSTGGKQRLGKTSKMGQRDIRTLLVSGAMAVLQAVERFDTSSNGWLKRLLSRKPRMVAAIALANKMARGLWAMMTKQEDYRNPAAMMA

SEQ ID NO: 494389 - protein, 312 aa, unidentified
MTDIICGVDVSSKWLDARIGRNGPSARFANDREGVEALAEFCQAHKVALVAMEATGGYEKRPFALLWARGVPAAIVNPRAIRRFAESMGLFEKTDQIDAGVIAWYAEVKPIKPCEPASDTQERLAALVVRLRQLTELRTAQTNQRRLVSDERTLASFQEVLALLARQIHSFEDEIATLIDGDPLWRELGQTFRAIKGVADRTVAGLMAQLPEIGTLSGKAIAKLVGLAPIANDSGKRNGKRPVRGGRSPIRAILFVVAEIVRRHNPDFAVFHKRLTDAGKPKKVVRVALAHKLLVRLNAKARDVRRQAALAA

SEQ ID NO: 494390 - protein, 347 aa, unidentified
MSNVPVFVGLDYHQDSIQVCVLNQQGDVLLNRPAGNDCDELFRLVHPLGRVQRVGIEACCGAADLGEELVDRLGWSVSLGHPAYIARMKSSPDKSDFSDGRLLADLTRVGYLPHVWLAPASIRELRQLVNHRQRLVDRGRALKLQVGAVLREQRVKIPKDRGSRWSKAWTASVRDNDQLSKHGQWIVNDLLDELVHNSGKVKAAEAKLREAAEGDRVIVKLMEQPGVGEVTAWVLRACIGEFSRFKTAKQLSRYCGLSPCNASSGNKVADAGLIDGCNKMLRMTIVQAAHRLIRTVQRWSKLAESLKKRGKPACVIVGAVGNRWMRNLHHAMKPESKTDPLAVTTQE

SEQ ID NO: 494391 - protein, 446 aa, unidentified
MTQREDSKIIGIMHPICCGLDVHKETISVCVIFPDKDGVDQYDIKEFGTFTDDLMHLRSWLLDHCCPVVAMESTGIYWRPVHNVLEDSVQVVLVNARDIKNVPGRKTDIGDSKWLAGLLRHGLLRGSFIPMKEVREWRDLTRLRKKYVHTVGDYRKRAHKLFESANIKIDSVVSDLFGVTGRNLMNLLVFDRKALTLEDIHQCVRGKLKGKEEELYRSIQGFFSDHHRFILKRLLHTIDLLEEEISMFDAQIRHLMKDQNALLDRMKKAAGIADVSSREILAEIGPDLTAFPTGEAMISWSGLCPGNNESAGKRKSGKSPVRKHHLKTIMIEVAWAAVKKKGSYFKDKYYRLKARRGAKKAIVAIAHRILLGLYYVIRDGVEFRDLERITSHRETKLRRCRTCESRLNYWVSIWCRKQRDRQKQKDKMGHKSFHYRGRLRTEAKSA

SEQ ID NO: 494392 - protein, 417 aa, unidentified
MDVMAERCAGLDVHRSTVVACVLLSEAGGRTKKAKAEFTTTTAGLGKLVAWLREHGVSVVGMESTGVYWMPVYAALESAGGFELIVANAQHIKAVPGRKTDMNDAEWVACLVRHGLMRPSFVPPKAIRDLRDLTRYRRTLVEAQASERRRLIKLLEAADIKLAGVLSDVFGVCGRLILRAVIAGDQSAAEMAKLARGKLRQKRPQLFDALSAQVDPHRRGLLAMQLTRVEAAEADIAALDAQIAIHLAPYARQLGLLMAIPGIDRVVGATMIAEIGVDMTVFATAGHLAAWAGVCPGNNESAGKRKPTGARKGNPHLKTALCNAAIGASRKRDSFFKAKYHKLKSRRGGGRAALAIAHKLLVVAYHVLSTGAEYRDLGETYLDKRNAQRSAQRYVRRLENLGYTVTLNPVAQTANAF

SEQ ID NO: 494393 - protein, 430 aa, unidentified
MTKLKHTPADSILVAIDVSRQRNDVLIEIPGISRHHRLVVLNTRTEHDRFIDRLRDIGRPVIVGFEATGNYHRPLAYRLLQAGFELRLVSSVALARTREALHNGWDKNDPKDAQVILHMLKIGATQTYCDPICSGINDIQELSKTHEVISKAKTELWHRLLTHYLPLYFPEIARFAGNSRSDWFLALLEQFPIPASITALSKERFIDEAWGVVGRKVSKARLLGDIYETARSSIGLPVTMDSRAITMFRLVIAEGRSLIRQRDAIEQQAHAALADNLDYQHLRQIPGIGPIIAMTILAEAGDLRRFRHHRQFLKFCGLDLATHQSGQFRGQTKLSKFGNARLRRAFWVAAQVAIRQRDNGFRAKYERYVARDRDNADLKRKALTAITAKMARTTHAVIKTGSDYRPFFEGPMPSGRTSLSRCREGATATL

SEQ ID NO: 494394 - protein, 376 aa, unidentified
MREKLRFLGLDVHAEMIAVAVAEPDGEVRSLGTIANREDSIRKFIRRLGPPEQLRACYEAGPTGFVLYWQLAQLGVACAVVAPSLVPKKPGDRVKTDRRDALKLARSHQSGDLTAVWVPDEDSEALRDLVRQREAAKQDQLRARHRLTKFLLRTGRRPPLGLKAWTERYIAWLEQIRYTQPAQEVTLVDCLNEVEHMSARVKRLEEAILEVVKLAPQPMQDVIRGLQTLRGVAHISAVTIAAELGNISSRFESARKLMGYCGVFPSEDSSGKRIRKGGITKAGNAHLRRIVVESAWSYRHLPPVGAKRRKRQQGVPAEITEMAWKAQNRLHKRYMKLTMAGKDQREVMTAVARELLGFIWAIGIKAEAAGKQQMAA

SEQ ID NO: 494395 - protein, 351 aa, unidentified
MRIIGVDLHTRQQSVAMLDTDTGEVIEKTLEHEGDEVREFYSALPGPVLVGIEATGSMPWFLKLMEELKIECRVGHPAKVRAAEARKQKHDRRDARLLLNLLAENRFPAIWMPSTEQRDLRTLLRHRHQWVRMRTRVQHTLQSLALANGLRRGTTLWSQVGQHALQALPLAPFAGQRRAALLALYPVFQKAIDDLDQQVSEQALLHPQARRLMTHPGVGPVTALATEVFLGDPLRFVDGKAVASYIGLIPSERSSGRRQRLGKLSKEGNALVRYLWGEATIHAVRRDPELKRFYRRKLMQKGLGKAKTAAARKLGIRLWIMLRDQIDYKEFCRRGQLRQKSGDARAGMPGR

SEQ ID NO: 494396 - protein, 409 aa, unidentified
MEVIHRRCAGLDVHQETVVACVRIQTRGRARQEVRTFSTPTSGLLALSDWLVDQGVTHAVLESTGVYWKPVWHVLEGSVELVLANATQVRNLPGRKTDVADAAWLADLLAHGLVRGSFVPPVPIQELRDLTRTRTQLVREAGRHTQRIQKTLEDANIKLTSILTDVMGLSGRTILRAVVDGTTDPAALAALRRGNRLKATQEQFVEALTGKIRDHHRFLLKLHLDQVESIEATVALIEQRIGGLTEPFRGQIELLKTIPGVSDTIARALVAEIGLDMTRFPSAPHLVSWAGLCPRSDESAGKRRSTRLRKGDKWLKTLLVQAAWAASRKKDSYLRALFLRLKARRGPAKAAVAVAASILTSAYFILQRRQPWNDLGANYFDTRDRAKLANRLVKRLENLGLRVQLSDAA

SEQ ID NO: 494397 - protein, 342 aa, unidentified
MQIAILGIDLGKNSCRVVGLDVAGRVVLRRRLRRDGVIKLAAGMPGCVIAMEACCGAHHLGRLLREHGHQVRLMSPEYVRPYVKAQKNDDRDAEAIAEAATRPTMRFVELKSEAQLDMQSLHRARDRLVGERTALINRLRAVLLERGIVVSQGRRKLERYVDALLAEEEIRFSPRTRLLVEDLRAEWRELDRRISAFDDEFAAQARTDETARLLTSNPGIGPLIATALTAAIGNAQTFGRGRDLAAWLGLVPKQVTTGGRPKLLGISKRGNGYLRKMLIHGARAALPTLSKGETPLGAWLRGLLARAHVNTAVVALAAKLARIAWAVIRSGEKFDMKAATAS

SEQ ID NO: 494398 - protein, 378 aa, unidentified
MKRILKIGMDVHSTNYTLCAMEPVIGAEDRVFANIQVTPDYKNIILFIENLKQKLGLKDTYDIECGYEAGCLGYSLYNQLTAAGVKCVILAPTTMLTEQGQRIKTDSRDAHLIAQCLSYGGYHPVYIPTEQDDSVKEYLRMRDDHKKALKKIKQQIGMFCIRHGYYYEGTKWTIAHLKWLKKLELAQMYRETLDEYLASYEEQTAKIERFDARIEEIASQTEYAEKVKKLGCFLGIKTHTALSLIVETGDFTRFAKGNVYAAYLGLAPGEHSSAVKVNRLGITKAGNSHLRLLLVEAAGGICKGAIGHKSKALKQRQQGNSTEVIAYADKANSRLRSKYYRLIRHGKKRNVAVAAVARELACFVWGMMTDNINVIEAA

SEQ ID NO: 494399 - protein, 323 aa, unidentified
MQGKVLLERSAEEPMYVGIDVSKEWLDVYFHPAGSRLRVSNDAAGLRSLKRKLAGLGAVQAIMEATGKFHRAAWRSLAAGGFAVTIADPRRVRALAKGLGFAAKTDAVDARLLALIGAMVCAAATCPPPEALEELQELVNARSAALADAVALGNRCETSQTRLLRTELNRLHAACRKLVAKLDAEIAQRIKADPALARRHAILISIPGIGAAVAAVLIATMPELGAIDGKQAAMLAGVAPIADDSGRHRGYRAIRGGRSLPRKALYMAALSASRHNPALSAFAERLKAKGKKPKVVLIAVVRKLVTLTNTLITQNRLWSPLAP

SEQ ID NO: 494400 - protein, 353 aa, unidentified
MRTYYVGMDVHGASIVIVVLDGAGKVVMQTIIKTSAQFVRGYLKQLRGKIYVTFEEGTQAHWLHDVIRPLVTEVVVCDPRHNKLIGSGNKSDRVDAQKLAELLRLGALKPVYHGDHGMQKLKELVRSYDCLVSDSTRVMNRLKAIYRGRAIACPGHDIYRQDQKPQWLAKLQEPGAKQRADLLYQQLAGLKPLRQEAKRLMVKEAQRQPAYSCLKSVPKLGAVSVAQLLAIVGTPHRFRSKHQFWTYVGLAVVTRSTADYEVVDGVLRRSKRAAATRGLNRNHNHVLKRVFKNAAMSACHSGPFQAGYEGRLQQGMATSLARLTIARQLAATTLAIWKRGEQFDSTRRAKQVA

SEQ ID NO: 494401 - protein, 401 aa, unidentified
MHYVIGIDVSKATSQVAVAVDGKVTQHFKITHDVLGFNQLNTIIMQFNEFPDIVFEATGIYSRRLKSFLDWHNYPYTYLNPLAAKKQLDQLRPHKNDLNDAKNLAETQFILARAQSYVQNPIYIELQDMSRFYQQINHDIVSTKNRLHRTLQLTFPEIEGLFSATDSPHYWELLTIVPHAIITRRSRQALMDTIQGGISWHIGHERLRKLVDQLMSMGQISAPAVAANSYNVAQVIYYAKRLIELHGTKGDILTAMVDKAMDLPEYSIYQSIPGFSDKTVVSLIAELGDLHRFRTANKLNAFVGIDLRFNDSGDYKSTGFITKRGNSTARKVLFRAISNIASTASYGHPSHINDWYQKKKQSSLSKGTKKIAIGAMSRLLRTMHYLVINHQLYDYKAVSKH

SEQ ID NO: 494402 - protein, 359 aa, unidentified
MKNSSRGSSKTEKPVSTVGIDLGDRFSRYCVVNARGEVMEEGKIATTVAALERHFAGEARQRIAVECGTHSPWVSRLLRSLGHEVWVANTRKLRAITGSESKNDRNDAEKLARFAAYDPELLSPIQHRSPERQRDLNLLQARDTLVRARTMLVNVVRGLVKSSGQRLPKCSTESFAKRVGSEIPAGYELALLPLIEQVSALTTQIRQLDKQIAALAQRYPEVERLRRVPGVGPVLATAYVLTLDSPAMVASSRAVGAFLGLRPRQAQSGERDPQHRISKTGNEFLRRLLVQAAQYTLGPFGPDSQLRRWGLKLAASGGKRGKKRAVIAVARKLAVLLHCLWRKGESYRPFPIPDPQLAA

SEQ ID NO: 494403 - protein, 344 aa, unidentified
MGEVITIGLDIAKPVFQVHGVDEAGAVTLRKRIGRAKMLEFFGKLTPCLVGIEACPAAHHWGRELQALGHTVKLMPPSYVKAYLKRSKNDANDAAAICEAVTRPTMRFVPIKTKDQQAALMLHRARQLLVRQRTMLSNALRGHLAELGIVSAKGRNGTGALLVIIADAGDSRVPPVARGILDVLARQYGALGAEIGSIDRSILAWHRSCEASRRLEEIPGIGPIVATALVAEIGDWKAFGSGRSLAAWIGLVPKQQSTGGKDKLGSITKQGNRYLRWLLVAGAMAVIRYAQKHGTLKRPWLGRLMSRRPTKVAAIALANKIARMAWAIIVHGDRYREPKPSLAA

SEQ ID NO: 494404 - protein, 352 aa, unidentified
MVVAVQYRRPSLNKNVMVQIYGIDLGMSSFDVSFLSESGSVRHLSGVKNTVHGISKFLLSLPSSAVLCAEHTGVYGDLLLRLCTLNRTCLCFVPGYQIKHSLGLQRGKSDPLDACRIREYAERFYDLLRPCFYPGEEMSELQELYRTRSLLVESRKRLDTLNIGDNCKSSVSLAADHARRAVLAELNTQISGLDHEIEALIQNSSEFSRNYQILTSIVGVGPVTSCELIIKTENFRKLDTAKKCAAYAGIAPYPKESGKMKCGHKISPMGDKQLKTLLFLCARSAKEHNKEIRLYFLKKHKVEKKHFFVAMNNIANKLLRLIYSLIHKQQTYDRDYIQRDPRCVVISDTHKC

SEQ ID NO: 494405 - protein, 414 aa, unidentified
MARYYLGVDWGDTQHAVWVCDEAGAKVVQMEVEQTPEGMSKFGHWLHECTAEGIELWAGIEKPEGRIVDFLLDHGVVVYPINPKSADRARDRFRMSRSKSDMFDAYVLAEFVRTDHPHLRALKPNSESAQELKMLTRDYQRLVQQQTRLVNQLKGTLKEYYPRPVEVFGDLTAKVALDFLKAYPTRQALSGVTQQQWEEFAQAHRLSKVRTQQLWEALSKPQFAIPEHVVRAKSRLVGVLVEQLEVVVGAVATYKKEVERAFASLPAAELTETLPGGKSGTTIPTLWAEMGDAEGRWESFQHLQAQAGTVPVTEQSGKRQVVHFRFACNKQLRYAVDWLAITSLRQSAWAKAYYQAQRARGHSHRQALRALGSKWIKILFVMWRDNVPYDEDHHLANIARQHFASGRLEMKERT

SEQ ID NO: 494406 - protein, 461 aa, unidentified
MGEYKMKGKRNSTKIHKKRLQQHLKQINLYAAGIDIGSREHYVAVPPSLDEDSVKKFGCFTPDLESMADWLVKIGITTVAMESTGVYWIPTFEILESRGLKVILVNARHVKNVTGRKSDVKDCQWLQQLHTYGLLNAAFRPEDDYVTLRTYMRQRETMVSHLSSKIQHMQKALRQMNVLLDNVVSDITSQTGMAIIRDILSGIREPQKLAENRDRRCKNSAEIIAKSLVGNYRDEHLFSLKQSVELYDVYNKKLDECDQVINQHLNILHKQADINERPVQKKRKKNNTNALRFDASINLYELCGVDLTAIDGMDEHGLLKIIAETGIDMSKWATEHRFSSWLGLSPNNKVSGGKILSSSSIKTKNRAKQAFKMAAFSLSNSKSGLGAFYRRLRGRIGAPKAINATARKLAIIFYKMLKNKTEYRKQSQDEYNELNKDRMLKQLKRKAKLLGMELIPNEQFT

SEQ ID NO: 494407 - protein, 313 aa, unidentified
MSNPPEIFAGIDVSKSHLDLALWNVHRSWRFSNNPEGIRALTDLLLEHQPALIVLEATGGYEQAAFRCLSASQLSVAIVNPRRVRDFARANGRLAKTDRIDAYNLAHFAQVVRPHAHPASTEAQQRLVGMIARRRQLHRMITAEKNRLRNAHPTVHLQLQEHIDWLRQALKELDSEVKDLLQSDHELEAKADLLCSAPSIGVVTAASLLADCPELGTLDRKKIAALVGVAPMNKDSGRKSGKRRIMGGRAPLRAALYMAALSASRYNPAIQPFYARLVGNGKEKKVALTACMRKLLTMLNAMMRDNKHWSSTI

SEQ ID NO: 494408 - protein, 321 aa, unidentified
MDPVSCVGIDVAKAKFDVALLKPNGKYRSKVFSNNSEGFRQFRDWLEKQEALKAHLCMETTGAYGRSLARFLAQQQLLISVMNPALIHAFGKTELSRAKTDKADARLIARYCQMHRPAPWVPPTEAIVTLQALVQRLDDLLGMQNMENNRLEMAEPAARASIEALLLTIHQQIDAVRRQIQDHMDDHPDLKSQKALLLSIPGIGETTAAMLLAFLSPLTRFHSAKQVVAYAGLNPRIRESGQWAGKSHIAKAGNVLLRKALYLPAVVAKRYNPVIAAFCDRLLARGKCPMQVIVAAMRRLLHIAFGVLKSGLPFNPNHALA

SEQ ID NO: 494409 - protein, 367 aa, unidentified
MSHIIYCGVDFHAPQQTICCLKTETGEFTSHELKHDHKEELRKFYSELGGPVVVGLEASGYTPWFEQLLEELGHEVWLGDATEIRRRARRRQKNDRRDAELILELMYHAEFPRIHRPLPQSREILRMLRYRHKLVKLRTIVKNSLQALSIQAGLSLQARLFTRQGTQQLEALTLSPVMRHQRQQWLELLQELNQRITETEGWLKQQALSDPRIQLLRTHPGLGLLSSLGIVHTLIPVSRFPNTRKVAAYGGFDPMERSSADKKRYLGISKAGSRLLRFLLIEATQTAVKTDPELKRFYHRLVQRRGKPKAKVAVARKLLIRSFIMLRDEINYAEFQQRAIAARLAREFARPNVPVPLIGQPASPAKG

SEQ ID NO: 494410 - protein, 406 aa, unidentified
MRDGESAEVTGPEIWAGVDIGKENHHCVVINADGERLLSRRVLNDETELLQLIGDVLAISADVLWAVDLNHGGAALLIGLLVGHNQPMAYLTGLAVHRASVTYRGEGKTDAKDAFVIADQARVRRDLGLLRPGDEIAVDLRTLTTRRLDVVFDRTRQINRLRAQLLEIFPALERSLDLVNKGPVMLLTGYQTPAAIRRAGASRIETWLKNRKVRGAAVLAKTAVEAAQAQQTALPGEKPAAAMVVRLAKGVMALDEEIAELDALIEARFREHPHAKVIRSLPGMGPKLGAEFIAATGGDMDAFGSADRLAGFAGLAPRPRDSGRVSGNLRRPKRYHRGLLRSMYLSSMVSITTCPASKAYYQRKRSEGKGHKQALLALARRRLNVLWAMIRDGQCYQGSPPVTAAV

SEQ ID NO: 494411 - protein, 465 aa, unidentified
MVGVRHVGVDCGETEHRMVLLSRDGEWEAREVVSNEPSSIERGFARLLSRIEPEESMRVVLEGLYGFSAAVAEVGRDLGLELWQANSVALDHYRDLEGQPRKDDDRDGYLLARMSFTKMQGCQLAVAADPEAQRLRRINRLHTRLTQTRGDAARRLRSRLVELSPELVQKSWQGPKWSSRAFLALMRRWPGFEGLQKARISTIERVLGRQGTRRETRRVQAQAVKAIATRLSSSLEREAITLEFTCLVAQLDTLDNSLKVVDRQMQAWTEAHAIGRKLLEMPGVGSFTAAAVVGELLPLARTASEAKVATYAGLTPLSRISCGKGKSHLARGVNKHALHACYMSAVASRRRSALDREYYRKQHLRHQGHPVPHIVANLSLARQRMKVMYKLMTTEAHYDKEILIASHLRRISADCGKLAPLSSPAPPTLPPAEGMENHPLPSGFPHPQPTTPTSPRKINPGLDRL

SEQ ID NO: 494412 - protein, 346 aa, unidentified
MLYLGLDVHSKWFTLAGFDKTTGEVFSQKKTANSPEAIQALFATLPDRRMGAMETGTNALAMYRRLAPYFDQLSIVAPNKVWDRQQNTSAKTDHRDAWGLAERLADGKLTPLFVPSDDLRAWRTLGRARVQTTQDITQQINRLYALARSWGYLDEKKLLTKGGRAWLDTVTLPDYAQQVLAESLTSLETVQAREAAYEQLLRQLVQEDPICQLLLTIPYVGPFTAFILRAEIGEITRFANADKLVAYAGLTPRVFQSGERCRYGALTKAGNAYLRYVAVLFAQNCVKGKKDTPFKRRYYRLYHAHDLNEIKVMLARDFLAVVYAMWKHQSVWREASDQVRRTASAA

SEQ ID NO: 494413 - protein, 332 aa, unidentified
MLYENYVGIDVSKLSIDAFIRESRIHRQFRNEESGFKQLIQWIKKHIGETWESLLICFEHTGLYSFSLALFLEREHIAYAMVPALDIKRSLGITRGKNDQIDAKRIAEFAYRFNNRVMPTSLPAKDIRKLHSLLAMRDKMMRNMGGYITSRNELFRVIPDRELPVLTSVYENIISTLKNEVHELEREIRSIIMANKELKTTFELITTVKGIGFIVASFLIVYTCNFTRFENWRKFACYSGIAPFEYQSGTSVHARTQVSSIANQQMKRLLHLAAMTAIHFDAELHNYYVRRQAEGKSKMATINIVRNKLIARVFAIVKRGTPFVDIQKYVYL

SEQ ID NO: 494414 - protein, 373 aa, unidentified
MNNTNQSAQQPKSAQQPREQSMEKGHSEEQPAMTEQPAMTVVLGIDTGKETLECTLVDAKTRQRLWSQAVPNTPAGIAQLLKKAPPEAPWVIEPTGHYSREAVQLATKAGRRVLLAPPRKAKSFLRSLQSRAKTDRLDSYGLALFALSQPLVIFPIKTEQAEQMDQFLLARRGISQAISSLKQQRKVLAHAREALTEAIKALTVQLRVLDKKIAALCSTGSEFKAVAMLLKVPGIGPVTAAAVTSRLRGKQFARADQFVAYVGLDVGVAQSGKHKGELGLTRQGDALLRHLLYLCAQSSLRAKDTLFHQQYDRERAKGLSTTAAVCAVARKLAKLCWSLVHYGTEFDPARVYQAPCRSVPRLSGNPQPAGGTP

SEQ ID NO: 494415 - protein, 402 aa, unidentified
MNAVGIDVSKGKSMVAVMRPLGEVVLLPFEVSHTGSELKELAKTLKNLPGETRVVMEYTGYYHAPVALALCEAGIYVSVVNPLLVHDYGNNTLRRAKTDKKDAMKLANYALDRWTQLPQYQPQEDTRLLLKTTYRQYQQTNKILTMQKNNLITLLDITFPGINSLFSSPMRDDGSEKWVDFVGTFWHSKCVSSRSEKAFKGQYKAWCKKHGYRFNEEKASEIYAAASAHVCLLPQMDETKLLVEQAVAQIRASSKALTALDQQMRKLAQALPEYDAVMEMYGVGPRLGPQLMAEIGDVRRFHSKSALVAYAGVDAPPYQSGTIDVHSRSITKRGSPSLRRTLFLVMSVLLQNSPPDQSVYQFLDKKRAQGKPYKVYMMAASNKFLRIYYAKVKAALDAEKKN

SEQ ID NO: 494416 - protein, 343 aa, unidentified
MKLFVGLDVSLEKTAICVVSEHGKIEREAQSASEPEALTRWMGDLDGTIAAIGLEAGPLSQWLHRGMTEAGLDVVLMETRQVKGALKAMPIKTDRRDAEGIARLLHLGWFRPVHCKSVSAQEVRAVLNARKAVQQGFIGLEMSLRGLLRNFGLKVGSISRGRFEQRIRELAVGNPMLEAATEPMLRARLSLRQELARLERHVRQLAQEDPACRRMMSMPGVGAVVALTYRSAVDDPTRFTSSKKVGPWVGLTPSRSQSGERDVSGGITKAGDVNLRRALCQAATVMMHRGRSTWLRTWAAQIARRRGSKRAMVALARRIGVILHRMWVEGTDFRSDGPAPKVA

SEQ ID NO: 494417 - protein, 343 aa, unidentified
MAQSNLIAIDLAKNIFQVAQLKGNKLKFNKPMKREPMFELLAKAEGSKVVMEACGSAQLIARKALPLGHDVMLLPPKFVKAFRQGQKTDANDVLAIASASQAYNVKPCKIMTVEEQTLQSLSQARTLVDKQKTQLSNQIRGLLLEFGIVINQGDAALTQVVPDILEDAENALPIALKQALAVSYDLYKTQCDAKAQLHKQVEAITKQNESCQRLMALEGVGPITAIELLSFLGNTSQFSNARGAAACAGVTPTQHSSGGKAKIGHIPKRRGNTLRKNLFLGARTVVSRLKHKEATTEKERWIKNLLAKKSVKCVAIALANKTVRTAYALLKNGSTYEPKILAV

SEQ ID NO: 494418 - protein, 391 aa, unidentified
MIYIGIDVAKDKHDCFITNSDSEVLFKAFTIFNNLDGFNDLYQKIESVMDDVTKVKVGLEATGHYSYNLLGYLIDKGLPTYVINPLHTNLYRKSLSLRQTKTDKVDARTIASMLMSDVNLKSYSDTSYHNEELKSLTRYRFDKVKERDKLKTSVSRLVCILFPELEKLVPTLHMASVYALLSKFPSTKHVATAHLTRLTNLLSESSKGRYCKDTAITFRDAARASIGSNMPAKSLELKHTIKLIQELDSEIDEIENEIKIIMDGINSPILSIPGINYRMGAMIIAEICDFNRFDSPDKILAYAGFSPSTYQSGQLDGAYAHMEKRGSRYLRYALYNATKYVCHWDPTFAVYLAKKRAEGKHYNVAISHAVKKLVRVIYHLEKTKQQYIKAS

SEQ ID NO: 494419 - protein, 326 aa, unidentified
MFFIGIDVSKAKLDCSLLLDVASAKRRAKSVANSKAGVGELLAWCVKQQVRPGTLHAILEGTGVYHEQAALALSDAGVTVSIVNPAQVKDFGRSLGVRTKTDGVDSLVLARYGALLNPRPWTPPAREARILQALLSRREAIAQDLQRERNRLEKADATDTPDLIRQSLVEAIDFLAKQLAKIQQDIDDHIDKHPNLKADRELLLSIPAVGPQVGNHLLAVMHNHQFQSAEQLAAYLGLVPVERQSGTSLLGRPRLSKAGPARIRAVLYMAAVVGTQHNPHIKALYQRLQTRGKTKMSALGAAMRKLVHLCFGVLKTRLPYQPNYAI

SEQ ID NO: 494420 - protein, 362 aa, unidentified
MDTILFQSVGIDIAKDKFDACFKEKGTNKAIIKGTKTFGNDAKGFVEFLDWCRKRKKENASICFVMEATGVYYENLCYFLHFKKERVCVELPQKVKYYAKSLNVKTKTDKVDANLIAEIGLERHTSLKSWAPPSKGFKEIRDLTRELARLKKYKTAASSQIHALETAHGTSKDALRIAKKQWKQTDKLIKELEAVLLKTVKKDKHLYEKIERISEVKGLGILSIVKVIAETNGFLLFGSIRQLVSYAGLDVVQDQSGTHNGRPKISKKGNAHLRQALYMPAVSAATHNEKMKSFYDRLNEKFVYKKQSLVAVMRKLLVTIYTLWKKGEEYDPNHQWQGGKRKREVALPLEDSHQKQQLLLEV

SEQ ID NO: 494421 - protein, 452 aa, unidentified
MPIIRSNAIRIKRFRELKESLRTRRDRLLVGIDIAKAEDVAQIRHAHTRILDKQMRIPNTGAGFEAFWAHLVQRCAETGVSDIVCAVEPTGTYHEALAQFLEGHAVDVVLVSNLVAHHNRRTLDGTWGKSDPKDAHNLCDLLERGHVLFYSRPGESIAALRRLVRLLRHARTELAACKARFRNTLLPVLGPAGEPLPAGLVASLPAPLQPLCPAPSAAPARGRPLPPALAFECTDLAARLRAVQARIATIEAELVRVAAPLPVYARLRTIPGIGPTLAAILLAEIGDITWYTKFSQLRKLAGLDIIRVATGNWTGTARISKCGRPLLRWALYQAAMGACRNAGWRARREGFIAKRQGDRFAFLRANIELAAKLLRIVWGVWRSGRPYDPRYRSGGPAARPATAPGVARVGRRKAPPSGQGPAEIVDPGGRQAGRSSGRRALPPKNDTSRRGR

SEQ ID NO: 494422 - protein, 392 aa, unidentified
MYIVGIDIGKNHHEASIVSPEGKQIGRSLRFATTHKGADSLMSFIFKNIGNSPCVFGMEATGHYWYPIYSFLKAKGYTIYVINPIQSDSLRKMYIRQTKNDSIDSFLIAEVIRFGQFGTTSMADENILAMRQLCRYRDSVISSRTEIKLRIGTIMEQIFPEYEKQFSSLWVSTSMGILEKYLTPENIENAPIDELFEIIKDKSHNRLTRAKAISIKEAAADTFGIKIAQDAFSFQLKQLIDRMNFLDKQIEALDCQILEYYEKFDCYLHTIPGIGIIGAATILAEIGDINRFKSSSALVAFAGIDPTVRQSGEFSSTHNHMSKRGSPYLRHAIFLAATTCSFHNSPLNAYYKKKRDQGKHHLTATGAVARKLTSVIYAVLRDSKPYEPKSFC

SEQ ID NO: 494423 - protein, 423 aa, unidentified
MKPVSTQPFTAYVGLDWADTKHDICLQAAGNDQREFDCIAHQVARIDEWARSLQQRFGGPIAIAIELAKGPIVYALQKYDFFVLFPINPLTLAKYREAFTPSRAKDDPSDAELALDLLMRHPERFAPLRPQSVAMRTLVSLTERRRVLVNDKIRLTNRLTHTLKQYYPQALDWFEQRDTVLFCDFLTRWPTLLQAKRARQASVQAFFHAHNGRRPQVIAARLEAIKAAVPLTQDAGVIVPCRLHAMVLVEQLRVTLQSIDQFDREIAELAPTLPDYCLFQGLPGAGPHLAPRLLVAFGEDRQRFQRADELQKYAGIAPVTERSGKKSWVHWRWQCPTFLRQTFVEWAGQTINKSFWAGAYYRQQREKGSTYQAAVRALAFKWMRILYRCWKARTPYDETKYLNALKKRGSPLLKNFILNAKIA

SEQ ID NO: 494424 - protein, 364 aa, unidentified
MSEITRASITRVGVDLSKRMLQVHAVDRSGRVLLAKAMSPDRFFAWCAQLPAGCLIAMEACGGAHHAARRLRLLSLDVRLIAGHFVTPYRMAGRSGKNDANDAAAICEAAARPHMRFVPVKSAEQQGQLAVHRLREGYKEERTALINRIRGLLLEHGLVFPQSPEALRSALPAVIEDASNELTGMARLALQRAHLHWIEIELQMQWCDERIASHVRSDARAKTAATLQGIGPITASALVASVGDFAQFANARQFGAWLGLVPSQNSTGGKASLGRITKRGDDYLRTLLIQGAKSAVMTAGKRSDRISRWLVQLKERVGWQKAVVALANKNARILWAMLTRGSAFDPDHVPSPPAARASVAGAPA

SEQ ID NO: 494425 - protein, 356 aa, unidentified
MQTQVTRKFDFSGKDLFVGLDVHKKSWSVTIIVDGIEHRTFTQPPDPGALYSYLNRMFPGASYYSAYEAGFCGYGIHRELNNLRIRNIVINAADIPSSQKDQLQKRDPVDSRKIARGLEKGLLRPIHIFDRDKEELRSLNRTRFYLMRDLRRSKNRIKSFLLYYGISVPSEYDNNLWSLKYIAWLKQIRMQTISGEAALSGLISSYEYHRGQILVLSRQIRERVREYDKELYTLLQTISGIGPLTASALITELGEINRFPHIENLSSFVGLIPREKQSGESFHTGGITFRCNSYLRTLLVESSWQAIRQDPALMKYYHEHLINNKGQKVIIKVAHKLLNRIRYVMKNRQPYVTGVA

SEQ ID NO: 494426 - protein, 336 aa, unidentified
MEEVQSVVGIDVSKKSMDIALLRNGKVKSKSLANSPAGHKELLEWLIASKADMATIHVCMEATGVYYEALALAMHDAGLKVSVVNPSCVKGFGRSENIRNKNDTIDAALIARYCAAMKPESWVPVPLEQRQLRAWSLRVQSLKDIRQQEENRREAHLVSGMLDVATHVAEHVKWIDDQIKKLENEIDDHIDRHPGLKRDSELLSSIPGIGKTTVARILGHLGDVRRFKSAKALAAFLGVTPKHNTSGTSVKGRSVICRTGSTSLRAALFMPSMVACRYNPIVKQFAERLLATGHPKKAVICAIMHKLTHLIYGVIRHGKPFDANYLSKPLAIQDGI

SEQ ID NO: 494427 - protein, 371 aa, unidentified
MSAKKISAKFSTAPIDRRPSGSKIVGEQGSSGRLIPRIPNSCQDSKSACRKAGNRKRMAEKVFVGIDVSKLDLDIALDSGEHWRCANQEGDFHELIERLKALPVELIVLEASGGYEGAVVASLHAAKLPVVVVNPRQVRDFAKALGKLAKTDRIDAQVLAQFAQLVRPELRPLKDEQTQELDARLARRRQIMSMLVAERQRLQVAKPSLRAEIKDHIHYLVKQLKDTDRGLDKMIRTTDLWREREALFKPVKGVGDQTLRVLCGSLPELGQLDRKKIAALVGVAPFARDSGKQRGKRACWGGRPEVRQALYMGALSATRYNPVIKPFYERLLRSGKPKKVALVACMRKLLTILNAMVRDHAPWNAQLHLTA

SEQ ID NO: 494428 - protein, 345 aa, unidentified
MEQLIRIGMDTSKRVFQLHGVNAAEDVVLRKKLRRKEMVALFADLAPSVVGIEACGGAHHWARLLRSFGHEVTLLPPEYVKAYRKRGKNDAADAAALCEAMSRPTMRFVPVKSAEAQAALMLAGLRERLVRQRTQLSNAIRGYAAEFGHVAAKGLDKIEPLLARLAADEDLPELAHELFALHAKEHAELQAKLAAIEAKLMAWHRTNACSQRLDKIPGIGPVSAAMLTMKVPQPQLFRSGRDFAAWIGLTPKNHSTAGTTRLGVITRAGDETLRSLLVVGATAVIQQVQRGRGRPSPWLAALLKRKPPKLVAVALANKLARIAWKLMVSGESYRAAPIPAMPVAA

SEQ ID NO: 494429 - protein, 411 aa, unidentified
MHNRQNYLYVGVDLHKEHHTAVIINCWQEKLGEIQFENKPSAFSKFLLEVETYVSAGVSVVFGLEDVGGYGRALAKYLVDHEQVVKEVNPALSFLERKSHVTTQKSDSWDAECVARILINKLNQLPDAKPNDLFWSIQQLVSRRNALVKAQSALKNQLHIQLNHHYPSYKKFFSELDGKTALAFWQQYPSPSCLEGANIKQLTAFLLDVSNNTCSVKKASDILKLVKEDGQTMKEYQEMRNFLVRSIVREIEFKKKEMKYIERELKQLVNLLDYQLETMPGIELVTASALIAEIGDVRRFPNPNKLARFAGVAPVYFGSGGKGKTHKSKQGNRALHALFYNLAVQQVQVAKGSKLPRNPVFHAYYQKKLKEGKTKGQALVCIMRRLVNIVYGMMKYKTAYELPVVEEKEVV

SEQ ID NO: 494430 - protein, 346 aa, unidentified
MTTLDRARLVTGGVDTHLELNVAAALDALGGLLGVKEFPTTRAGHGALLRWMKSFGSVTRVGVEGTGSYGAGLARHLRVSGIEVLEVDRPNRQSRRRTGKSDPADAIEAARAALSGRAQGAGKSRDGNVEAIRALVVAKRSCRSAKIKTLNQIRHLGFTATDDLRERFEGVSRRRLAKEAASMRPRAGSDPVTFATKTALVILGRRVLALDEEKKQLDSLLGELVEKTAPELLALFGVGVDSAASLLVTAGDNPERIRSESSWAHLCGVAPIPASSGKVTRYRLNRGGDRQANSALWVIVLARMSADPRTRAYVERRTKEGRSKGEIMRILKRYVAREVYRHLPRA

SEQ ID NO: 494431 - protein, 327 aa, unidentified
MQAVTTIGLDIAKSVFQIHGVDAAGNVIVRRQLKRRYVLPFFQKLPPCLVGIEACASSHHWSRELQALAHTVRLMPPAYVKPYVKRHKNDAADAEAICEAVTRANMRFVAAKTLEQQSCLMLHRTRHLFIRQQTAVINAIRAHLAEFGIVAPVGRKGVEQLLDAVADTSDKRLPEIARACVVALGAQLRTLKVQILNFDRQIMAWHRSHAASKRLDDIPGVGPALATALVASVADPKAFRSGRDFSAWIGLVPKQRSSGGKDKLGSISKQGDRYLRSLFTAGALAVIRYAKIHGTQHGPGSAHCWRGGLPRSRRSRWPTKLQEWRGP

SEQ ID NO: 494432 - protein, 463 aa, unidentified
MKQATGKGKKRKRRTSKHGFRVIQPNVAGIDLGSCEHYVCCPPGPDDEPNVRHFGTTTPELYTLADWLEEQQVESVAMESTGVYWVPIYEILESRGFEVLLVNARMLSRVPGRKTDMIDCQWIQMLHSCGLLTGSFRPGNDICVLRSLVREKNTMESQRSDWIRRIQKSLDQMNVCVHHAVSDITGVTGMAIIRAIVHGERDPRKLAKLRDKRCRKSEEQIAGELTGNWRTEHLFTLKQALQMYDHICEIITEYETEISRTLTLLQPPEYRSLEVPEVTNKTKRYNVRARGQEPMREALFRLIGYDLTSITGIGVDTAEIILSELGTDLSCFPSEKHFVSYLKLSPKLDISGGKPIPGKRKGSTTTRIGAALRTAAVTLKHSHSALGAEYRRIARRKGASVAVFAIARKLAIIIFRLLRYGQQYVDEGMQAYEERFKAARIRTCKQIAEQFGLTLILPDQEAA

SEQ ID NO: 494433 - protein, 403 aa, unidentified
MKHVIAFDISMGKSYMVIYNAQKQCVFESEIKHSKPEFKKLQEKIHELTDKTGELPKIVFEATGIYSRQLERFMQDNQYTYCLLNPLEAKLQCDSLRIHKTDRSDAHRLALTHFTATRRVFTGTDDLFYQLKSLSRLYSELDSELSIIRGRMHKVIQLTFPELERMFTSKSDLFLNFVQLFPHPDCILGLSKTIIKNRIRANTNKKISNITAEKKAIQILEIAKTSYPAVSQNDVLCDQLKLYARRYQELLHQKECCINKMVYIAEQRAEYNIILSLPGIGPNTAVRLMAEIGDITRFNNNKQLNAFAGIDIRRFQSGKTFFKDKINKRGDKHLRKHLFLIIQNMIKQRRYGQNHIVGYYDKLKTQPHNKCHKVASIACVNKFLKLLFHLITHDIHYDYRLAA

SEQ ID NO: 494434 - protein, 303 aa, unidentified
MHDQDNEVTGGVDTHAEVHVAAAIDSLGRVLGTEAFPTTSGGYRQLLAWLTGHGQLARVGIEGTGSYGAGLARYLAGAKVEVVEVNRANRQLRRRRGKSDTTDAEAAARAALNGEASGAPKAGDGPVESIRVLRLARRSAIKARTQAANQIRDLLVNAPDQLRSQLRGCSTEGRVATCARFRPGDVSAPGEATKTALRALARRHLDLSSEIDDLDEHLARLCAEANPALLAARGVGPEVAATLLVSAGDNPQRMRSESAFAALCGASPVEASSGKVIRHRLNTGGDRQANNAPVAHRHGAPHV

SEQ ID NO: 494435 - protein, 422 aa, unidentified
MLAESHDEEQIIARVAALDIAKAELVCCVRVPSPAGGKRRLQEVATYSTMTQALTELANRLVEMRVQRVVMEATSSYWKPVFYLLEAHGLDPWLVNARDVKHLPGRPKTDVLDAVWLCKVAERQMLRPSFVPPWPIRRLRDLTRYRTDLVAARTAEKNRVEKLLEDACIKLSVVASDIFGVSGRAMLAALVAGERDPKVLAQLARARMRGKIDRLEQAFDGHFDDHHRFLLSRMLARIEALDADIAAVDAQIDVQLAPFAEAAARLDEIPGIGPVAAAAIIAEIGVDMSRFPTAGHLCSWAKFAPGINSSAGKSKGSASSGHGNPYLARILGEAAVGTTKTNTFLAARYRRIARRRGQPRAVVAIGRSILVIIWHLLHDPDTRYRDLGSDHYARHVDPTAKKRSHIRQLEALGYTVTLTPAA

SEQ ID NO: 494436 - protein, 351 aa, unidentified
MFIIGVDYHPSFQQIAFLDQGTGECGERRLNHSDGEAEKFYRDLQQRGVSVRVGMEATGYSRWFERLLAELGIEVWIGNAAEIKTRRVRKQKTDRLDAQLLLKLLLENNFPRIWVPSPENRDLRQLLWHRHRLVQMRTRIMNQLQALAMNEGQRRKKKLWNEQGRAQLEKLPLATWASRRRKDLLELLDRMNPTIEELTRAIEQEAKKWPAALRLMTHPGVGPLTALAFVLIIGTWERFPRGKQIGSYIGLVPSEDSSADHQRLGHISKQGNALLRFLLVEAAQAATRCSPDWRRRYIHLAMRRQKNIARVAMGRRMAVRLYWMWRNGCEYSPSLEFGSYAGQLVTGHGAK

SEQ ID NO: 494437 - protein, 327 aa, unidentified
MEQRVLGIDVAKETLDIVLSDGNHLNQGQFANNQKGHEQLELWVRKQTDSSVHVCLEATGQYGDAVAEYMFAQGFPVSVVNPARIKHYGNSKLRRNKTDKADAQLIAEYCLREKPAIWTPPPASFKDLQVLVRHLEDLQNNRLQELNRLQSGVHTSFVVESLNSLLVFLDDQIKQTKKAIQDHINQQEELKRMQNLLVTIPGIGKLTAAKLLGEIRNILDFQSARQLAAYAGLTPRNFLSGTSVHKKSRLSKTGNANLRKALFMPAIVASKHNPIVQAFCARLSQSGLRPMEVVGAAMRKLLHLVFGILKTGRPFDPNYINPTQAFS

SEQ ID NO: 494438 - protein, 320 aa, unidentified
MHAVLGIDVAKTKFQVSLLFPDGRRRRKSCANTPAGCAELLAWLQRHGATRVHACVEATGTYGELVATTLVDAGHQVSMLNPAVIHHYAKSRLARAKTDPVDADLIADYTAKEQPPAWTPLPRDIRELQALVRRLDALLGMQTDERNRAQAGALTPAVQQSIAAVLESLDAQIATVRRQIRGHINQHPGLRAQRDLLSTIPGIGEATAALLLAELFNKSFTSARQAAAFAGVVPRANDSGNRHGRRVMCKVGPARVRKALYFPAITALRCNPTLQPLAKRLRDAGKPEMLLIGAAMRKLIHLAFGVLKSGRAFDAHLAKA

SEQ ID NO: 494439 - protein, 269 aa, unidentified
MTQYKRIAIDTSKAVFTIHCIDARDRPVLRTNLRRGQLLPFFKKLLATEIAIESCGGSHHWTRELSALGHTVRLIPPQYVKPDVKRGKNDRNDAAAICEASGRPGMHFVPAKSLAQQAQGMVMKVRETLIGQRTALGNTVRGHAAEFGIVAGKGISTIAPLLSAIEQDATVPPEAKEVFALLGQQIEEIGTRIKEIDVKLNAAHKASAVSTRLATIPGVGPVIALTLATEINPAAFESGRHLAAWVGLTPKEHSTGGKQRMGQNQPGGQ

SEQ ID NO: 494440 - protein, 332 aa, unidentified
MNTIPVHLGLDYHQSVIQACVGTDKGQVLGNRRCANAVETVAAYAASFGAVESVTLEACSGAADFADALIAHTGWKVQLSHPGYAARMKLNPDKSDYSDARMQMELGRTGLVPRVWLAPREVRELRLLVRHRQQLVKERRACKLRIGAILREQRCLDAPAPRWTRPWLVWLREQAPLSEQGRWVVERHLASLKRLGEEIGAVETRLAAVTAKDPQVERLLAEPGIGPVTAWMLRAEIGRFDRFHNGKQLARFCGLSPRNASSGTRQADAGLIRAANGQLRACLIEAGHRLARTHPRWSTLAANLRARGKPGSVVAAAIANRWVRSLYHRLAA

SEQ ID NO: 494441 - protein, 341 aa, unidentified
MGQASTIGLDIAKWVFQAHGADATGRVVFRKRLVRAKVFEFFAGQPRCLVALEACGGAHYWARELGKLGHTVRLIPPAYVKPFVKRQKNDVADAEAICEAAQRPGMRFVPVKDEAQQANTVVFRARDLLVRQRTQCINALRGHLAEYGHVVPQGPAHVDSLVALVEDPKSSVPESARGILQVLIRTLNALEEQLKELDGEIARRAKADPVARRLMTIPGIGPIAATAITALVPAPEGFRAGRDFAAWLGLTPLQRSTGGKHKLGAISKRGERTIRRLLILGASAVVRWASRRGAAAGSWLARMLARKPRMLVTTALANKMARIVWALLVKGGTYRAPAVAA

SEQ ID NO: 494442 - protein, 343 aa, unidentified
MTKLYGGIDLHANNSVIVLIDEQEQVVFETRTFNDLSNILFHLRSFHARIQGLVVESTYNWYWLVDGLMEAGYSVHLANTAAIHQYEGLKHTNDHSDARWLAQLLRLGILPTGYIYPKEDRAIRDLLRKRSQLVRQKTSNLLSIHNLVTRNTGTSLTGNHIKTLTAEAMRDVLPTPDLALAATSTLAVMRCAAEQIAAIEHAIKARVSLRPTFRQLLTVAGIGQTLALTIMLEAGEMHRFPTVGQWASYCRCVNSTKLSNGKRKGQGNTKNGNKYLAWAFIEAANFAVRYYPDIQRFYQRKKAKTQGVVAIKAVAHKLARACYYVLRDQVPFDIKKAFVTQPA

SEQ ID NO: 494443 - protein, 388 aa, unidentified
MNVGADKSDPLTAIRTDLGAIFVSLELSRSSWLITSLSPGGGEKMSKHSVPGGDFARLMERFAQLQEKARLRTGQSFRIIVVQEAGLDGFWIHRALQNEGIESHVVDAASIATSRRRRRAKTDKIDGETLVRALLAYKRGEPRVCAMVKVPTPGEEDRRHLCRERKALTAERVRHVNRIKGFLFSQGVSGYQPLRRDRRQRLEELQTGDGRAFPPHLKALVNRELDRLELLLKQIKTVEAARDALLAVEQTAKPGPAAMLLDIKGIGPEFAAILWSEGLFRHFENRRQIAAYAGLAPTPWQSGAVDREQGVSKAGNPRLRTTLIQLAWLWLRNQPRSALSLWFHERVSRNGGRLRKTTIVALARKLLVALWKYVTAGVVIEGVTMKVA

SEQ ID NO: 494444 - protein, 402 aa, unidentified
MTYDYVIGMDACKYFHHACVLDIDGTQVLSKRINQNEQSLRALFSAFSAHDHKVLVVVDQPNNIGRLTVAVAQDIGIDVRYLPGLAMRQLSRIHAGNAKTDIRDAYIIAHAAKNLPESLRSVDRVEEAFLQLKVLNGIDEDLARSYTRLINQIRSALVGCYPQFEQALRGQIIHRKWVLHLLARYGGPTKIKRLGKAKAAAFARRYKARNPEPVLDAIFAAISEQTVTIAGAHYAEMGVAMSAKDALLKLEHRQQIEKEVIELINDIPHTQFLLSMPGIGPKTAAQILMTAGDMSDFPSAGHLASYAGLSPRTNQSGTSIMSNSLNRAGNKKLKNALWQSSFASIRFHERSRQFYERKRREGKRHNAAVVALARRRLNVLYAMMRNHEHYHDPAPSQEDLAA

SEQ ID NO: 494445 - protein, 420 aa, unidentified
MKDVNTKKLKRVNEGTLIVAVDIGKVKHTGYWRFSDGTEIKPFEFFNNGRGFQKFWDGVGQAKKDHPIEEVVVGFESTGSYAEPLLHFLRKRGVRLVQVNPFHTKRLKELQGNSPNKTDHKDPKVIADIMELGHALTVIIPEGKAAELRRLTNAREKSIQRRTVLLNQLQDMVFIIFPEFLEVMKGVKSRSAQYLLMDCPTPEKVMEKGLEELTRVLKKVSKGKLGKDRAQALYEAACNSVGIQEGQRSMVLEITEYILSIEAIERFIGRVEKEMIVHLKEIPYSRWILSIKGIGPVTASGLIGEIGNFGQFGTISEILKHAGMDLFEISSGKRKGRRRISKRGRALLRKLLFYAALNTVRKGGAMEEYYRRYLERGMPGKKALVAVARKLLRIIFALVRDHKAFVQSGLATHYQFKEAA

SEQ ID NO: 494446 - protein, 344 aa, unidentified
MNSTTIAVDVAKSVFEVAVSLHPGQVRERHRLSREAFGRFLVAHPPATVLMEACGSAHHWARHAQRHGHRVVLVPPHVVRPYVGRNKTDRTDAKGLLEVFRNEDVQPVPVKSPTQQALAALHRLRSTWMATRTARLNTVRGLLREFGLVIPVGARYVVPHVRAVLADADAEIPGLLRPALAAVVEEIGELDGRIRAVERQLEAAAADTLAVGHLRTIPGIGLLTATALVATVGDVARFPSARHFASYLGLTPRERSSGARRHLGAISKRGDTYLRMLLIHGARAVLWHAKAKAASSPDRLRTWALQLERLRGHNKAAVALANKLARIAWAVWRRGTPFAVAPAA

SEQ ID NO: 494447 - protein, 348 aa, unidentified
MLADELDFVIGVDTHRDEHALALVACPSGARVQERLIGADERGYAAALAFAVERAAGRRAWAIEGTGSYGKGLARYLTQRDERVHEVERPKRQGGRARAKSDRLDALRAARSLIAAEKPALPRAAGLRESLRVLLQVRTSAVAARPVALNQLRALLVTCPEPLRAELRSLTRARLLRRCRELEPERTDDPELRSTLQALRLLAARVESLTAETRELEQELRAEAEQIAPALLAERGIGPIGAAQALVSWSHKGRFRSEAAFARLAGAPPIPASSGKTVRHRLDRGGDRKLNNVLHQIVITRRKHDPRTIAYIERRRREGKSEREAIRSLKRYLARHLFRLLETTATPT

SEQ ID NO: 494448 - protein, 338 aa, unidentified
MKLKRIGVDLAKQVFQVHGVDSHEQVKCRKQLKRHQMLDFFRQLEPCVVAMEACGSAHYWARELGKLGHEVRLIAPQFVKPYVKGGKNDANDAQAICEAASRPTMRYVEVKTVEQQASQSVHRIRGRLIKARTALVNEVRGLLAEFGLIESRKGVAATRELLCRAIDDSDSSMPGTMRELLRGLSEELQGYDERLKKLEQLIQREAREDERVRRLMKIEGLGPISATAIVSAVGDARQFASGRQFAAWLGLVPSQYSTGGKERLGGISKRGDKYLRTLLIHGSRSVLKHCQSKTDKRSDWLSQLMCRRNKNIATVALANKNARIIWAILSKGEQYQPC

SEQ ID NO: 494449 - protein, 372 aa, unidentified
MPQRSRVFVGLDTSKLKISVALAEEGRQGEVRFLGEIDNTPEAVRRLVGKLASRYSEVLFCYEAGPTGYGLQRQIAALGHECDVIAPSLIPKRPGERVKTNRRDALTLARLHRAGELTATWVPDPGHEAVRELVRARDAAMADLRAKRQHLQSFLLRHGRLFPGRKPWTRAHARWLSELAFEHPAQYLVLREYRQGIEDAQARLERLTQQIAEVLTTWSMAPVVEAYQALRGVALLTAVTFVAEIGDVRRFESPRQLMAYLGLVPCESSTGERVRRGSITKAGNTRVRRVLIEGAWTYRFPARMSRLLQERQANLPQIVRTIAWKAQVRLCARYRRLMAAGKRQTVVTTAIAREMAAFLWAIGHAIEPRSAA

SEQ ID NO: 494450 - protein, 416 aa, unidentified
MEVIVERCAGLDVHKDTIMAAVRLPGDKGKRRTELKEFRTWTSSLRELRAWLVGHGVTQVVMEATGVYWKAPWHVLTPEASFELLLCNAQHVKNLPGRKTDVSDAQWLASLLECGLLRGSFVPDPVMSRLRDLTRHRKKLAEERARETQRIQKVLEDAGIKLDSVVSDVLGKGPRNMIEALIAGERDVHVLADMALTRSRARIPELLLALEGGFSEHHAFMLRCHLDTVDHLGAQIAKLDERLEVEITPFSRQVERLCTVIGIGKVTAQAIVAEIGVDMSRFPTAAHLASWAGMCPGNHESAGKRRSGKARKGNAALRSALIEAAWSASHSKNSYYAAQYRRFCRRFGKKSESKAIFVVAHSMLVTIWHILTNDTDYADLGADWFDRRRDNEQHARRLANQIERLGYKVTVEAVAA

SEQ ID NO: 494451 - protein, 335 aa, unidentified
MSVYVGIDMHRKRSQIAVVDHDGAVRMNRNVLNGVKPVLSVIGDLPIGAPVAFEAAYGWGWLVQLLEDYGFEPHLVHPLRCKAIASARLKNDKVDAATLAQLLRADLLPEAWIAPLQVRQQRALLRHRCQLVRLRTLLRNRIHAVLADHGCDRPGGYFTAPGRVWLDGLDLPDASRRVVDDLLALMDALKEPIDALDRQLLAQARGDPRVAALTRLPGVGTLTALMIVAEVGDVSRFPSARKLAAWAGLTPTVRASDLTVRHGHISKQGSDWLRWILCEAAQTAKRSPEFAVAYQRLAHRRGKKIATIAIARRLLTRAYHLLQAVPARPDRQEVR

SEQ ID NO: 494452 - protein, 409 aa, unidentified
MKMAGIDVHKKVLMVVVVDTSALQEKPARRRFVTLPSELQRFRIWLQEQRVEEAVMESTAQYWRSVWLELEPHMRLHLAQAFSNRAPRGRKHDFKDAERLVRRLIADELILSFVPNGEQRIWRSLTRMKVQLTRDRVRLQNQMECLLEEMRIKLSIVVSNLLGASGLRILHALAQGETDPKKLAELGDERLHCTEEQLVDALTGRVQPMHRGMLALQLQRLQLIDQQMAQLNHMIAQAMKSHQDAVIRLAEVPGLGVDSAQQIIAEVGAQASTFSSAAELTAWVGTCPGKEESAEQNQSSRSAKGNKYLRRVLNQAAHAAVAKKGCHFQVVFRRLMPRLGYKSAIWAVAHRLCRVVWKILHEGVRFIEQGREVGPREKKQRAQLLARALRKLGYEVTITPINQLAPKPA

SEQ ID NO: 494453 - protein, 343 aa, unidentified
MKLSRVGIDLAKNVYQLHGADRTGKTVWKRRLKRHQWFKALLDKTEPGCVIGMEACASAHHWGRELQSRGYTVKLIPPQFVKPYVKSNKNDARDAEAICEAMSRPNMRFVTVKTVEQQDIQATHRIRAELITQRTAKANQIRGLVAEYGLVAPKHLSSLRAAIPCWLEDAENGLTDDFRSLLHGVWEDLRALDDRVGEMDKTIKRLAENNEDCVRLQQLRGVGPMISTAMIATVGDARQYHKSRQMAAAIGITPKQHSSGDRDRLLGISKRGDVYLRTLMIHGARAVVARAKYKDDRLSRWVTAIATKRHPNVAAVALANKTARMAWAMLRNETDYDPDFATS

SEQ ID NO: 494454 - protein, 392 aa, unidentified
MYIVGIDIGKNHHEASIVSPEGKQIGRSLRFATTHKGADSLMRFIFKNIGNSPCVFGMEATGHYWYPIYSFIKAKGYTIYVINPIQSDSLRKMYIRQTKNDSIDSFLIAEVIRFGQFGTTSMADENILAMRQLCRYRDSVISSRTEIKLRIGTIMEQIFPEYEKQFSSLWVSTSMGILEKYLTPENIENAPIDELFEIIKDKSHNKLTMKKAISIREAAADTFGIKIAQDAFSFQLKQLIDRMNFLDKQIEALDCQILEYYEKFDCYLHTIPGIGMIAAATILAEIGDINRFKSSSALVAFAGIDPTVRQSGEFSSTHNHMSKRGSPYLRHAIFLAATTCSFHNSPLNAYYKKKREQGKHHLTATGAVARKLTTVIYAVLRDGKPYEPKSFC

SEQ ID NO: 494455 - protein, 369 aa, unidentified
MAEPREAFIGIDAAKLRNAVAIADAGRDGEVRFLGEVDASPEGMRRLAAKLAAKYDRLNFCYEAGPTGYGLHRLLTDLGHHCVVVAPSLIPRKPSDRVKTNRRDAITLARLLRAGELTPVWVPDPAHEAIRGLIRARAAAAKEVGIKKRQVGAFLLRHSRLFSRKKAWGARYRRWLQEQGFEHPADQIVLQELVDGVRVAEERLVRLGRAIEEFLPTWSLAPLVEALQALRGVDLVTAATFVVEVGDLRRFKSPRQLMGYLGLVPGERSTGETVRRGSITKMGNARVRHLLVESAWTYRHPPRVGAKKLPKLERVSPTIREIAWKAQSRLTARYRAFVARGKKTTVTCTAIARELAAFMWAVAREVRPA

SEQ ID NO: 494456 - protein, 324 aa, unidentified
MIDGILGIDVSKNTLDASVSSCRKVRARCFANSPDGWRHLLDWLIIQKIRRVHACLESTGRYSLGIACALYAAGHVVSIVNPAQIRDFARTKLGRNKTDGVDASHIREYCELFKPQPWAPPSEAHRRLGELQTIRAGIIAGLTEWKNRKNSGMVDVVAQSLADVTISHFNNQLEAVDEAIAQTIDNDSGLRGKRDLLLSISGVGEILAGVVLAELPGPDVLRSSAAVVAYAGLNPRQHQSGTSIDRVTRISKIGNAVLRAALYMPAMSAMRFNPAIVALVTRLKSRGRLNPKQIVVAAMRKLLVLCFGVLKTGKPFDPAIAMGC

SEQ ID NO: 494457 - protein, 440 aa, unidentified
MGTQSAIALTETWGVTAPTGLLYVGIDIGRRRHLAAAIPEVRMLDGSWERAPARAIPTTGLGFRGLIAWLGGLGFAPDLTRIGMEPTGGWYGRTVAAWLERHGYRVDWLQNFALHDRRHLMIGKQTKTDALDARLIARLLFERERLGLKGGFLRRPPRNTDAIRMLIRNRARLVEQRTRCRNQLTAIEDVLFPELKDFFKTSVTIPSARLLLESFPTPNHVAAADPADLHRIVVCQGHASSMSARLMDLQMAAADSAGLAIDTDAIVHTQDWLLYQLRLIDSQILEVESAIEAVLEDWPAQERAVLASFPAMTVLRQAVLLACIGDIACFRDDRQLRKLLGWYPEARESGSSVLKHRLGRSGNRMARRELWLWAWELIRQSHAASPFRDYYRRLRERGMAGNVAMGHLAGKLITVLFHCLRCGTPYDPQRHARDLGIADA

SEQ ID NO: 494458 - protein, 402 aa, unidentified
MRYIGLDVGRDFAHAAVVEGTGSARKLGRLRMGEELAAFAATLGPDDAVALEASGNTWALAELLGRHAGRVVVSNPLRTRAIADAKRKTDDIDAATLAELLAADYLPAVWIPDEATRRLRRIVAHRAGLVRDRTATRNRVSAILGRRLVRSPLSDPFGSRGRAWLAALELPPDERLALDSALRLNAVLDAEVDLADRAIATALIDDPRVRHLLTIPGIGLVTAAGILAVVGDIGRFPRPAKLVSYLGLDPQVRQSGDRPAHPGHISRAGQAHARGLVTEAAHAAVRAPGPLATSFLRLRARRGGGIAIVAVARKLAVLVWHLLTKDEDYRDARPDLVRAKQRALGRLAGRATARTRPSHRGATGSSHDQGRARLRGGDDPHHPALRHAIDRVQLDDTPVPGA

SEQ ID NO: 494459 - protein, 418 aa, unidentified
MQVESDEPELIERVAALDVGKAEVVCCVRIPGPGGQRMQEVRTVSTMTAALLALGDWMAGLGVTRVVMEATSDYWRPPFYLLEDRFETWLVNAKDVKHLPGRPKTDRLDAVWLCKVAERQMLRPSLVPPPAIRELRDLTRYRVDLLAERTAEKQRVEKLLEDALVKLSAVVSDLFGVSGRAMMAALITGERDPAVLAQLARGTLRNKTGRLTEALTGRFTDHHAFLLTQMLRRVDAISADVATVQERIDAQIAPFARAVARLDEIPGVGATAAQAILAEVGLDMTRFPTPAHLTSWARFAPGVSESAGRKKGNAGTGHGNRYLARVLGEAAIGAARTDTFLGERYRRIARRRGKNRAIVAVGRSILVIVWALLSDDDAQFVDLGPDYYATRTNPERKVRQHIRELQALGYSVTLNPAA

SEQ ID NO: 494460 - protein, 427 aa, unidentified
MRSIALDVHRDFCEVAIKDESGLRLAGRVRSSVSELELFAQSLAPDDEVALEATGGALAIARILEGHVARVVIANTRKLSAIAESKVKTDKVDAKTLCELLAAGFLPAVWSPDEFTRALRRRLQRRSKLVRSRTRAKNECHAVLARNLKGRPPVTDVFGKRGREWLAAIELPADERETVDCCLREVDFLDNEVGLIERELARQAMSCQEIRRLMTVPGVSLVSAAAFVAAVGEAHRFSSPKKLVSYVGLDPRVRQSGEGPARHGHISKQGSSEARHMLCEAAWVAVRTPGPVRAFYERVRARRGAQIALVATARKLGVLFWHLLTREEDYAFGRPSLTRRKLRALELKTQEGWRRGRYSGPRVNESRKEREREAEFAEQMESAYRRLVQDWQPKPPRSGAGATRGRASSKPSSGQQRGRASVPNSAL

SEQ ID NO: 494461 - protein, 354 aa, unidentified
MQHDAPSRKIIIGIDTHKDTHAAVALNALGVRLGATIVPVNRVGYRCIDAWARSFGIVMAFGIEGTGSYGAGLARALREAGHHVLEVNRPDRSTRRRNGKTDMLDAEAAARAVLSGQALAEPKTGTSTVEMIRHLKIARDAAVKAKTQAMQTLKSIIVVAAAELREQLEGIRGPITLVRHLASMRPGPLTSPLASAKTALRATARRWLALHQEIEGHDRDLDALVAATAPHLTAAPGIANTTTAELLLLVGDNPERIRSEGAFAKLCGACPIPASSGRTKRHRLNRGGNRQANAALHRIVVTRMRLHQPTIDYVRRRTGEGRTKPEIMRCLKRYVAREVFRSLCRPRPPSPTAP

SEQ ID NO: 494462 - protein, 391 aa, unidentified
MVLVGIDVAKDKHDCFIMSSEGEVLANVFTISNSRDGFEHLLQRIRACTNAQDTIKVGLEATGHYSCNILGFLLDNGLPTYVLNPLHTNLYRKSLSLRKTKTDSVDARTIAAMLMSDVDLKPYTDTAYHNEELKSLTRYRFDKVRERAKLKQSVSRLVCILFPELEKLVPSLHMTSVYALLEKFPGANHIAATHLTHLKTILHDASKGRYGRDKAEEMRDSARRSIGSVMPAKSLELKHTIRLIRELDTEIDEIETAIQNIMSELRSPITTIPGIGFRMGAMILAEIGDFSRFDSPDKVLAYSGMSPSTYQSGQLTNGYAHMEKRGSRYLRFALYNATKYVCHWDTSFAAYLAKKRAEGKHYNVALSHAAKKLVRLIYALENSGETYRLAA

SEQ ID NO: 494463 - protein, 416 aa, unidentified
MLFVGDDWAEDHHDVEVMDACGRRLVKARLPEGMAGMARLHAMIGQAVGELFGDDVGVEDVAGRVKIGIETGRGPWVRALVAAGYQVFPVNPLQAARYRQRLTVSGAKSDAADAHLLADMVRTDSHQLRPIAGDSAEAEAVKVVARMHKTLIWERTRAVQRLRHALREYFPAALEAFADLDAADTLELLAKAPDPASAARLGPGQISAALQRARRRDVPAKAAAIQAALRAEHLGQPAVITAAYAATIRALVALLVTLNAQVKAMQGQVEAHFGRHPDAEIILSQPGLGAVLGARVLAEFGDDHTRYISAKARKNYAATSPITRASGKKKTVLARFVHNDRLVDALMTQAFTSLRLSPGARAYYDRQRARGASHNAALRQLANRHVGILHGCLKTGTVYDETTAWTHHHQDRQAAA

SEQ ID NO: 494464 - protein, 365 aa, unidentified
MRIIHWIGIDDHADKWTIAQLRGDEERPGKEFELVPDGKGYQRLLSFLKKLDGEVRIVYEAGPCGFDLYRRLKKAGLQCWVAAPALTPRKPGQKVKTNRRDALKLARYLRAGELTFITVPDEDRESLRDLIRAREAVQKDVGRVSKQIIHLLLRYGHRYREGQSWTRRFWAWLKAVELEGEHSRFVLTEMIGELEHRIEQLERYDQKVELAAQKPEYKPYLDALRTLRGIATISAMTILSELGDLRRFPTAPKLMAAIGLVPSEYSTGDKTTRYAITKTGNAHVRRIVVEAAWHYQRRPLAGRVIKARRKDQPHPIVNVAEKCEKRLHSRFHRLTSRNKKSTVAVVAVARELVGFIWAIGQLEHP

SEQ ID NO: 494465 - protein, 508 aa, unidentified
MITIPVITECCAGIDIGKRELAVAIAVGPADKEAEIKTRSFGTTVPALTGLLAWLRQEGCTSVAMESTGSYWIPVKNILETDMKLILACARKHHPKKGHKTDFRDAMDLAVHQRHGLLTGSYLPERKIVEFRDLTRRRKKLLGHLRSEKNRIQKVLETANVKIGNIVSDVFGVSGQEMLQALLDKAPLSAAEMAGMAKRRLRLKIPQLTEALQDHQMNDHHRWLIEQSIEHSKLLDLQTEALEKRIQSQLQPCQKQYELLMTIPGVKETTAAGILAEIGPHMEQFQTADHLCSWAGIRPGNNRSAGKSRSTHIKKANKFLLASLVEAAWGAARTRNSMFERKFRRWAKRLGRKKATIAICRSLLRVVWAVLRNDRPYREPDAQILRALETAKQVHHHARRLRELGADETAVHALVASVLENSASEASPGNAKAMPTAELSAGKHTESPRAVCSPKKRPTARGVLGFRIRTAPKEQYSVEKELSAGAPSQGRPRTKPDQKKQNSKPSSS

SEQ ID NO: 494466 - protein, 339 aa, unidentified
MYPFYLGIDLHLKRTYMVLMDAKGEVINKGRISNQEITKYLQEKVPQETYAVLEATRNWPFMYDLLHEHVQRVDLVHAKGVRAIANAAVKTDQIDASVLAHLARMNYIPKAYAASKEMRDLRQLLRHRGWMVNQRSKAKNRIHAVLAAYNLISPFTDLFGVAGREYLHEVMGEKLRSSAQQVVEDHLATIDHLTERIHALEKNISLNKRQNHIVNLLKSMPGVGRLIALILLAEIGDISRFHSPKALCSWAGLTPKVHSSDAVVQHGHITKEGSRYLRSAMVQAATTACRVSPKWYRVHEHMALRCGRRAARVAVARRLLTVIYYMWKRDQPYQENYGQ

SEQ ID NO: 494467 - protein, 370 aa, unidentified
MLDTTTFVGLDVHARSIKAVSLDVMTGEVRCATFGYDAGAVAEWVRSVDPKARCVYESGVTGFDLQKRLSGLGVDCVVGAVSKMIKPSADRRRKNDRNDAEFLARMLSVGNVVEVWVPDDECEAARDLTRALEDARDDLSRSKQRLSKFLLRHGLVFDERTPTGRRKGNWTRAHWSWIESIRFAEGADNDVLAYYVDAVRRAAEEKARLEGLVEAEARKPRWRKRVDSLRCLKGVDTASAADLVFEAGEFSRFRNARSFAAWVGLTPSEHSSGESDRRGAITKAGNKHLRKTLVEAAWHYLTCSGRPKGLAKGQAPDRGARRHAAKGVRRLVERREALLARGVHGNKANVATARELACWVWAVGLMAEEA

SEQ ID NO: 494468 - protein, 406 aa, unidentified
MNMNAVGIDVSKRKSTVAVLRPGGKVVVKPFDVPHLSADFQSLEKLIRELDGETRIVMECTGRYYEPVARELSQAGFFVSAVNPQIIRNFQGQDNHLRKVKTDKADSVKIARYTLDSWANLKQYSLMDELRSQLKTMNRQFDFYMKHKTAMKNNLIGLIDQTYPGANTYFDSPAREDGSQKWVDFIGTYWHVDCVRKMSLSAFTDHYQKWCSRRKYNFSKSKAEEIYGKAKELIPVLPKDSFTKRIIKQAIDQLNAVSQTVEQLRALMNETASKLPEYPVVMAMKGVGPSLGPQLMAEIGDVTRFTHKGAITAFAGVDPGVNDSGDYSQKSVHASKHGSPVLRKTLFQIMEVLIKTKPDDAVYRFMDKKRSEGKPYYVYMTAGANKFLRIYYGRVKEYLSSLPESE

SEQ ID NO: 494469 - protein, 376 aa, unidentified
MGDHSEAFVGIDTSKLRNAVAIADSGRGGELRFLGEIENTPAATAKLVRKLAAKYERLTFCYEAGPTGYGLHRQIKGLGFECTVVAPSLIPKRPGDKVKTNRRDALSLAKLLRADELTAVWVPDGGHEAMRDLTRARETAMLDLRTKRQHVSAFLLRLGRPYPESRKTWTKAHASWITSQKLEHPQQRLVLEEMMLAIRQAQERLQRLEQAIAAAVPEWSLAALVTALMAMRGLDLIAATTLLAEIGDLSRFRTPTELMAYLGLVPSEASTGDTIKRGPITKAGNRRARRMLVECSWSYQHPPRVGQAKQPKVDAAPPAVREIAWKAQCRLYRRYRTLIRNGKLKTVAIVAIARELAGFIWAVARAVTTARFAAAA

SEQ ID NO: 494470 - protein, 412 aa, unidentified
MQDILTCAMGLDIHRDVIVACLAKGELGTDPEIEIRSFSTLIPEMRKLRDWVLEAECRYVAMESTGIYWQPIYEMLEPCFDGQINILVVNARHMKNVPGRKTDMRDAQWIATLLRAGLLKGSFIPDKTFRELRHLTRYRKSIVRDITAQKNRIDKFLQSSGFRFTAFLSDAFGASGQNIIRHLMEYGNISREALDRCLKTQTRKRIDEILIALNGSLSEHQRGFLRMIFGHLEALEQHRHTVEDAITKEITKHEEALSLLCSIPGIDVTAAAAIIAEIGTDMSAFPDSQHICSWAGLSPGNNESAGKRKSAHINKGNPYLKSMLCEVGWVISGKRSLYLSGWYWRIKQRKGAKRATIALARKLLALIYTMLKTGSPYNEDCFEIRRKQSERKRASRMVNELQKLGYFVVAPG

SEQ ID NO: 494471 - protein, 348 aa, unidentified
MTIVEVARPVTGGVDTHLDLNVAAALDAIGGLLAVAEFPATSVGHRRLLGWLAGFGPVTRVGVEGTGSYGAGLARYLRAAGVEVAEVDRPNRQARRRAGKSDPLDAIEAARAALSGRACGAAKTRDGNVEAIRALVVAKRSARSTKITTLNQIRHLSFTAPEELRRRLKDVSRRQLAARAAALRPSQRDGADPVMTATKTALRILGRRVLALNEEKARIDALLTTLVTQTAPDLLTLHGVGIDTAAALLVTAGDNPGRLRSEAAWAHLCGTAPIPASSGKVTRYRLNRGGDRQANRALWGVVITRLRNDPRTQAYMARRLAEGRSKPEVIRILKRYVAREVYHRLPRP

SEQ ID NO: 494472 - protein, 400 aa, unidentified
MISVGIDVSKGKSTVCILKPYGEIVSKPFNITHTQKDLSELSSMLFRLNDEVKIVMEATGIYHLPVLTYLQEKGFFVSVINPYLMKSYRNESLRKAKTDKIDSRIIANYGIDHWFKMKEFQISGVIYEELKLLGQQYRHYMKLHLLSLAELTHLLDLTMPGIKNLLASWNETNRKDKRSDFVERFWHYDVITSMSEQEFTEKYILWAKEKKYVPSQEKAKVIYTLAQESIPTLPSETSSVKMLVTEAVRVLKEVDATLGLILSRMQEIAKTLPEYSVVREMGGVGNTLAPKLIAEIGDVRRFRNGKALVAFAGIDPPPYESGQFVGCNRKISKRGSASLRKVGYKTMRSLKMRSRPEDPVYRYVVKKESEGKSKKSAKIAGLNKFLRIYYARVTELYKNI

SEQ ID NO: 494473 - protein, 345 aa, unidentified
MNIIRVGVDIAKSVFHVHGVDRHGQTQWQGKYARNKWLTALSRKVPAGAEIGMEACASSHYWARELQKRGYFVRLIAAQFVKPYVKSNKNDRVDAEAICEAMSRPNMRYVAPKTVAQQDVQAAHRIREELVGQRTAKANQIRGLVGEYGVVAPVGIQQLRRALPEWLEDAENGLSASFRVLLHGLADDLRYLDDRITALDERITESVKQDPVARRLMTLRGVGPLTASALSGALGDGKAFRKGRDFAASLGLTPRQHSTGGRDRLLGISKRGDSYLRKLLVHGARAVLRHIGGKDDGLSHWLQALVSRKHVNVATVALANKTARIAWALVHNEAAYDEGLAAAGV

SEQ ID NO: 494474 - protein, 346 aa, unidentified
MALTIVGTRAITGGVDTHADVHVAAALDPIGGLLGVREFPATAAGYGRLLSWLGGFGTVCLAGIEGAGSYGAGLARHITAAGVRVVEVDRSDRQDRRRQGKSDPLDAVSAARAAQSGRARGASKGRDGAVEAIRALMVAKRSAAGERTQTINQARALVLTGPDDLRARFTGHTAAALVAELASLRPRPGSTVGYATRIALRELGRRAEFPDGQLERLDELIGPHVAARAPGLLALYGIGPNTAALLLIAAGDHPERLRSEAAWAHLCGAAPIPASSGKTVRRRLNPGGDRQANHALWRIVFTRLGSDPATRAYVERRTAEGKSKKEIIRCLKRYVAREVYPHLRAG

SEQ ID NO: 494475 - protein, 391 aa, unidentified
MVCVGIDVAKDKHDCCILDSDGMVRADCFTIPNNMDGFKQLLQTIRNCTKKSDKIKVGLEATGHYSYNILGFLLDNGLPTYVINPLHTNLYRKSLSLRKTKTDRVDARTIATMLLSDVDLKSYTDIAYHNEELKSLTRYRFDKVQERAKLKQSVSRLATILFPELEGLVSSIHGTSIYALLSEYPGTKQISEVHLTKLTNLLTTASKGRYGKEKAIQIREAARASIGSVMPAKSLELKHTIKLIQELASEIDEIEDSIQKIIDELNPPILSIPGMGVNSAAVILAEIGDFSNFSSPDKILAYAGCSPSTYQSGKLTNCYAHMEKRGSRYLRHALYNATKYVCYWNPVFAEYLAKKRAEGKHYNVALSHAMKKLVRLIYALQKSGKAYLAAA

SEQ ID NO: 494476 - protein, 402 aa, unidentified
MYSSFVGIDIGKWNHQAAFLEVSGKETARSLAFQNTSEGFQSLLDSLAPFDKGQTVIGLEATGHYWLALFSFLVDNGWTVKVINPMQSDALRNMNIRKAKTDRKDCVVIADVLRFGRYTETVLPDEDLLQLRELSRCRVAHVELLGDLKRRALGILDRIFPEFASCFSTVFGAAPTELLQECTDPEELADYDVDKLIKLLEKESRGRHSREKAEELKAKASRSVGTRFGRDALKFELKMLLEQLDFIKGQVKELDKFLKKLMKNHELIYTIPGISVTLGSAILGEIGDVKRFGTPQQLQAFAGMDPSVTQSGNFQGTQGKMSKRGSPYLRRAVYLAANAARRFDPVFKEFYDRMIARGKHPKQALAAVGTKLLRVIHAVMTSQKPYNPQKLLPPAAISQLNP

SEQ ID NO: 494477 - protein, 497 aa, unidentified
MPTKSTIYSRCNPQLLKLFETAGHPAKVLCVALDYAKAQHMALMCNGLGELLKPSFAIDNTPQGAAQLLSEVRACVKPRKIRSEHVFFGGEDYPSYAENFLRHLRQAKFLVVRVNAWEAKQQRSNFQASSDSLDLLGIARCCLNRRGESVRDLPQAYPNLRIATRDRDKLVRMRTAVSNRIHSYVDRLFPGFLSEGKSGLQPFSKASLELMADRFSPAQLSRRPRQALAQWLGRRGVTQPRDTADQLKGFARNVLAPAPEQTPMLQQTLAQLVGLYRDLEQSIARIDREVAHWLARTPGAWLTSIAGFGITLSAGWTAELGPPSQWRSVRQLCSYSGVVPKSKQTGGPQKEPVVGAVQQRCNKRLKNVVLQAVQKVIQHGPEELRRTAQELQARGAHTEFALAKRLVRLGKYLALTGTVYRPKAMMDPDTPKATLAAHYQSLWEKLLPKWRDKADLREVFAPEQPLGQWRKMVQELYALELRLPQQKAAPKSSALAP

SEQ ID NO: 494478 - protein, 400 aa, unidentified
MIFVGDDWAEQHHDVHLMDDTGRRLSSRRLPEGLAGICTLHELIAGHADEPGQVVIGIETDRGLWVQALTAAGYQVYPINPLAVARYRDRHHVSGAKSDAGDAKLLADLVRTDRHNHRPIAGDSPDVEAIKVLARGHQNLIWARTRQTNALRSALREYYPAALEVFDDLHDRDVLGRAPTPAEAAHLTLPAIRSALKRAGRQRNLDTRAREIRAGLRVEQLAAPAPVVAAFAATTRAAVGLIVELNRQIIELESTLADHFESHPDADIYRSLPGLGVVLGARVLGEFGDDPDRYTTAKSRRNYAGTSPLTVASGKKRAVLARHVRNRRLYDAIDQWAFCALSSSPGAREFYDQRRDAGDLHHQALRALGNRLVGLLHGCLRHHTHYDEHIAWDHRTIQAA

SEQ ID NO: 494479 - protein, 345 aa, unidentified
MVMIGIDPHKRTHTAVAIDRGERVLDERLVQATGAQVPELLEWAKRLDGGERTWAIESAGGLGYLLAQQLLAAGEQVVDIPATLASRVRLLGTGRSEKNDPNDARSVAIAALRAAELVPVRVEDHATVLRLLASRHTQLGWAYNKTACRLHAVVAELVPGGIGQELVVSQARSLLTAHQPVGAVAVERHALAVEMLDELDRLNTQRKALRRRIAVAVAASGTTLTQIFGIAEVGAAVILGQVGDVARFPTADRFAAYNGTAPIEWSSGNPTHPIRRLSRRGNRTLNHVIHIAAVTQLRHRHSPGRAFYDRKRDEGMTSRAATRALKRRISNVIYRHLVADAARQN

SEQ ID NO: 494480 - protein, 348 aa, unidentified
MYVGIDVHKDTHTAVGISPYGEKLFEVTVGNYNPDFKLLEEKVEKHKGILSPFIGLEDVCGYGERLAGYLYEKYPLYHVPSILVDKARQNATHPEKSDSLDALGVAKVMIQSIDTLLPYTISQESEKAKQLKEISVDREDLVLERTRLKNQVHTLLYRIYNTEYASKFKDPFSIKALTFWRKAKPKCNPFLLKTMKRKVRRLLDIHIEVTDLEKDMEQLLAEGKYTIQTASGCGLVLASTMIGEIGDINRFTSPGALAKYAGCSPRERSSGKKVRHVKSRSGNRRLNCAFHRMALAQISRMGNDRARTYFKRKITEGKSKSQALVCLRRQMVNIIWMMLKHKTIYRNA

SEQ ID NO: 494481 - protein, 422 aa, unidentified
MLTTTHDNEEIIERVAALDIGKAELMCCVRVPDGDHAGRRLQEVQACPAMTRAVLGLADHLARLGVTRVVMEATADYWKPVFYLLEAAGLETWLVNAKDVKHLPGRPKTDKLDAVWLCKVAERQMLRPSFVPPPPIRQLRDLTRYRADLVAARTAEKQRVEKLLEDACIKLSAVVADIFGVSGRDMPAALVAGERDPKVLAQLARRSMRAKIAVLEEAFTGHFTTHHAFLLRTMPGRVDAISADIAALDDRIAAQAAPLAGAVARLDEIPGISLASAHVILAEIGTDMTRFPTAAHLASWARLAPGISESAGKKKGKGSTGHGNAYLASVLGNAAAGAAKTDTFLGEKYRRIARRRGSKRAIVALGRSILVIAWHLLSDPEGRFYDLGPGYHAARIDPERRKRTHIRELEALGYTVTLKPAA

SEQ ID NO: 494482 - protein, 311 aa, unidentified
MREDSIGVDISKDHLDVHRLRDGTMARFPNDAAGFTAFRRWLGRERPLRVVYEPTGAYHAAFELRFGSELPLCKVNPLQARRFAQARGTRAKTDAVDARMLAVMGAALALEPDPPLSQDRRDLKEMRVEHQALVRERTALLTRLKTLTLSLTRTRVATRLRLVERHLTEIGAAMAERIRKDQAMARTSDILCSIPGLGPRSAATILIEMPEIGTLPRKQCASLAGLAPMTRTSGRWQGQAHIQAGRKALRQALYMPALVATRFNAPLKAKYLALRARGKPAKLALTAIMRALLETANALVRANRTWTQIPP

SEQ ID NO: 494483 - protein, 285 aa, unidentified
MKISEVIGIDVSKLVVDVRIQTTQDYQQFENSAKGFKKMCNWVSKSSPIPKAQTLYVFEHTGMYSHNLAVYLDEHDFCFSIVSGLEVKRSLGIARGKDDKIDATKIARYAYRLRDELKPSILPTKEIAYIRRLLTLRERLVKQRAGFKASYKEQKRVFLKKENQLLFETQEKMIKYISKQIDAVEKELHDAININEELKTLYHLIISIRSVGPQTALFMIVFTAAFTKFKDARKFASYCGVAPFPNRSGTSIRGKTKVSHLANKKMKSLLDQCAKNAIQHNYEMK

SEQ ID NO: 494484 - protein, 342 aa, unidentified
MKHFIGLDVSLKETHVCVVDETGTAVAVCREATRPDLLASAIGRLAPSVERVVLETGGQSSWLQRSLRGLGVPTVIVDARQAKAALSCRLNKTDANDAEGLAQLARTGWYREVRAKRPEAALGRSVLLARQQLVKQRRDMENQVRALLRGFGLAVGAVSRGRFEERVWELVRCQPQLENAIGPLLMVRRCVDDHIQELEGRIRSVVGGSAVCSRLMTVPGVGPITALAFVTAIDDPYRFARSDSVGAYLGLTPRRHQSGEVDWAGRISKRGDALARCMLYEAANVLLTRVRKWSAPKAWAAKLARKAGAKKARVALARKLATILHSMWVNGTEFQWTREATA

SEQ ID NO: 494485 - protein, 380 aa, unidentified
MASMHDSTRSKTTVYAAIELSKKSWVVAIARPDRDRPSIHRIAGGNLADLIGRLRKAAGEKQRIVVCYEAGYDGFWLARSLAKIGIDCRVLDPASIQVNRRARRVKTDRIDSLALLRALIAIDRGERHVCAVVRVPTIEEEDARRSHRERQRLVRERTGHINRIKGLLFAQGIRGIEPKRRRTRIDFGKLATAEGLPLAERLRREPEREYQRLELIETQIRIVEKERDTADAQDPAVEQKRELLCALQGVGGASAAILAREVFARQFASRRQLGSYLGLTPSAYDSGSTTRCQGISKAGNSWARRVLIEVAWLWRKYQPGSPLSHWYAQKTADQSPRIRRIMLIALARKLAISLWRYVETGLVPDGAVMAKTTPHMAAAA

SEQ ID NO: 494486 - protein, 348 aa, unidentified
MLIIGCDYHPGFQQIAFVDKETGECGERRLTQREEAEQFYRALLGQNVRVGMEASGHARWFERLLNELQFELWIGDAAEIRAKRVRKQKTDRQDAQLLLRLLIEDRFPRIWVPDAENRDLRQLLWHRHRLVQMRTRVMNQLHVVALNEGLRRKKALWRAAGRQELESIALAPWASRRRQDLLDVLDRLTPKIQQLTAALEEEVEKRPVTRRLTTHPGVGPLTALAFELVIGTPERFHCGKQIASYVGLVPTEESSGDRRRLGHISKQGNVRLRFLLVEAAQVTVRSQPEWRNKFFHLAMRRGRKIAKVAMARKLAVHLYWMWRQGYDYGQLQKLGSHAGEPGHPDGGQ

SEQ ID NO: 494487 - protein, 371 aa, unidentified
MPSTTRICRAGGTAITTIAHTQPARLTVGVDTHKEVHVACAKDQLGRRLATTLVATTTAGYAELLGWADALGQVEAFGIEGTGCYGAELARFLRGHGQRVVEVNRPDRAARRRHGKSDPVDAEAAARAVQAGEATGLPKAGDGVVEMLRVLRVARQTAVRARTQTINALKALVVTAPDSLRQQLRDLPTRQLVATAAAFQPDTPATPTMATMVALGALARRYQVLDGEITMLSKQLHRLVRLAAPALLAVFGVGPETASALLVAAGDNPQRLHSDAAFAALCGASPIEVSSGKTVRHRLNRGGDRQANNALWRIVLVRLRAGHPPTVAYLQRRTAQGKSKREAIRCLKRYVAREIFAVLTTMADQAVTTAA

SEQ ID NO: 494488 - protein, 427 aa, unidentified
MKTEDSRLEEFRQLRNEIRGSEKHLLVGIDIGKEKQNAFLGTATGKTLFKRLIFENNKEGFEKLLTHTEAAKVQNNLSQVVFGMEPTANYHKPLGEYLITRGHEVVLVSGNAVANNRQLLDGRWDKHDGKDAANVADLISQGKCQYYEYPCREVRDLRVLLSLKRKLKKQAQGLWLRIRNNLVAQYFPEMDRYYGSCAQDNLEIVRNCLSPSVIAGMEYNEFFKTVVSRKKGLRQHKHLYRLWQLAGDSICCEAGDAAICEAEVLVEQLKQTRKAIEQVEKEIEKLCNLFSEYEFLMSIPGFGPDVSAKVLAYIGDQYRFDKASQVVKMAGLDLNANRSGKTTDKAVPVISKKGKADLRYALYQAALIASTRNQHFIKYFTEKIRGREMEKGIKTKMRVKLSAKLLIIAWTLMKNKEPFNPDYLTVA

SEQ ID NO: 494489 - protein, 365 aa, unidentified
MMNHIFVGIDLGDKNSVARIAVNRGKTERMTFVNNRRGRARLFEELGRRAEKQTDVQIVMAYEASSCGFILHDEAEARGIRCWVLAPTKMEKSVEQRKHKNDDRDADDVLEKVRAHVLAGNRLPTVWIPDRQMRDDRELVRSRMELVEKQTRLKTQIQMLVKRYGMEKPSGCGAGWTIRHRQWLEGLSECDALGGGARAALQSLLRQLSFLEAEIERMEKPIHQLAQQSRHKPIIDELTQEQGVGLITAMVYRTEIGHAGRFGRGRRVGKFVGLTPTSHESGQQQDRKGHISRQGPPRLRKILCQASWVHVQRDPQAKRFYQQLVSRNPKKKKIAIVAVMRRLAVRLWHRMRAAELRMTTMTEMN

SEQ ID NO: 494490 - protein, 346 aa, unidentified
MKKIFIGIDFSKEKFDATLIKAEGLKECAPSAHEVFDNKTSGFRRLVKWVKAQSEGFPIDSWLFCGENTGGYSIGLSNYLYASAYDMWLECAYKIKHSVGLQRVKNDKADSRAIAEYAMRNHDKMIPYKPQSASLTCLREIFLYRHSLVRQRVSLQVRRDEKRLTQEKSDVRAFMSFTSKHLITEVNKAIAKCDQKIKDIIAADDELREIFDIITSMPGIGIQNATCLMVYTDNFQKFDMNARKIGCYYGIAPFGRQSGTSVNSRPQVSPFANRMIKSLLSQAALAAIRFDMNVYNYYQRLKERGKHPLLIHNNIKNKMLHALVAMVRDRVKYNPDYVYRTNKEIA

SEQ ID NO: 494491 - protein, 345 aa, unidentified
MQPMYYIGLDVHKRTIRYCVKDGSGAIHSEGSLPATRFDLDHWMKTLPQPWTAAMEATMFTGWIYDHLKPHAAALKVAHPLMLRAIAAAKKKNDRIDASKICDCLRCDFLPECYMASTAIRERRRTLRYRNLLVRQMVQMKNKIGMLLMEAGVSYNKQKLHKAGYFRELLATNPDIDEGLRSLLRQCRETVVRLGKTESALIRSLEHDRLLAERVERLMSIPAIGPITALTWALEIGEVQRFSSIKKAISYCGLCGDEKSSANTMQRTPLSKQRNKHLQTTLIEAAKMAPRYSPTLALLYDREKQKGNANRATLAVARKLVAYLMSVDRGQCHFLVLDQETRTAA

SEQ ID NO: 494492 - protein, 416 aa, unidentified
MNAAGIDVSSRKSTVAVLRPFGEVVQYPFDVHHSAENLIALAQQLKAIEGETRVVMEHTGRYYEGIAKVLHEAGLFVSAVNPLLIKEYGNNSLRKVKTDKADAVKIARYALDNWADLRDYTPMDTIRYDLKTLNRQFQLASKQKTATANNLIALQEQSFPGIRKLFDSPVRSDGTQKWVDFTHDFWHADCVRGSSQNAFTERYRKWCKRNRYQFSMEKAAQVYALARSAVVLVQKTSVTKTLVQEAANQLTAISRSVETYRTEMNKLASQLPEYPVVMEMYGVGESLGPQLMAEIGDVRRFQRKQSLVAFAGIDPAPNESGDYRSRSNKTTKRGSPYLRKTLFNIMTIHLQRAPLDEPVFQFLDKKRAEGKPYYVYMTAAGNKFLRRYYAKVMAYFATLENLPPVDMESTGLQRTE

SEQ ID NO: 494493 - protein, 412 aa, unidentified
MEGETVIAGVDTHKDVHVLCLLDGLGRKIWSGSFRADPEGYDRLAEAIGDPGSCAVVGVEGTASYGAGLTRRLVELGYNVVEVLRPKRDKARPGEGKSDPLDAERAARKAASGRGCSVPKSQDGWVEAVRQLYVARRLAVATSTSCVACAKSMLTTAPGALRERFRGRERPKDLMPLLARRRKAGDALEESVLASLRSVAAVWKEARSQVESCDERIRALLEANAPALLGVEGCGTTTAAALVVAAGDNPGRLKGEAAFSMLCGVSPIPASSGKTERHRLNRGGNRQANWALYEIAIKRMAYDERTKRYVARRTSEGKSRREAIRCLKRYIAREVYRVLMDPNPDGAAPEGPELAKMRKAMRVTQRQAAEGLGLSAATLGHLEHGRRRSTKLERRYYELLCELKGALPQTAS

SEQ ID NO: 494494 - protein, 343 aa, unidentified
MDVHKRESQVCILSEAGEVVLETRIRTERGRLGAVLGGRPRARILLEASTESEWVAQALEGLGHEVIVADPNYTPMYATRSRRVKTDRRDARTLGEACRLGAYRCAHRTSAPRREVRAALAVRDALVRTRARYVTLIRALLRQQGIAVPSGSTEAFLRRLERVSLPRAQQRAIAPLVALLPALNTEIAAADARIGEAMAADPVPRRLATAPGVGPVTAVAYVATLDDVRRFGHPGQVAAYLGLVPQERSSGERQRRGALTKAGNGRMRALLVQAAWCIWRDRSPASERLRAWAQPIAARRGKRVAVVALARRLAGILYALWRDETDYDAQRVGRRRQAADAAA

SEQ ID NO: 494495 - protein, 344 aa, unidentified
MEEHTVVAVDVAKTVFELAVSEEPGRVRLHRRLSRGELEVFFAQSRESTVVMEACGSAHFWARQLQSLGHAVVLLPPHQVRPYVTRNKTDRADAKGILEAYRNSDLRPVPVKTVSQQVLGSIHRFRAGWIQARTAQVNTLRGLLRELGFVIPEGIEKVLPQVRLLVADAESSLPDSLRGTVAAACDEIESLGKKIQQAEHQLEALAEETPLVERLRSVPGIGLMTSTALVAFVGDARRFPSGRHFASYLGLTPREYSSGLRHRLGRISKRGDSYLRLLLVHGARSVLCHAKKATTHDRLRTWALKLQGRTRHNKAAVALANKLARIAWAVWRNGREYESVAPAA

SEQ ID NO: 494496 - protein, 326 aa, unidentified
MNLPAVVLGIDIAKLKFDVCLIKENQKVKHKVFANTKHGFEQLVAWLNSHQAGSLHVCLEATGSYGEALALFLHEAGYVVSIINPAAIKAFAASRLSRTKTDKVDAELIARFCLAQQPQAWTPPASEVRGLQALVRRLESLVEMRVAEENRLSSGIAVDVVRHSLEEHIAYLVEQIKQTELMIRGHIDNHPDLKEQSDLLDSIPGIAQTTAALLLAEIVNIKQYKSARQVAAYAGLVPRERRSGSSVRGRVQLSKIGNARLRKALYFPAITALRCSSFFKAWADGLRERGKCKMSVIGAAMRKLIHLAYGVLKTGKPFDPNWAKTA

SEQ ID NO: 494497 - protein, 339 aa, unidentified
MNATRIGVDLAKSVLQVHCVDRHEKVVARKKLNRAQMHSYFKSLTPSLVGMEACATSHYWARTLMSYGHKVELIAAQFVKPYVKGGKNDANDAEAICEAVGRPTMRFVAIKTVEQQVMQAEHRIRSRLVRARTALCNEIRGLLGEFGIVVPVGAQQLRKALPVIQEQEDSGLTPRFLMLLAELADELRQIDDRVTLHDKRIQAAAREDHRIRRLLEIEGIGPVSASALVAAVGDAKQFASGRDMAAWLGLVPSQHSSGGKERLGRISKRGDTYLRTLLIHGARAALNACGSKEDVRSKWAQRLATRRNRNIATVALANKNARIAWAVLSKEEDYRGANR

SEQ ID NO: 494498 - protein, 413 aa, unidentified
MERIIERCAGLDVHKSSVTACVRIPDENEALHQEIREFATTTRGLLLLRDWLASFEVRLVGMEATGVYWKPIYYMLEDDFELWLLNARHLKNVPGRKTDVKDAEWICQLVEHGLVRPSFVPPKEIRELRNLTRYRKAQIEERTREVQRLEKVLQDAGIKLSSVATRVLGASGRAMLDALVGGTTDPEVLAELARGRLRSKLPALRDALEGSFSSHHALMVGKIVAHIDYLDESIGDFSAEIERVIAPFSEEVELLDTIPGVNRRTAETLIAEIGVDMSQFPTHRHLASWAGMCPGNEESAGKRRSGKTRKGSKWLRSALTESARAAARSKETYLAAHYARLRGRRGSKKAAVAVGHSILVICYHVLERGVPYEELGEDYFDRQRSGEAYAKRLVRQLERLGHKVALEPLPQSA

SEQ ID NO: 494499 - protein, 343 aa, unidentified
MQTITTIGLDIAKSVFQVHGVDAAGQVVVRRQLKRRYVLAFFQRLPPCLIGIEACASSHYWSRELRALGHTVRLMPPAYVKPYVKRQKNDATDAEAICEAVTRANMRFVPTKTPEQQSCLMLHRTRHLFIRQQTAVINAIRAHLAEFGIVAPVGRKGVTELLHVVADPSDGRVPEVARACLAALGTQLLGLKEQIVEFDRLIMAWYRSNETSKRLHYIPGVGPLLATALAASVADPQTFRSGRNFSAWIGLVPKQHSSGGKDRLGSISKQGDRYLRSLFVAGALSVIRYAKIHGTKHRPWLTALLARRPTKVAAIALANKLARMAWAMMARGERYRNPVALAA

SEQ ID NO: 494500 - protein, 409 aa, unidentified
MERVIERGAGLDVHKKSVTACVRVPGSAGSRRQEVQTFGTTAAALLTLRDWLQAHGVTHVAMESTGVYWKPVYYVLEELFTCLLVNAAHVSKVPGRKTDVRDCEWLAQLLEHGLLRGSFVPPVAIRELRDLTRYRAVLVQDRTREANRLHKVLTDAGIQLASVASNVLGKSGRAMLTALVEGTTDPGVLADLAQGKLRSKLPALREALTGHFRPHHALLVSQLLAHLDYLDEALAVLTADIETALAPFAGEAARLDAIPGIGPRTAEILIAELGVDMRQFPTARHVASWAGLCPGNHESAGKHYSGKTRSGNIWLKRALCQAAWAASHTRHTYFAAQFRRLAAKRGKKRAIIAVAHSLLVVIYTMLKQGKGYLELGADYFEKLHADDFKRYLVRKLEAQGYKVTLETAA

SEQ ID NO: 494501 - protein, 332 aa, unidentified
MSVYVGIDVHRKRSQVAVINEGGEVLANRNVPNGVKPVLSVIGGLPAGTPAAYEAAFGWGWLLELLEGYGFEPHMVHPLQCKAIASARLKNDKVDAATLAQLLRADLLPEAWIAPPEVRQLRALLRHRAQLVRLRTLLRNRVHAILADHGHGRPAGCWSGPGRQWLAALQLPAVSREVTDDALALMDALQQPIDRLDQEVRQRAKADPRVKVLTQLPGVGPFTALVLLAEIGDITRFGSARKLASWAGLTPTVRGSDRTVHHGHISKQGPTWVRWVACEAAQTAKRHPDFAPGYEALARRRGKKIATTAVARKLITRAYHLLTEAASDGAPS

SEQ ID NO: 494502 - protein, 372 aa, unidentified
MKKVSRTATQMEKPEITVGLDLGDRFSHYCMLNSDGDAIETGRIQSTEEALRRHFEGESMMRIALECGTHSPWISRLLEQFGHQVVVANARKIRAITASESKNDKNDAEKLARFAFCDPRLLSPIRHRSPERQQDLNLIQARATLVRARTMIVNALRGLVKSAGGRLPACSPQGFEARAAAAIPPSLATAARPLLSQIAALNASIHEMDRGIEQLGDRYPEIKLLRSTPGIGPLIAAAYVLTLDRPDAVRHSRQAGAFLGLRPRQSQSGDSDPQHRISKAGNVYLRSLLVQAAHYVLGRFGPDSELRRWGLKLAASGGKRGKKRAVVAVARKLAVILHRIWQTGNAWQPFPRADRDRKNARNQALSQNLCVA

SEQ ID NO: 494503 - protein, 520 aa, unidentified
MATSRTRQRRSARRSPSDVGKPRGVLHPRVQQVGPEHFGIVCFDPAKVRSKFLLADFYGRVLIPPTWVAHNRPALDTAVAQVRQAFADHQLRDGLIAIERTGRYHRVVQRTFVAAGFETRIVHPFVTKQYRQPVDPANKTDDADLSALHRATVTGCALLEASRDEAWTTLQLLVRHRRDLVRKGAALNCQIRDHLEAALPGYAACFDKLWDSAIPWHLLQHFPSAQRLRDAGVTALCHSLREAGIRFQQRTVQAVVDWAAQAAPGDIAAAQHLRLGLALYDDRQHKTQQIQALERELASRLVQTPYSLLLSFPGINVVSAADFAGEMGPIEHYANAKAITGRAGLRPSRYQSDQVDKANGPLIRLCNHALRAAILGIADNLSVCNHHFQALATRWASQGKDPRHTRVKIGLRFSRIAFQMVAGRQVFRHPSIQGRHYILDKLNAFHRDHDTDMVAVLRDLQAAIGQLPQREHAAEAKPLHEEWQRIRDGHRRGPQLLGDILPIVLARLGVAVVQSPESGE

SEQ ID NO: 494504 - protein, 313 aa, unidentified
MKKTICGVDVSKAKLDVCIEPAHRLASFNNDTAGIAELAKFCREHKVDLVVMEASGGYERRVFIELWEQDISCALTNPRSVRRYAEAMGILEKTDRIDASVIARFADAKGLAPTPLPSQAQLRLKALVARLRQVTDDLTVQKQRRSSMFDNTEMQASVDEVIALLKRQSRSLEGEIASMIDDDPLWAKLADTWRELKGVAGRTVARLHAELPEIGTLSNKAIAKLAGLAPLANDSGKRKGKRPTRGGRAGVRSILFLVAAIVARYDKNIGTFKERLVKAGKEKMVIRIALARRLLVILNAKARDARAQYANAT

SEQ ID NO: 494505 - protein, 349 aa, unidentified
MSMVCGLDLHREQITFDALEVETGQVWRGRIWQPDRARLRRWLEQELAPRASGESVAVALEGCTGWLYVVEEVTAVGFEAHVAEPAETQAARGRKRRAKTDRSDCRLLRDLLLSGQLPESWVPPAPVLEWRERIRLYKTLLDQRTQWTQRIHAELYQHGVALPEAAVRSEATRRALADPALRLSAAGRERIEASYAMIDATDARLLPLRAKLARFAAHQPACMALIKTHYGVGPLSSLAIWTELGDCQRFSRSMQVVRHAGIDVTVDSSDRHRAGGYLSRQGPAVLRWALYEAAKTSSRRSAPDHHYYAQVKARHDGKLAALSMARKIARRCYHTLRGLPPEIVYAMPD

SEQ ID NO: 494506 - protein, 348 aa, unidentified
MKNKSFVGIDISKNVIDVSIFREDTNIKMFPHEVFNNTRKGFGDMCSWLKKSRVVLSQVLFGMEFTGCYSLDLEKFLTSKNYSFCMLSTRIVKHHPMGTIDKRDKNDSAKIADFLYRYDGTECAKPYKLPSKAMQQLKQLVNERKFLVEQRTNFMNRMQMFETKEDSAMYESYIKKLNHDIEKIDQEECELMSKEEDVFDTFQNLLTIPGIGFVNATNIIAITRNFTAFDTARQYARYVGVAPCSHTSGTSVKWRARPSAHCNGQVKADLSMAALRAVEYDVEMQMFYNRKLGGRKDSDTKRKALNAVKFKLIRRMFAIGKQKRKWEGLNTSDDRKNLHIEKSKASEL

SEQ ID NO: 494507 - protein, 400 aa, unidentified
MSGLKGNFDCIVGIDISKDKFDACGITGEETKLFQISATMDRKGFEKLKRYFASVSVSSVLIGMESTASYHVNLFSYLVAEGYKVILINPLLISNYMKMELRKTKTDKKDAVVIARFLLANGDTLIQRATPSLISDLRDLSRQRESLVDEMTALKIEIKQLLNITFPELEHMAGIFTKSILRLLQQYPSAFALRDADIGQLSQTLITYSYGHKREEFAEALIKAARFSVGTNSPAKEMIIKQKIALLLHLEEALGEITDMLMEMARKLMEEDINIMTSIKGIGDKTATNFLVEMGGDINQFECSGKIIAMAGLDPAVYQSGQHEGRGRITKRGNRHLRRIIWMMTTSVIQYTDIFHAYYLKRRKEGLPYKKAVLATAHKLIRVIYAMLTQRTTFCPQLNS

SEQ ID NO: 494508 - protein, 376 aa, unidentified
MESSTFIGLDVHKASISVAVARGERGGEVRHWGSVPNRPDHIRKLVEKLAASGAQLRFCYEAGPCGYGLHRHLVEMGHDCIVVAPSLIPLKAGDRVKTDRRDALMLAKLHRAGELTAVWVPDAAHEAMRDLVRARATAMRVAGKARQHLQGFLLRHGRVYPGKKGWTGAYRRWLAMVRFTQPAQQIDLQDYIDAVADAEARVERLTGQIADLLPQWSLAPVVAAVQAMRGVGFIVAVTVVAEVGDFHRFDSPRQLMAYLGLTPSEHSTGASVRRGGITKAGSGLARRALIEGAWSYRMQARISVKLLARLEALPQVVRDIAWKGQLRMCQRYRHLVAAGKAKVLVVTAIAREMLGFVWAIARAVTTPTAAPVAKAL

SEQ ID NO: 494509 - protein, 340 aa, unidentified
MKITTFGLDLAKNVFQLHWVEPETGEVKRRSLKRDQMIKFFAQRSASVVAMEACGSAHYWARKLIELGHEARLIAPQFVRPFVRSNKTDAADAQAIWEAAQRPERRFVAVKSVHQQAVLMLHRVREQRVKMRTMQINQLRGLLYEFGVILPAGRHKAMPQVTQALARLEDTLPAMALEVLREQCASVEALSAQIEEIERKLAAWRKEDEAAKRLMQMPGVGLLTATAAVATVGDAKVFSSGREFAAFLGLVPRQSGTGGRVKLLGISKRGDGYLRRLLIHGARAVITHAKARDPWVEALLARRPLNAVVVALANKMARTIWALLAHGRHYEPRGQALGCA

SEQ ID NO: 494510 - protein, 342 aa, unidentified
MKFYCGIDLSARDCHVCVIDEQLKIVVQQKLGNELAKICQLLEPYKANLKIVVESTFNWYWLIDGLQAEGFEVVLAHTLGLYLITGAKVKTDRRDAYSLAKLLLVGAVPAAYIYPVATRPVRDLLRRRARLVQVRAGEYGSLRRLLLRQGILSSRQQEIKTASETELAQWFEHPLVRLHASQELRRIELYSQQIAELEKTILELAKTEQSYQLLLQLPGVGQTIALTILYEVGELTRFANVKVFSSYCRVVPGIAQSGNVTGRGRASKQGNHYLKAAFSQAAVHAVRCYPNVRRYYERQLKRHQGRGRQMICYNIIAHKLAQAAFHILKEQTEYRAELLFGR

SEQ ID NO: 494511 - protein, 348 aa, unidentified
MRSYFVGLDVHKQVIAFCVKTADGAIVMEGSIPATRTALDQWVKTLPGPWHGAMEATIFSHWIYRHLEPHAAKLEMGHPARMKAICAGKKKSDKIDARTIADLLRCNLFPACFVISPELGALRQQMRFRRLVLEETVMFKNKTAGLLMSAGVEYERRRLHGKRYFENLLKDNEWISQELRPLLEFNRAQMTTLQAMDRRLKGMLARHPALESRVKALCRIDGVGTVTALSWALEAATPERFRSIKQAMSYCGLTSALRESAGHQKRGPLSKQRNPHLQSALIETAKLAPMYNEKLKEVYRKALEKGDHRNRATLAVARKLVAYLMAADRAFFAVQREGTAVGEDTLAA

SEQ ID NO: 494512 - protein, 440 aa, unidentified
MAMRKREDEVFPNAAGIDVGASSHWVAVPGHCTDAPVREFGAMTDDLHAMAEWLLACGVDVVALESTGVYWIPVYELLESRGLKVWLVDARQVKYVPGRKSDVADCQWLQKLMSHGLLRAAFRPAAEVCVLRAVARSREVLLTEQASWVQRMQKALVQMNIQLTEVISDVMGQTGQAIIRDIVAGQRDPARLARHRHRRIKASEQDIVRALTGHWREEHLFVLGQALGMYDDIARHLHACDTKLRTLLAERSSACVDVGKTPRTGSKARAQFDLRQQLANWAGCDLTRINGLGLESVMKILSELGTDLSRFANVKHFCSWLGLCPATKISGGKVISARTKRSANRVRQALKMAAMSLSHSDSALGAFYRKLCTRMDKPRANTATAHKLARLVYFMLTRGEAFVDEGQQRYEEQQRERSIAALKRRAATLGFQINPIGTAA

SEQ ID NO: 494513 - protein, 307 aa, unidentified
MQAVTTIGLDIAKSVFQVHGVDAEGKVLIRRKLKRRYVLAFFQKLPPCLVGIEACATSHHWSRELKALGHTVRLMPPAYVKPYVKRQKNDAADAEAICEAVTRANMRFVETKTPEQQSCLMLHRTRHLFIRQQTSVINAIRAHMAEFGIVAPVGRQGVEALLEVAADGGDNRVPEVARSCLAALGAQLRALKAQILEFDRRITAWHRSNETSRRLDAIPGVGPALATALVASVADAKAFRSGRNFSAWIGLVPKQHSSGGKDRLGSISKQGAAQPVHCRSPRRDPLCQDPRHKASTLAYSLAGAASD

SEQ ID NO: 494514 - protein, 339 aa, unidentified
MELYAGLDLHSRNTYIGIMDNKFNRVFKKRVPNHLEQILQTLDPFQDQIKGFVVESTFNWYWLVDGLMDAGYSSAHLANPSAIKQYEGLKHSDDQHDAFFLAQLLILGILPQGYIYPKKDRPVRDLARKRMFLVQHKTAHILSLQSLIQRCCARKVRANDMRHLTVEELELWLEEEHLVLSAQANLDSVNFLKQKIKQLEKAIIQKVKLNKAFKYLLTVPGIGNILAMTIMLEVGNIKRFPKVGNFTSYCRCVPSRRLSDGKSKGQGNRKNGNRYLSWAFTEAAQLGRRHNERFRRYYNRKVAQANTSLATKALGNKLARICYYIMRDQVPFREELFCR

SEQ ID NO: 494515 - protein, 348 aa, unidentified
MTIIVEQTRTITGGVDTHLDMHVAAAIDQLGALLGTEAFEANRAGEADLVCWLASFGTLTRVGVEGTGSYGAGLARLLAVDSDVEVVEVDRPNRQLRRRQGKTDTLDAIEAARAAQSGRALGQAKSRTGNVEAIRALTVAKRSAQSTKVQALNQIRHLGFTAPDPLRERLSGLSAAKIVSETAALRPRPGGDPVVFATKTSLRILGRRVQALDAEKAELDTHLTVLVTTTAPELLAAYGVGVDTAAQLLVAAGDNPQRLRSEASWAHLCGVAPIQASSGKVTRYRLNRGGDRRANHALWRIAMTRMSSDPRTKAYVLRRTEEGKTKSEIIRILKRYIAREIYALLPRT

SEQ ID NO: 494516 - protein, 340 aa, unidentified
MKSTIIGIDLAKNVFEVYLEDEGGQGNKRCRLSRKKMLPWFANRAPALVGMEACGGAHYWARELAKLGHTVRLIAPQYVKPWVQTNKSDQADARAICRAVQEPGMRFVAIAGEAQQAVQAIHRVRSRLQENRTALVNQIRGILLEYGVALPKGVAAVRKALPLLLAEERWAPLIRQFLLEQHAELLEWDTRMVAVTQAIIQENARQPVCQRLEQVRGIGPLSASALWLKAGGQTYQNGRHLAAALGLVPKHTGTGGKIRLGGMSKRGDRYLRSLLIHGARSVITHSREKQDPVSRWVHRLVERRGMNKAVVALANKNARVAFALIHADQPYDVTKMCRAA

SEQ ID NO: 494517 - protein, 326 aa, unidentified
MLEGVNGKEDWIVEESVFVGIDVSKGTLDIVMRPGGSRESIPNQEAQIGELVRRLSTLRATLLVVEATGGVERRVVRALAAAELPVIVVNPRQVRDFAKATGRLAKTDKIDAEVLAHFGEAVRPALRTLPAPASEELRAQIARRRQVTEMLTAENNRLGHSAKAVGKRIEAHIRWLEAELDRVDNELDQSIQQSPIWREQEDLLKSVPGIGAVISRTLLAELPELGKLNRKQIAALVGVAPLNWDSGMMRGRRAIWGGRATVRAALYMAALVASRCNPNIREFHRRLRAGGKAPKVALVACMHKLLTILNAMIKHRTRWSVIVEAQ

SEQ ID NO: 494518 - protein, 367 aa, unidentified
MSIYFGVDFHARQQFIKWCDTSDGEVHEQQLFHHALEEVREFYTRFQGEVIVGLEASGYSSWFETMLQQIGHQVWVGNPTEIRRRARSRQKTDRRDAELLLELLLKDEFPRLHRLTPASLEVLRQLRYRHRLVQMRTRIYNALQAIALSAGVSLKAKLRTNKGQQRLCQLSLTPACAQQRQEWLSLLSELNRRIAQVEQELEPLAAADPRVQRVRTHPGVGLLTGLALVHTLCPVSRFSNSRKVTAYIGLEPREYSSGERQRFGGISKAGSRLLRFLLVEAGHKAITKDQHLKKLYHRLLHRRERAKAKVAVARHVLVHSYILLRDEIDYAEFLRRGVAVRSARVGHRLSMPDKLIERSASGQQQSA

SEQ ID NO: 494519 - protein, 344 aa, unidentified
MERYIGMDVHAESCSFCVLEASGKELQQDVVETNGQALVQYLKQFSGRLHLCYEESEWAGWLWEILSPHVAEVVVFRGERRKGSKSDAIDARHLAERIRTGQIGMPIFKAPRQFAKLRELAQVYGLLTRDVVRAKNRLKSRFRRRGVRCTGESVYGVEGRQRLLEELPPALRPAVGLLGVELDCLEALKAETEAAMVKASHAAPISRVLETIPGLGPVRVAQILPIVVTPHRFRTKRQFWAYCGFGVVMRTSGDWVQVDGKWVKVQVAKTRGLNFNFNRTLKYIFKGAATTVVSHAGPNSFREAYDRLCAEGTKPNLAKLTVARKIAATTLAMWKSGEEYDAKR

SEQ ID NO: 494520 - protein, 374 aa, unidentified
MEYYSTLYVGMDVHRDSFTLSHFALEMRQPTGIIKTDSDYRRIVTYVHRLKEKYGQEKRIVCGYEAGSLGYTLYHQLTKAKIECVILAPSTISSPRGGKRVKTDGRDAANIAQCLAYGTYSPVHIPSAEDEQVKEFIRMRNDHCQMLKKLKQQILSFCLRHGYQYSGTRSNWTQAHMKWLDALQPEGLLGDTLEEYLTSFRYHQNKLERLDRRIEEISREETYREPVGRLCCLIGVKPLTALSVVSEVSDMHRFPTAEKFAAYLGLVPGEHSSGNSVRRGGITKAGNVHVRTLLTEVAQSYTHGKVGYKSSALKNRQSGQSETVIAYADRANERLRRRYYQMTLQNGKRGNVAKTAIARELACFIWGLLTDHVA

SEQ ID NO: 494521 - protein, 354 aa, unidentified
MNTVASKWVIGMDVSEKSIEFFFLRPDGEGGLSKKEPNTPDTLAKICSEMPDRKGFMVVMENGTHSPWMSEYFHREGVECYVGNARKLAAIWTSVQKSDRNDAEMLARLARADLKLFSPIRHAGRDLRAEFAVLKSRDRLVKCRTALINCVRGTLRSFGVDTTELTVEKFTSKAVGVMPKDLHPALDGLLVQIRMLETQIKDYDRKIERIGKRHEPVQRLRQISGVGPVIALAYVLFVGDPQNYSSAGRVGAHLGIVPKRDQSGDVDKQLGITKAGNQMLRYLLAQGANYILSRGPDCDLRRFGERICARGGKIARRKAKIAVARKLSKIMYVMWRNGTDYELFHKSQRGMVNT

SEQ ID NO: 494522 - protein, 347 aa, unidentified
MLGIDAHKRTHTVVAVDELGRQLATRTTTATTTADHLAIIRWADQFGAERSWAVEDCRHLSRRLERDMLAAGERIVRVPPKLMAHARDAARTYGKSDPIDALAIARAALREPHLPVAHLDDVSRELRLLVDHREDLVAERTRHINRVRWHLHEIDPTWDPDQRALTTFKHLAIAEQRLTTVDTVVARVALDLVGRIRSLTIDINSLAAELEERTVTTAPNLRKIHGIGPLAAAKLVGEVAGIERFRSRHAFARHNGTAPLPVWSANRERHRLSRTGNRQLNAAIHRIALTQARSHPDAIAFIKRRIENGNSGREALRSLKRRLSDVVYRALLADAPHLRERPQHIAA

SEQ ID NO: 494523 - protein, 354 aa, unidentified
MEHPTRIFVDTSKSVFQVHGVSAAEAVVLRRKLSRSQFAKFLSGLEPTVIGFEACGASHHWARVAMAHGHQARLVPPQHVKPYLKRNKNDARDAEAGCEAMSRPMTTFVPVKSEEQQAAAMLIGVRQGLVKRRTQLGNRIRGYAAEFGLVWPKGTDKIGPLLDRIAADKTLPALAREMFAELGAEWAQVVARVAQVERRVLSSHKADPTRVRLAEVPSIGPIGAAMIVAKVPDAAAFKSTRHFCGWVGLTPKDHSTAGKQRLGAITKAGDEALRAVLVSGAMSLVKVAQKRPDKAWPWLVDLLTRKSPKAAAVAVANRVGRIICKMLVTGEAYDPQRMMRPLGRSPLQPIAQAA

SEQ ID NO: 494524 - protein, 380 aa, unidentified
MAEITRGLIARVGVDLAKQAIQVHAVDAAGHRLVARAFKRDQFLAWCAQLPAGCVVAMEACSSAHHWGRKLTALGLQPKLIAASFVSPYRMEGRSGKNDMTDAAAICEAASRPTMRFVPIKSCEQQGVMSLHRFREGYKEERTACINRIRGVLAEHGLVFGKSPKVLRAALADVIEDASNELSGRARLVVQRAFEHWRELDEHMGWSDGQVGQHVRGSPQAKRAAKVMGIGELGASALVGGVGEFKQFKSGHQFGAWLGLVPSQNSSGGKASLGRITKRGDDYLRTLLIQGAKSAVMSAGKRDDPISKWLQQLILRVGWQKACVAMANKNARILWAVMTREAAFDAEYVSVKPAGKCKAPSAPTKPIPTVKSAQVAACMA

SEQ ID NO: 494525 - protein, 335 aa, unidentified
MHYLYYVGLDVSKETFDASLVAFEDANEMAHRKFANSRKGICSCLHWVEKRHGILLDDVIFCAEDMGSYISEMAVCASDRTLNFNFSLISPLVIKYSMGIARGKTDRVDARRIAEYAITHYRKIALYLPAEKELCQLRTWLILRAHLAKQRVAKLVLLEKLDYKEKFADVSIQRSMLQEEIAYAETHMKTIEREMKELIAADSNICRNYKLLTSIKGVGPITAIVMLCSTLNFTKITDHRKFACYCGLAPFEHSSGTSVCGGCHTSSMANRDIKVQLNRSALIAIRCDPQLKAYYERKVAEGKHKFSVLNAVRAKIAARCFAVVRRGTPYVALQI

SEQ ID NO: 494526 - protein, 373 aa, unidentified
MNYSTVYIGMDVHKETFSLCCYTNEKEQAEYPQKVDGHYSKVINYIEAMRFHYGDDALFICGYEAGCLGFTLYHQLTDHHVKCVILAPTTMPQQKGRKKVKTDKRDAALIARCLAHHDYSSVHIPTEQDEQTKEFIRMRDDHKLALKKIKQQILSFCLRHNYRFDGTKNHWTKAHLKWLRSLKPEGLYSEILQEYLLTYDNLTDKLERFDKRIEDLASDETYQENVQKLSCFIGVKTVTALAVLTEVGDFKRFASAQHFASYIGLTPGEDSSGNDQKRLGITKAGNRHVRCLLIEAAQSYSRGQIGFKSKALKARQHDNPPEIIAYSDKANERLRRKYYRMVLKNNKKPNVAKTAVARELACFMWGMITGNVA

SEQ ID NO: 494527 - protein, 419 aa, unidentified
MPLSTTLYVGTDISERVNRTRFYEEGGKEIGGRMESQNDLPGSRDLAGESVARAHRIGAKQILWGLEATNLFWWHLATFLTTHPELLAHGLRCYTFNPRQVKKFKESYPDIGKDDWTDAMVIADRLRFGRLPAECYLDERYQPLQRLTRYRRHLVTQLVREKNVALGYVYLKLSAYNTIERPLSDTFGVTSQQLLEGYLTPDEICAAPIEELASVLKEHSRGRVADPEKVAEVVKQAARRSYALPKPLVEPVNLILSSSLTTIRTLKAQLGPIEKAIATELRATPPQTLSTIPGLGPVFTAGIVSEIGDVGRFEREESLAKFCGLTWRRHQSGEFEGEERPLTKTGNAYLRYYMVEAANSVRLSCPEEFGSYYHKKYREATRHKHRRALVLTARKLVRLVHSMLRSGRIYQPGGPRKAR

SEQ ID NO: 494528 - protein, 376 aa, unidentified
MSKIRFVGLDVHADTIAVAVAEPGGEVRSHGVIPNRIESVRKLIGKLGPARQLKACYEAGPTGYVLYWQLTQLGVACEVIAPSLVPTKAGDRVKTDRRDAEKLARCYRAGELTAVWVPDAAHEALRDLVRAREAAKKDQLKARHRLGKFLLRHGRRPEGMKAWTKQHLEWIKTHVRFDQPALEATLLDYLHEVEHVAMRIVKLEKAIDEAVQTAPMEIRTVIEALQALRGVAQTTAATIVSELGSLSRFQSPRQLMGYSGLVAREHSSGNRVQRGSITKTGNAHLRRVLVEAAWAYQHRPNVTGFLLRRQKSLSLSDEVKQIAWKAQHRLHKRYKTFAARGKNKNQIVTALGRELLGFIWAIALNTEQKHKLAIAA

SEQ ID NO: 494529 - protein, 326 aa, unidentified
MQGKEASEQETKIKSSVGIDVSKCWLDVHVLPTNERLRAANDRTGIRQLKRWLSPHAIALVAIEATGKWHRLVHRSLIASAIPVAIVDPFRVRMFAKAQGILAKTDQLDARMLALFATVMNPATRNPAPQTIAELAELVVARAGAVDAQTALKNQLSAAECKFLKQQFARRIETTGKDIAALDREILKRIKADDCLARRYAVLTSIPSFGFVVAATLIACLAEIGSTTAKQIAMLAGLAPIADQSGERDGIRVIWGGRPAVRRMLYLAALSAIRFNADIKTFYRRLVGSGKPRKVALIAAARKLVVLANTLVGQDRHWSPCSPNHA

SEQ ID NO: 494530 - protein, 337 aa, unidentified
MEHFAGLDVSMKETHVCVVDRDGDVALETMATTLPEAIAEALARTPSCQRVVLETGRMAPTLYHGLEALGVPVICIESRQAHLALKSLATHKTDRNDARGLAQLARTGFFKPVYVKSLPAHAVRALILARKKPVGQRVTLENQIRGLAVVFGVRLPRGLSPAFAKQVASGSQGVAGLACAMTGLLAARNAVLEAITAIDRDMKHLARSSEACRRLMTIPGVGQLTALAFVAAIDDPERFRRSRDVGAYLGLVPRRYQSGEVDYTGSISKCGDRRVRTLLYEAANVMLTRYRGKLALKEWALDIGRRSTMRKARIALARRLAIIMHAMLRHGTEFRPA

SEQ ID NO: 494531 - protein, 367 aa, unidentified
MEKHNTARKSSCGGKRTTGKLTIGLDLGDRSSRYCLLDEQGEVIEEGSLPTTRKGLDRVFGAAGRCRLAMEVGTHSPWVSRYLARLGYEVIVANARRVRLISESSRKDDKLDAKTLARLARIDPELLSPIRHRGVQAQADLMMIRARAVLVQTRTALINAARGLTKSYGERLPSCATYQMGKDQAELLSPAIRAALEPLLAEVETVTERIREYDKQLEQLCQTRYPETKLLKQVHGVGTLIALAFVLTVEDPHRFRKSRAVGCYVGLRPKRRQSGQSRPQLGISKEGDVYLRTLLVQGAHHVLGPFGKDSDLRRWGLKLAAQGGKNAKKRAVVAVARKLAVLLHKLWVSGETYEPLRLANRAQIVAA

SEQ ID NO: 494532 - protein, 340 aa, unidentified
MALYGGIDLHANNSVIVLLNEQDKVIYRKRLSNDLPTILEQLAPYHMEIKGLVVESTYNWYWLVDGLMAAEYRVHLANPAAMQQYSGLKYTDDDSDARWLAHLLRLGVLPQGYIYPKAERAVRDLLRKRAHLVRQHTANVLSVQNILARNTGARFSGKRIQELTKQELTTLLAEETQVLAVTSSLVVLDCLRHQIKMLEQSVHKRLHHTPSYEQLLTVQGIGPILAQTITLETGVISRFPTVGNYASYCRCVDSTKLSNGKRKGTGNVKNGNPYLAWAYMEAAQFALRFQPEAQRFYQRKLAKSRHNTVLARKAVAHKLARACYYLMRDLVPFEATKAFG

SEQ ID NO: 494533 - protein, 316 aa, unidentified
MAHPKEKTINVGIDVGKHQLDAFILERDIQISVANDASGIRTLIGRLARYKLDRVIVEATGRRETNLVLAAAERGLPIIVCQPLKVRRYAGAKGILAKTDQIDARVLAEYAAVMKPEVRAIPAGNLRKIRDLCVRRRQLIDMRTMEKNRLDVMPKSFHPGIRKLIRQFDSHLVALETKIDQLIESVDEWRQLRERLVTAPGVGEQLANTLVADLPELGSLNHKQIAALVGVAPFNRDSGTLRGKRRIRGGRATVRTVLFMATMTAVRFNPRIRAMYQRLLDAGKMKKVALIACMRKLIVMLNAMVKNGTDWNENYA

SEQ ID NO: 494534 - protein, 342 aa, unidentified
MNKVTIIGIDLAKRVFHAHGAAADGSVVFRKRLTRAQVLPFLAGRPRCVVAMEACASAHEWGRAIQELGHDVRLITPTYVKPYVKRQKNDMADAEAIAEAGSRPTMRFVAVKTEEQQARSMVFRTRDLLVRQRTQLINALRGHLAEHGVVAPQGPAHLKTLAAAMDGAGRSLPQLVRDVGGIYLEQIEQLNRRIADLEKVLRREAQFGTETRRLQTMPGIGPITAMAVEAFAPPMATFKRGRDFAAWLGLVPVQHSTGGKQRLGRTSKMGQRDIRRLLIIGAMAVIQWASRREAEAGSWLHRMMERKPLMLVAVALANKMARSIWAMLTKKEDYRNPGNAAA

SEQ ID NO: 494535 - protein, 409 aa, unidentified
MDVLHAHCCGIDVHAKFVVACCRQIGSTGSVTKTSRTFGTMTADLQALAAWLTSEAVTHVAIESTGVLWQPVWNILEPHVTIVLVNPRDVRQVPGRKTDVTDAEWLAQLLQYGLLRSSFVPPVAIRALRDLTRGRAKLVDQTTAVTNRIHAVLHDANIKLGSVATDILGVSGRAMLQAIVEGETDPSRLADLARHRLRSKLPALRRALEGRVTDHHRFLLRRLLGQLAFLEAEIAIYDARIAEASAPFVAILARLDTIPGVDRRTAENLFAELGAEMSVFPTAAHLASWAAICPGNHETGGKPLKGTTRHGNRWARRALTEAAWGAKHTRGTYAAAQFRRLAARRGAKRAIVAVAHSLLVAAYYIIRDEVVYTDLGVAHFDRLAPTQLTRYFVKRLEGLGHKVTLETAA

SEQ ID NO: 494536 - protein, 355 aa, unidentified
MPSKADTAVARTIGIDTGKNTLHMIGLDEKGAIVLREKVSRTRIAARFVNLPPCLVGIEAGMASHHVARELVALGHEVKQVPPAYSKPFRQGHKNDFRDAHAVAEAVERPSTRCVPIKTDGQLDLQALHRVRSRLIGNRTAVINQIRGFLLEHGIPVRQGYRFLRQQLPQILATRTDVLSPRMVRIIGDLMTDWKYLDERIEGVTDEIEALAHADEGCQQLITVPGIGPIISSAMVAAIGNGAAFCKGRDFAAWLGLVPKQRSTGDRTILGRITKRGNRYLRMLFIQGARAVLLRPASWAKHSFGSWLTAATRRLHRNVLTVALANKLARIAWTVLAQGRRYEARVEPRVEPAAA

SEQ ID NO: 494537 - protein, 340 aa, unidentified
MRSIKYYVGVDIAAETFTASVLGTPEDPLLTTEPIANSPDAFPQFVTWLKQHHVRPHNALVCLENTGVYGEVLCYFLQAQGFSVAVEMPHKVKRAFHELRKNDRVDARQIAEYACRYRDQLTLWHPQEEVLEQIRTLSATREHFTRQLIANRNALQALQRKAIPTPLATEAYQQMMQELKNRIKAIDQAIQDLINQHPTFKPLADLADSVPGVGQSLSGCLVVLTEGFSNNPDYRELASRLGLAPHEHTSGTSVRKKPRSKRHGHARTRKLLHLAARSVAQHREEFRLYYLRKIAEGKAPGIIYNNIANKLLKITLAVVRSGTPYRKHYRSVNPLYLKTA

SEQ ID NO: 494538 - protein, 375 aa, unidentified
MSQIMRIGMDTSKSVFQLHGVDAAERPVLRKKLRRSQVLEFFRALPPTRVGMEACGAAHHWARQIGALGHEAVLLPAQLVKPYIPRNKNDAADADGVCEAMSRPRMRFVPVKTAEQQAALMLVGVRDQLVARRTQLSNSIRGYAAEFGLVAAKGLDKIAPLLARIAADARLPDLAKEMFATLGADYAELGMRLSRLEARLHAWQRQDETSRRLMEVPGVGPIAAALLVMKVPNPRAFRSGRDFAAWLGLTPKDHSTAGKQRLGVITRAGDEALRRTLVVGATAVIQQTRRGRGRASPWLTGLIARKPPKLAAVALANKTARIVWKLMVSGERYDHGRAARARAERSAALTEGFALRSALAATAVRGDAAATVREP

SEQ ID NO: 494539 - protein, 427 aa, unidentified
MLVPRENAVLGLDLGERKQALAVAGADGRVLARRSPRVSVHELGPFLDWALAQARAAGYGGLSVACEPTGSGWMAVQDLCAARGLPFVCVQPLMSHLAREQEDLTGDKTDEGDCVLIARLARELHCYEPERLEGAWAELREEGRRRAQLITNATAAKQLLRDKLGLVAPALLEAACEPFDSPAWLASLEVVLERCGGDPATVTAIGFAGFTAAVRAALPGWGGQRAGGTCRQLFAALGDGRGVARMRRAALRRVRGALADLKYARARRAQTETDMTALLAELGIDTARICQIPGLSPVTLAAILAETGDLDKYESSSSVVKHAGMSPARNESGSFRGQAKISRRGRPALRLATWRATWAVLRHCDVLAAKHAALTSRDDDSRLTPGQARVACAASLLRWIWSLTVHGTQWDPRIAAGQLGHHHAVAA

SEQ ID NO: 494540 - protein, 423 aa, unidentified
MISFPKRERAQRAAACVGVDAGKFAHTLVVRPTGRPDSKPCTFPTTRAGFEQAVAFVRQQVPGASPANILVGIEFAGNYGFTFAHYLRELGFPIVSVLPAHTKRWKDVAHNQPLKTDAKDAGTITDLLAQGHFVGFPFLEPAYADLRYLVTARERLAVLRRGAITQLRALLQVVFPEYETIFPLVSQRTAVLLLRAFPGPQQLLAAPKAKVLRVLRAGSRGHLGAEIYERLVGAARATLGLPGAQVRLRQEIVLTLDRLALFEQQIRALEVELVAALEAVPETPYLLSIPQVAAVTAAVFLGSIGDPRAYDAGAQILRVAGLSLVERSSGVLHGTKRISKRGRPLLRAAAYLFAVRSITKGGLFRADYEGLCARNGGQKLKAIVAVMRSGLQLLYSIARDRRRFTVEPPPRRRARPTLEVTPA

SEQ ID NO: 494541 - protein, 340 aa, unidentified
MAKYIGMDAHSSTCTFCVLDNDGVEISSTVIATNGKLLKEYIRSIQGVKKLALEECELSAWLHEILEPDVEELVVCDPVKNTVYKKNKTDKLDARNLAMLLRGGFLHPVYHQDSARYHLRSFMRGYQNIVDAGVGFKNRYSSLYRKNGQKKKGVDLYSDESLLKDLPRPDQRFVAQHLYSMIQNTETERQAYVKEIKKLPRTFKEIKLLCGIHGIGEIQAAKIVAQVVEPQRFKNKYKFFAYCGLVRYAHSSAGTERRGKLAHGNKTLKCVFKMATLSAIYGDNVFSRYYESLLKKGLNEKAARNAITRKIAAISLAMLKHNAKFDESKIKMTEESITSA

SEQ ID NO: 494542 - protein, 379 aa, unidentified
MKQIRSFVGMDVHKETISISVAEDGRGGPVRFIGVIPNTPEALQKMAKQLTRHGELDFCYEASGCGYGIHRQLTRLGHKCTVAAPSMIPRKPGERIKTDRRDSEKLAILHRSGDLTPVWVPDTTHEALRDLVRARVDASMHLMRARQQLLAFLLRHGRSYPTGKHWTQRHRSWLAGQTFQEHAHGIVFQDYLETVWTAQQRRDALIERISAMVGSWSLGPLVEALRGLRGIDMISAATFIASTGDLSRFESPRLLMGYLGLVPSEHSSGGTIRRGGITKTGNREARRMLIEAAWSYQYPARIAKEKAEILVRLPKNIRDIAWKAQTRLCTRYRSMVARGKKPTVVVAAIARELAGFIWAIGQEMRLLMAASQQKLCTLA

SEQ ID NO: 494543 - protein, 333 aa, unidentified
MVEGTKGSHHKEGSTKMRKHTIICAGIDTGKRKLDVAIDGSAARLQVDNTPDGHAKLSAWLRSRGVKRVGIEASGGYEQAVVARLRSDKFVVIVFQPAQVRAYAKFHLQRAKNDKIDAALIAACTAATKKIHAPPDPRLAPLAQHLTMIEQITEDIRRIKTRLEFCTDGRIRRLWEEDLKRLKQWLKSELTALVASIRRHHDLAQRLDLICSVAGVGLRTAVTILVRMPEIGRLSRAQVAALAGLAPYDDDSGEQFGVRHIQGGRERLRHSVYAAALAASFRWNDQLITLYQRLIGAGKPHKVALVACARKLLIFVNTVVERGTPWTKCPAAA

SEQ ID NO: 494544 - protein, 371 aa, unidentified
MKKRTELTRRKQPDLSQKKQLDLTIGLDLGDKTSRYCVLDREGIVLLERSISTSEKGFSQAFENLDASRIALEVGTHSPWVKRLLETWKHEVIVANARRVRLITESTRKDDRLDARTLARLARIDPQLLSPVRHRSEKAQAHLVMIRARAALVEARTKLINSMRGLTKSFGQRLTSCDPDQMSVKRLDSLSPSLQAAFAGFVTVVESLTRQIHEYDGRLAEIARTEYPETAQLRQVTGVGELIALSFVLTIDDPTRFRRSRDVGCYLGFRPKRRDSGESRPQLRITKEGDGYLRKLLVQGAHYILGWRGPDTDIRRWGLKLAERGGKNAKKRAVVAVARKLAVLLHRLWVTGRPYEPLRQGQATQNPTVAA

SEQ ID NO: 494545 - protein, 356 aa, unidentified
MGGLKHQKEKRSMDHFAGLDVSVKETSVCIVDDTGKIVREVKVASEPEALLAALKNPAYRFKRIGLEAGPLSQWLYSALAEAGLPVVCVETRHMQAVLKAQINKTDRNDARGIAQMMRVGLYRPVHVKTLRSQKLRMLLTHRKLLQSKAIAVENDLRGTLRNFGLKVGMVGKAKFEARIKELVENLPDLAELVEPLLIVRRALREQFVILHRRLLAIVRDDEVCRRLITTPGVGPVVALTYRATVDVPGRFRKSKSVGAVFGLTCSKYQSGEIDRSGRISRCGDEMMRVMLYEAAQSMLRSKKWSWLKAWAMQIARRRGMKKAIVALARRLAVIMHRIWVDGTEFRWNREQVAAAA

SEQ ID NO: 494546 - protein, 408 aa, unidentified
MNAVGIDVSKGKSMVAALRPMGEVALLPQEFLHTEVGLEQMAYAIIALGEDTRVIMEATGRYHEPVAAALHEYGIYVCVLNPLFIKQSGGGSIRKVKTDKADAMKIAKYGLDNWVDLREYTPMDTIRQQLKLCSRQYNIYMKTVVSLQNNLISLTDKTFPGVNELFSSPERADGHQKWVDFVMTFYHCDCICRVSENAFAERYQKWCKRKGYHFSAEKAQDVYLGSCGHFTTLPKNDNTKLLITTAAQQLLAGKMTLAALRTEMTRLAKQLPEYDIVRAMYGVGETTAVQLMAEIGDVRRFPRRSSIVGFAGVDPAVDQSGKHSAKSVPTTKRGSPHLRKTLYQIVCTYLKKSPVDEPVYQFLDKKRSEGKPYFVYMTAAQNKFLRIYYARVKECLEAFDAQQDTSQR

SEQ ID NO: 494547 - protein, 422 aa, unidentified
MLEETQDTEEIIGRVAALDIGKAELVCCVRVPSARGSGKRAQEVRTYPTMTRSLLVLADRLGELGVTRVVMEATSDYWKSPFYLLEAHGFEVWLVNARDVKHLPGRPKTDKLDAVWLAKVAERQMLRPSFVPPPPIRRLRDLTRYRADLVATRTAEKNRVEKLLEDAQIKLSVVASDIFGVSGRDMMAALIAGERDPKALAQLARRRLRAKLSLLEEAFYGHFSDHHAFLLQTMLSRIDQASADIATLEAHIEAEIAPFAQAADRLDEICGVGRTAAQVIIAEIGVDMGRFATPGHLVSWARFAPGVKESAGKKKGKATTGHGNPYLARVLGEAAVSAGKTNTFLGERYRRIARRRGTKKAIVAVGRSILIIVWHLLADPDARFHDLGAGFYDTRIDADRRKRNHVRQLEALGYTVTLQPAA

SEQ ID NO: 494548 - protein, 405 aa, unidentified
MTPTEIVHTEESINDLIKFIKKLDGETRIVMEATGAYHFPLVEKFLEAGLFVTVINPYVMKKYACAAERWGKTDKMDSVRIANYGIDNWFKLQEFKPSDGIYEELKILGRQYSHYIKMKIESKQNLTVLLDQIMPGIEKLISSKRSEEPTKDKLGDFVEKYWHYNNIVKMSEKKFCEDYSKWTKKKGYHANETKAKDIYAMAKSGITTIRSDMASTKMLIKEAVRVLKEINQALENILKQMQEIAKELPEYETVRNMPGVGNILACKLIAEIGDVRRFHNASALIAYAGIDAPPYQSGNFTGTNRKISKRGSALLRKIGYEVMKCLKSVKPKEDNAVYLYMLKKEEEGKAKKVAKIAALNKFLRIYYARVKNVYNKRIFLDFEPEANTVTAANGVACPLLLIKKR

SEQ ID NO: 494549 - protein, 391 aa, unidentified
MIYIGIDVAKDKHDCFITNSDSEVLFKAFTIFNNLDGFNDLYQKIESVMDDVTKVKVGLEATGHYSYNLLGYLIDKGLPTYVINPLHTNLYRKSLSLRQTKTDKVDARTIASMLMSDVNLKSYSDTSYHNEELKSLTSYRFDKVKERAKLKTSVSRLVCILFPELEKLVPTLHMASVYALLSEFPSAKHVATAHLTRLTNLLSESSKGRYGKDTAITFRDSARASIGSNMPAKSLELKHTIKLIQELDSEIDEIENEIKIIMDEINSPILSIPGINYRMGSMIIAEIGDFNRFDSPDKILAYAGFSPSTYQSGQLDGAYAHMEKRGSRYLRYALYNATKYVCHWDPTFAAYLAKKRAEGKHYNVAISHAVKKLVRVIYHLEKTKQQYIKAA

SEQ ID NO: 494550 - protein, 371 aa, unidentified
MVRIAKYVGLDVHKDTIAIASCTGGPMTEAKDEGTVPHDLPRLLRKLLSLAPAEHLRVVYEAGPTGFGLCRELRAHGIACIVVAPNRVPQMPGPRIKTDKRDARYLAWQLRMGTLNGIAIPDEELEALRDLVRAREDLLHARRRTRQQLAGFLLRHGMPWRGKHSWGIQHVEWIRGLRLGSEAQDLAKKHYLEAIAYFDARIDELTADLERLAPQLQGVHGRLYRWLQAMRGISTIVAATLVCELGDLRRFKTASRLMSYVGMVPREHSSGPRVWRGSITKAGNPHVRRVLIEACWPGRLRPTKSKALLRRQVGVDPAVIDIAWHSQRRLHDRYRRMRARGKPQNVTIVALAREMLGFIWSIGQHVEQQPV

SEQ ID NO: 494551 - protein, 346 aa, unidentified
MEHVGIDLHTNTSQICIITESGDRIERGIRTTRERFVAVFGGRPRALIVIEASTESEWVARCLEDLGHEVVVADPNFSPMYLTRTRRVKTDRRDARALAEACRLRAYRPAHRCSDNARHIRGVLAVRDALVRTRSRYISLIRALLRGHGFRVRSGGSGSLVARISELELPEQLHDQIAPSLAIMEPLNNQILECDRMLDDLVTDDERMNRLCSVPGVGPVTAAAFVAVVDDVGRFRSAHQLEAYLGLVPRESSSAERQQKGRITKLGNSRVRWLLVQAAWVILRRPRPETEALREWAARIAARRGARVAVVALARRLAGILYAMTRDSTSYDPQLLGKGKRARVAA

SEQ ID NO: 494552 - protein, 482 aa, unidentified
MTPRRQKNGRVVASPEPLRVANPHAAGIDVHAAVHWVAVPPNHVAAAKCMDAGAGDAANLPPHVRKFGTCTADLELLADWLHQCGITSVAMESTGVYWIPLFELLERRGFQVYLVDPRQTKHAPGRPKTDVLDCQWIQRLHSYGLLTASFRPEDQVVVLRGYLRQRHMLIRYAGQHVQHMQKALEQMNVKLPEVVSDITGVTGLAIIKAILAGERAPRKLAKLRDERCKRTEVEIARALQGNWREEHLFALKQALELYQDYEHLLRECDVKLEAHLATFADKSGGQKLEPKPRRCGRRHNEAAFAVRSALHRMSGHDLTVLEGIDDNTALVILSEIGMDMSKWPTEKHFTSWLGLCPQHQGSAGKIKSRRVRRGSNLAARAFRLAAQGCHHAKNALGAFYRRIQARCGGIKAVFATARKIAERVYRLLKYGTEYVRQGIEAYEKAYRERLLKGLTYRAKSLGYALIALPEAPPSTEATPATL

SEQ ID NO: 494553 - protein, 428 aa, unidentified
MTNRDTIPPGAVLVALDIAKLRNEVLIEMPGQHRRRRLSVLNNRTEHDRLIGTLKAFDAPVVCAFEATGNYHRPIAWRLLEAGFDTRLVSSMALARTREALHNGWDKNDPRDAQVILHMLRIGASQAYHDPLKAGINDVQELSKTHEAIANAKTEIQHRILTHYLPLYFPEVERFRGNTRSDWFFAFLEAFPTPGSIVALSREQFISDAWQVVGRKVSKERLLSDIYETARTSIGLPLPLESPAVRMFRMVITEARGLIRQRDEIEELADTLLHGSADYQALRQIPGIGPIIALTIIAEAGDLRRFRHHRQFLKFCGLDLSTQQSGQYRGQTRLSKFGNARLRRCLWIAGQVAIRQRENGFRDKFERYIARDRDSRDLRRKALTAITAKMARVVHAIIKSGSEYRPFFEGRVPGGRTPLRRAVRAPIG

SEQ ID NO: 494554 - protein, 355 aa, unidentified
MIIIGCDYHPGFQQIAFVDTDTGELRERRLQHPEEAEQFYRDLAAQGRKVRVGMEASGHARWFERLLVELNFELWIGDAAEIRAKRVRKQKTDRQDAQHILRLLLEDRFPQIWVPSGENRDLRQLLWHRHRMVQARTRIMNQLQAVALNEGLRCKKRLWRERGREQLESFRLVPWASRRRRDLLELLDRLNPTIAELTRAIEQEAEKCPEAQRLMTHPGVGSLTALAFVLILGRAERFQCGKQIACYLGLVPLEDSSGEKRRLGHITKQGSSLLRFLLVEAAQVTVRSDQAWRSKYFHLAMRRGRKIAKVAMARRLAIQMYWMMRKRWDYEQLKKFGSQGRKPSFHTVLTKGSTR

SEQ ID NO: 494555 - protein, 339 aa, unidentified
MKYLPVGVDIAKSLIQVHFIDEHTGEVVDKQLRSKDFLSFFSNREPCLIGMEACGGSQHWARELEKMGHSVRLMQGRFVKAFVMGNKNDVMDARAIWVAVQQPGKAIAVKTEEQQSILVLHRSRRQLVKFRTAQISALHGTLLEFGEIIHKGRAAMDKELPLALERMKAKLPPYLITVLEDQYNRLNELDMLIDGIEKQLNSVARQNETCKRLMEIPGVGPLIATAAVATMGEASAFKSGREFAAYVGLVPKQTGSGGKVRLLGISKRGDTYLRTLFVHGARAASLVAKEPGPWITELKKRRPTGVLIVAMANKLARTVWAIAAHGRKYDKNHISIRPY

SEQ ID NO: 494556 - protein, 411 aa, unidentified
MEVLYPRCAGLDVHKSVIFVCALVGQGSSMIKHKWKCGTFPHQLQELKQKLLELGVTHVLMESTGVYWMPIYDALEGSLEVIVANAQHVMNVPGRKTDETDAEWLAKLLRCGLVTPSFVPPRPFRELRTVSRYRRAIVEARAAEQNRIEKHLQIAGIKLTSVASRLDTVSGMDMLEHIAKGQTNPKELAALARGHLRAKIPALEQAFGGTIPEHTQRMIGLQLRQLNRLDCTVAEVELEIAQKAEPYEQVIARLDAIPGIDRHGAIAILAEIGTDMTPWKTHRQLAAMAGVCPGNYISAGKRLKNRSRRGNPYLKANLVQLACSAINKQGSYFQAKYIRLKQRRGHKRALLAIAHAILITIYHMLKSGEPYRELGARFLTEDEKGRKKISLVRQLEKLGCSVVLTDAPPSA

SEQ ID NO: 494557 - protein, 342 aa, unidentified
MYYIGLDVHKKTISYCVKDVSGRIQQQGTIAATRSELDSWMKTLAQPWTAAMEATIFTGWVYDHLLPHAAQVKVAHPVMLRAIAASKKKNDRIDAGKIADCLRCDFLPECHMVSTQIRDRRRTMRYRHLVVRQMVQLKNRVSGLLLETGVPHNKQRLHKVKYFRALLATNPEVEESIRPLLKLSRESIERLQKIDYALVSSLERDPLLAQRLQNLRTVPGVGPITALTWALEIGDVSRFHSVKQAISYCGLCGDEKSSAEKVLRTPLSKQRNKHIQHVLMEAAKLAPKQSHELALVYERAKEKGNVNRATIAVARKMVTYLLAVDRATRPFVPAEERSTAAA

SEQ ID NO: 494558 - protein, 346 aa, unidentified
MKCSRVGVDIAKSVFHVFGVDRHETPRLQAKLKRGNWVETLCIHLAPNADIGMEACASAHHWGRELQRRGFQVKLIAAQFVKPYVKSNKNDRVDAEAICEAMSRPGMRFVSVKTVMQQDIQAMHRIRSELVGQRTAKANQIRGLVGEYGIVAPRGIHQLRGALPCWLEDAENGLSDLFRGLLADLREDLEHLDERIAKLDVSIAGSIDSDPLARRLLAIRGVGPLTASALVGALGDGASFRNGRDFAASLGLTPRQQSTGGRDRLLGISKRGDPYLRKLLVHGARAVLRHAKRRDDALSKWLNALSSRKHANVVAVALANKTARVAWALTANGTGYDSKLVAASPA

SEQ ID NO: 494559 - protein, 350 aa, unidentified
MVTTTNIRKLNDRILASKCETVKIGADVHARDIVACVQLDGALPERPVKLTAEQLIGLVAGLIKAGRTVHVCQEAGPCGYVLHRRLLAAGAKSLVVVPTALADGRQQKTDGLDATALVDKLDRYLRGNTKAFTVVTVPTPEQEQVRGEVRLREQLKHDRHAWEARGRSLLLAQGHHVTGPWWRAGNWAPLAATLPAWLVERLEVIRKMVLALDAEERALHTQLEACAPAQLPKAVGALTWVMLAREICDWTRFKNRRQVASYTGLCPGGYQSGGTQRDGHINRHGNPVVRHLLIELTWRLVRWQPDYPPIRRLLESGAKGAARRKLAVDLWRLATKQTTPETLHLLVPTA

SEQ ID NO: 494560 - protein, 400 aa, unidentified
MVSPQLQVAVDVGCRRHRVAVGNVAGAVLEEFDVEHNAAGLAEFFARIERLRAKRGWPVAVAMEGYNGWARPLDRQVLLRGWRLYNVNNLKLARYKEIFPAPSKSDAVDTRRMLELFRLHGQLRVARNVLQEVAPVPLENDQLKRFTRRRRQLVGEKGRVLNRLQSDLQAVCPGLLSITGEADNLWFLNLLACREDIRKVVGLRRATLLSLQGVGQKYAAVIQGWQKQACFSAEAPWVGPMIVADARRVLELKGQIHALDHAIAGLVQRSEMAGHIDTIPGFGPTCSGELAGEIGTLERFRTEAGLAVYLGMATLDNRSGDSNGAKPPRQVNTRAKAAMMVAVARHVEQVPASRAYYEKKRTEGRTHNQAIRALGRQLVRVIWSMLKRGRDYELRAAVPG

SEQ ID NO: 494561 - protein, 335 aa, unidentified
MMYVGLDVHKRACYGTITDQEGTILKQGKFASSPEGLKAFMEGVDEAKIAMEAGYCWQPLYDALKEKGYDVRLAHPKRVKAIAEAKVKTDKVDSETLAHLLRANLLPESYVPPMDIRELREMVRRRSFLVGMRTKLKNRIHAELAKRGIDLETPLFTRRGRELLRSLSLEAVDQLLPVIDALDVQIICISRSLRRMSGEDERARLLTTIPGVGYYVAMLIISEIGDVNRFPSAEKLCGYSGLVPRVRNSGDSVRHGGITRDGSRWLRWSLTQAVLVHVRWAEESELSGFYRRLAARKTKQEAVITTARKMLKVVFWMLRDGEPYHSGGLEPALGR

SEQ ID NO: 494562 - protein, 465 aa, unidentified
MRTDKKVWRNRKARKELARRLQSENPGLEVVHPHAAGIDVGNGAHYAAVRPDRDSQPVRRFECFTADLYRLADWLQSCGVQTVALQSTGVYWIPLYNILEERGFEVYLVNARHTKNLPGRKSDVQESQWLLKLHTYGLLNNSFQPPSEIRTLRTYWRQRLQHVTGAATCVQRMQKALTQMNIQLANVISDLSGVTGQLMVRAIVAGERDPQKLAELSHPRIQASRAEIAKSLEGNWRRELIFVLQQEMEMYDTYQRRVAECDKELQKHLRAFADTVPPPAKENLPPKKKKKQNKNNPHFHLADELERITGVDLTRIDGVDVMVAQTVITEVGLDMSPWKTEAHFASWLGVCPDNRISGDKVLARGTRHVLNRAATALRLGASTLLKSQTYLGAQYRRLRSKLGAPKAITAMAHRLARLVYRMLKYGQHYVDKGAEYYERRNRQQQIEFLRKKAARLGLQLAPAHP

SEQ ID NO: 494563 - protein, 392 aa, unidentified
MLNRVWVSNGLGLLVDPVSLPVARSGIEQLEALLAAHPAPAQVIAIEATGSLHRAWADELERRHPGALRVFAPSETKAARTQLGSGRFKTDDRDCAALTYLARQGAGRRHQEESVVEELRAAVRHRRGLVADRKKAQQRLHDQLNALVPGLSAPTGHGELRRSLPVETPTGQAVLACAVAFEGRPPSIRSLTARAPGKLTKVTAGYWAQRWRGALPPPPDGAARAARLGRDLARYQALQADIGWIEDEVTALLARTHGQVLTTLPGVAVNRAAAFAAHSLPIEQFPDAEHLYSATGLAPAMYQSASISRRGRISRQGLAEHRDALTGIAWGLSVNSPAFAERDAELRARGMRPIQARVALARNACRLIYRMLTTQQPFDEAAYRRARLNRGR

SEQ ID NO: 494564 - protein, 327 aa, unidentified
MKQPIGIDISSETLDYYFSTSADQIEKGVISNDYPSILEFLSFQNPKNFFLVLEPTGTYGDKLVELAHRQGFEIRLANPKKSSKFMEVLELLHKTDENAAMALYLMGKSQEVHLPRFIPQSEVMKQRKQIQMTVNALSKQSRMLKNQIHAMEQRLIVNELAMNALKSTLKTLEEQLSLLEAELQQLTDEEIEEFNHYAQSVKGIGPKSAASLMLYTNGLRYFERKSQLSKFVGVVCSSHKSGKSVNKKGGITKNGPSLLRACLYNAAKSAKQHNHACRILYERLRSKGKSHKVAMVAVINKLLHQVFAVVKSKTLFDNDLYLNLQKK

SEQ ID NO: 494565 - protein, 353 aa, unidentified
MKFYTNQHKHYCGIDLHARTLYVCIIDQKGEIVKHKNIDATPEAFLGIIEKYREDIVVAVECMFTWYWVADLCRKEKIAFVLGHALYMKAIHGGKAKNDRIDAHKIAVLLRGGMIPMAYVYPSEMRATRDLLRRRNHLMRKRADLLAHIQNTNHQYNLPRFKKVIAYKRNREGIAEQFSDECVRKSIEVNLSLIDHYDQLLGKLEYYIDKKAKVHDPEALFRLRSIPGIGHTLALIILYEIHDIKRFPRVQDFVSYSRLVKCAKESAGKHYGHSGAKIGNAHLKWAFSEAAVIMLRESTDIKKYKAKLQKKHGKAKALTILAHKIGRAVYYMLKRKEVFNTERFLNKQLIQTG

SEQ ID NO: 494566 - protein, 452 aa, unidentified
MAKPKKRRHRKLDRSLPEMRPNAGGIDMGATEIFAAVPADRDSESVRSFPSFTQDLHELADWLQRCRVDTVAMESTGVYWIPLFQILEARGIEVHLVNAQHVHHVPGRKSDVLDCQWLQYLHSVGLLKASFRPEHAVCEIRSLMRHRQNLVEMACVHVQHMHKSLDQMNLQIHHVISDITGVTGLAIVDAIIAGITNPKELAKLRDHRIKASIETVTKSLVGDYRPEHIFTLKQSLTAYRYYQQLIADCDQEIQQRIQAFDTKNDGPTAAAAVDSSNSTTATPSSFDLHCHLERIFGVDLTRIPGFECLRIQTIFSELGADLSKFPTDDGFCSWLNLCPKDGSSAGRRIRGPKVKTKNRVAQAFRLAAQSLHHSQSYLGDYYRSQRARHGAVKATKNTAHKLARIFYHLVTTRQPYDETVFAKLEARSHKRRLHKLQSLAKQMGYSLVEANA

SEQ ID NO: 494567 - protein, 314 aa, unidentified
MEQVFVGIDVAKDHLDVHIRPTGESFVVRRDGEGLTGLVERLKQMKPALIVSEATGGFEVAVAAAVGSAGLPIAVVNPRQIRDFARATGKLAKTDALDAAAIAHFAEAVRPEPRPLPEAKALELGELIARRRQVIEMMVAERNRGRLLQSARLKKRIERHIASLQKELTEIETDLDQNIRGTPVWRENEDLLKSVPGIGNVTARTLLADLPELGSLNRKQIAALVGVAPFNRDSGMLRGKRTIWGGRSSVRAALYMAALVASRSNPVIAEFYRRLRGLGKPAKVALTACMRKLLVMLNAILRDRKPWQEARVAA

SEQ ID NO: 494568 - protein, 391 aa, unidentified
MKLYTGMDLHSNNTYIGISDEDDKRVFKGRFPNQLPVILKVLEPYEKMIVGIVVESTFNWYWLVDGLMENVYKDRVHLAHPAGFQPYKGLKHSSDKTSAFFLGKLLRLGILPEGHILPKNDRHLRDLLRKRLMLVQQRTDHLLSLKSLLNRNFCLSPNRNELKQISQEDIDALIRNEHLNLSAKTNIDVSDHLESRIKQLEKKILADTIEKPYYLKLLTVPGIGKVLALTITLETGDINRFEDDGNYASYSRCVSSKRISNEKNKGSNNRKNGNKYLGWAFVEAANFMKRYCPEAEAFHRRKCLKENYTLATKALACKIAKACFYIMKDDVAFDVEKMFGKPLKSKKDKGRGSKPDRGLAAKPRAPIGKTAAADFNSGYNNSDIEKMQDKN

SEQ ID NO: 494569 - protein, 306 aa, unidentified
MSEQTCAIGIDVAKASLDIAVRPSGERWQVGNEAAGHGAVVERLRALAPTVIVLEATGGYEAPVVAALAAAGLPVVVVNPRQVRDFGRASGKLAKTDALSAALLAHFGEVMRPPVRPLPDAVTQELQQWLARRRQLVEMLTAEQNRRPSAPAPVQKQILAHIGGLRRQLKSVERRLRELIQRSPVWQEQQQLLVSVPGVGPVLATTLLAVPELGHLNRKQIAALVGVAPLNRDSGTLCGQRVIWGGRAPVRAVLYMAALVASKSNPLIRGFYDRLVAKGKPKKVALTACMHKFLTILNAMARRQTP

SEQ ID NO: 494570 - protein, 490 aa, unidentified
MGQKSKRKPTPVQSSVPVEIPDAEHELVMERAAAIDVAKASGKVCVRLPGKSGRRFSRVWDVPARTGAITELAEQLAGLGIEKVTVESTSDYWRIWYYLLEDTGLDVQLVNARDVKNVPGRSKTDKLDAVWLAKLTEKGLLRPSFVPPAPIRVLRDYTRLREDLTRERSRYWQRLEKLLEDAAIKVSAVASTLDTLSTRDMVEALIAGERDPRRLAELARGRMKTKRSELIAALDGRFDDHHAELARLLLGQIDALTAKIGALTARIEQLIAAMDESDHDSDDRDESDAAGPPATNASTTVGQATSTEPATITATGAHTATVVECPRLLTTVERLDEVTGVGQRAAQTIIAEIGLDMTRFATPEHLVSWAKLCPRTIQSGPVIRGAKTGKGNPYLKGALGEAAAAAARTDTFLGERYRRIVKRRGKLKALVAVARSILRIVWQLLTDPTARFHDLGPDYHTNRVVTERKIRNHIAHLTAMGFHVTLQPVA

SEQ ID NO: 494571 - protein, 353 aa, unidentified
MDSLTDLREVVDVVIGVDTHVHTHSAAVLDTATGGVLDQVTVEATAEGYAELVEFANQHATLRAWAIEGTSGHGAGLSRHLLASSEIVIELDRPKRAARRNGAKSDPLDAIRAAREAMARPRLGTPRAGGERQALSVLLAARRSAINASTDAQLQVFSLVIAAPEPIRARFRGQKLAAMLNTAAHLRVHSSWDTETTSTVVALRALARRVHALLSEARAHQKAIVSIIRGWRPDLLEQFGVGPIVAATVLCAWSHPGRIHSEAAFAMLAGVAPIPANSGQVTTRHRLNRYGDRHLNQALHTVVRIRIQYQPATRDYVARRTAEGKTSREIKRCLTRYVARDLYRLLENGAATA

SEQ ID NO: 494572 - protein, 377 aa, unidentified
MRTVRFLGLDVHADTIAVAVAEPGGDVRSLGVIPNRPEALRKLVKKLGAPAALRACYEAGPTGYVVYWQLAALGVRCEVVAPSLVPTKAGDRVKTDRRDAEKLARSYRAGDLTAVWVPDAAHEALRDLVRAREAAAQDQLRARQRLGKFLLRLGRRPPVPMKAWTQGHLTWVKTVQFEQPAQNATLLDYLHEVEHAVTRIARLERAIADAVTTAPASMRAVIDALQTLRGVARVTAVTIVAEVGELSRFTKATQLMGYSGLVAREHSSGARIRRGSITKTGNAHLRRIAVEAAWAYRHRPAVSGALKKRQASLSPAVTALGWKAQHRLHARYYRLLGRGKCPQQVVTAVARELLGFVWAIGVLVETQHRPTPVSVAA

SEQ ID NO: 494573 - protein, 342 aa, unidentified
MYYIGLDVHKKTISYCVKDAAGKVQSEGKIGSTRRELDAWIKTLPQPRRIAMEATIFTGWIYDHLIPHAEKVKVAHPLMLRAIAAAKRKNDKIDASKIADCLRCDFLPECYMTSTEIRDRRRTLRYRGLLVKQMVQMKNRISGLLMETGASYNKQRLHKVGYFTELMAGNEEIDCVRPLLKLSRETINRSQKLDYALVSSLERDPLLAERLKRLRTVPGVGPITALTWVLEIGDVARFHSIKNAISYCGLCGAEKRSADKVVRTPISKQRNKHIQQVLVEAAKLAPRYSHELSLIYEKEKQRGNRNRATLAVARKMVAWMIAVERRKQDFVPAEERGGTVAA

SEQ ID NO: 494574 - protein, 318 aa, unidentified
MPQSVVVGIDVSKAEFCVAIDPSGERWISATTPLAIDALVERLRAMTPQLVVLEATGGYELALAGACATAGLPVAIVNPRQVRAFAQALGRTAKTDAIDAAVLALFGARVRPEPRTVADAATRALAALLTRRRQLLEMLVAERQRLAQAPPTGPVTRDLRAHIRWLERRLTDVDDDIGHAIQASPVWRVHEDLLRTVPGIGPTTARTLLAELPELGRLDRRAIAALVGVAPFNCDSGQQRGHRRIAGGRAAVRASLYMAALVASRRNPPLAAFYRRLRVHGKPAKVALVAVMRKLLTILNAIIKQHAPWNPGAQTVPV

SEQ ID NO: 494575 - protein, 343 aa, unidentified
MNVTRIGLDLAKQVFQIHSVDRDERVVVKRQLKRSQIRAYFEKLPACRIGMEACAGAHYWAREFGRMGHEVKLIAPQFVKPYVKSQKNDANDAEAICEAAGRPNMRFVTVKTVAQQDLQAVHRIRSELVRQRTAKANQIRGLLAEYGIVVAIRIDALRRALPDLLEDADNGLSGLFRRLLEGLRQDLVELDRRVAELDGEIQIAAKEDETARRLQTIPGIGPITATALAASVGDAWQFKRGRDLSAWLGLTPGQHSSGGKDRLLGMSKRGDSYLRTLLIHGARSVIQAAVNKTDPRSRWIVGVASRRHKNVAAVALANKNARIAWALVVRGGAYDSQFGRVAA

SEQ ID NO: 494576 - protein, 428 aa, unidentified
MEAVVERACGLDVHQATVVACLLVGEAGKKPRREVRTYRTLTRELMEMCRWLEEEQCTHIAMESTGVFWKPVYAVLERAPTPFELIVGNAHHIKNVPGRKTDVKDSEWIATLVRHGLIRPSFVPPKDLRRLRDLMRYRRKLVEGRTAERNRVLKLLESANIKLASVASDVFGTSGRAMLDAILANSKTPREMAELARGRLRSKLLDLELALEGSVDEHHRLLLRLQLERVDELDVDVDRLDAVIRKHLAPYKQQITLLQGIPGVDWVTSATLIAEIGADMNVFANDRALAAWAGLAPGNYESAGKQTRGRTRRGNVHLRTALIQAAICAARTKGTYLKDKFHRLKARRGSMRAAVAIGHKILLAAYHILSTGDSYKDLGEGYLDAIDRHRTARHLVHRLHALGFDVTVQATSTTSLPPDLDDAVLAPG

SEQ ID NO: 494577 - protein, 339 aa, unidentified
MNVIYLGIDLAKNVFQLCGLNQAGKPVYKKRTDRKTLLQTVANIPACLIGVEASTGAFYWQREFEKLGHKVKVISPQYVKPFVRGQKNDGNDAQAIAIALMQPTMQFVPPKSPEQQDIQALHRARQRIVNHRTATVCQIRGLLLDRGITIGAAVSRVRRAVPLILEDAENGLSVRMRRTIAELYDLFNDLGHRISFFDKEIDAVFRQSEACQRIAKVKGIGPKTATAVVAAIGKGTEFKNGRHFAAWLGLVPRQHSSGDRQVLMNMTKKGDKHLRTLFIHGARAVVRVAANNNEGYLNQWVNQLKERRGFNKTTVAVANKNARIIWSILHNETEYRPAV

SEQ ID NO: 494578 - protein, 391 aa, unidentified
MIFVGIDVAKDTHYAAVSDDSGAVLVKPFAFQNNAEGFCLLLKKLSEFDRSKLLIGLESTGIYSENLICFLYESGFRLAVINPIQTATLRKTAIRKTKTDKVDTMLIIKSLMVNSYRLYSQRDADSLKLRTLCRFRQNLKNSKARLKIQLAGYVNLVFPEFGKFFKSGIHIAASYALLKKYSSPKEIAALRTSTLCTLLSKASHGRFGKDTAEALKSLALSSVGVKNPYISIQIAQTIAQIELLEQQIKDLNSAIEEAMESINSVLMTVPGIGAVNAACILGEIGDIKRFSKPCKLLAYAGLDPTVRQSGQFTAKSTRMSKRGSALLRYALINSAWQLTLNDTTFKAYYDLKRSQGLNHYGALGHVAHKLTRVIFKLLTSDTPFNPAKLVA

SEQ ID NO: 494579 - protein, 358 aa, unidentified
MDSITFVGLDVHADSITAAIVHGQSQEVEVIELSSDLMKVRRLFRRLSDKGPVRACYEASGAGFVLQRVLSRDGFHCDVIAPSLIPRRPGDRRKTDRLDAIMLARLYRSGHLTPVHVPTEDHETLRRLLRLRTTYHSYCTATMHRISGILRNHGFVFTQGKSTWTKKHRLDGPLQTTLAIELEHLEYLEAQQHAMDAQLEGFARSDQFRIQTEALCCLRGVKSLTALTLLCEIDDVRRFASPRALMAYFGLVPSEHSSGNKEHRGSITKAGNIHVRRLLVEAAWNNRHRVGADLILNRRRQGQPPAVVAIALKAQHRLYKKFWHLDQRKHRHVAITAVARELCGFVWAILYQLHPTMN

SEQ ID NO: 494580 - protein, 385 aa, unidentified
MTARTRNFDPTALRNTLCLSFELGEGTWKLTFSPGFGETVVRRTVTSRDREAVLHTITAMKDHFGLPSEARVVSCYEAGREGFWLHRFLEAHGVENLVVDSSSIEVSRRRRRAKTDRLDGESLLDLLFRHLAGSRKKVWSVVRVPTVEQEDRRHLHRELQSARRDRTRVTNRMKGLLANHGLTLNLKKGVAEQLAALRQWDGSPLPTALRARLAREWERVEFYTGLIEHLEGERRMLLRTGKDPAIEKIRQLNALRGIGTNSAWLYVMELFAWREFRNRREVGAIVGLTPTPDESGKKEREQGMSKAGNRHVRSMAIEIAWGWLRFQPESELSKWYQRRFGGGSKRVRKIGIVALARKLLIELWRFLETGVLPEGAQLKTDVRIR

SEQ ID NO: 494581 - protein, 523 aa, unidentified
MATRFRSRTRRSGRFLTVAKPSGSLHPRVQKVGPEHFGIVAVDCAKARSKWMLADFYGRILIEPTVVEHNKRGFDSAIAQIRRARESHALGDIIVAIERTGIYHLPVKRVFSSNSFETRIVHPLTTRQYRLPADPGNKTDDTDLLAIHRATTNGFGLIEPQLDEVHGPLRLLARYRRTLVRKNASSRNQLITLLDVVLPGYTGLFHDIFNNPAALAIARTVTSAAEVQALGVDGLAQVLKTLGVRAQRRTLEQILAWTTGIENTADYAAMSNTIIVSLDDDRCARLQQIGMMEQKMAGLLARTPYVVLLSIPGIGVVTAGEFAGEMGPIANYASDQAITGRAGIYPSRYQSDKVDRCDGPLVRRANRSLRGVILLIADNLLLINRFFQGLKMRWQAEGMDYRDMCVHAAKRFCRIAFQMVAGRQVFRHPSCQKRDAILRKLTCFHVDHGTSMAQVLTDLQAAIDHIPKSEHTPEAKSLFDAMQPRNRRQQTGLRRLGEILPGVLAKVGVTAVELSSKGENDLT

SEQ ID NO: 494582 - protein, 437 aa, unidentified
MDRGLALARQSRMRREPVMEGSITWVGIDAHKKTLVVAILHPGDGDAAQLEIDNNERAIGRLVRRLEREAKGREIRICYEAGTCGYALQRRLEAAGRVVCEVVAPSLVPRKPGERIKTDRRDARKLVELYRAELLTVVAPPSPQQEAIRDLCRCREDVRADLARCRHRLVKLLVRRGHVFQSTSRLWSEAHRRWLASIAFDDETDRVVLAEYMLAIEQAERRLRALDSELEKAAQLPLYRQQVGWLRCFRGIDTTVAMIFLAELHGIERFDSPRALAAYLGLVPTLYASGESARRGKITKTGNGHIRRALVQASWQYRHRASVGPKLRARREGQPERVITIADEANRRLTTRYRRLVERRKTPNKVVIAIARELAGFLWAALRDDREDARHGARSSAQFRGAKASAAPRSLARARRKNDSRIEVGQPRKARKEKRAS

SEQ ID NO: 494583 - protein, 387 aa, unidentified
MYYCGIDVAKRGHVVSVIDDTGKVLNHGVPISNDRIGFQQLADLLEPYRGGIRIGLEATGHYWLALYDYLCHLEYDLSVINPLQVKAFRKMDIRKRKTDRLDSVAISEFMRFANPGSTPADLPVIIQLKELTRFRFHLVQQIGDCKRKIISILDRVFPEYEQLFSNVFLVSSRQLLHHAVTADEFAAFDLNELAQILHTASRHRLGIDKARQIHLKASQSVGVSFLTDAIHTEIQCLLQLIELLEQQRSQVDAKVEQLMNSIPHHIITIPGIGQVTGAMLLAEIGNINRFPALEQLVAYAGIDASVFKTGQFEGDEAHMSKRGSHYLRYALWQAATASLLHNPELKQYYDKKRAEGKQHGVAMGAVCHKLLSRIFVIMKEQRPYVTH

SEQ ID NO: 494584 - protein, 497 aa, unidentified
MRGVETSVSLRSELRGRLWSNHFGWQSLFDVGHAPPWEHWTKSRPADQSLTGHPMSFDRLKRTQRRERLPGHKLKPSRATLLVQNSKPHLSMKPTYFLGIDAAKHKMRAALSNRSEHVLFEKDLSVQATGLRQLLAAIKRQVNDPEQLLVLIEATGLLHLNWSAALTKAGYAVAVINPLIARRLYTLQNSIRDNKSDPIDARGLCTIGLLHGEKLLAHYRFSLRPEQFTLQRAQSVRKALRSALTNLKKTYQSLMDLSFPELGGLLHLDGVGIRQLLIQAPTPAAIASKRLSTLEKNWMVRPKAAALKALAAESMADPDLAAASGPALVALLQSVAAMEARLHALDQQIAKLACTSVDPQTKALIETIPGFGPVNAAKILAWLPTEILHSGSNRKVAARLQAFMGNDPRLRQSGQWKGHTKRSKRGVEMLRTAFFQSAFSAAHNDPELRTYYQCKRAQGKTHEVALSHLMRILTRRLVAVLRSGKPYQSHYNLKNAA

SEQ ID NO: 494585 - protein, 324 aa, unidentified
MIDGVLGIDVSKNTIDVSMSDSNKVRARSFANSADGWRHLLAWLISQKIQRVHACLESTGRYSIGIASALYEAGHIVSIVNPAQIRDFARTKLGRNKTDGVDASHIREYCELFKPQPWAPASEAHRRLGELQTIRAGIIAGLTEWKNRKNSGMIDAVAQSLADVTISHFTSQLGAVDEAITQTIDNDPVLRRKRDLLLSISGVGETLAGVVLAELPGPDVLRSGAEVVAYAGLNPRLHQSGTSIDRMTRISKIGNAVLRAALYMPAMSAMQHNPAIVALVARLKARGRLKPKQIVVAAMRKLLVLCFGVLKTGKPFDSAIAMGC

SEQ ID NO: 494586 - protein, 402 aa, unidentified
MRFVGIDVAAERHVVAIVDETGAVLLRATPVTEDTPGYQQLLQLLGNAQDCLVALEATGHYWRNLYAALVTAGFEVALLNPLRTSRFAEEELQRTKTDAIDAVGIARFAAQKRPAVTKLPEPALLELRELVRLRQQVVQQLGNRVRQLHRAVDLGFPEFTRHIRTLQSELATTILSHYPTAAALRTVSVKKLARLVYDGSHSVGEGLARTLIEAAKQSVGAHHGEPYQLEVCYACEDIDLLRRRLRALERDIERRLVEHEVGKLLTTIDGIGPQTAACIMAELGDPSRFHSPGAVASYVGVIPRLHESGKRKKTNHARRVPLGNARLRRALWMPALTAIHHNPWLRAYYQRLRAAGKPPKVALVAVIRKLMAAVYSVAKHRRPFILPPIMPPVADHAAVPAS

SEQ ID NO: 494587 - protein, 405 aa, unidentified
MATPAQVDVWAGLDVGKGEHFADVLDNDGERLFAQAFASDQAGLEALLERAARYGTPGLVIDQPGSIAQLALAVAARRATPVAYVPGLVMRRAAGLYPGEAKTDRRDAYVLADTGRTRRKQVHWLDASSDGLLAQLRVLNGDDIGLAAGATRLASRLRGALTSISPALERAVGDRLHQAGARDLLAAYPTLTALRAASQSRIERTVKARSPRIAAKVSAAVAAALAAQDLTVPAAAATGRVIAELAADLDRVCARRDALAGEIEEAFLAHPFGELVASMPGIGPPTGARILGEIGDGSAFANGSKLAAYAGLAPVTRQSGTTLAGETRSRRGSHRLKNAMFLAAFAALRDPASKAFYDRKRTEGKRHNTALICLARRRCDVILANLRTGQPYRTGQSRAAGLIAA

SEQ ID NO: 494588 - protein, 358 aa, unidentified
MESQDSKYVGIDCGKKSLEVVRIHSENSLKERRQFSTTEIGINNLLKWLTQNDIVGLEAGTQSFRIAKSILNKGIQVIVLNPGDLATIYQSLKKTDKEDSLKIARLIQRYPMEELPVVPVPTDEEEDNRRLCTEQENWTRQLTQGKNRLHSLFTQAGLTEITKKHLRTKSSRETSVTLLPSRYQKEAERILQVLDLVEQNLKLIEEETKDALKKNPAYVQTIMSMPGIGMVTSLAIMSYMGDCKRFSSGKQAAYYAGLVPRVDISGDTVRYGKIVSRGCHSIRRVIVQAAWSLVRCQHGGKLKEFYERLYSKKGAKKSIIAVSRKMIEVLYSMIRTGALFDSMPEEVLHRKLAQYGLM

SEQ ID NO: 494589 - protein, 308 aa, unidentified
MTIHHTFIGCDIGKDMIDIFDPRTARFCRIPNDEAALSTFAHRLDPATDLVVFGATGHCDRLLRLCLSQAGIAFARVNPKTARRFAEARGRLAKTDRIDARSLCEMGAMFGLTAEAPPCPVRERLAALARRRDQLVDARATERRHLCDAFDPAIRADIETMIAILGEKIASIQAEIDDHMKSQALTEHAHRLTSAPGVGKVTALTLLAHMPELGALSPKAAASLAGLAPFNDDSGKRSGRRRIKGGRPRVRKALYMAALGAIKASARLRAFHQAVSARTGSAKAGIIAVARKLLTILNAMQRDKTHFA

SEQ ID NO: 494590 - protein, 411 aa, unidentified
MSDSIFVGVDVSAKSNKVCILEASGSRLAKMSVLNNSQGASQIVNRVIDTLSKTGCTKVSFGLEATSVYGDGLIFYLKQDKSLKNYDTKVFLLNPKQVHNFKKAYSDLPKTDDVDAWVIADCLRFGRINLRETYFDEQYKALQRLTRARYYVAQNIVREKNRYLANLFLKFSGLYQENLFSDKFGATAMELSNGAFSLDEIVHMPIDKLAQFINTSGKGKFADPKALAADIQKAARSSYRLPKTVEDSVNRILAVSTVSIQSYLDQLKSLDKSISALMETIPNTLTSIKGVGPVYAAGILSEIGSINRFKDQASLAKYAGLSWSRYQSGNFDADNTRMINSGNRYLRYYLIEAANLVRRHDPEFKRFYELKYRETPTTPHKRALALTARKFVRLVYALLRDQRLYIPSRAE

SEQ ID NO: 494591 - protein, 385 aa, unidentified
MGKSQHIQGFKGTKFSQQLRGVNLEQVLIVAIDAAKLHQKALICNYFGDVIEKPFFFSVSQSGMQILYDTIEKAVRNTGAVRLFLGIEATGHYYEDIVRQMAKQGYHVQILNAYTTFEERASALSWCKTDDLDLVAIAHALRNNKATESRLTKGLQRQLRVFTRARRSEIRKRSILRMEIRALMDIVWREYQGYAEHQNGRVRKVKVFSDLWGKASLFFMEHYPHPALVLKLGEEGLRKLSVKHNLKLRTSAIRKLLHVASESLAPDEQTLRPELMLLRMKLQDLRNFDAKINALEKEIESLLLQTDGRLLLTVPGLGVSTAAELYAEIGDVSHYRHAGQLIKKAGTNPIVKQTGGGAGSYGKIPSSSRHTDFIYRFSSVAIQYL

SEQ ID NO: 494592 - protein, 333 aa, unidentified
MKNYLFHAGIDISKDKLDINILDSLTLQSQHLIIKNDIKSISDLIKILQKKIDLNRTLFCCENTGVYTNHLSFVLLNKELDLWVVPAIEIKKSKGISRGKNDKTDSKDISYYSYRHLDKLALFTLADVDVQKLKILFTERAKMIKALLILQTSRENKEFTQKEIYKEISGVNGALLKQIKNSIKKIEIRIKEVIKSNDQLNKQDQLARSIPGIGAQTSAYLIIATKGFSSFDNWRKFACYSGVAPFEFSSGTSVRGKTKVNHMADKKMKSLLQMCVLTAIKYDPQLKDYYNMKKAEGKNSMLVMNNIRCKLISRVFAVISRGTPYINTYKFAS

SEQ ID NO: 494593 - protein, 475 aa, unidentified
MNIKGSKKKNQVLSVNIFEQQEIIAKADAIKAGLKASTWHELETKGKFDKNDKLSFVSDDMLILGCDIGSETHYVRAIDTRGRELSKSVFGFSNTAEGFESMLDWSTKLAAANDKKQIVLGLEPTGHYWFCLTTWLVAKGISVVQVNPYAVKQTKEVEDNSQLKDDKKDPKLIANLVKDGNFGMPYLPEKLYADIRRLSMFRDQLNEDRIRNLNRLHREMKIYFPEYKDAFGKIDGAFSLELLKEAPFPDGLAALGTEGMKQIWHEAKLRGRGYANASAILEYARKSVGIKDGADAGRQAVKWFVSRIIELDEQLSDIENQLNQRCNEIPYAKNILAISGIGENILSGILAEMGDISRFDDVKEIQKLSGLGLVACSSGKHTGETKISHRGRKRLRYWLFQAAKSAVAHSEEFKELHVYYTTRKQNPLKKMQSLIVIACKILRVIFTILTKGTTYDPKKLLGDIVRPDQSIPQAA

SEQ ID NO: 494594 - protein, 315 aa, unidentified
MERHLATPSFVGIDVSKDRLDVHVRPSGQSFAALRDSKGLEQLVGQLRQLPPALIVLEATGGFEVTVAAALASAGLPLAVVNPRQIRDFARAMGRLAKTDALDAQVIALFAERIRPEPRPLADADSRSLAELVARRRQVVEMIGMEANRLHQARNSRVQRMLRTTLKTLTAQLAQLDHDIDEIIKRSSLWRAADNLLTSVPGVGDVTAHTLIADLPELGQLDRRRVAALVGVAPVNRDSGQLRGKRAIAGGRIGVRNALYMATLSAVRWNPVISKHYKGLVDRGRPKKVALVACMRRLLGILNAIMRTNTPWQCA

SEQ ID NO: 494595 - protein, 467 aa, unidentified
MAAVMIGVDPHKASHTAVAISAAEEPLGEVRVRACVVQAERLLAWAAAWPQRTWAVEGAGGTGHLLAQQLVSAGERVLDVQPKLGARVRLLAAGDVNKNDPNDARSVAVAALRSAGVREVRADDHAAVLKIWSKRYRDLGRTRTQVACRLHAVLGELIPGGVPKAITTARAARVLKALRPEGAVEGARCELAADLLEDLRRVDTRIRETRKKLAVAVAAAGTSLTGLFGVGPVIAAAVIGDVRDVSRFPGRDHFAAYNGTAPIEVSSGQRKVYRLSRRGNRRLNHAIHMAAITQIHHRHSQGRAYYDKKLAEGKTPREALRALKRQISNAIFACLQADARAAARAKGPGGQAGNGSVASVAGSHPRHRLFGTATPGPGVHTTTAAGNPPPGPARGRGTAGHSSIAATPPPAKPQVQVERTAAKEDERPGGAARRRPHSAARKGQGPLIKPQRPKGTSHPGRKADRTP

SEQ ID NO: 494596 - protein, 376 aa, unidentified
MGKSIAEARRFVGLDVHADTIAVAVAEAGGEVRSLGTIPNRLSSVRKLLAKLGDPNSWQACYEAGPTGYTLYWQLTKLGVECMVVAPTLIPMKAGDRVKTDRRDAQHLARCFRAGELTAVWVPDAAHEALRDLVRAREAAKADQLRARHRLGKFLLRHGRRPSERMNSWSQRHMDWIRREVKFEQFAQQATLEDYLAEVDHLGQRIERLEKAIDQTIEGAPASMKAVVNALQGLRGIAKMSAVTIVAEVGQLSRFPTARQLMGYSGAVASEDSSGGRTRRGGITKTGNAHLRRVLVEAAWCQRYGPSLTRTLRVRQEGLPAAVVEIATKARHRLSARYRRLLARGKPKQKVVTAIARELLGFVWAIGVEVERTAAA

SEQ ID NO: 494597 - protein, 323 aa, unidentified
MTKHITICAGIDTGKSKLDVAVEGSREQLQVENTSEGHAVLLAWLRRHRVKRVGIEASGGYEQPVVAELRRKRFVVVVFQPAQVRAYAKFHLQRAKNDKIDAALIAACTAAVRKIHPAPDPRLQPFAEQLTMIDQIGEDIARLKNRIESCRNTQIKGLWEEDLARLAKREKVELKALIASIRKHPDLAKRLDLINSIDGIGLPTAVAILVRMPEIGQITREQAAALAGLAPYDDDSGEHSGTRHIEGGRQRLRHALYAAALAASFRWNKQLMTLYRRLIAAGKEHKRALVACARKMLVFANTIVARGTPWQDRPPENATLTAS

SEQ ID NO: 494598 - protein, 337 aa, unidentified
MSSLPVFAGLDYHDEQVQVCVLDQEGNTKLNRRFANDAARIHAAVAAQGVVVRAAIEACCGAANLAEELVTRFHWPIDLAHPGYVARLKQSPDKTDLGDARLVADLARVGYIPKVWLAPQNIRRLRGLTRYRQQLVDQRRDAKLRVRALLRENRQRPPQGINAWTKAWLRWIHELRWGDDERWLMERHLLEIGQLTERIHAAEQRLKQATADDPVVQRLLEEEGVGLVTAVMLRAEIGRFDRFRNGKQLARFCGVTPRNASSGQRQADAGLIQAGNPALRRVLIELGHRLVWRSKGRWAKLAHELQKRGKARNVIVAAVANRWVRGLHHQMQSLGPT

SEQ ID NO: 494599 - protein, 406 aa, unidentified
MQGPVITVDVSKGSCHYQPYVSNGHPMRKPKVLHDTVEGFQSLSDLIDTMKDRYECETIPVIFEATGVYHRCLQKYLDDHQIPYYIISPLMSASYRKTTPNSNKTDDLDCSHIAKAYYGECNLFPYDKPSKSFHSLRELNRYYECELNHLRMRKNTFRKYLDIVYPRLDKCFKGHSSLYDEIPMEVIKQYPHPSLLLKHKEETIVKKIEKKTSHNASFIQNIVHEMYECSMHCYSGADVTDVESMILPELVDDLQSQEERCDEILKQLVSEAQKTPYFTSIVSIVGIGDNLAARIIAELGDMSRFSCRRAITAYAGLNPKIRQSGDMDGIHLAISKKGNKHLRCLMYLAVSCNYRLKKCDVLYEFNQKKRQQSFSPLKPKAATIATAHKLLLIIYALCTNGTVYHS

SEQ ID NO: 494600 - protein, 322 aa, unidentified
MSVSVLGIDIAKQKFDAALLVAGKTKHKACKNSAEGFEALKLWLEKQKVQKVHACLEATGNYGEDLATYLHDTGHIVSIVNPARIKGFAQSELLRTKTDKLDAALIARFCLAMKPGPWSPPSPEIRYLRALVRRVDSLIDMRSQEKNRISTAHETVSLLIKEHIIYLDQEIKKIRQQIAMLIEQDPDLKRNKDLLDSIPGIGKVTIPDILAELDGLEKFNHVRELVAFIGLAPKETLSGSSIKGKPRLCKIGHARLRKALYMPALVSIQCNPVMIAFYNRLKDKGKNGKVIVCAIMRKLVHVIFGVLKSGKKYDPNFKPISA

SEQ ID NO: 494601 - protein, 358 aa, unidentified
MQRNKKTFKGQNIYIGIDVHKKNWQVAVITESGYTERLSTAADAKALFKFLKSHYPDGNYRAVYESGFSGFATHYALSELGISCVVAHAADIPSSQYELTMKSDRIDAEKLARALRAGLVRGIYVRPKDNLDDRGVLRIRKTIQIQVGGYKTRIKHLLHSNGVELPERFSRSGTHWSRAFIAWLREDMRLLSDTRRSLDLLLLQVETLRANLLEATRRVRALSMTDRYREDCALLMGIPGIGLTVAMTILTEVCDIGRFGNERLFASYLGLVPTSHSSGERVSHGEMTFRGNKHIGPLLVEASWVLIVRDRELGRMYTEYRWRMAGQKAIIKIARKLSNIIFAVLKTRKAYEPYRRDA

SEQ ID NO: 494602 - protein, 418 aa, unidentified
MPEQYRWFLGIDWATEFHQVCVLDAERQVIEERKVEHSGSGIADLVETLLKLSAGQPDQVAVAIEMPRGAIVETLVERQFAVFSLNPKQMDRFRDRHTVPGAKDDSRDAFVMADSLRTDLHLFHRVRLDDPLVIRIRELSRAEEDIQQETVRAGHRLRELLIRYYPQMLKLCPGVDEPWFWELIEIAPMPAQVAKLKRSKVEKLLKSHRIRRITGEQVLAELGVQALQLAPGGAEAASEHVLLQLPLLRLLREQRADLARRIQGLLDEMSQEGQSGEHRDVTILLSLPGVGRIVAATMLAEASQALAERDYHALRSYAGAAPITRQSGKRRVVVMRQSCNPRLRDALYHWARVSMQHDERGKKHYAELRAKGHSHGRALRGIADRLLAVLIAMLRSNTLYDPAFQSKTASQTAPSNAA

SEQ ID NO: 494603 - protein, 436 aa, unidentified
MTSHCQFYNYKFQEVILLSFKILKFKCCGLDVHKTWIYACIGITDSNNRTEYKQARFSSFTKGLNELCDWLAKYNCTDVCMESTGKYWIPVFNILEQHNLWVTLSHPKYTKPMKGNKTDRKDAKWICDLYMCGMVKPSFIPPADIRELRDLVRYRYKLTCMITGEKNRAQNCLTVSNLKLDDVFSDVFGKSSRSITEQILKHPGETFDVTPFVDGRCKTPIEEIQAAVDGAISKEQAVKLRQCLDHIDELNKHISEVEQEILRLSDKYEAALNLIRTVPGFDKNPMTAVQILSEIGGDMSVFPTAKHLVSWAGCCPRNDQSNQKIKSTRISRAGSYFKPVLVQVANALIKSKKHLEFTNRYKRIKARRGHKKAIIAICRMILTAIWHILSDLKPYTPEGFLESRPVKEEKVLSISQALNLLKQRGYIIKDEPLSVS

SEQ ID NO: 494604 - protein, 425 aa, unidentified
MIPAVVERCAGIDVHKRFVTVCVLVGAAHLNPEPKMRKFGTINALLYELRDWLLQENCKQVAMESTGPYWRPIFNILEEAGFQVTLANPQQVKNLRGHKTDMKDCQWLAHLLRHGMIRPSYIPSRPIREMRELTRRRKQLIRNGAMERNRVQKVLEEANIKLGNVLSDVFGASGQDMLLALVRGQATVEQIAQLAKRGARKKIPEIQASLEGHRMTETQRELIRQSMGHMAFLEKQIEDIDQTIQEKIRSFRFTESYELLQTVTGIKAEAAAAVLAEVGDTVSAFPSSAKLSSWTGVCPGNNESAGKRHSTRTTKGNPYLREVLLECAWASTRRKNSQMQHLYQRWQPRLGHKRAIVAVAHKLVEAIYFVLSTRRPYIDTIEPPTTVRVNRLIRHHTRRLRKLGCWLQQTTQNPERSTKQSQQLT

SEQ ID NO: 494605 - protein, 342 aa, unidentified
MSIVYVGLDLGSSNFQQGALNHDGVSRVNRDFSTSEANLVKAFSDLKGEIHVHLEAGELAPWAAVVIAPLVTRVVCSHPQSNAWIAKDADKCDRVDAYKLAELLRLNRFKEVHYAPDQPRRNFKQLVQHYDELTAQQARLKTKLKARLRMQGVIVTGERLFSATGRKEVLARVAARDLRIAITQLYSVLDQSVEAQTKARWLMLRAAQAFPEIKLFRTAPGVGPIGACRFSAYIHTPSRFSTTRKLWKYCRLSVSHRSSNGKPLRRPRLDRSGCGRLKDVSRKAFEVAVRSQKDNGFKRAYQRALETTHDKTHARLTVQRKIISTLRAMWLNQTTYCDELRR

SEQ ID NO: 494606 - protein, 383 aa, unidentified
MIIIGVDFHPEFQQIASVDSETGEFQEKRLAHREEAEKFYRGLAAAGQKVRVGMEASGHARWFERLVAELQFELWIGDAAEIRTKRVRKQKTDRQDAQLILRLLLEDRFPQIWVPSWENRDLRQLLWHRHRMVQARTRIMNQLQAVALNEGLRCKKRLWRERGRQQLESFLLAPWASRRRRDLLELMDRLNPAIAELSQAIEQEVEKCPEAQRLRTHPGVGALTALAFVLIIGKAERFGCGKQVASYLGLVPLEESSGNRRRLGHITKQGSSMLRFLLVEAAQVTVRSLPEWRSKYLHLMMRRGRKIAKVAMARKLAVRLYWMMRQGWDYQQWSKFGSQGRKPGSHAGVPTASTRYPRLRSSRIIRLVRLRLDFAFTAGPRSS

SEQ ID NO: 494607 - protein, 395 aa, unidentified
MFFLGIDIGKNNHVASMLDDKGKPVFKAFSFANTTDGGESLLSKLEKHDANSANLVVGLEATGHYWLSVYSFLRNKNFKLHVINPIQTDGWRKGIEIRKRKTDTIDSLLIADLVRYGDFIEARLPDEAVLSLKNLTRFRTYLVDSISDLKRKVICVLDQVFPEYQHIFSDVFGATSKEVLLQFASPAELECLSVDTLAELLAKISRRKIGSDKADELSNAAKSSFGVTFCRDSFTFQLRMMIEQIKYIETQVKDTETEIKRIMQMLASPIMTIPGIGKTLGAVILGEIGDITKFDNPKKLVAFAGIDATVKQSGEFEGTENHMSKRGSPYLRRALFQAALVASVGKKPDPVLSAFYQKKITEGKHHNTAVGAVARKMCNIVYYVLTENRAYEVRK

SEQ ID NO: 494608 - protein, 323 aa, unidentified
MSSFVGVDVAKNTFDIATHLPNGKHKTKAKLANDAKGFKEFEAWLQKQVEPSALIVMEATSVYHLELAEFVYNKGYRVCVVNPATTYSYAGSELRRIKTDKSDAKLIADFAREKNEKLKLWAPEPLKYRQLKAMVRRLDDLQEMEQMERNRLEVSDEKVKASINSVLRHIEKEIDETHKAIKKHIDDDPDMRQMRDLIVTIDGIGQKTIERLLAELGDLRKYDDPRKLVAAAGLNPKLHDSGQLKGRSTISKIGSVRVRAGLYMPGLVAMQHNEAIKAMKDRLKANGKAPKQIICAAMRKLLHFVYGVLKSGQPYDPKLALAR

SEQ ID NO: 494609 - protein, 462 aa, unidentified
MNRTKDCDPRVFMFYVCMPRMSRLGLAIGRTPRITHEVLEQANFSISLVWNRRRNMKKFYDQPVFAKGRNVVGIDIGKNKHSAFAITSGGETIAALASFTNDREGVDRLEEGVLKPAGGSRKQLFSMEATGHYWMALYHELVRRGYQGVVLNPIQTHGEARTRIRKTKTDQRDAEGIARFILTGKAHAARIPDEPTLELRILVRRRHRLVQMKGDIERGAQSLTDRVFPEYNRCLCKPFLPSARAMIRAVGIAPGGIVEDEGLTREVLTRAGHNLLKPERIDNLIQQARGSIGIGRAGNVISDEMRATIDLLDDFELQIAEIEYQLECRMEELASPLLSLGIKAPLAAAIHAESDPVSDFPSARQYAAYAGLEPSTFESGQMRATQTHISKRGSPHLRHALYLSAFVIYRKHDHFHRIYQRFRKKGHRHNDALVIVARRLALVVWRMLKDNRPFSKRPPKRN

SEQ ID NO: 494610 - protein, 359 aa, unidentified
MCKSISKLETVTTVGLDLAKNVFQVHAVDGQGNVVVDKALGRAKLLAFFAALPKCLVGMEACASAHHWGREIAALGHEVKLMPPAYVKAYVRRSKNDSVDAAACCEAVGRPSMRFVPLRSAENQAELMRHRAREMLSSQRVALLNGLRGHLAEIGVVAPQGGRYAYELKTLAETGHDTNGEIVVPTSVREALAPLVRQIDAIDAEIAAIDRKLETQAKNDPTAKRLMTIPGVGPVTASAIVATVRDVKAFANGREFAAHLGLTPRQNSSGGKHRLGGITKMGDRYLRKLLVVGATAALVHREGHNDALRSWVKELFARKSGPHKKKLIAVALANKLARIVFALLSRGGAYDDRPVRARA

SEQ ID NO: 494611 - protein, 379 aa, unidentified
MRNRHHETLLRHRLGRSHHDVAIIDGEGQLVAKKRITDDSTGFAELIEALTAAGDSVDDPIPVAIETSRGLLVASLRATGRSVYAINPLAVARYRERHSVARAKADHADAMTLANILRVDAHLHRRLPADTELCRSIAVLARAHQDAIWRRTKAHNELRSVLREFSPTFLAAFTSRFPLGIASPEARAVLAIAPTPAAAAKLSVTRIAAALRRAGRSRNIDQTATEIRADLRKPQLRQPVPVEVAMGVQVVALLAALDTACNSVEDLGRAAAESFQKHSDYAIITSFPGLADSTGARVLAEIGDDRSRFADARALKAYAGSAPVTRASGKSVSIAHRRIKNDRLAAAGWIWAFAAATHCQPAGEHYRRRREHGDRHAAA

SEQ ID NO: 494612 - protein, 369 aa, unidentified
MKKSTNASTVKVTKQQRSAWTKVTTIGIDLGDRFSYYCAIDDAGGTVFEGRVATTAGGFQLQFGGIGPKTIAIETGTHSPWVSRLLSSLGHEVIVANSRKLRVIYENRTKSDRVDAESLARIARLDRKLLCEVQHRSETSQADLALLRSRDAIVATRTRLINHVRGSVKSLGVRLPSSSSNGFRKNVVDAIPSSVRRVLLPLVDLIAQLTKQIKSFDRQAEHLIRDCYPQAQRLLQVRGVGPITALAFILTLEDHRRFRRSRSVGPFVGLVPAREDSGQNRPQKRISKQGDAFLRRLLVGCAHYILGPFGVDCDLRRHGLAMAARGGKNAKKRAAVAVARKLAVLLHRLWSSEDAYDPLFNAKQHQLAA

SEQ ID NO: 494613 - protein, 341 aa, unidentified
MREYHYIGLDVHKKTISYCVKKADGKIVDEGTLAATRRELGEWVKGLTFPWVGAMEATMFTGWIYDFLLPYAEELKVGHSFMLRAICASKKKNDRVDARKLADALRCDLLPECHMASSRTRELRRAMRYRGLLVREATRMKNKTAGLLMEVGAEYNKDKLHGKRYFESLLDKLDYVPDSVIDLLNLTRSNMEIFESNQRRLTRALRNHADLHERVERLMSIPGVGEVTALTWALEVDDPHRFSSFKKAASYCGLCSAQDESAGKNQRHPLSKQRNKHLQRVLVEAAKLAPSHNEQLADVYERERERGANHNRATLAVARKLVAYLLYVDKKENVFEMRNAA

SEQ ID NO: 494614 - protein, 397 aa, unidentified
MYIVGIDIAKRKHEAAVIDGEGAVIIKPFSFTNNCSGYNRLLAMLTKAKLPLDEVSFAMEATGHYWLALFTRLQKEGFRVQVINPVQTNSIRSFYIRQAKTDPRDALLIAEVIRFGHFSESTLHPENIYELRELCRGRHAIVSMQADVKRKAVALLDQVFPEYETAFTNLFSDTSMAILQTCPTPKELSEMPLEELCHLIEVSSHKRFRMVKAQELQELARNSFGFAMAGDVFSTMIRLYAKHLVFLKQQVQEMDRKIAEIMDTLDTPITTITGIGPTLGAYILSEIGDISRFSSAAKLAAYAGIDPTMRQSGEYNGVRNRMSKRGSPYLRHAIWLAASSAVLHDSALKLYFQKKRDEGKPYMASVGHACRKMVSIIYAVMRDNKAYTPYIPNEISA

SEQ ID NO: 494615 - protein, 389 aa, unidentified
MLIQQIAPVAKTEFAPIFVALELSRSKWLVGVGTPQKWTVRRHQVQGGDLCGLLEFLRRVASAEEERSGLPVMVHVCFEAGRDGHWLYRALKVAGYDVYEIEPASVAVDRRARRAKSDGVDVDKLVRTLGRLLRGELDACRVVEVPDEAEEDAKRPHREYERLVKERTSHSNRVKALLFGQGVRDFDPMAADRLERLAALPIMPRLKAELSRECRRLVRIIDDIAEVEAEMKAAIVPSKKANPAKAASSAPSHVRTKAAQLYKLKSIGVHFSTVLAGEVYYRTFQNRRGVGQYIGLAPSPFQSGDMARDQGIAKAGNKRARKAMIELSWLWLQHQPDSALSKWFRRRVGDQKGRVRRIAIVAMARKLAVALWRYLETGVIPEGAILKRA

SEQ ID NO: 494616 - protein, 344 aa, unidentified
MTRAPTIVGIDLGKNWFHLVGLDGRGAAVLRKKLNRGQLAEYAATAPRCVVATESCPGSQYWGRVFAKAGHEVRILPAQFVKPYLKANKNDFNDAEAIAEAGNRARMRCVPLKTNEQLELQALHRVRQRVIVERTAVVNQMRALLLEQGIVIPLGRALFAHRLPAIFEDAENGLSPRLVGLLHRLRQRWLAIDIEIEDATRDLTAWADQSDMCRRVVTVPGIGPMIATATVAAVGNGRMFTSGRDMAAWLGIVPRQYSTGGKPTLGRISKRGNTYLRQLFIQGAQSSFLHLKRDHSSLGEWLRQVEARRHRQVAVVALANKMVRICWKVLTTEEVYQPYPCRVA

SEQ ID NO: 494617 - protein, 361 aa, unidentified
MQRVKVNEKSFEGQPIYVGIDYHKKSWKVTVLGKEYEHKSMSRDPDPDQLVSYLKSHFPGADYKAVYEAGFSGFRSQRRLKELGVDCIVIHAADVPTSEKDRQQKTDKADSRKLAKMLRSGEFAGVHVPDEELETGRALVRQRYRISKDLTRHKNRVKSLLFQFGIEIPERFTDSQSRGWSGNYMEWLKELPEGREELRAVVRNYVETGMQVRKQLTAITRQVRVLSKKERYRRDYELLVSIPGIGLLVGMFLLTQLGNLGRFKSLDELCSYVGLMPRMHGSGEKMVTGKLSRRGRKEIKIMLIEAAWIAVRQDPAMTVRFNGLKKRMNANKAIIRIAKNLLSRIRYVIRHQTAYEPGVIK

SEQ ID NO: 494618 - protein, 360 aa, unidentified
MITSSGKQEQMTVGLDVSDKNIHACFLDQGGEVAEESRLAATPAALRRRFSGKERLRIILEAGLHSPWMSRLLLDLGHEVYVANPRKLRAIYENESKSDRVDAQYLARIGRLDPALLYPLRHRSAETQADLAVLRSRAALVRVRGNLANYLRGVVKSSGGRIPHCETRRLARKAELHLPAELIPALAPILSTIAELDLRIVAYDKQIEDMAKKRYPETELLRQVPGVGPITATTFVLTVEDPSRFSRARAMGSYLGLRPRQSDSGTLKPQLRITKAGDKNLRSLLVECAHHILGRLGPDTDLKRWGLKLAERGGKNAKKRAAIAVARKLSVLLLRLWVTGEVYEPLRNARLRGELLAPAP

SEQ ID NO: 494619 - protein, 458 aa, unidentified
MPKKSSKKAKSQRSRERALLEKVHLNAAGIDVGADTHWVAVPEDRDENPVRSFGVFTSDLIALCDWLKRCQVETIAMESTGVYWIPLFQMLERKGFEVRLVNASHAKNVPGRKTDVKDCQWLQQLHTFGMLRGSFRPEGQMCVVRSYLRLRDTLSKDCNSLVQRMQKALTEMNIQIHRVISDITGMTGMSILRAILAGERDCIKLAQMKHPQIKSSAQDIAKALEGDYRQEHLFALQTALELYDSYQFKIMECDQHVEKALAAFEPKVRVSAPDLSRLRSAEKRQEAVRRHHLEEMTGADLTKLPGLELLAVQRILSEIGLDMSRWPSEKHFCAWLNVAPNNRISGGKILSSKPRKNANRAAAALRLAAQSAMQSKTAIGAFIRRIKSRLGAPTAINAGAHKLARLLYRMLKFGKAYVETGQEVYEKFFKERTLRNLQRKARELGFNVTPMSSTALVS

SEQ ID NO: 494620 - protein, 387 aa, unidentified
MTVRTVNNVPAATHGETVRCLFAIELSTMSWVIAFNTPLSEKISRRTLTGCKWKRLLELIEEVGARVSRETGRAVEVVSCYEAGYDGFWLHRQLEAHGIRNYVIDPASLQVDRRARRVKTDRIDTDRLLRSLMAYLRGEPKVWSVVRVPSVAEEDARRLHRERDRLVSERVQHVNRIKGLCALQGIYDYHPLRPQAMARLEQLRTTRGDAFPPRLKSEIMRELQRLEMVVEMIATLEAERDAIVDDEASTHLNAKKIQDLHKLKAIGPEFATVLVGEIFHRNFNNRRQVASYVGFAPSPFQSGNVAHDQGISKAGNRKGRTTGIELAWLWLRYQPDSDLSVWFRTRVGTTKGRIRRIAIVALARKLLVALWRYLETGLVPRGAVLKG

SEQ ID NO: 494621 - protein, 399 aa, unidentified
MIIVGIDIAKQNHQAIIIDERGIALCKSFSFANSNAGVEKLKDAIAQAATDPSEVIIGMEATGHYWLALYSALLPLGFTLHVINPIQTDAMRHATTIRKSKTDVIDCELIAQTIRFGRFSVTHVADEDMVAMRQLTRFHFSLVDSVSEIKLQVIALLDQVFPEYQSLFSDTFGKTSVELLLSHTTPEDILALDTDALVEILSRCSRGRLGLDKATQIQSAAAHSFGVKFGKDAFSFQIRSLLAQIQLIEAQIEQLDAQVAEIYASFGSHLHTIPGIGPVLAATILAEVGDVSRFRSDPAKLVAYAGIDPSVKQSGGFTGSQNRMSKRGSPYLRRALWLAASVAYRFDPSLAAFYHKKRAEGKAHMTTVGAVARKLTYIVFAILRDNKPYLAPYNPHFFP

SEQ ID NO: 494622 - protein, 347 aa, unidentified
MTEAYDGRQVVGMDLHRRRSVLVRMTEDGRKLETVRITNSPAALRAVIARAGTSPRVVIEAAYGWYWAVDVLEAAGAEVHLAHPLGVKAYCYRRVKNDERDAADLAGLLRMGRLPEAWIAPAEIRELREISRYRHQLVKARTSLKDQVHGVLAKLGIPVTHSDIFGVHGQAWLDELAMPQPYAGKVASLRQLAGELTVEITLLDTVLGDLLAGHEGYAAIQQLPGIGPVLAAVIVAEIGDIRRFPGPGQLASWAGLTPRHYESDTKVIRGHVTKQGSRMLRWAVVEAIQRQPAGSRPRQVKDAIIARRGKQAKNIAKIAAARELLTLVYYGMRDGRIRRAAPSGQAA

SEQ ID NO: 494623 - protein, 424 aa, unidentified
MTQNQSYAAFIGLDKSDKKINVSLQQCAKNKMERSIVKGGAEALHAWVAALCARFPGQAVAICLEQPASGLIHALMSYDFVVLFPINPMTLARYREAFTPSRAKDDPTDADFLCELVALHREQLKAWQPDDVCTRKLRHLTQARRRSVNMRTRLSNQLKALLKTYFPQALELCGDDLTTPMACALLQKWPSLQQLKRARLETIRRFYYAQNARRGDVIARRLALIAQALPLTDDPALIESSIVTVQALTLGLRAVHTAISRYDREIARTFAQHPDASLFAALPGSGTAYSARLLAAFGSRRELFESAQAMLNFSGIAPVLKRSGQATITHRRYARPLFVHQSFIEYANESIRHSLWARAFYQMHKGAQKSHWVIIRALAYKWIRILFRCWQQRMPYNELRYLKSLQKSRSPLLQCLAQPTTQAT

SEQ ID NO: 494624 - protein, 350 aa, unidentified
MTSMTSARAVVTVGVDTHLDVHHVAVIDQVGRPLADAGFPTTPGGYRQLLAWAAGYGETVAFGVEGTGAYGAGLARFLREAGQTVIEVDRPDRKTRRQRGKSDPIDAYAAAAAVLSGTAAGTPKTRDGTVEAIRTLRVARRSAIKGRTQAINQLKAVLLTGPAELRQALAGQNTRELLGSCRRLRIDKRPAKAADPVAAATKLTLRRLARRIAALTEEIDELDAELRPLVARAAPALLAIYGVGTEVAAQLLTTAGDNPHRLRSEAAFAQLCGTAPLPASSGRTTRHRLNRGGDRHANYALHIIALVRLSSHEQTRTYAARRRSEGLSNLEIIRCLKRYIAREIHHALTA

SEQ ID NO: 494625 - protein, 412 aa, unidentified
MEVMYPRCAGLDVHKETVVACVRIVAGGEVSRSARTFATTTASLIELGEWLEVNGCTHVAMEATGVYWKPVWQVLADGAFELILANAAQVKSVPGRKTDVNDATWLSELLAHGLVRASFVPEPAIQELRGLLRTRKQLVREKASHVQRLQKTLEEANIKIESVLSDVMGRSGRAMIQALIDGETDPAKLAALAHWKVRASAATLREALHGRIKRHHRFLLRLHLQQVDALDAAIAEIDREADAGLACFRDAVKQLSTIPGVSELSAQVILSEIGTDMGRFATAAHLRSWAGLCPRNDESAGKRRSTRLRRGAPWLKAMLVQCAWAAARTKATYLHAQFVRLRGRRGPKKAICAVAASILTAVYHMLKDGTFYEDLGAAHFDRRRPEMQARRLVKRLSELGFSVELKPVAAIT

SEQ ID NO: 494626 - protein, 336 aa, unidentified
MKTKYYVGLDVHKETTTYAVRDRNGNIVAEGKTATLYGDLYPELKTYLKSAIIGLEASTSYYTLYHQFLKEGYTAKVANTVQMRQLITKNDKLDAQRLAEMLRLGNFPTSYVPDEDIQHLRSLVHMRHALMEEKTRCNLRIQATLDRNKVVMPPHKAFSKRWKNTIMQHMSSGKVSPELRYACDHYMFLDWKEKQIEYEMITYIKQKWDKDYELLQTIVGIGPILACYVISEVCPITRFINKRKLRRYAGVVPTFHESAGKTSKGKIPKSSSRGLLRWALVQAANATARTRSRLGNYYRKKLKQKKNSGIAKVAVASSLSDIIYEVLTTGKPYSTT

SEQ ID NO: 494627 - protein, 344 aa, unidentified
MKVSVLGIDLGKNVCSIVGLDASGAVVLRRRVKRETLIGLVAKLPASIIAMEACCDAHYLGRLFADQGHDVRLMSPEYVRPYIKAQKNDDRDAEGIAEAATRPTMRFVELKSQEQLDMQTLHRSRDRLVAERTSLINQLRAILLERGIVVPQGKHRLERYLISLMDEQRTEGLSSRIRALIADARAQWLELDRRIAVLTKEFVAFSKQNEDARRLATIPGVGVMIASALIAAIGKAEAFEHGRDLAAWLGLVPRQSTTGGKPKLLGISKRGNKYLRKLLIHGARAALPHIAARDTSLGRWAKQLLARVHKNVAIVAFANKLARIAWSVLQRGERFTAKGSPLVA

SEQ ID NO: 494628 - protein, 347 aa, unidentified
MNFYNNTHPYYCGIDLHARILYVCILDQEGNTCVHKEISADPEKLKQILEPYIGNIVVGVECMHCWYWVADFCNDIGVDFILGHALYMKAIHGGKAKNDRIDSFKIANLIRGGNFPLAYVYPKEMRATRDLLRRRMKIVRHGADLKAHVVNTTSQYNLPPNKVNLKNKDAREQLRSTFPERSVQKNIDLDMVILDCYAEQLSKVEWYIQQQAKQHKPNHLHLLKSVWGIGPILALTIIYEIGDIERFESVQKFASYSRLVKCKAESAGKSYGTQGNKIGNAHLKWAFSEAAVLYLRGNKKAQKYLLTLQKRMSKAKALSALAHKLGRCVYFMLKNETVFDENKFLKG

SEQ ID NO: 494629 - protein, 353 aa, unidentified
MGNILAIDLGKFNSAVCIFDRSSLKSKVKTIRTRKQVMHDLFVEYQEDIEIVLFETGSQMGWVADILWTLNIPFKVANTNHSAWKWKNNPNKSDRKDAQRLAMMYHTDFFPTVHVPKREVRQKRSLIVYRDDLVKRITKIKNSIRAILSREDIHQFGGKKGWTIKALAPIRKLAIDINEIADPEEFWKGQLDTELQALDSATALLKNIETKLNALGDADEKVKRLRTIPGVGPRLSEAVVAIIDDPHRFKNGRHVSSYLGMVPRRWQSGAVDITGRISKCGNKLLRTLLVEVSWLGLRESWMREIYDKVRRGDKKRSKVAIVAVARQLLVRCWAILRDESCWDADHSKRLSNC

SEQ ID NO: 494630 - protein, 402 aa, unidentified
MNAVGIDVSKGKSMVAIMRPFGEIVSAPFEIKHTAGDIHSLVELINSVEGESRIVMEHTGRYYEVLAHQLSKANLFVSAINPKLIKDFDNDSLRKVKSDKADAVKIARYALDKWQNLKQYNVMDELRNQLKTMNRQFGFYMKHKTAMKNNLIGILDQTYPGVNTYFDSPARSDGSQKWVDFASTYWHVDCVRKMSLNAFIDHYQNWCKRKKYNFSQSKAEEIYGKAKELVPVLPKDAITKLIIKQAVYQLNSASTTVESLRTLMNETASKLPEYPVVMAMKGVGTSLGPQLIAEIGDVSRFTHKSAITAFAGVDPGVNESGSYEQKSVPTSKRGSSDLRKTLFQVMDVLIKTHPQDDPVYQFLDKKRAQGKPYYVYMTAGANKFLRIYYGRVKEYLSSLPES

SEQ ID NO: 494631 - protein, 412 aa, unidentified
MKDLLEISCGLDVHKEKIVACILTGPLGKPTRSEIREFTTLIPDMIALRDWIVSQNCHHVAMESTGIYWMPIYEILEDAFSGDITLLVVNARHMKNVPGKKTDMRDSEWISTLLRAGLLNGSFIPEKRIREFRDLNRYRKSVIRDITSQKNRIEKFLQSSGFRLSSFISDIFGASGRNIILHLMEHGQIDKTALDSCLKTKTRNRIDEILMSVNGTLSEHQKAFLRILMTHYDSLKKHLAEIETSLEEDMAPFALQVEQLNSIYGISTTASCAIIAEIGIDMEPFKTAEHICSWAGLCPGNNESAGKRKSASVTKGNPYIKSMLCEIAWVIAGKRNTYLSAWYWRIKQKKGAKKAIVALARKLLVIIYTMLKQGTLFDESCFETRRKNCEQKQLSRYIRELEKHGYHVEAQS

SEQ ID NO: 494632 - protein, 441 aa, unidentified
MVDTAVTTPEPVWAAFLALDWGSQKHAWILQPADGGKRNEGFVDNTPEAIAVWAAGLYQRFGGRPVAVALEQKRGSVVNLLLPYAHLVLFPVPPSMSASYRKTFVPSGAKDDPTDAGWILDLLLRHRDRLRRLAPDDANTRLLLMLVEDRRQLVDDKTSLTLRLQDCLKQYFPQLVRWFDVDTALVADLLQQWPDLQHLQRCHDGTLRKFFRQHHGGEKLTGERIETIRAAVPATNDPSVLEAGSMKARHLTESIAALRGQITQLERRRDELVADHPDAPIFASFPGAGPATVPRLIAAFGTCRERYQCAFDVECDSGIAPVHIRSGKVDLVSMRRACQKFTRQTFHEFAGQSIPQCEWASAFYHAHCTKPEEHHAAVRALAFKWIRILFRCWKDRKPYEEQLYLTSQRRRGALLGPGLASVTSLEWHNVAGFSKLSEKNS

SEQ ID NO: 494633 - protein, 359 aa, unidentified
MNRKMQQFIAKGKEIFIGLEDSKKTWKLCVRSEKMVIHETSMPAEYNVLLSYLNNKFPDCKITVMYEAGFKGFNLYDRLVENKHECVVLPPHLMVEPKVNRVKTDKRDARKLAKMLENGDYRSCYVPDKERREDRQICRTLNGIEKEIKSFRNRIRKLLQYHGIEAGVPVKQFWSKGDFKGLSKLELGSSLKISLAALLKELDGVWETQLALRNEMRKLSKKPRYEKAFKIARSLPGIGWLTAIRFVLELGEDFTRFTTSKSIANFLGLTGSEDSTGETVHKGRITKMGNNFLRAWLIESAWVGIRKDPVLLDIFKRVQMNSGSKKKAIVAVARKLAIRLRSCMVNGVEYEVGLVEVVR

SEQ ID NO: 494634 - protein, 400 aa, unidentified
MTGRKKPHKQDGMALIHPHAAAIDIGSRMHVAAVAPDRNAMPVRTFGTFTEDLYRIADWFEECRITTVAMESTGVYWIPAFEILEERGFDVILVNARDARHVPGRKTDVSDAQWLQRLHAYGLLRGSFRPHGEITALRAYLRQRERLLDYAASHIQHMQKALTLMNFQIHHVVSDITGMTGMRIVRAIVEGERDPAVLAQFRDARCRASVDTIRQALIGNVRDEHIFALTQALDLYDLYQAKVVDCDRRIEAVLASLERPDAQPAASLPKPRHHTRPPNAPAFDAREALYAILGVDLTQIHGIGPYLALKLVSECGTDLSAWPTAKHFTSWLSLAPSNKISGGKILSSKTRRSNNRAASLLRLAAITVGRTETALGAFYRPCLSGYYPHPQHVGCCQAPE

SEQ ID NO: 494635 - protein, 429 aa, unidentified
MARSVGMDVHRDFCEIAIAEEGAVRAAGRIQSRPEALELFAQSLVATDEVAIEATANALAIARIIEANVRRVVLANPKAVRETSRRAKTDKIDARVLAQLLAVGFLERVWTPDEAARTRRRLTSRRCALVRQRTREKNQIHAALQRNLVERPSMSDMFGVKGRAWLAERTFELPLDERLTVEACLRQIDFVEGELEQLDKILAADALSDQDALRLMTLPGVSAVTAIALLGAIGDVSRFKTPRHLVGYLGLDPRVRQSGSEPAKHGKIGKHGPGEVRGLLVEAAWHAARTAGPLRAFHQRLAARRGANIATVAVARKLVIIVWHLLSRGEQYAFLRPSLYRQKIRRLGLMTGATRQQGKRLPEPAFLRAGDPRRDQEVEFVAQHEAAYRRLVADWQASRPAKKVGAGATPGRASQRPSRGKAARQATNP

SEQ ID NO: 494636 - protein, 396 aa, unidentified
MSWMRKWTLRADGIKVPKVEGVQSSQATGGSDMNRIVVGVDIAKRVFQLHWVEPQTGEIVALQLKREKFLEHFANRSSCVIGMEACGGSHHWSRSLQKLGHEVKLLSGRMVKPFVGGNKNDAADARAIWMAMQQPGIKVVAVKTEEQQAVLALHRMREQLVKFRTAQINGLRGLLTEYGEVMPQGRAGIKRDLPGALGRLADRLPSMVIDTLREQYARLGELDEQIHQIERRLRQWQSQDPATQRIAAIPGVGLLSATAAIATMGDAGAFKSGREFAAWLGLVPRQTGTGGRIRLLGISKRGDTYLRTLLIHGARAVLTHSKSPPAWLTELLKRRPKNVAVVAMANKMARTIWALTAHERTYQCGYVSLQAWGCTHDRLTVNRGRYAKRLRKDYNV

SEQ ID NO: 494637 - protein, 366 aa, unidentified
MDAPTHGCAPLNRTVFGREELGLLFGGMDTHKDTLAVALIDPSGRRQDAITVANTVAGHGQLVAWLADHGPVQRLGIEGAGSYGRAVALALLAADIHVVEVPPALTMRERRRCRTLGKSDPTDAVAIARITAREDDLPPVAPAGLAEDLKLLVDDRDQLVSERTRVANRVHADLTIIHPGYQSRCRDLRSATALATARQIVAPDQTVRAELIRTRLDRLTELDTEIRVLERRLRALVTDSGTTLTEIHGVGVLLAARILGEVGDIRRFSSKAKFATSNGSAPVPASSGRTQRHRLNRRGNRRLNRALYIIAITQARADHPGRDYLQRKQREGKSRREALRCLKRRISDAVYRCLVTDATTPATSTT

SEQ ID NO: 494638 - protein, 340 aa, unidentified
MSTINILGIDIGKFTFHLVGHDLSGREVYRKKFSRPKLIQVLSTLEITTIAMEACSGCHWLARKCREFGHKVKLIPPQYVKPYVKTNKNDFIDADAIAEAAARPTMRFVSIKTETSQVISVIQRIRSSYVKDRTACMSRIGATLLEFGMSFPKSHAKMKVLFQWLAEHGEPIPPMLLLELRDHHDYYLKLNKLILAQEKKLKEIVDHDERAQLLKTIPGVGILTASRCLSDISSATDFKNGRNFAAWLGLVPRQYSTGGKPTLLGISKRGNKGLRELFIHGARAVLVRPEKAVAVFGNWILALLSRKHFNVVVIALANKLARIAWSVLSTKQAFEVRIQA

SEQ ID NO: 494639 - protein, 342 aa, unidentified
MKYYCGLDLSARDCQVCVIDNNLNPLVQKKVKNELSRIVALIEPFKDDLESVVESTFNWYWLVDGLKEKGYGICLAHTLGLFMITGAKVKTDKRDAFALAKLLKAGMIPKAYIYPYESRPVRDLIRRRSSLVQLRAEEYGSLRRLLLRQGIIEHSRNDIKHAVKEDLNEWFQHPMIILRARFQLERIELFSRQITELESTILATAEKKPEYKLLTTIPGIWKILAMTIMYEVGEISRFENAKHFSSYTRVVPGIAQSGSKKGRGRGSKQGNPYLKSAFSQAATYAVRYYPKIRRCYDKHLNRHRGRARKLIAYNIIAHKIAVATYCVLRDGTEYREELMFGN

SEQ ID NO: 494640 - protein, 459 aa, unidentified
MTKRKKKSPVNATPLDTLKQLNLNAAGLDIGTEEIYTCVPADRDEQSIRVFGTFTTDLYALADWLEACGIETVAMESTGVYWIPVYEILEDRGFDLCLVNARHLKNVPGRKTDVLDCQWIQQLHTYGLLRASFRPPEEICALRALARHRDNLIRYRSAHIQHMQKALQMMNVKLTQVVSDITGVTGLSIIRAIVAGERDPQVLAGLRNPKCAKSEAEIAKALQGNYKPEHLFVLKQALAQYDFYLKQIQESDAELEAMYAALPPSDDPVSPPPKPRTAKPRKNQAHFDLATALYQMTGVDLTAIDGLDALTVHKIITETGVDMSAWPTVKHFTSWLCLAPYNDKSGGKVLRRGSKKTQNRANTAFRIAAQSLSRSQSALGAFYRRMRAKHGPAKANKATAHKLARIFYHMLKYREAYVDPGESHYEQQYRERVIRNLKRRAAKLGMELVSTSDQAPVVS

SEQ ID NO: 494641 - protein, 410 aa, unidentified
MEVIVERPAALDVHKAQVTACVRVPAPGGGREPHLAEFQTTVRGLLALRDWLAAHGVSQVVMEATGVYWQPVWHILEEDFQLMLVNARHVKQVPGRKTDLSDAAWLCQLAEAGLLKANYVPPKPIRELRQLTRYRKTQIAERQREANRLHKALEDSNVKLDCVASDILGVSGRAMLDALCHGTTDPVVLADLAKGRLRRKLPALQEALEGRFDELHALLIGAILAHLDFLDEQIDRLSDAIEERLAPFAAAVELLCTIPGVGRRSAQNILAEIGPDMSVFPSARHLASWGGQCPGNDRSAGKQRSGRPRKGSRWLDAALKDAAMAATRTKDTYLQALYRRQRSRIGHGKAIGAVKHSILCACWHMLTTGELYREAGGNYFSQRDPERATRRLVAQLERLGHTVTLQEAAA

SEQ ID NO: 494642 - protein, 429 aa, unidentified
MQNESTPGARGPVFCGVDTHADSHWLCVLDWRGRKVLSRQFPADAAGYEALAGAIAAAGEPACVAMEGTSSYGAGLTRHLASLGMPVREALSPARTQRRRPGQGKCDEADAERAARAAMSGSRLGTPKSQDGWVDGVRCMLAARSGAVKARTSAINTARSLLTTAPEGLRSRFRGMGGPRLMEELPSVRAEGALGAALGALADLWAAARDAALDMELAIEASLEENCPALLAMYGCGPVSAAKLAVAAGDNPGRLRSEASFAAICGACPIPASSGKTVRHRLNRGGDRQANSALHEIARQRVMRDPETAEYAERARGRGKSDREVMRCLKRYVAREAYRALMRPHEIRRPEDASELVAARRAARVSQVRAASILGTSEKYISMLERGQRELKPIRRAYEAWVEAGLPLDWDRQAFEAERKMDSKKHLAK

SEQ ID NO: 494643 - protein, 388 aa, unidentified
MKRQTIGQASATAALDYDSTMIGALELSSKKWVFAVQLPGSRKHTRHAVEPNGPALETLLEKLKAIGALSGRPISRVIMTHEAGRDGFWLVRFLQRRGVEVQVMQASSLPVDRRARRAKTDVIDAEMLLRTLLAWLRGEPRVCSMVPIPSEADEEARRAHREREDLLGERRSLLNRIDGILATLGIIGFKGLRRDRRKQLDDLRQPDGAKVPATAHSRIERLVERLELVMAQLATVEAARDAVVKKETPANSSERMIRDLSRVCGIGVESATLLVREAFCRNFANRRALGSYAGLTATPFASGSMTREQGISKDGNRRLRVCLVELAWLWLRYQRESGLAQWFCTRVNGAKGRVAKIMIVALARKLLIALWRFAKEGVIPEGATMKTA

SEQ ID NO: 494644 - protein, 339 aa, unidentified
MQLYAGLDLHSRNTYIGIMDKEFKRIFNKRVVNKLPVILDTLKPFQDQLKGIVVESTFNWYWLIDGLMDAGYDCLHLANPAAMKQYEGIKHTDDQHDAFFLAQMLILGILPQGYIYPKEDRPVRDLARKRLFLVRHKTAHILSLQSLIARCSGQRVSANDIRKFTVDDLQQLLEQEYIVLSAQANLDTIVFLKQQILQLEKAIKNKVKLSKAFQQLLTVPGIGLILAMTIMLEVGDIGRFHQVGNFASYSRCVSSQRLSDGKKKGHGNRKNGNRYLSWAFTEAAHLSRRYNEHFRSYYNRKVAQANTSLATKALSNKLARICYYIMRDQVPFQENLLSQ

SEQ ID NO: 494645 - protein, 436 aa, unidentified
MDANYANRLQWFRQFKEHINASTSTLVVGIDIGKDTHHAFLGTPAGRTIHRRLIFENSIQGFDTLLFLIQRYMRDEQLSDVVIGVEPTSVYHKPLSEHLITMGYQVVYATNTAIKKNRAILDGRWDKNDTKDSANVADLVSRGRCHFYDLPDINLRDIRNLLSLRKRLKKQEHRLVTRIRNNLVAQYFPELDGAWYRCQQENLAIVRFCLSPHKVAELGFDDFCRMVIRKRRGVRQYQRLRYIYEIAQDSIGCRLGSAVVFEARLLVENLQRSREQVREVEEQLYAICESYKEYELLQTIPGFGPYVSAVVLGAIGYAQRFDNAKQVLRLAGLDLNASRSGKTSRTAVPVISKVGKADLRYALYQAAHVATSLTAEFKAYFKRILKSREKERGIKTKMRVKVSAKMLVIAWTLMKTKQPYKAGLLVTDEPVKQRGR

SEQ ID NO: 494646 - protein, 356 aa, unidentified
MNYVGIDYHKKYSYVTAIDEEGRVIRSKRLENKAEAFQDFFKRLEGPIETVLEASRTWGVMYDLLEELEEVESVELAHSQKVRAIAEAKIKTDKIDSHVLAQLLRADLIPAAYIPGKQTRSYKEMIRQRVFLVRMRTRLKNRIHVLLDRLHVPLPSVTDLFGKRGVDYLRKLNLPGVDGEILRENLQLLEVFNTLIKEAEREIELLLRENPLVKLLRTVPGLGPILAAVVVLEIDRIERFLSPSKLASYAGLVPSTYASGGRIFHGRLLPMSNKWLKWALVEAAWGSIRTSPYCRSYFENHKRHKGPHTAAIALARRLCEIIWHVLKENRVYEERPLQRQRRTSSMATSPAALTAT

SEQ ID NO: 494647 - protein, 368 aa, unidentified
MEEVRAFVGLDVHKETISVAVADAGRTGEVRHVGTIGNSPAAIGKIARSLARRHGAIEFVYEAGSCGYNVQRQLAAMGMVRRVCAPSLTPRKPGERIKNDRRDAIALARLHRAGELTYVWVPDVLHEALRDLVRARHAACQDVRRDRIRIQAFLLRCDLRFEGKPWSTRHRKWLCNRQFAHPAQQIAFQTYLNALEHDEARKAEVEGQIREMLTASPWAGQMQALQALKGVDPVVAATIIAEVGDFSRFAHPRQLVAYFGLAPGEHSSGGTVWPRGITKAGRSIARTVLCEAAWNYRTTPKVGQWMKERCPPVPQDIHALAWKAQLRLDKTYRKLTARGKRSVVATAAVARELLGFVWSIGQRVPLAA

SEQ ID NO: 494648 - protein, 348 aa, unidentified
MVHFVGLDVSVKETSVCVVDDAGKVILEQKVPTEPSDIIALLTSLGEPYGRIGIEAGPLSQWLVNALTAAELPVICVETRHMKALLTAQQINKTDRNDARGIAQMMRVGLFKPVHVKTLVAQEQRMLLTSRKLLQRKLLDVESDLRGTLRNFGLRVGAVSGGRYEARVHDLVEGFPRLAAIAEPLLNVRRVMRQQLAVLHKMLLDTVRGDPVCRRLMTAPGVGAVVALTYRATIDQPQRFVHSRAVGAHVGLTPKRYQSGEVDYDGGVSKCGDALLRTMLYEAAYSLLIQSRKWSWLKAWGIRVAQRRGIRRAIVAVARRLAVVLHRMWVDGSEFRWSKDSAAAPTVA

SEQ ID NO: 494649 - protein, 474 aa, unidentified
MIHSVGIDFHRDQHRARCLDDRAQPCDSFSFQTTLEGLAKLEERVFRDGANPIIVFEPAGLAWLVVAVYLRSRHADCRLVKAKMQKIAALRRYLRGSAKSDRIDALTLAKMPFIDPEQLYEIYLPPAEIHALQRLTRQRKRLEGDITGRKIRIGATTDGYLPGVRLAFTDPWSPQARAFLRSRLNPFAVVRDGEEALHAFLSKASLRGKGSRAESHLVFLACQSVAALYELSRSVETINEEFFTELQEEVARELRLMEAEEAESESLARRIAELYQKLHPSDNLRTIPGVGEHTAPVFLSAVGDPTRFRSQSAFANWEGIVPGARQSSNVEAKGLRMTKAGPAIMRMALYQAGDIGRRWDPQLAAVYYREMVHHGKNHKQAMGAVMSHLGARVLAVLKEDRPYELRDPEGKLISKDEVRKFILSKYHVAEDIRRERRRHKPVKVRRKDREMTTYRTNEAAKAPQPVEVMAISRK

SEQ ID NO: 494650 - protein, 402 aa, unidentified
MNAVGIDVSKSKSVVAIMRPFGEIVSTPFEIKHTASDIHSLIELINSVEGESRIVMEHTGRYYEVLAHQLLEANLFVSAINPKLIKDFDNDSLRKVKSDKADAVKIARYALDKWQNLKQYNVMNELRNQLKTMNRQFGFYMKHKTAMKNNLIGILDQTYPGVNTYFDSPARSDGSQKWVDFASTYWHVDCVRKMSLNAFIDHYQNWCKRKKYNFSQSKAEEIYGKAKELVPVLPKDAITKLIIKQAVDQLNSASTTVESLRTLMNETASKLPEYPVVMAMKGVGTSLGPQLMAEIGDVSRFTHKSAITAFAGVDPGVNESGTYEQKSVPTSKRGSADLRKTLFQVMDVLIKTHPQDDPVYQFLDKKRAQGKPYYVYMTAGANKFLRIYYGRVKEYLASLPES

SEQ ID NO: 494651 - protein, 366 aa, unidentified
MKKNSTVQQSPKRATVRKAGPITIGLDLGDKTSRYCVLGEQGEIVQEGNVGTTKKALAQNFGALRRCRMAMEVGTHSPWVSRLLKSLGHEVIVANARQVKLISQSSRKDDRLDAQTLARLARVDPQLLRPIQHRSERAQAHLMLIRVRAALVEARSSLVNTARGLAKSVGERLPKCDTDQMGVERLEGLPAELRQALQPLLEQIESVTEKIKESDGRIEQIARTEYPETALLKQVSGVGTLIALTFVLTIEDRDRFQKSRDVGCYVGLRPKRSESGESQPQLRITKEGDVYLRKMLVQGAHYILGYRGPDTDLKRWGLRLAGHGKNAKKRAVVAVARKLGILLHRLWVTGEVYEPLRNSRARPAAA

SEQ ID NO: 494652 - protein, 351 aa, unidentified
MEHTTIAVDLAKSVFQVAVSHRAGRVDAERRLSRDRFLAYFAQQPPATVLLEACGSSHHWARQLEQFGHVVRLLPAHDVHRYVRRNKTDRTDAKALLEAARNEEIHPVPVKTVEHHAITSLHRLRSTWVATRTARLNTLRGLLREFGIFIPVGAQHVVPRVRELLGHPTGALPVAVRSTLANACAEIDVLETNRRDVERQLAAIARQLPDVALLQTVPGVGLMTATALIAFVGDIGRFGSGRHFASFLGLTPKEDASASRRRLGAISKQGDVYLRMLLIHGARSVLWHGKSCAHPSGFQTWARCIEQRRGHNVAAVAVANKLARIVWAVWTQQRPFAANHRHAETTSVSSN

SEQ ID NO: 494653 - protein, 370 aa, unidentified
MDEGIKFFVGLDAHKDSIAAAVAEAGRAPAQLVGSIAHEVGKLLNVLLRYGAPAQVQVVYEAGPTGYGLQRALARRGYPCQVIAPSLIPKRAGDRVKTDRRDGLRLAELSRAGELRAVWIPDPADEAIRDLARAREDAVNARTQVRQQLKGFLLRHDVRYAGKTSWSKTYYRWLATLNFGPGGAQTAFTEYWQTVTAADERVARLTAALLPAIAGWRFEAVVMALQALRGIDTVSAIGLVAEIGDIGRFAHPRQLMGYLGLVPSEHSSGERVARGSITKTGNAHARRLLIEAAWNYRFRPRIGYRAQRRAEDLPQAIRDVAWKAQLRLTGRFAKLRARGVQINKVCVAVARELAGFVWAIASTRAKLAQH

SEQ ID NO: 494654 - protein, 361 aa, unidentified
MAKSSRGTVDEGACYVGLDVSKDATHVCVVGEDGRVRWQGKVPTDPDALARSIQRRAPGARLVGLEMGAMAGWLWRGLRAHDIPSHCIDARHAHAALSVRMNKTDSNDAQGIAELMRTGWYRIVEPRSEASQGLRMLLSARSRLVRMRADAQNQMRGMLKERGIRLPRAVGAMFRRRVRDGMRAHLEPEDPLVMLIESFLRIHERLADEQRVIDDRIKQAAASDEAVRRLMTIPGVGVVTAVCFRHTVDEPERFTSSSTVGAYLGLTPRRHQSGEVDWTGRVSKRGSSVMRAVLYEAANVIMHRLRRACALKRWGTALAARIGMRRAKVALARKLSVVMHTIWVRGTTFDWGGEPSGEVAI

SEQ ID NO: 494655 - protein, 408 aa, unidentified
MNAVGIDVSKGKSMVAALRPMGEVALLPQEFLHTEVGLEQMAYAIIALGEDTRVIMEATGRYHEPVAAALHEYGIYVCVLNPLFIKQSGGGSIRKVKTDKADAMKIAKYGLDNWVDLREYTPMDTVRQQLKLCSRQYNLYMKTVVSLQNNLISLTDKTFPGVNELFSSPERADGHQKWVDFVMTFYHCDCICRVSENAFAERYQKWCKRKGYHFSAEKAQDVYLESCGHFTTLPKNDNTKLLITTAAQQLLAGKMTLAALRTEMTRLAKQLPEYDIVRAMYGVGETTAVQLMAEIGDVRRFPRRSSIVGFAGVDPAVDQSGKHSAKSVPTTKRGSPHLRKTLYQIVCTYLKKSPVDEPVYQFLDKKRSEGKPYFVYMTAAQNKFLRIYYARVKECLEAFDAQQDTSQR

SEQ ID NO: 494656 - protein, 361 aa, unidentified
MLLRPLARMTASRRHPPPPHSSVNWNIAAPLGDRLSRKQTLWRSTPNYKRGNYSMKFYGVDVSKDTLDIACDGKVVQIGNDKKSIRLFVKSLPVGSVVAMESTNRYHLTMADACYVAGMAVYVVNPRMTRHYREALNLRGHTDKMDAKTICSYIKHHHEDLRPYVPKSADQRRLQGLVRRRAKLVGVKVQLRQSLQDIKELKSDLDAMLKRIDRMIAHIDVLIDRQLEGNAGRERLATITSVGPVVSAALVADLDAGQFASADAFVAFYGLDPVPNDSGRSKGKRKISKKGHRLGRTLLYVAALSAASSKAWKPVYEHILAKGLSRVQALVCLARKIARTAWSIYTHKTIFQPERLVAGLT

SEQ ID NO: 494657 - protein, 371 aa, unidentified
MTSIIYVGMDVHTTNYTLCCYSIENDTIFARVDMGPEYMNIVKYLEKVERNHGGDCHFLCGYEAGTLGYSLYHQLVGQGLDCVILAPTTMATTRKKKRIKNDKRDAANIAKCLAYNTYSAVYVPTGEDNAVKEYIRMRNDSKDTLKRIKQQLLAFCTRHGKRFTEGRNNWTQKHLAWLGKLDFGDAILNETLKEYLTLYHQATDKVELFDRRINEMAGAERYKEKVEKLKCFIGIKDHTALATIVEIGDFARFPTAQNFSSYIGLVPGEDSSGDSVQRTGITKAGNSHVRKLLIEAAQSYSRGAVGAKSKALKDRQAGNDPQVIAYADRANERLKRKCYRIMFKSKRNIAVTAVARELACFIWGMMTDNIA

SEQ ID NO: 494658 - protein, 316 aa, unidentified
MSTSELGLHVGMDVSKARLDVAVHESGEQWTATNDGPGLSRLVERLTGLHPARIVVEASGGYEALLVAELCAASLPVALINPKRAREFAKALGVLAKTDRIDARMLAHFAAAVQPALTHWPEADAQRLAELVTRRRQIVNMRTAERNRLSTASATLRPRIRKHLDWLAEELTALNTELYDFIRQHAQWRDNADRLDGVPGIGPVTAATLVAELPELGQLSAKRIAALVGVAPFNHESGRHRGKRHIQGGRFSVRSVLYMATLAATRFNPVIRRFYERLRAAGKEKKVAITACMRKLLTILNAMLRDQKAWREPAET

SEQ ID NO: 494659 - protein, 355 aa, unidentified
MQATHILGIDISKDKFDVCLRTATDQGPRHAATFHNNAKGFKDLCTWLRQQAATDLPLHACLEATSRYGDALALDLHQHGHTVSVVNPRRTRHYADSRLMRTQNDTIDAALIADFCASQNPRSWRPVAEDQRQLQNLVRTRGFFLNQKQQCLNRLETADPISAKHLRSHVRQLDATLSKLEKQIIDLLQTQPDLARQVELADSIPGVGLLTAAIAVAELPPIHRLEHAGQAVALAGLDPRKKTSGTSVHTAPRLSKMGSRLLRQTLCMAALTALRYNPIIRALGERLRAKGKGGKLIVAAAMRKLVRLIYGVLKQGQPFDPHWQNRDRAVGLGGLASDGDMLPNPQLGSPSVATA

SEQ ID NO: 494660 - protein, 402 aa, unidentified
METSIIGHDSVDVFIGVDVGKGEHHAVAIDRAGKRLFDKALPNDEGKLRALIDGLKDHGTLLFVVDQPATIGALPIVVAQDASVLVGYLPGLAMRRIADLHAGEAKTDARDAAIIAEAARSLPHALRSIQLADEHVAELSMLCGFDDDLAGQVTATSNRIRGLLTQIHPALERVLGPHLDHPAVVDLLQRHPAPSDLAKLGPTRLGNRLVKLAPRMGKRLAGEIMQALSEQTVVVVGTNAASVVLPRLAKQLEDLRTQRAEIAIEVERLVDAHPLQPVLTSMPGVGVRTAARLLTEVAGKSFASAGHLASYAGLAPVTRRSGSSIRGEHASRRGNKILKRALFLSAFAALRDPVSRSYYDRKRAQGKRDNQALIALARRRCDVLYAMLRDGTIYQPPLALAA

SEQ ID NO: 494661 - protein, 386 aa, unidentified
MATAKGAFDVTMIGAQRPDSTEVETILGVDTHLDFHVAVAIDHLGRRLGELSVPTTAKGYERLLRWAEGFGPVRCVGVEGTSSYGAGLARHLRAKWIEVLEVERPEHRRRSSRGNHEKSDPSDAEAAARTVLAGEASGVPKSADGRVEMIRTLRAARRSAIKARTQAANQLQALCVTAPEELRNRLRGLSTKKLVCVAARFRLAGDPHDVPTATKFTLRSVARRYEPLSEEISELEAHLERLVAEAAPELVSLSGIGTDSAATLLVVAGDNPQRLGSEASFASLCGVSPIEASSGKVVRHRLNRGGNREANRALYMICLARMRRDQRTQEYVSRRTQEGKSKREIIRCLKRYVAREVYRVLATYGGRFSPTVPMDEAQIGAGANAA

SEQ ID NO: 494662 - protein, 355 aa, unidentified
MTGEKYIGLDVHQATICVAVMDAKGKVVMESILETKATTILEFLAGLRGTLSVTFEEGTWAAWLYDLLKPHVANLVVCNPRKNALLNHGNKSDKIDARKLANLLRLNDLEPVYHGETGVRMLRELARSYLTIVKDVSRVMSRLKAIYRSWAIPCAGRDVYYTRHRSEWLGKIPEAGSRRRAEQLYQQLDMLQPLRQQARRELLAESRKHTITAKLRQIPSLGPIRSALAVALIQTPHRFRSKRQLWTYSGLGLETRDSGEYYYVDGQVRRRKKQGFIRGLNKDHNHDLKGLFKAAATRASVQPGPFQDFYQRSLAKGIQPTMARLTLARKIAAITLTLWKKGENYDAEKLKAQAA

SEQ ID NO: 494663 - protein, 366 aa, unidentified
MKKTSTVRVNGNMIFKGHKLTIGLDLGDRWSFYCVLDEAGEVLLEEKVATTPEAMKQTFERIPRSLIALETGTHSPWVSRLLRELGHEVLVAHAQKVQLISKSNRKDDRHDARTLARLARIDPELLGPVRHRSAKAQIHLTVIRARAELVSARTALVNAARGLAKSYGERLRKCGTQQVSRELAAELSVELREVLEPLLQEVESLNERIQEYDARMEKIARESYPQVELLKQVKGVGTQIALTFVLTLEDPHRFPKSREVGCFLGLRPGRRDSGESQPQMHISKEGDPYLRTMLVQGAHYILGPFGEDSDLRRWGLKLAARGGKNAKKRAVIAVARKLAVLLHRLWVGGEVYEPLRNSQKAMRAVA

SEQ ID NO: 494664 - protein, 337 aa, unidentified
MDNIEACGVEVSARELVVARRGKSGVQLKCFANTAAGHRQLLRALTRGGQRVRVVLEATGLYALDLALLLSAQEQVQLMVANPRAVRHFAQAMMQRSKNDQLDAVVLLEFAERMPFTPWVRPAENTLALWAIARRLQALTKLCTAEKNRAHAMGLSEAIPAMVRRDIARSLQFHQRAMKKLRQQALQCIAADAQLQQRYQLLRSVPGLGEISAVQTLAELLLLPADRDVRQWVAYAGLDPREYSSGTSVRKYTRISKVGNAHLRRALYMPALVASRVEPHLRGFYEHLLARGKSKRQALVAVARKLLHAIYGMFRSQRPYDGTRVYLAAAAQAEKFS

SEQ ID NO: 494665 - protein, 341 aa, unidentified
MEEYIGLDVSMKETAVSIRRAGERIWRGKCASDPSIVAELIRKRAPSVKRVVFETGPLSVWFYHSLRTEGLPAICIDARHAKAALDMATNKTDANDADGLAQLAEVGFFREVRVKGFDSMLTRTLVAARTRLVRITTELSNQIRGVMKTFGLLVPAGKGSTFEKNVRNLLADRDRLASIVLPMLEAWRGIRIRAAELGRQLVRDARQSRACRILMTIPGIGAITATSFTTAIEEPDNFRKSRSVGAWIGLTTRRYQSGEVDYDGHISRRGDRPLRGLLYEAAAVILTRSSTHSTLRTWGLQLRERIGFKRAAVAVARKLAVIMHTMLKTGQLFNPNAGAAA

SEQ ID NO: 494666 - protein, 394 aa, unidentified
MKLVGIDVGKNSHHFCVMDKETGEFNVAPSSFSNNKEGFDFLINSLKPYSKKSILIGMEDTGHYHVALLKFLLSNGYTVALINPKTTDLTRKMEGGITKNDKLDTITICDVLDTPERKKQYRITKVDRFDLYEQRQLTRHHHNLKEELNVYCNRLQKSIDLVFPEFNTLFSSKYSIVYMNLLKTFGSAEAIASTDIRTIRKCFEVKGRGGRISLTPEKLKECAKNSIGISSEVETIQIKHLVNQITLIKEQIAEIDKKIEEFSIKNNSPILSIPGISHFSGTSILAELGDIGNYSKPSQIIKFAGVAPYHYESSQYNAQHTGITKKGSKYLRKTLYQIILTVINNNPVFKKYYLLKISQGKGHRCAQGHCIRKLLRIIYHLLETGQSFDPALLR

SEQ ID NO: 494667 - protein, 352 aa, unidentified
MSHPEVTAVFPSLTIGLDLGDRQSHLCGIDASGAKVLERAVATSAEAVHREFGTRPPARVVLEVGTHSPWMSRQLLAYGHEVFVANPSAMYGARRRAKRNDQMDAEFLARQGRADPTLLHPIQHRREPAQAHLAQVRARDQLVSARTKLINHVRGAVKSVGQRLPSGSADAFATQAAAHLPLALTEALSPLLTVIATLTAQIRTFDRQLETLAATHYPETARLRQVPGVGLLTALTYVLLVDDPTRFRSSRDAAAYFGLVPRLDESSQHRPQLRISKRGDAMGRRFLVSAAQYILGPFAPPSDLRRFGEALMVRGGPNAKKRAVVAVARKLAVLLHALWRHDTPYVPERAVT

SEQ ID NO: 494668 - protein, 412 aa, unidentified
MEVIYPRCSGLDVHKRFVVACLSIIEKGQRHKELRQASTMTSDILALKAWLLAAGCRQIAMESTGVYWKPIFHLLEDSFEIVLVNAQHMKAVPGRKTDVKDAEWIADLLQHGLLKASFIPGSEQQAVRDLTRTRMRLLQERTRLINRIQKVLEDANLKLASVVTDIMGVTGQAILRALVAGQEDPERLAHLAQGSLVRKQELLQAALQGKLTLHHRMLLEELLRLIATLDHSIARFDREVAERLRRFDALIERIDAVTGLSRRNIEVLLGELGWDMSHFPDAAHAASWVGICPGQHETGGKQQSGRTRQGNRWAKTVLIQAAHAAGHTQTYLGEQYRRISARRGSKKAAMAVGHSILVIFYHMVKTGEPYHEKGVDYFTTVDKQKIQQRLVRQLERLGNTVILQPKAETTFA

SEQ ID NO: 494669 - protein, 413 aa, unidentified
MFKIFRKNCCGLDVHKTWIYACIGITDANGRTVYKQARFSSFTKGLNELAEWLAKYNCKDVCLESSGKFWIPVFNILEKTCFVTLAHPKYTKPQKGNKTDRKDAKWICDLFMCDMIKPSFIPGLEIRQLRDLMRYRTKLTNMKTSEKNRALNCLTVSNLKLDDVFSDVFGKSSTSIIQYLLEHPGESFDVRPFIHARCKTPVEEIQAAVEGAISVPQAIKLRQCLNHINEIEKHREEIHLEIQALAEPFSPVLELLRTIPGLDTQPITAIAILSEIGPDMSVFPTSKHFISWAGCCPRNDRSARRTKSTRISRAGQSLKPLLVQIANALLRSKEHPEFKNRYRRIKANRGHKKAIIAICKMLLTAIWNVLSKVEPYSAKGYLEPKPAKEEKVLTQSQALDLLRKRGYTIIDSA

SEQ ID NO: 494670 - protein, 370 aa, unidentified
MQENQEYVGVDVSKDTLDMLVYSTSEIRSYTNNDAGIAGATTWLKQLKPAITVMEATGGMEVSLYIALQEANLPVAVINPRQIRDFAKSVGILAKTDKVDAKVLARYAATIQPEARPLPDEEARRLDTLVTRRRQLVGMITAEGNRFATTRDKMMKQRIHAHIDWLKQELAAIDKDMSQMMKDNPRWRAKDKLLRSVPGVGPVLSTTLIAELSELGRLNRKRIAALVGVAPLNRDSGKHQGKRSIWGGRCSVRQPLYMATLTAVRFNPKIRSFYEHLLANGKEKKVALIACMHKLLTILNAMVKHGSYWSCTYSDLNNSVIPVPAKTVARRERDRVRVCAHRAGLKTRQVRGWDLKLASCILQPCHVLYL

SEQ ID NO: 494671 - protein, 413 aa, unidentified
MLKIVYPICCGMDVHKSFVVACIATTNDKGVTTYKKKRFSTFTSDLRRCASWLAENNCADVCMESTGKYWIPIYNTLESTCQIVLAHPKYVKAIRGKKTDEKDAKWIADIFKHGLVSGSFIPPAEIRQLRDLVRYRWKLTHYTVGEKNRAQNCLTVSNIKLDDVFSDVFGKTASAITDRLLESNEPFDVAPYLSRRIKTPVEKIQAAVDGELCAEQAEKLRIIRSHMNSLELCKANLESLILSTAQKYLPQLELVMTVPGIQAYSAIGIISEIGVDMSVFPSSKHLCSWAGLTPQNNESAGKKKTTRISRAGAYIKPLLVQCALTVCKSSKHPEIKNRYLSLKKRRGHKKAIIAIARMLLTAIYNILKKNEPYNPELYNRCNNTPPEHRAVSVEEAIFILQRQGYLVTPSAPG

SEQ ID NO: 494672 - protein, 336 aa, unidentified
MQNITLIGIDLGKHSFHIHCQDKSGKALLRKKFTRTKLMQFLATCPPSVVVMEACAGAHFLARRISDFGHETKLISPQFVRPFVKSNKNDFVDAEAICEAASRPSMRFVQPRTEAQQAMRALHRVRESLIRDKVKTTNQIHGFLLEFGISLPTGDAVIKRLSLVLAEHEIPEYLSRLLVRLHTHYLYLVEQIAELESELSQSINADDTAQRIMTIPGVGPITASLLSSQLGDGKQFSCSRDFAASTGLVPRQYSTGGKSTLLGISKRGDKNLRRLLVQCARSFMMQLERQRGKLAEWVREQLNKKHSNVVACALANKLARIAWAITTQKKRISGLI

SEQ ID NO: 494673 - protein, 344 aa, unidentified
MKIAVLGIDLGKNVCSVVGLDPSGAVVLRRRVRRDTLIDLVAKLPSCIVGMEACCGAHHLGRLFAAQGHDVRLMSPEYVRPYVKAQKNDDRDAEGIAEAATRPTMRFVEMKTEDQLDMQTLHRSRERLVGERTALINQLRAILLDRGIVVPQGKRKLEQYLVILMNEHNGEGLSARMRMLVADIRAQWQELDRRIGEFDAEFVRWAKENEDARRLVTIPGVGVTISTALIAAVGKAETFEHGRDLAAWLGLVPRQSTTGGKPRLMGISKRGNKYLRKLLIHGARAALPYVAEKDTALGRWAKSLLSRVHQNVAVVAFANKLARICWAVLRSGQKFAAQEAPLVV

SEQ ID NO: 494674 - protein, 353 aa, unidentified
MTKPCPVPQRCFTVGIDPASESFVAALMTALDEPVRAIEEFDNTKAGYTAFQRWLEDQEAPADEVLICIENTGVYSEALCYSLYERGFLLTLAVPYNVHKASEDGPKNDHRDSQKIAQYALRYRDRLSAWTPQETLTERVKAILTTREQLIKQKTATQNSLRAMRRKAVETPSVLQALETIKASLTEQIEALVEDLKRLISEQPRVAQMVEVVDTAPGVGLLMASHLLVLTNAFTEPVSYRELAAHLGISPREYTSGKSVWRPSKGRGYGPSMMRKLLYLASGSLVRHDARFAQYYARKCAEGKSKLLVRNNVANKLLRIVCDMIKNKQPYIDTYQSIHPRLQKTPCHALTKS

SEQ ID NO: 494675 - protein, 344 aa, unidentified
MVERFVGLDVSQRLTSVCILDERGIRVWRGKCATDPAAIEDAVRTRAGDVTVRLGIETGPLTPWLVHELRSRDLDVVCLDARQARAALALRPNKTDANDAEGLAQILRLGWHRSVHVKSYDAHRLRAALGARMQLVGMVTELSNHVRGVLKVFGLVLEGVRGGVFADRVEILVADRPEVAAVVRPMLEAWRALRGQVAAYDAALRAEARARAECRLLMSVPGVGAITAVAFASAVDDPARFTSSRAVGAHFGLTPRRHQSGETDRIGAISRWGDGLVRTYLYEAANVLLGRVQRWSPLKAWAVRLAQRSGGTKARVALARKLAVVMHAIWRSGEPFRWTATAAG

SEQ ID NO: 494676 - protein, 453 aa, unidentified
MEIASTPVFGEIRRNVAGIDLAWRAETYICGPRREDGVYEIEAFGMTTPELHRILMWLKDRKVESVAMESTSVYWIPLTDLLEGNGIEVVLVDARMVRMVPGRKSDVQDCQWLQKLHSCGLLRGAFRPPEAVAAARSVLREKGNLAAMRTQAIQQMQKSLDQMNIRVHHAVSDIDGKTGTKIIEAIVNGERNPENLAKLRDKRCKKTEKEIAEHLTGTWRAEHLFNLGQAFKTMRFLDERLAEYDLKAAEMFAALAAASDNPKPPEPPKGKKLTKKERKNPEGKSVLCQFMNFDLTSIDGIDYDAATIIVSELGTKIGSFPDEHHFVSYIGLAPSLSKSAGKKVRQKKRGKNTSRVGSVLRMAAVSQKNSQTELGAYYRSVARRIDGKTAVKATARRIAQLVYRGLCYGKAYIDRGAQTYELRLRDRTLNTVKKLIKFHNINASELLSTFVAA

SEQ ID NO: 494677 - protein, 350 aa, unidentified
MIIIGVDFHPEFQQIAFVDTETGELQEARLRHREEAETFYRELRARAWPVRVGMEASGHGRWFERLLSELQIDLWVGDAAEIRTKRVRKQKTDRQDAQLILKLLLKDDFPRIWVPSWENRDLRQLLWHRHRMVQARTRVMNQLQAVALNEGLRCKKRLWRERGRQQLESFRLAPWASRRRRDLLELLDRLNPSIAELSQAVEREVEKYPEAQRLATHPGVGPLTALAFVLIIGKAERFPCGKQVASYLGLVPLEDSSGNRRRLGHITKQGSSMLRFLLVEAAQVTVRSLPEWRSRYFHMMMRRGRKIAKIAMARRLAIRLYWMLRQGWDYQQSIKFGSHAGQPGNRHGVR

SEQ ID NO: 494678 - protein, 307 aa, unidentified
MSYIGIDVSKDTLEVHVRPEGTQWNTTNDKHGLITLVKTLKKCEVELIVMEATGGLEQEAADKLAKAGFGVAIVNPRQVKDFAKSTGKLAKSDKLDAGVIAHYAEAIKPEHRHVVDKVGQALKELVRRRRQVVDMIAAEKNRSVTAKGKALESIRSHIHWLQKELEEIDSDLEGEVKDQPEWKEKDEILRSVPGVGPVTSIVLLSSVTELGSVNRKEIAALAGLAPFNQDSGTMHGKRAVWGGRADVRSIMYMATLSAIRCNPKIKEFYDRLVKAGKAFKLAMTACSRKLLTILNKMIHDRTVWHTA

SEQ ID NO: 494679 - protein, 414 aa, unidentified
MLKIVYRICCGMDVHKSFVVACVASTNEQGVTTYKSKRFSTFTGDLHRCAAWLAENNCKDVCMESTGKYWIPVYNILEQTCHIVLAHPKYVKAIRGKKTDKRDAKWIADIFKHDLVAGSFIPPADIRQLRDLVRYRWKLTNFTTGEKNRAQNCLTVSNFKLDDVFSDVFGKAASAITARILENPTAKITDASSFRTKHMKATDEEILAAVDGEMCAEQAEKLRIIRSHMDSLELCKSNLESLILSTAENYFPQLELVMTVPGIQSFAAIGIISEIGVDMSVFPTSKHLCSWAGLTPQNNESAGKKKTTRISRAGAYIKPLLVQCALCAVRAKQFPEVRNRYLALKKRRGHKKAIIAVARMLLTAIYNMLKKNEPYNPELYRKGDRPPAHREVSVDEAIFILQRQGYLVTAPSTT

SEQ ID NO: 494680 - protein, 344 aa, unidentified
MKSKHPVIIGIDTHKATHVAVAIDTQGTRLAALTIPANPKGYLEVERWSQSLGKVQAFGIEGTGSYGAGLSRSLLEQGHNVVEVTRPNRQLRYTQGKTDSLDAEGAARSVLSGQATAQPKTQSGSSEMIRHLKIARDTAVKSRSQAMVTLKTLIINAPADLREGLDQIRGKVGLIRHIAAFRPRKIDNTMASAKAAMRALARRWLWLHEEIISHDKELERLVTERAPDLMASHGIATLTVSEMLILVGDDPTRIRSEAAFAKLCGVCPIPASSGKTHRFRLNRGGNRQANAALYRVAIVRMRSHEPTLAYVKKRTKDGKSKSEIIRCLKRYIAREIYSQLCVPK

SEQ ID NO: 494681 - protein, 385 aa, unidentified
MERNDLSRALVAFDQNSTLVAVVELSLNNWLVAGFVAGDATKRLKNLLADPDRLLKQLLRWRDEGAKAGRTMDRIAVAFEAGRDGFWLARWLRARGIEAYVIHASSIPVPRQHRRAKTDRLDTETLMRAFLGWLRGEARHCQMAAIPTLAEEDAKRPTREHEMLVAERTRLTNRMTSTLIRLGIRNFNVKLVKAAARLAGLRTPEGGPVPPHTLAELDRDMARLALVRNQIKAIEQARVERLEAAPAQGTHPMILMLAKVMGVGIETADLLVHEVLARHLRDHRAVGRYGGLTGSPDESGTKSREQGLARAGNRRVRRAMLQLAWRWLKFQKESALTQWFRSRTADERAGTRKTMIIALARKLLVALWRYVNDGVVPQGAVLRAA

SEQ ID NO: 494682 - protein, 370 aa, unidentified
MRIIGCDLHARQQTLAMLDTETGEVVNLTLMHEGNNVREFYSKLPRPVLVGIEATGSMHWFLNLMEELGIECRVGHPAQIRAAEPRKQKHDRRDADLILKLLAQNRFPAIWLPSKELLDLRALLLHRHQWVRMRVRMQNALQAIALANGLRRGPALWSYDGQAKIAFLPLLPHAAYRRSALQAMYKNLQSEIENLTRRVAEQAGNRCGARLLMTHPGVGPVTALATEVFLGDPQRFTDSKTLASYVGIIPREYSSGEHQRLGGVTKQGSPLLRFLWGEAGAHAARRDPELKRFYRRKLVHKGLGKARVAVARKLGIRLWIMLRDEIDYQEFCRRGQIQQKTVRPVVGMPETGNGAKSHRPVDEATRLPES

SEQ ID NO: 494683 - protein, 335 aa, unidentified
MHYLYYVGLDVSKETFDASLVAFEDANEMAHRKFANSRKGICSCLHWVEKRHGIRLDDVIFCAEDMGSYISEMAVCASDRTLNFNFSLISPLVIKYSMGIARGKTDRVDARRIAEYAITHYRKIALYLPAEKELCQLRTWLILRAHLAKQRVAKLVLLEKLDYKEKFADVSIQRSMLQEEIAYAETHMKTIEREMKELIAADSNICRNYKLLTSIKGVGPITAIVMLCSTLNFTKITDHRKFACYCGLAPFEHSSGTSVRGGCHTSSMANRDIKVQLNRRALIAIRCDPQLKAYYERKVAEGKHKFSVLNAVRAKIAARCFAVVRRGTPYVALQI

SEQ ID NO: 494684 - protein, 399 aa, unidentified
MLAVGIDISKSKSVAAILNQDGSMHTSPFEFHHTQPELDAFIKYILNSNQSATILMENTGHYHYPVLKAFQEAGLPVCIVNAYQIKKFGDMDLRKAKTDKKDAVRIARYALEKSYSLVPYTSMEQKYEDLRFLARQYNQRMLTLKTNKVFLLNLLDETMPGITNILPLTTRTPETSLSVLFINRFKSYDRIKKMGKNRFLDAFEKIARKSRNRQTKTYGLAIYEAALRNITTRGENEYILAAQDQCLELVCESQKAADSIILKMQTLAETLPEYAVLRSMAGVGDRLGPLILAEIGDIRRFHSGKALNAYAGNDAPPYQSGTFESHNRHISKRGNAALRKYCFEVMQALKLTRPQDDPVYLFLLKKEQEGKPYNVAKMAGVNKFLRIYYARAMETLKQQ

SEQ ID NO: 494685 - protein, 387 aa, unidentified
MYYIGIDISKFKHDCAVIDDSGEIVTPSWSFTNDAEGFSQLKLLLNSLGTETRIGLESTGHYGMNLKLFLESNNFSFMEFNPLLINRFVKSKSLRKTKSDSIDCMMIAHYLMTVEYKPYPSSFYHTEKLKSLTRFRDSLIRLRSRQLVELTNILDKVFPEFKPFFGSRFSVTALYILSNYSSPEKIANMNSKSYEALRKLSRGRFSTVDFAKLKQLAKNTIGTTEDYLLLQMQIVLDIYRQLDSKVDETEVSIKECVSDMNPPMLSVPGIGIESAAVILAEFGDFSKFKNASQMLSFAGLEPGYFQSGTSETTGKMVKHGSSYLRYALMNCAQTVVNYEPTFAMFYSKKRAEGKPHRVALSHVVKKLLRVIYTLQTKNIAYDADFVR

SEQ ID NO: 494686 - protein, 343 aa, unidentified
MSKHVVAGGDLAGLLDLFAALQAKAQARTGHSYRTIVLQEAGLDGFWIHRALEKEGIESHVVDPASITTSRRKKRAKTDRIDGEALVRTLLAYKRGEPRVCSMVRPPSPEEEDRRRLVRERKALITERVRHSNRIKGLLFAQGISKYEPLRRDRRARLAALRTGDGRELPAHLKAQISRELDRLELLLEQLKAVEAERDALLAQEQVHANAPAGMLLKLKGIGPEFAAILWSEGLFRHYDNRRQLAAYAGLAPTPWQSGQIDREQGVSKAGNPRLRVALIQLSWLWLQHQSQSALARWFEARVARNGGRLRKSTIVALARKLLVALWKYVNAGVAIEGAVLAS

SEQ ID NO: 494687 - protein, 291 aa, unidentified
MADDSTRFFGLDIHKEYFVAVAVNRDLEIIFGPQRVSNYQLEDWVGRVLTFQDAIVLEMSTNTYLFYDTLLPHVNSVTAVHPPNVPEVTNARVKTDKKAAETLAQLLAAGMLKGTEVWIPPDDVRDLRAVIARREKMVRLSTIAKNRLHSLEHRNHLIPPENPFSPEQRTWWENLRLSATEKLLMQSDLDTLDFAQKQVEQVEECLKQKSAQDERIPLLVQLPGVAMLTAMTILAAIGDVTRFPNAKKLVGYAGLGTRVHNSGMTHSSGRITKAGRKDLRRAMVNAANHAV

SEQ ID NO: 494688 - protein, 438 aa, unidentified
MTTLAFVGLDVSQDSARICFLLADGSEPRSRWTVPNTQPGAEALSAELAHLSTLYHVDRLCIGLEATGLLWWHLACALKDAAVLAAFTPRVYALNPQLVETFRKNFGAMPKSDHADAFLIAERVRYGRHLPSPFQLDTRYAPLQRLTRFRCHLVENLVREKNYFLSFLFLTFSSYGQIAPFGDPFGATSCAVLEDFSTEDLAQLSLDDLASYLQDKGHGRLADPESLATTLQRAARDSYRLDKVLQEPLRLVLGTTMATIRTLQQQLKAVDKTIAQELAAIPQTLSSVPGLGPVWTAGLIAELGDITRFDDQGAVAQYAGLTWPSDQSGDFAAEDTEMSKRGNSYLRYYLVEAANSVRTHCPEYGRYYAAKYAETPRHAHKRALVLTARKLVRLIDVLLREGRIYQPPEQRPSATPATHPQAKRPSPQRRSKRVSGVA

SEQ ID NO: 494689 - protein, 590 aa, unidentified
MSTTVPLDRIGVGIDTARYGHRVSFLGPDRKPAAKPFTVMENHAGYQALQERLKQLHEHHPTAHFHVRIDAAGQYAVNLEQFLRALKLPMTISVGEPKRNKDYQKAHFPKRTTDDTESQAMARFAVVEQPDATPAPSQPMILLGEVAGRLQAQVKQTTRAINRLHNLLARVFPELATLTEDIGVGWVLKLLDKYPTAERIAAAHRSSLEKIPYLPAEQAEALHQAAEQSVASLRGDVAEALVRDLVEQVRHSQCAEEKLRQLLIAAFADLPASPHVQVVTIPGIGDATAAVLVAKIVNIDRFATPNHLVNYFGVFPEENSSGVDKRGKPLPPGTLVMSPKGNDLVRSYLWNAARSAIQCNPAVRALYRRLKSKGKRGDVAIPRDARVIDVKGKTVLPGLIDGHCHLLDFVGEIYLHLGITTCPDITQNDDEWTLAERQGTNLGKIRGPRIWSTGSRLVGPPLAWALRGERGYLIKTPEEFVSKSVRNLDAAAIEYLYRLYITEVIPPRPHLKIEGIELATQMSASLLPSARAIKAEELIDARSCPSSRNKDGAISRFLANCKLNDGRILPRLPKSHTLTSCSASACQSCF

SEQ ID NO: 494690 - protein, 352 aa, unidentified
MKIVGALDVHRRQITFKTLEPASGESSRGRISPAAREPLRQWLERFDGLEGEFVLEGTTGWRFVVEEIERAGDVARLADPAETAARRGRKRRAKTDDADCDLQLRLLLAGELPEAWIPPVQILELRTRVRLRKTLIDQRTAWLQRLQAQLFHQGVPPGLKPRTAAGRDALARVELSPAGREAVELYLRMLDQIDRELAPIDRALRAFARHQPGCRALTGQLYGVGAVTATAILAELGDARRFRSSDDAVRHCGLDITVWQSDRKRAAGHLSHQGPSLLRWALFEAAQCAARRSSPDHTYYLDVAKRIDHNRACLSVARKLCRRAHHILRELGDDALAPTDHEPRAKLVDAAA

SEQ ID NO: 494691 - protein, 344 aa, unidentified
MTSMNFIGLDIHEKTISYCVKDAAGAVLAEGTIPSTRQSLDDWIRTLHQPWTVAMEATMFTGWIYDQLLPHAAAVKVAHPLMLRAIAAAKKKTDRIDASKIADCLRCNFLPECYMASTEIRERRRTLRYRKLLVRQNVQLRNKVSQMLMESGVVYNKQKLHKVGYFKELMTTNPDIGEGLRPLLAICREAIVRIGKTEGALVRSLARDPLLSERVERLMTIPAVGPITALTWVLEVDDVARFGSVKQAISYCGLCAAERSSAEVVKRMPISKQRNKHLQSVLVEAAKLGPRLSPDLALVYEAEKQKGHANRATLAVARKLVAYLLAVDRSGREFVVAGEPRAAA

SEQ ID NO: 494692 - protein, 354 aa, unidentified
MPKSASAQIAVIGIDIGKNSFHVVGHDSRGAIILRQKWSRGQIEARLANIPSCLIGMEACVGAHHLARKLATFGHDARLMPAKYVRPYAKGQKNDFNDAEAIAEAVQRPTMKFVAVKTTDQLDLQALHRVRERLVSQRTGIINQIRAFMLERGIAVRQGIRFLRTELPIILASRTDMLSPRMLHVIEDLAGDWRRLDERIETLSREIETIARQDTGCDRLMSVPGIGPIISSAVVASIGSGDVFSKGRDFAAWLGLVPKQISTGDRTILGKISKRGNRYLRVLFVQAAWVVLVKPVSWERHGLKSWIEAAKKRLHHNVLAIALANKLARIAWAVLAKGRGFEATRTIDGSTKPA

SEQ ID NO: 494693 - protein, 353 aa, unidentified
MIIIGVDFHPEFQQIASVDTETGEFQEKRLAHREDAETFYRALAGQKVRVGMEASGHARWFERLLAELQFELWIGDAAEIQSKRVRKQKTDRQDAQLILRLMLKDDFPRIWVPSWENRDLRQLLWHRHRMVQIRTRIMNQLQALALNEGLRCRKRLWREHGRQQLESFRLAPWASRRRRDLLELLDRLNPTIAELSQAIEQEAEKYPEAQRLMTHPGVGPLTALAFVLIIGKAERFQCGKQIASYLGLVPLEKSSGNRRRLGHITKQGSSMVRFLLVEAAQVTVRSLPEWRKKYAHLMMRRGRKIAKVAMARRLAVALYWMWRKGWNYEPSKSSVRTRASSEQAMVCSKTPSN

SEQ ID NO: 494694 - protein, 386 aa, unidentified
MTTSIQTRIEQAPLLQPTLFLAFELGQNTWKLGFTIGVAQPPRERTIPAGDVARLQQEITRAKQRFGLPEDARVVSCYEAGRDGFWLHRSLVAHDIQNHVIDSASIEVNRRQRRAKTDRLDVRKLLTMLLRHMAGERKVWSVVRVPSVEEEDRRQLHRELTTAKQDRTRVINRIKGLLAGHGVQLALQGDVDAQLDHVQQWDGSPLPSALRTRLKRAWQQVGFLTAHIQTLEAERRALLRRREDPVFAQVRQLFTLRGIGVNSAWLYVMAFFAWRDFQTPKQVGALAGLTPTPYQSGQSRRELGIAKAGNRHIRTMAIEIAWAWRRFQPDSALSQWYERRFGAGSARRRKLGIVALARKLLIALWRFVKTGVLPEGAVLKTEALGR

SEQ ID NO: 494695 - protein, 394 aa, unidentified
MILVGIDIGKNQHTFSIIDKGTGEILSNPSVFNNNQEGFLSLIKKLSDYAKSELLIGMEDTGHYHFALLKYLLDSHYTVALINPATTDLTRKLQGGITKNDSLDSLTICDVISSNHRKKPYRITKVNRFDLYEQKQLTRHHHNLKEELNIYKNRIQKCIDIVFPEFNSLFRSKYGIVYMNVLKTFASAKKIADSDIQTIRECFEYNRRGKRISLSAEQLKAAAKTSVGIHSVAEEIQIRHLVRQIEMIEEQLSEIDKKIEEFSLQNDSPILSIPGISHFSGTSILAELGDICNYTKASQIIKFAGVAPYHHESSQFTAQHTAITKKGSRYLRKTLYQIILTVINNNKVFTAYYNKKLAEGKGHRCAQGHCIRKLLRIIYHLLSTGQTFDPDLLR

SEQ ID NO: 494696 - protein, 315 aa, unidentified
MSETVIFVGVDVSKARLDVAVRPSGDTLTVLHDEAGIAGLVMRLHAWQPAAVVLEATGDLQLPLVSALIAAGLPVHVVNPRQVREFARATGRLAKTDRLDARVLAQFAEAVRPAPRALPDEATQTLSAVLTRRRQLIEMLTAEKNRLSQARLSLRKRIEAHIEWLTSELRRVDADLDTAIRHSPVWREQDDLLQSMPGVGPGLSRTMLAELPELGTLSSKQLAALVGVAPHNRDSGTLHGKRTIWGGRAVVRTALYMAALAATKWNPVIKAFYHQLLARGKAKKVALVACMHKLLIILNAMVKHRTPWRANVQQA

SEQ ID NO: 494697 - protein, 343 aa, unidentified
MRHYAGLDVSVKETSVCIVDESGKVCRETKVPSHPEDLARALHDRAWCLERVGLEAGPLSQWLFSGLAATGLPVVCIETRHTKAFLQAQVNKSDRNDARGIAQMMRVNLFRPVHVKTLTSQKRRALLTARKLLQEKALAVDNDIRGLLRNFGLKVGPIGASRFETRTRELVDGMPELAEIIDPLLEARRKLRELFAVLHRKLLAIVRDDTVCRRLMTVPGVGPVVSMAFTATIDVPARFKSSKAVGAALGLTPILNQSGESKRLGRVSLCGDGMTRTLLYEAAQVMLTRTTKWSWLKAWAMKVAARRGIQKAIVALARRLAVILHRIWVSGTDFRWTREVQST

SEQ ID NO: 494698 - protein, 429 aa, unidentified
MQNESTPGARGPVFCGVDTHADSHWLCVLDWRGRKVLSRQFPADAAGYEALAGAIAAAGEPACVAMEGTSSYGAGLTRHLASLGMPVREALSPARMQRRRPGQGKCDESDAERAARAAMSGSKLGTPKSQDGWVDGVRCMLAARSGAVKARTSAINTARSLLTTAPEGLRSRFRGMAGPRLMEELPSVRAEGALGAALGALADLWAAARDAALDMERAIEASLEENCPALLAMYGCGPVSAAKLAVAAGDNPGRLRSEASFAAICGACPIPASSGKTVRHRLNRGGDRQANSALHEIARQRVMRDPETAEYAERARARGKSDREVMRCLKRYVAREAYRALMRPHEVRRPEDASGLVAARRAAKVSQVRAASILGTSEKYISMLERGQRELKPIRRAYEAWVEAGLPLDWDRQAFEAERKMDSKKHLAK

SEQ ID NO: 494699 - protein, 364 aa, unidentified
MYDSTTTVTVGLDVHARSVRLAAVRADELLEERTLPYDEDAVERFLRRWPGVRCCYEAGPTGFGLYRHLIGRGIDCSVVAPGLVPQRPGDRIKTDPRDARKLARLLAGGLLEPIHVPSRELEAARDLVRAREDARLDRMRDRHRLSKFCLRHGRVLPTSSWTVMRRKWLGEQRFEFAAQQITFDSYVHTVDLVDARIEQLERAIRETAEQEPWCGLVARLRCLRGIETLTALALVTEIGDFDRFKTAEEFMAFVGLVPSEHSSGEKRRQGSITKVGNSHVRRLLVESAWHARRRPKVGYELARRQRGQDAVVVERAWRCQQRLYQRWQRMAGRGKPQQKIVVACARELAGFVWAIATEQPLRNT

SEQ ID NO: 494700 - protein, 358 aa, unidentified
MNRNTGMNAGQIIGTMNGQQVIGLDIAKHVFQMHTVNMGTGEIVNVQIKRAKVQEHFANLAPCLVAIEACGGAHHWARELSKLGHTVRLLHAKIVRPFVSGNKTDATDARAIWLAVQQPGVKFVGTKTAAQQATLTLHRQRELLMKMRIMQTNALRSLLYEFGATFAKGKRALFKEIEATLEGLAHTLPQLVRDSLHEQVARIKAIEVDMQAIEARLQLQLKQDPQMQRIAQIPGVGLLTATAAIATMGEASAFKSGREFCAWLGLVPKQTGSGGKVKLLGISKRGDGYLRCLLIHGARSVIAHAKEPGPWLQSIKARRPSNVVFVAQAAKMARTIWAITAKAQDYDRGFKSIRPQAA

SEQ ID NO: 494701 - protein, 349 aa, unidentified
METYIGCDAHKRYSIFTSMTERGQKGRPVRVEHTRAQYRAFLGDLPPGSPIAIETIGNWYWMVDEMERAGHVPKLAHAGKAKLMMGQINKTDKLDAAGLAMLLRNGTLPEVWIPPGDIRDQRELPRTRMSLVGVRTMLKNRIHATLAKYLIEIEASDVFGVKGREDLESRLGELPEYTRASVVQELELLDEVEEQIKTSEERIREVVSATPEMELLRTIPGVGPILAVVIALEIGDIGRFPAPENVASYAGTVPRVSASGDRMRFGKVRSDVNRYLKWALVEAANVVVLNQRHWPDRHVVQLYQRLRERKGHGKAVVAVARHMAEAVFWVLKKREVYKEPHRPVSSNQT

SEQ ID NO: 494702 - protein, 340 aa, unidentified
MKHSVIGMDIAKQVFQLHSVHSDTGEIERIKLRREEVLPYFARRTPTLVAVEACGSAHWWGRKLAELGHEIRLLHPRSVRPFVLRNKTDAADARAIWTAVQQPDARFVAVKTEMQQAVLALHRLRAQLLKFRIMQSNALRGLLYEFGEVLPEGCLALAKALPVALARLEANLPAPLLDSLREQWARVVSMDKEITSIERRLTLILRDTPACQAVAEIPGVGLLTATAAVASIGQPDSFKSGREFAAWLGLVPRQRGTGGRVRQLGISKRGDIYLRTLLMHGARAVILRHRHVPWLDALLKRRPYNVVVAAVANKLARTIWAVLARGKPYDPAAFSAVAAA

SEQ ID NO: 494703 - protein, 377 aa, unidentified
MSLVMGIDQHRAQITAEWLDTETGEVSRARVRPADRAGVRRFLARFAGQQLEVALEATTGWRFLVEELRAVGAVVHLAEPAETAALRGNKRRAKSDRADARHHRELLLAERLPESWIPPDHILDVRARVRLRHTLIEQHTEWQQRIQAVLYHHGCRQRRRLMEGDGREWLASQALSETAREQITVAMAIIDALDVQLAPLTKELCAWARRQAGCKALIDAYYGIGELCAVTVIAELGDCRRFQNSRDAVRYSGLDVTVYQSDRHRAPGHLSRQGPPALRWALYEAAQVARRPGSPDRGYYEQAAERLGGNRACVALARKLLKRCYHTLRELGDDALTPPVERPQPGPGSAAARRASSGSPRSLEPTTTNQRADVLAA

SEQ ID NO: 494704 - protein, 274 aa, unidentified
MIAVGVDTHKEQHLAVALDGLGQVLAEIVITTTLAGYSQFVCWLKELGENVLVGIEGAGSYGAGLCEYLQAEEIEVFEVERPQRRERRTGESDRLDALLAAKKVLTREGLSTPRGSGKRLALQMLLVGHRSAVSERSRLYNQLQALQVGAPYALRERIGQARNGAKLADRLTGMRTRPTASLQENTTLQVLRDIANRARALDAEAENYARQIEEMVCSLAPSLLEEPGVGPICAGRLLAFNPARFTSEAAFARANGTAPQPASSGKTVRHRLSR

SEQ ID NO: 494705 - protein, 341 aa, unidentified
MNLTTIGIDLAKNVFQIHGADERGKAVLKKQLKRDQVVPFFANLVPCKIGMEACGSAHYWARKLQALGHSVQLIAPQYVKPFVKRNKNDAADAEAICEAVTRPNMPAVPIKNASQQAILSVHRARQGFVKARTAQANQIRGLLAEFGIIIPQGISHIAKRVPEIIEDGENELPGSFRLLIQRLVDHLKVLGQQVGELEREIQAWHRENEASKKLAKIPGIGPMTASALVASVGNARSFRNGRQLAAWLGIVPKQHSTGGKATLLGISKRGDTYLRTLLIHGARAVIRVAERKPQPDAWLGKLLTRRNKNVAAVALANKNARTIWALLAHDRAYESDYRMAA

SEQ ID NO: 494706 - protein, 412 aa, unidentified
MTNPYNLFVGIDLGSQSHHVSVVDRDGTLLGERKFEHDGQGIQQLLTWLAELAGGASPETVAVALEAPRGAIVDALLERGYCLFSINPKQLDRFRDRYSVAGAKDDSRDAYVLGNSLRTDLSHFRRLRPDHVQIVRLRELSRASDALQEDWRRNANQLWSYLQRYFPAILKFSSAADDVWVFDLLEQTQAQSKLAAALPIEELAKLLRRRRIRRFSAEKLYRALQDRLPLAAGVEEALAEQVLLLLPRLRLLHQQRSEVDHRTDRLLVEMAQENFPEHRSVEILRSIPGLGRVFIATVFSEAGRPLLDRDYHDLRLLAGAAPVTWKSGKTKIVSMRRACNDRLRDAVQNSANTHMQKDPRAKQIYARLRRKGNTHARGLRGVGDRLLELICVLLRSDQLYQLDRRQPKQDAA

SEQ ID NO: 494707 - protein, 346 aa, unidentified
MMIIGCDFHPSWQQIAWLDTETGETGEQKLVHASGDAKSFYAQLPQPVLIGMEATGNSQWFIELVQDLGHEIWIGDAAQIRASYVRKQKTDKRDAAHILKLVVEGRFPRLWTPDREQRDLRQLVLHRHKLVEIRSRVKNELQHLSLNKGMQRKAKLWSQAGQKLLRELPLKPWAACRREDLLGLLTMLNQQIGKLDEAVQHAADEHPQAQLLMTQPGVGPNTALAYVLTIGDVSRFPRGKQVASYLGLIPREESSGGRQKLGAISKQGNRLVRSLLVEAAQIAVRFDPGMKKEYLHRCHQKPKGVAKVAAARKLAVRLYWMLRTQTAYPEIVRIESSPRVPLVGAS

SEQ ID NO: 494708 - protein, 331 aa, unidentified
MLPVIGLDIAKRVFQLHTVDSDTGEITKLKLKRSEIVPFFSNRSVSVVAMEACGSSHHWARQLRSFGHEVRLIATKFVKPFVKGNKNDAADARAIWEAAQRPEMRCVAVKSEAQQAILALHSMREGLVKARTAQLHQLRAVFYELGIDLPEGRHWCVKRLPEAFAGLEGRVPAMVIEALRDQFQLITQLTERVESIEHKLDWFRRSDERCQRLLEIPGVGLLTATAVVASVGDATEFRSGREFAAWLGVVPRHSGTGGRVRILNISKRGNSYLRAMLIHCARAVMARQKEHSAWLQRLMRERPWNVAVVALANKLARTVWALLAHRTSYVR

SEQ ID NO: 494709 - protein, 378 aa, unidentified
MDVIYPRCAGLDVHAETIVACALWEEDGHIQKDIQTFSTFSKGLGDLLEWLEEHGVTHVAMESTGVYWKPVFAFLEGYVDLTLANPQRIKNVPGRKTDVSDAEWIAKLLRHGLVEKSFVPPADIRELRDFTRLRKKWVGQLTSEKNRIQKVLESSNVKLGSVLSDLFGVSGKDILARLLEKGYVDKDELDQCLRGRLKKKKQAVYDSLLGTLTEHELRLLRLLWKHVEELEQLIEEVDQHIDRLLEPYREEVDLLMTMPGIKKQTAAVIIAEMGTDMSVFETPERAASWTGLSPGNHESAGKRKSTRTTKGNPHLRSALCEAAWSAARSKTHPLSRKFWSLAARCGKKKALIAIARRMLVIIFCMISRKEPFRQPQLI

SEQ ID NO: 494710 - protein, 358 aa, unidentified
MAVIEGVCRIVGGVDTHKDLHVAAIVDEQDRIIGTRSFATTRQGYRQMLAWMRSFGELQRIGIESTGSYGAGLLRFMQQAKVTVLEVTTPDKQDRRRRGKNDDLDAQNAAHAAFAGQRTVTPRSRDGMIESLRVLMACRKTAVSARRVALQMIHNTIVCAPDGLRDQLRNLTRMQLVRTLASWRPDLTAYRDLDSAYRIGLKSLARRYLELHDEIADLDAMIAAIVDELAPNLVARNSIGHTGAAQLLLTAGDNPERLRSEASFASLCGASPVPASSGRTVRHRLNRGGDRAANSALHIIAIGRLRTDQRTKDYVARRLAEGHSKLDAIRALKRYLAREVFTLITQRRKKINATRIAA

SEQ ID NO: 494711 - protein, 370 aa, unidentified
MSYYVGLDLHSNNTYVGVIDSKERRVLKGKFPNQLEVILALLEPYKKRTVGVVVESTFNWYWLVDGLMDNGYKVHLAHPAAFKQYNGLKYTDDEHDAFFLAKMLQLGILPEGYIMPREERHLRDLLRKRLKLVRQRTTHILSFKSLVSRNQAISMDSNKIKTLTEESIDGMFENEHLVISAKANIAIMNYLKEKIVAIEKQIRNVTQIKPEHDFLTTVPGIGKSLVLTVMLETEDINRFKAVGNYASYCRCVESKRLSNNKSKGENNRKNGNKYLAWAYVEIANCAKRYCPQARAFYLKKSMKTNKTLAIKALAHKLARACYYIMKDNVAFDVTKIFGKPILKNGCGREPNWGLGHQPSAPIGQPAAADF

SEQ ID NO: 494712 - protein, 569 aa, unidentified
MAIQLDHHAWRSQARDDKHVFISSPDLSAAPAPDRKETGLARVEGGILALEVFCPARQAIHRRIIGALSSPFSSLVLEAVHPSVVASPRKRFRPRSRRILIFVHPPGRRGQTTHQTMSKINRPASNKKKDAAKRIRPVTRPDAAGIDLAALVHYVAVPPDRDPQPVQSFGTQTADLHKLADWLVACRIKTVAMEATGVYWVPLYQILEDRGLEVCLVNARHAKNVPGRKTDVLDCEWLQYLHSVGLLNASFRPPAPICAVRALVRHRDSLVQTGCEHLLRIQKALDQMNVQVHHAVSDITGMTGLAILEAILNGERDPQKLAQLRDPRCKKTQSEIAAALHGDWRPEHLFTLRQSLAAWRYHQTLITECEAELKKQMDTLADQTKDAVPAKAKPDQRCDETLRHHLFRKFGVDLTAADGMNTQTALVLLSEVGTDLRKFATADHFASWLCLSPDNRVSGGRRLSVATRTGANRLATALRLAARSLHRSQTALGDWYRRMKAKLGSAGAITATAHKLARILWAMIKHRRPFDRARLGNPELRQQRRENALRRAAKELGYLLQPIHPVPVS

SEQ ID NO: 494713 - protein, 326 aa, unidentified
MQGKESSEQKTKAKSSAGIDVCKSWLDVHVIPEGCSRRFSNDAQGHRQLKRWLAKYDVTVIAMEATGKWHRQVHRSLHASGLKVAIINPLRARLFAEAIGLLAKTDRVDARMLALLAASLLPSANTPAPVLIEALKELVAARHSAVTEQTALENQLASANTSFLCAQLRRRIDRLAKDIAGLDAEIAKRIKADQGLARRYEILLSIPGLGPVTAATLVADLTELGACNAKQIAMLTGLAPLADDSGSRQGQRVIRAGRASVRRVLYLCALSAKRCNATTKALYDRLTAAGKPRKVALIAVARKLVILANTLISQDRLWQQSAPLNA

SEQ ID NO: 494714 - protein, 276 aa, unidentified
MKYTPVGVDIAKHVIQIHFINEHTGEVVDKQLRRQDFLTFFGNREPCLIGMEACGGSQHWARELTKLGHKVRLLQARFVKAFVMGNKNDVMDARAIWMAVQQPGKEIAVKTEEQQSVLVLHRTRMQLVKFRTAQINALHGTLLEFGETIHKGRAAMEREFPEALERMKERLPPYLIMVLENQYNRLNELDSLIEDIEKQLTSVARQNETCKRLLDIPGVGPLIATAAVATMGEASAFKSGREFAAYVGLVPKQTGSGGKVRVRCTGNSGHYHLFFF

SEQ ID NO: 494715 - protein, 411 aa, unidentified
MRRVIGIDVHRTFGEVVIWEDGRLRHAGRIDMTRTALEGFGKTLLASDEVVVEATGNSMAVSRVLAPFVARVIIANPLQVKAIAQAHVKTDKIDAGTLASLQAAGYLPQIWTPDAETERKRRLVARRYQVVRHRTRLKNEVHSILHAHLIPKCPHADLFNGRGRAWLVAQPLPDDERAAIDRHVRELDRLAEDLALLDREIAQDAIDDSAVNRLMTITGVNLAVAAGIMAAIGDISRFNSPQKLVSYFGLNPRVRQSGLGAAHHGRISKIGRSHARAMLVEAAWAAAKAPGPLHAFFVRIRARRGHQIAAVAVARKLTVLCWHLLTKGEDYLWARPALVAIKTRAMQLQAGHPQQKGSRRGPAYAYNIKVLRDREMLIAAQAEQSYERLVTQWKPRRPKTGARAPQLGKTK

SEQ ID NO: 494716 - protein, 370 aa, unidentified
MKKQTKTTPSVVHTSPAAVVSGFTLGLDLGDRSHHVCVLDATGQIVREGALSNTRPALAKLMAGFPRATVAMEAGTHSPWISRYLTELGAKVIVANPRKLHAISRNERKCDRRDAQMLARLARVDPALLHPIQHGTAQAQHDLLGLKLRDALVRTRVNLINAVRFTLKSLGHSVRNPSSESFHKTVLADVPADCLPVIQPLLTVLVQVTEQIKGMERDLVQCSKKEYPATQRLQQISGVGPLTALCFVLKIGDPQRFGRSRDVGAYLGLCPRRDQSGGTDKQLRISKCGDGLMRRLLVSAAHYILGPFGPPCALREQGQRLAGTGSAREKKRAVVAVARKLAVLLLSLWKHGADYEPRATAGPALVLTPA

SEQ ID NO: 494717 - protein, 333 aa, unidentified
MSRTQEKIDDLTRNDNAAVHAGVDVSKEALDVFISPHALRLRVDNNKTGIKALIRQCKRHDVRLVAMEATGKYHCLLHELLSEAGIAAAVVNPFRMRQFADSLGRLAKTDTIDAEVIARFAACMKPETTPPPTAPSKALKGLHAARRQVLDEIGDLKRKLHATDHALAAKQMRARLKMAERHKEALDQEIRALIAADAAMKRKFDILTSIPGIGAATAGILITDLSELGQVNARQIAALTGVAPMNWDSGAKNGKRMIRGGRKTARNALYMCAVCCIRRSSQMGGFYRQLIKRGKSPKVALTAVIRKLAILANTLIAQDRCWQPHCPSPQIRP

SEQ ID NO: 494718 - protein, 370 aa, unidentified
MLDTTTFVGLDVHARSIKAVSLDVMTGEVRAATFGYDAGAVAGWVRSVDPRARCVYESGVTGFDLQKRLSGLGVDCVVGAVSKMIKPSADRRRKNDRNDAEFLARMLSVGNVVEVWVPDDECEAARDLTRALEDARDDLSRSKQRLSKFLLRHGLVFDERTPTGRRKGNWTRAHWSWIESIRFAEGADNDVLAYYVDAVRRAAEEKARLEGLVEAEARKPRWRRRVDSLRCLKGVDTATAADLVFEAGEFSRFRNARSFAAWVGLTPSEHSSGESDRRGAITKAGNKHLRKALVEAAWHYLTCSARPKEPARGQAPDPGARRHAAKGVRRLVERRGTLLARGVHNNKANVATARELACWVWAVGLMAEEA

SEQ ID NO: 494719 - protein, 375 aa, unidentified
MAMIARLGIDTSKGLFQLHGVDEREEVVLRKQVRRGQFLAFVDKLAPTEIGIEACGASHYWARRLQALGHTVVLLPPQHVKPYAGHNKKDKIDAEAICEAMSRPRVRERLVAVKSAEQSAAQMLLGTRDGLLQRRTQLSNIIRGYAAEFGQTAPKGLAHIKPLLERIAADQAVPAMARELFATLDEEFAELAPRIAQLDKKLKAFQRSNELCRRLVEIPTVGPVIASSMVVKIGTPAAFRSGRRCAAWLGLTPKDHSTAGKMRHGGITRAGDEALRAALVSGATAYIQQVKRGRTRPSPWLAGLLKRKPEKLVAVALANKTARIAWKLMTSGQRYDRDRAEAREALGAAQCGGSAPSPSLPPLAADHGASAITAA

SEQ ID NO: 494720 - protein, 373 aa, unidentified
MFISGLPACLNLDPDSRLTSIVKVIRLSSSPFFTENFRDKSMENFYFIGVDVSKKKLDFCVMFEGKVVHEEETANHQSAIMSLLHQLEEDYGIASDQILVCAEHTGQYTFPLACACKAVECKLWLENAAEIKYSSGVQRGKNDKVDAKRIAIYARRFQDKVQYYERPTEDIERLKQLESERTLYVADLAKYKGQVKDQKDYMPKALYERKMKRLQALMEDLEEAIQAITDEMDEVIVSCPVLYRQRELLMSIDGVGRVVATNMIITTEAFTRFDDPRKFNCYAGVAPFSYSSGSSLHSKARVSHRADKVMKRLLHLAAVAITHRIGGELKKYYERKVAEGKNKMSVINALRAKIVARMFAVIKRNEKYKPILS

SEQ ID NO: 494721 - protein, 349 aa, unidentified
MLADEVDYVLGVDTHRDEHVMAVVTAPTGAVVAGAATAANAYGYRELLRVAEQHAPGRRAWAIEGTGSYGAGLSRYLHARGESVLEVSRIPRDERRLRGKDDALDAARTARAALASDTLALPRRGERREALRLLLVARRSAVDVRREALTQLRAVIVTAPERLRQELCRLPEGKLLDRCSRFRRTNSAGADELATRIVLRSLARRVRTATVEADELEREILAHVRALAPTLLDEPGVGPIVAAQLIVAWSHHGRLRSEACFARLAGVAPVPASSGQTTRHRLSRGGDRQLNRALHTIVLHRRHHDPTTRDYIARRIAEGKSRRDATRLLKRYLARHLYRLLQQQEPMTT

SEQ ID NO: 494722 - protein, 391 aa, unidentified
MIYVGIDVAKDKHDCFITNFDGEVLFKAFTIANNLDGFNDLYQKIVSVAEDITKVKVGLEATGHYSYNLLGYLIDKSLPTYVINPLHTNLYRKSLSLRQTKTDKVDARTIASMLMSDVNLKSYSDISYHNEELKSLTRYRFDKVKERAKLKSSVSRLVCILFPELEKLVPTLHMASVYAMLSEFPSAKQVACAHLTRLTNLLSEASKGRYGRETAITFREAARTSIGSNMPAKSLELKHTIKLIHELTSEIDQVENEIKIIMDEINSPILSIPGINYRMGAMIIAEIGDFNRFNSPDKILAYAGFSPSTYQSGQLHGAYSHMEKRSSRYLRYALYNAAKYVCHWDPTFAEYLVKKRAEGKHYNVAISHAVKKLVRVIYHLEKTNQQYIKSA

SEQ ID NO: 494723 - protein, 391 aa, unidentified
MIIVGIDVAKDKHDCFIMDSEGTVLFDVFTVPNTLDGFNILLDNIKSVTDDLGKTKVGLEATGHYSYDLLGFLLNNGLPTYVLNPLHTNLYRKSLTLRKTKTDKVDARVIASMLMSCVDLKPYTSTLYQNEELKSMTRYRFDKVSERAKLKTSVSRLVTILFPELEKLVPTLHMKSVYALLAEYPSAKHIADAHLTRLTNLLSEASKNRYGKDKAIQIREAARRSIGSVMSAKSMELRHTIKLIADLTEQIDEVEAEIKKLVDESGTTLLTVPGLSYATVAVILTEVGDFSNFATPDKVLAFAGMSPSTYQSGQLTNCYARMEKRGSKYLRYALYNAAKYVCTWDKTFADYLSKKRAEGKHYNVALSHAVKKLVRLIFALEKSHMPYQPSI

SEQ ID NO: 494724 - protein, 458 aa, unidentified
MAPRKRKKSSVSDSLPPQLATVNLHAAGIDVGAEEHWAAVPACDDPQPVRRFGANTADLDALADWLWACDITTVALESTGVYWIPLFELLEARGFQVLLVDPGKMPRNGRPKSDVHDCQWLQRLHTYGLLTACFRPEDQVVVLRSYLRQRAALLADAARDIQHLQKALTQMNIKLQHVVSDITGVTGLAIIRAILAGERDPQKLAQLRDHRCKQDQESIAQALYGNWREEHLFALQQALERYEFHHRQIAACDGRIETQLQTFADRSQGELLPPKPGQRRRHRNRPAFDPRGPLHRMTGVDLTRIEGIDETTALIVISEIGLDMSKWPSAKHFTSWLGVSPHQRVSGGKVLSSRTRPTTNRAAAALRLAAASLHHSKSALGAYFRRMKGRLGTPKAITATAHKLARLIYSMLKHGTAYVARGMDEYEQQYRDRVVKHLHRRAKELGYELHPAPEGTPA

SEQ ID NO: 494725 - protein, 353 aa, unidentified
MESMPAAAIAVTVGVDTHLDQHVAAVIDQSGRLCGTKAFAASTRGYVALVTWAERFGPVERIGVEGTGTYGAGLARFVRAYGLQVVEVDRPDRSTRRRHGKSDPIDAQAAARATLAGVATTIPKTREGQVEMIRVLRVARRGALKARVAAAEQLHGVLYSAPEELRQPLLGLKTKALVSSCAAMRPGPLTSPTAATKTTLRTLARRWQQLQAELDQLDSQLQELVAAAAPSLVALPGIGVDTAGQLLVTAGDNPQRLRSEAAFAHLCGTAPIPASSGRTDRHRLNRGGDRRANNALWRIALVRMHCHPQTRAYVERRTKQGLSKLDIMRCLKRYIAREIYPHLTNPPPTTCPK

SEQ ID NO: 494726 - protein, 341 aa, unidentified
MTGVSTIGLDLAKNVFQAHGADATGVPVFRKKLRRDQVLAFFAGQPRCTVAMEACPGAHHWGREIGKLGHEVKLIAPAYVKPFVKRQKNDAADAEAICEAAQRPTMRFVAVKSEEKQASAVIFRTRDVLVGQRTQIINAIRGHLSEYGLIAPQGPFHVERLIAQIEDPASSLPQAARACLAVIVGTLRHLQEQTAALDAEIAARAKADDVARRLMTVPGIGPLIATALEALAPPAETFRSGRDFAAWVGLTPVQHSTGGKEHLGRTSRMGERTLRRLLIIAASGVVRWAKRKGVPAGSWLARMLARKPPMLVIVALANKNARIVWALLTRGGIYRAPAVTA

SEQ ID NO: 494727 - protein, 407 aa, unidentified
MVDTTAIDLFLGLDLGKEFHHAHGRTEDGRTVHDKRLPNTEPKLLELFTRLVAKFGTVLVIVDQVANIGALPLTVARAAGCRVAYLPGLSMRRAADLHPGEAKTDARDAFVIAETARTMPHTLRAVDRDDEVLAELTMLTGYDNDLAGEVNRTTNRLRGLLSQIHPSLERVLGPRLAYPYVQALLQRHGSPARLKKLGRARCEALLKVHGSRKAHHLTAEIFDALAEQTLVVPGTEASALIVPGLAAQLAAAHAQRRQAEQEIAALLEALPLFHLLTSLPGLGVRTTAAVIVAIGDGTSFPTAGHLASYAGLAPATKSSGTSIRGEHAPHRGNRLLKRALFQAAFAAVGCKSDPSSRIYYDRQRARGKTHTQAILRLARQRVNVIHAMIRTGALYEARTPGDVDLAA

SEQ ID NO: 494728 - protein, 307 aa, unidentified
MFVGIDVSKNRLDVHVRPGGETFAVSRDGEGLAQLCERLTQMAPSRIVLEATGGFETLAASALAAAQLPVAVVNPRQIRDFGRALGRLAKTDAIDAAIIAHFAEAVQPDIRPLASEDALLLGELVARRRQLVDMMIAEQNRRSRLASRSLRKAIDRHIELLKQQLADLDAEIDKTIRGTPAWRAKQDLLISVPSIGHKIARTLIAELPELGTLDRRKIASLVGVAPFNRDSGMFRGRRSIAGGRTPVRNALYMGILVAIRRNLPMAQVYHRMRQAGKPAKVAIVACMRKLLTILNAILRDQKPWQPA

SEQ ID NO: 494729 - protein, 457 aa, unidentified
MVDKTQAQAIDWNSLPPLNVNAAGLDIGATEIYVCVPTGRDPQSVRRFGTFTVDLHSLAAWLTTCQIDTVAMEATGVYWIPVYEILEAAGFEVYLVNARHIKNVAARKSDVSDCQWIQRLHTYGLLRASFRPPEEIAALRALVRHRETLIQYRAAHIQHMQKALQLMNVKLTHVISDITGVTGMTIIRAIVAGERNPKVLAQYRDPACKKSQVEIAKALEGHYKAEHVFVLRQALELYDFYDQQIQACDREIERRYQASEPRDPDGQPATTAPQPTQRKPRKGQAHFDLASSLYRMVGVDLTRIDGIDALTAQTLISEIGLDMSKWRTVKHFTSWLGLAPNPKKSGGKVLTNHAPRAQNRAAQSLRIAAQTLARSQSALGAFYRRIRAKHGAAQAVVATAHKLARIVYHMLKYREDYHDLGTDYYEQQYKERVLRTLTRKAADLGFRLEPVLTPQVS

SEQ ID NO: 494730 - protein, 421 aa, unidentified
MTQSAPDTFAALVGIDWADAKHDVCLQAAGSAKRECFQLEHTPEAIDAWVTTLRTRFNGQPVAVCLELNKGPLVFALRKYDFLILFPLNPLTLARYREAFTPSRAKDDPTDAELQLELLLTHRDKLRPLNPQSPTMRALAQLVEHRRRVVGDKVRITNRLTSTLKNYFPHALQWFQDKDTLLFCDFLSRWPTLKAAQLARRSTLATFFRDHHVRSSDVIDTRIHAIHAASPLTIDEGVIAPHALLVQALVSQLRVTLQAIETFDNAIAQRAQSHPDFPLFQALPGAGPVFASRLLVAFGEQRDRYASAAELQRYAGIAPVTERSGKKSWVHWRLQCPKFLRQTFVEWAAESTRHSFWAQVYYQQQRDKGKAHQAAVRALAFKWIRILFRCWQERTPYNESAYLQALNSRGSSLLHNLAKEA

SEQ ID NO: 494731 - protein, 418 aa, unidentified
MHEIQSWFAGVDWASQKHDVWLADASGKRLGKRTFEHSGEGLAQMCNWLIATSGGKPEDIYVAIEVPHGAVVETLLDRGFKVYAINPRQLDRFRDRFSPAGAKDDSRDAETLSSSLRTDRRAFHQVSLAGPAIIQLREWSRMADDLRADKIRHANRLREQLQRYYPQMLQFDSDLAEEWVLKLWEAAPTPAKAARLRQAEVEKLLKRHRIRRIGAAKVLSILKEQALVVAPGVTEAAVAHIRALIESIRLFTQQLKEAHRQLDRLCSLLAKPIPGETEQTGPEPEQTLVAILQSLPGAGRIVLAALLAEAFETLQRADYPILRILCGVAPVTRRSGKSRAVTRRLACNPRLRNAIHYLADAARRCDEKSKAKYIALKARGCSHARALRTIGDRLLYVACTMLKNHTLFDPSLEAQKRA

SEQ ID NO: 494732 - protein, 348 aa, unidentified
MQFYTNLHPFYCGIDLHARMLYVCILDERGDILVHKKIKDSPEQLLTLLSPYLGNIIVGAECMHCWYWLSDFCEQHNIDFILGHALYMKAIHGGKTKNDKIDAYKIAKLMRGGNFPLAYVYPKEKRAIRDLLRRRTHAMRHSAELKAFVKNALAQYNLPLPEKSDLSYTTGRDAMRGYFPDPLVQRSVDMNLRLIEIYDHEVSSIECYVEKITKNDNGRDYHLLRSLPGVGRVLALTILYEIGNIQRFESVQKFASYSRLVKCKAESAGKTYGTQGNKIGNAHLKWAFSEAAVLFLKGNPRAQAYLAKLQKRMSKAKALSALAHKLGRCMYYMLKNKTVFDSERFLAG

SEQ ID NO: 494733 - protein, 582 aa, unidentified
MPACSSAPLDRIGVGIDTARYGHRVAFLRPDRQPAAKPLTVLENQAGYQALQQRLEHLHQQHPQAHFHVRIDAAGQYAANLEHFLRGLPLPITLSIGEPKRNKDYQKAHFPKRTTDDTESQAMARFAVVELPEATLPVPPQMALLREVATRLQAQVKQSTQAVNRLHNLMARVFPELATLADDFSARWLLTLLDRYPTAQRLGAAQLRSVEQIPHLPAKLAQPLHQAAKTSVASLHGPVAETLVGELVTQVCHCLAHEAKLRQLLQDAFTALPPSGHVQVHTIPGIGLATAAVLVAKVIDIDRFVSPEHLVAYFGVFPEENSSGVDKQGRPLPPGTMCMSHKGNDLVRGYLWNAARSAIKHNPAVRALYQRLRAKGKRGDVAMGHCMRKLLHLVYAVWKTNRPFDGQHFPWEQPKDTPPATPTSGTAGQPAGNEEAVGHTQAVPAEPVVTTATAKVEDGTTPVNPPDAPARPRVDYAFVRQQITLARVLDHLGVLDALSGCGQQRRGPCPLHGQTGPKSRTFSAHLGKNIFQCFAADCAAHGNVLDLWAAVQGLPLYEAALHLAETFGLRRNREEEPVKGTR

SEQ ID NO: 494734 - protein, 411 aa, unidentified
MHDTFFVGIDVSLKSNAVCVLNSQGRKLSSFSVRNDREGSRELASRVGSCVLKAGCDPVVKVGIEATSVYGFPMLYFLKQEPSIVKANPQFYILNPKQVKGFKKTYSDLPKTDPVDAFVIADCLRFGRIGTKEAYMDDFYASLQKLTRARFHVAQNLAAEKNRYLNALFLKFSGMVQEKLFSDNFGATAMALVEEYETVDDIANTPVGDLAAFLNNHGKGHFADPDQLAAAIQASARASYRLPKTVLGSVNQVLAVSARTIRFYESQLRDYDKAIADLVSTLPGNPLATVSGIGPVYSAGILAEIGEISRFKDQAALAKYAGLAWSRHQSGDFDADQTHLIQSGNRYLRYYLIEAANKVRQHDPDYMAFYQKKLSETKVTPKKRALVLTARKLVRLVYALLRDNKFYTPSV

SEQ ID NO: 494735 - protein, 315 aa, unidentified
MLSQIFVGIDVAKAQLDIALRPTSERWAVPNDEPGIATLVGRLQAVQPTLIGLEATGGYHRAVVAALAAAALPLVVVNPRQVRDFAKATGQLAKTDALNAHAVAHFAEAVRPALRPLPDAQTEELRALLARRRQLIAMRTAEQNRLENVPPRLRADIVAHIAWLDQHVATLDDDLDTTLRASPVWREREILYRSVPGIGPVCARTLVLDLPELGTLSRQRIAALVGVAPFNRDSGTLRGSRTTWGGRAHVRATLYMSALVAVRYNPVLKAFYQRLCLAGKAKKVALTACMRKLVTILNAMVKHQKPWHVQEVPSA

SEQ ID NO: 494736 - protein, 349 aa, unidentified
MMRYIGVDVGKTRCRAAIMNEKGTLEKEFFFENNNKGITSLLSTLNTQDKVVMESTGNLWLNIYDTLDQRNIKVVLANPLNTKAIASAKIKTDKLDARILAHLLRADLIAESYVPEGNIREMRALVRHRLSLVQMRTMLKNKVHAIVDKYGYRCEYSDMFGKAGIQWLRAQEMNEIDCLLVENYLSLLDSVKVQIGRVDDAIKEKACEDEDVCLLLSLTGMGVYTALLVRSEVGSIGRFSDYKKLVSWAGLAPSVYQSGNVEFYGRITKRGSPLLRWALVEDARIAVRHDERLRAFYLRVAKRHGDQKAAVAVACKMLKIVWFMLTRREPYESADLRRYGEKLKSIDIK

SEQ ID NO: 494737 - protein, 343 aa, unidentified
MQDVATVGLDIAKQVFQAHGADASGETLFNTQIKRENVLEFFSKLKPCLVGMESCATSYYWARQLLEFGHDVRLIHTSYVKPFVKRGKTDANDAEAINVALTQKTMRFVPVKTLNQQAAVTIFRTRSLFVSQRTQLVNALRGHLAEAGLVAAKGIQNYSKLVKLMESAADTALPTVLKQALTDICDQIHLLNDLVTKLDKEIDRRVKHDENACRLLTIPGVGPKTAMCVIATIPDIHRFPSGRHFSSWLGLTPRTYSSGGRSVLRRITKMGNSELRAMLYLGGTVIMMRDSKTPIGRWAARLRARRPYKVAAIAVANRIARIIWALLANGGVYNPTYGREASA

SEQ ID NO: 494738 - protein, 408 aa, unidentified
MNPLFVGIDVSSRNNVAYLMKPDGSKHSSFSVQNNLGGAKLLSERIVSALGSMQLSDVVIGLEATSIYGDSLVYALREDGRLGKFQRKIHVLNPKQVRKFKEAYPDLPKNDWVDAFVIADHLRFGRIAREVYMDDYRYKALQTLTRARFEVIQNLTREKQRFANYLFLKCSGMAQDKDIANSSSTTIALMERFETVDDLANSDLEELTAFVTETGRGRFADPAATAKAVRAAAKGSYRLPKTVNDTVNQAMSVSIASMRALKEQVKVLDKAIEQQFEIIPNTLTSIPGIGKVYSAGIIAEIGDIHRFDSQASVAKFAGLVWHKNQSGEFEAEHSRMIKSGNRYLRYYLLEAANSVRRCDSEFRRYYDLKFKEVNKYQHKRALALTARKLVRLVFRLLKDNRLYIPPEG

SEQ ID NO: 494739 - protein, 388 aa, unidentified
MRPISQTTTQKLSHRQSDDATLYASLELSQATWLVTSLSPGSEKMSKHSTPGGDGAALLGLLRRLQVRAEQITEGPVAIVVIQEAGLDGFWVHRLLNANGIESHVVDAASIAVPRRRRRAKTDAIDGETLLRTLLAWQRGEPRVCAMVVPPTPEQEDRRRTSRERAVLLQERVRHVNRIKGLLAGQGITDYEPLHKDRRAQLAALKTGDGQPLPMRLKAELLREIELIELLMRQIAEVEVERDTAVELDAEGNQSPVVLLARLKAIGPQIAAVLYLEGLYRSFANRREVAAYAGLVPTPWRSGTIDREQGISKAGNRRLRHIMIELAWLWVRHQPDSALSRWFRARVGTERGRIRRVAIVALARKLLIALWRYVTHGEVPEGAVLKAA

SEQ ID NO: 494740 - protein, 422 aa, unidentified
MLQETHDTEELIERIAALDIGKAELTCCVRVPSSTVPGKRSQEVMTYKTMTRSLLVLADRLAELGVTRVVMEATSDYWKSPFYLLEAHGFETWLVNAKDVKHLPGRPKTDRLDAVWLCKVAERQMLRPSFVPPPQIRQLRDLTRYRVDLIGVRTAEKNRVEKLLEDAQIKLSVVASDIFGVSGRAMLAALVAGERDPKVLAQLARQRLRAKLSLLEEAFYGRFSDHHGFLLQTMLDRIDQTSAAIATLEAKIEQQIVPFQAAVVRLDEICGVGRAAAQVLIAEIGVDMGRFPTPGHLVSWARFAPGVKESAGKKKGKASTGRGNPYLARVLGEAAVAAGRTNTFLGERYRRIARRRGAKRAVVAVGRSILIIVWHLLSDPDARFHDLGPGFYDTRINADRAKRNHIRQLEALGYRVTLQPAA

SEQ ID NO: 494741 - protein, 419 aa, unidentified
MSFKILKNNCCGLDVHKTWIFACIGITDSNNRTEYKQARFSSFTKGLQELCDWLAKYNCNDVCMESTGKYWIPVFNVLEKNNIWVTLSHPKYTKPQKGNKTDRKDAKWICDLYMCGMVKPSFIPPADIRELRDLVRYRFKLTCMITGEKNRVHNCLTISNLKLDDVFSDIFGKSSRSITEQILQHPGETFDVTPFVDSRCKTPIEQIQAAVDGAVSAQQAVKLRQCLNHIDELEMHKAEIEREIFRLSDKYEDILTLIRTVPGFNKNPMTAIQVLSEIGGDMSVFPTAKNLASWAGCCPRNDQSNQKIKSTRISRAGSYFKPVLVQIANALVKSKKHPEFTTRYRRIKARRGHKKAIIAICRMILTAIWHILTDLKPYTPEGFLEPRPVNEAKTLTTSQALNMLKQRGYIIKDEAVPVA

SEQ ID NO: 494742 - protein, 387 aa, unidentified
MTRVVIGMDPHKRSVTIEVMTPDESVLGGGRYGTDEAGFTALLREAQQWPERIWAVEGCSGIGHHVATRLLAAGEQVVDVPPKLSARARVFSTGQGRKTDATDAHSIALVGTRMAGLRPVVDDQQLAVLRVLADRRRTLGEDHTRMVSQLHHLLLELIPGGAKKDLSAAQAKGLLAKVRPRDIAGKTRRRVAAELIADLERIYARKKAANKELRELIEATGTSLLTLNGIGPSGAARLLIDVGDITRFPTKGHFASWNGTAPLDASSGDRVRHRLSRAGNRQINRTLHIMATVQLRNPSQGRDYYDHKKAAGKTSMEAMRCLKRRLSDVVYRHMAGDAVRAMTGPGGHPGATTESSATDSHPDTGSSNKSHPGPAKSEPTTALPAAS

SEQ ID NO: 494743 - protein, 351 aa, unidentified
MKYYTTTTEYNCGIDLHARQMYACLMDRQGRKLVHTNIQGNDFDYFLQKVQPYRHDLTVVSECTFNWYWLADACEAAGITFVLAHALYAAHIHGGKNKNDRIDSEKLAHLLRSNLIPPAYIYPSERRPIRALLRQRMSYVWHRAELMTHLSMNQTAQNCIPAQKGGHNRDVWQERILAQTPNPYHQLAVRCDMDAVRAYDALIAKLDGTITLYARQHQSREYTLLQTVPGIGDVLAMTILYEVDTIARFPTVKDFTSYCRLVKGSVASAGKLKGLTGGKMGNAYLRWAFGEAAVICKRAHRLLSPYADRLVAKHGTFKGNAILANQLARAVYFMLHSGQAFDPERVIKASI

SEQ ID NO: 494744 - protein, 356 aa, unidentified
MSSMTVSGAVKQPVFVGVDTHKATHHVAVIDGIGTIVDDGQFPATAAGSRAVAGWLSQWEIVRVGVEQSGTYGAGLTRALTAAGHQVVDVNMPDLSVRARAGKSDPIDAVMAAEAVRTGRAETVAKDRGGVIEAIRLLQAARHSAVKARSAALTQLGDLTVITPDSVRERLGSTSRDHARAALSFRADRTRLGDPAQAAKVALKSVATRIAALDEEIAALDKALAGMVTQIAPRLLALPQVGVHAASQLLVTFGQCPNRITTDAKFARLIGVAPIPASSGKTHRMRLHTGGDRQANKTVHMIAIGRLSNHQPAIDYLHRRVSEGLTKKDAIRAMKRLIARELFGALKADLRALDEL

SEQ ID NO: 494745 - protein, 344 aa, unidentified
MKVTTIGMDLAKNVFQIHGVDARDKVVMRKQLRRDQVSEFFAKLPPCLVGMEACGGAHHWARKLQDFGHTVRLMAPQFVKPYVKSNKNDAADAEAICEAVTRPNMRFVPVKSVEQQAVLALHRVRQGFVKARTAQANQIRGLLAEYGLVLPQGVSALRKRLPDLLETSKDGVPEVFLLLVRRLYAHLTELDQQAEALEEQIRAWHRDCALSRRLEKIPGIGPLTATALVASIADAQAFRNGRQLSAWLGLVPRQHSSGGKPTLLGISKRGDVYLRTLLIHGARAALLSAQRKQSAGPWLKGLLGRRHVNVATVALANKNARTAWALLAHDREFQADYVSASATA

SEQ ID NO: 494746 - protein, 362 aa, unidentified
MFKIFRKNCCGLDVHKTWIYACIGITDVNGRTDYKEARFSTFSRGMRELADWLAKYECKEVCMESAGRYWFPVFNILEKTCWVTLAHPKYTKPQKGNKTDWKDAKWICDLFMCDMIKPSFIPPPDIRHLRDLVRYRFKLTNILTGKKNCAQNCLTISNLKLDDVFSDVFGKSASSITTYILDHPGEQFDIAPFVDGRCKTPIEEIQVAVDGSISPEHAIKLRTVLSHIDEIKAHKQTIEAEILRLAAPYETLLELIRTVPGLSAAPMTAIALISEIGVDMSVFPTAKNLSSWAGCCPHNDSSGGKRKSTRISRTGVYLKPLLVQVANAVVKSNKYPGCKERYRRLKAHCGHKKPSLPSAVCS

SEQ ID NO: 494747 - protein, 341 aa, unidentified
MLYAGIDIHKSVFQAVVLDPDSGELSECRFEPSRERLGEWASEWQGKLAAVAVESTTGWRWVARVLEQRGFEVHLVDPGRASALRGRRRRPKTDKLDARWLALVLARQLLSECEAWMPPAQIQLLRDQTRLRKSLVDSRTAWAQRLHALLAHEGWPCSRGRLLTPEGRRWVIALELDPCVRAQVDVMLTLILALDQQLKVVETELRRFARSDARCRALETIFGVGPIFACHLLAEIGDARRFKRSRQVVRASGLDPAVIESADSKRRGRLAKQGSPYLRWALVEAATHSSRSTSPDHELYMSTAQRCGRGRARLTVARKIARRAYHLLAAVEAESVEPQTV

SEQ ID NO: 494748 - protein, 348 aa, unidentified
MALTIVETRAITGGVDTHADTHVAAALDPVGGLLGVREFPATAAGYSGLLGWLGGFGTVCLVGIEGTGSYGAGLARHVTAAGVRVVEVDRSDRQDRRRQGKSDPLDAVSAARAAQSGRARGAPKGRDGQVEAIRALMVARRSAVGERTRAINQARALVLTGPDELRERFARHTAAALVTGLASLRPRPGDVTGYPTRIALRELGRRAVFLDGQLERLDELSVPLVTARAPGLLALYGVGTNTAALLLIAAGDHPGRLRSEAAWAHLCGTAPIPASSGKTIRRRLNPGGDRQANHALWRIVFTRLGSDPATRAYVERRTAEGKSKAEIIRCLKRYVAREVYPHLRPPAG

SEQ ID NO: 494749 - protein, 404 aa, unidentified
MEVVLASCAGLDVHKKTVVACAITPGSRDIRTFGTMTDELRQLGAWLQERGISEVAMESSGVYWQPVFNVLEDMGLVLLVANAHHIKAVPGRKTDVKDAEWIAELLRHGLLRPSFIPERGQRELRELTRHRRSLIQERSQVRNRIQKLLEGVNLKLSSVISDVAGVSGRAILAALANGETDPEVLANLASGSLQHKHQELVRALHGAMGDHQRLLLQSLLRQLDFLDAEIAGLSEEVAGRTVPFEAAIERLDAVPGIGRRNAEDILAEIGTDMSRFASAAHLASWARLCPANHESAGKRKAVSTGHGNRWLRSSLTQAAQAAAHKKDSYFRAQYQRLSARRGKKRAAIALAHTLLVVIYQLLSRPQPYRDLGLLYFDKRRQQATINAAVRRIERLGYKVTIEAA

SEQ ID NO: 494750 - protein, 346 aa, unidentified
MLYVGLDLSRKRIDFHALTEGGELVERGAVPADRDGLARLVYRLGGHGREVQAVIESMNGARFVHDQLELAGFEVEIADAQRVKGLAPLACKTDRIDAWVLAELARRELVPAIWLPDPAVRAERERARFRLHLVRKRTALKNRIHATLIAHGHPCPVSDLFGTGGRRLLERLDLPEPWRGTLEASLRLIDILEVEIDACERELRRLGAEHRYVPLLMSCPGIAWVLGYTIASELGDVARFQSPHKLVGYTGLCPKVDQSGERDWRGPLKKNGPRYLRWALIEAAQHAGASSHYRALSQRKRAQYPGPRGSKIAAICVARKLAEAIWYMLTRNQPFAPAGATRPLTA

SEQ ID NO: 494751 - protein, 353 aa, unidentified
MLTIGVDFSKRTSVYSVWDATGHRLQRCKLDNEPQVMRQFVQALPAEPIQLAMEATRNWGLYYETVRGSVDHFYLAHPVKMKAITQSETKNDQHDADLIARLTQSGFLPTAHISSLGTRQLRSLRRFRTFCVHERTAVRNQVQTLIDRNVWPAQRPTSFKNPCSRRGLAWLTTVSLPERERFILTQCLATYAHVTHQITAMEREVERQAVDLPGIAYLRTVPGFHKSRVHLYTVLLEIDDIQRFHKARNLAHYAGLIPREHSSGDTHRTGRLVKQANKHLRTALLESVFGAMLADRSLRAYYQSVKDRRGSGPAIIATTRQLSYAVYHVLKDQTAYRAQSFPPATASGPLAEE

SEQ ID NO: 494752 - protein, 418 aa, unidentified
MSNPSLTPHASRFLAVDLHKDYVVVGGVNPRLETVLSPRRIELSRWQKWADTNLLPTDVLVIESTSNAWDFYDQVSPLVAKVVIANPRLVKLISAGRVKTDKIDTMALARLLAANLIPEVWVPPIVVRDARGLLAHRRRLVHNRTMVTNRLQSLLLRHNLPAPEGNPFSLANLPWWETLPVSPTEKLRIRQDLATLEHLSSQITELEAEVANLSTQAPWADQITFLIQIPGFSILLAMTILAAIGDVSRFPHPKKLVAYAGLGASVHDSGKTHRTGKITKTGRRELRWSLVEAAWSAVRYFPYWKFQFDRFARRMPETKAIVIIARKLLVSIWYVLSQRAADRQADPVRVAAKLMCWSWKLSDEQRNGLSSRQFIRYHLMKLNLGRELSTFSYGNMPRRIASEEEVLAVLAKKATAQA

SEQ ID NO: 494753 - protein, 348 aa, unidentified
MKYIGLDCHKQYDHATLINTETGEVKAKRLAHIEEEFREFIGDKADTKMVIESCWNWSRTYELAKDLVEEIILAHPLKVKAIASAKIKTDAIDSRTLAQLLMADLIPQAHLRKAENRVKQRIIRHRTFLVVMRTRVKNRIHDLVDSQLLSKEMLRSKPKRLFSKEGMRWLNSLEWAKAEDRKTVESDLRLVGYLNEEISASNKMVEKLYMGDRDAQLLSTIPGIGTTLAMLISTEIDGVGRFSSPSKLCSYAGLVPSTHSSGGKTYHGKITLEGNRWLRWALVEAVVPASYADTEIRTRLNTLRKIKNVNVAKTIMARWLLKVVYHVLKENRPYVPADPAAMQVRAAF

SEQ ID NO: 494754 - protein, 327 aa, unidentified
MSYFVGLDVSLDKTSICIVDNNGNIYLEGEAETDPNAIATFLQKNDLPLTLIGLEAGNLSSWLYTGLAECDLPVVCLETRHAKAALKAQNVKTDRNDARGLAQIVRTGWFKEVHIKSIASQKLRVLLNSRKLLLNKRLEIDGQIRGTLKVFGLKVGKVTVSSYEIRIHELIGGDTELEAYIYPLLAVRQSLLEQCHVLEKMVLKYVKHDEVCRRLMTIPGVGVLTALAFKTTIDNPLRFQKSKDVGAALGLTPRKYASGEIDYNGHITKCGDVIVRAHLYEAASVLLCRSKKQTPLRAWGMRIARRSLRGCGAEIGRAHASYVAGWN

SEQ ID NO: 494755 - protein, 408 aa, unidentified
MDVLFKRCAGLDVHLREVVACLRLMGRGKAKYEVRRFPTTTSGLLALADWLEEAGCTHVAMEATGAYWKPVWHILEGRFELVLANAAHIRAVPGRKSDVNDATWIADLLAYGLIRSSLVPPEPIAQLRDLTRTRKQLGREIVQHTQRIQKVLEDANVKLSSLISDVLGTSGRRILRALIDGESDPRRLAALGSERLKCSREELVEALRGRVTAHHRFLLAQHLRMVEDLERAVADFDARIEEHTAPFRAQLERLSAIPGISRTSAQVLLAEIGADMSRFPSAGHLLSWAGLCRRQDESAGKHRSTRLRKGAPWLKPVLVQCAWAAARKKNSYLQAQFLRLKSRRGPKKAAIAVAASMLTAAYYILRDEVDYRDLGADYFTRRDKARVAHRLAARIRDLGYEVELREAA

SEQ ID NO: 494756 - protein, 401 aa, unidentified
MKKTCGLDVHKDTVFCGIYNGKEHLEVEKFLTTTPAIRTLGEHLRGHAVRQVAIESTGTYWVPVWNILEEMGFELILVNPYLIKQMPGRKSDIKDAQWIATLLYKGLLRGSLVPCKEVRELRTYSRKYVKLQQRLTSVQQEMERMLEICGIRITSFVSNISSKSVLRIIRLITEGEKDTEVLLEKVHGRIINKHSKEKIRESLTGFITTQHRFILELALEEFEVLTKQSERCLAEMEKLCREHYSRELELLQTIPGVSLISVMIILAETGADMKAFENSSKFAGWTGLRPRNDESAGKYKSTATTKGNKYLRAVLVQVAWAASRTKDSYFKEKFTRLSLRKPRKKALVAISRKIAVVIWNVLHFDQAYDPCKVTVLKPGDVKAKIHYHQREAERLEKLIRI

SEQ ID NO: 494757 - protein, 315 aa, unidentified
MTSAQVFVGMDISKAQLDLVLRPEGQFSAPNNEAGFVQVLERLSAVHPTLVVLEATGGLEIPLTGVLAAAGVPVVVVNPRQGRDFAKATGRLAKTDALDAQTLAHFAEVLQPELRPLPDEQTQALAAILARRRQLVEMLTAEKNRLGTARKPVRKSLRTPIAWLERELSHTDRGLAHAIRESPVWREKEELLRSTPGVGPVVTTTLLATLPELGTLTGKQSAALVGVAPLNRDSGTWRGTRTVWGGRAQIRAALYMAALVAARFNPVIRAFYQRLRAAGKAKKVVLTACMRKLLIILNAMLKHRTAWRAELVHCA

SEQ ID NO: 494758 - protein, 420 aa, unidentified
MSKILYVGIDAHQKENFCCLLDQEGNKVINIFSVANNLDGAKELEDKIDLVMKERCLTELKAATEAAAFLDLHIVDYLASSKLLSKYTPSIYQFNPKITAGFKKAYPDKDKTDAIDAFVVADRLRFGRLPEPYEDSLPYFPLKRLTRYRYHLVSNISREKNYFLTHLFLKYSSFSDVKPFSNVFGKTGIAIITEFFSSDELASMDIEELVEFLIKEGKNRFKDPEAVAQKVKQVARESYRIRPTLANSVNLILSSTLENIHALIVSLKEINEAIANEFKAFPNTLESVKGLGPVYSAGIFAEIGNIKRFSSHAKLAKFAGLTWRKSQSGGFEAEETRMTKTGNEYLRYYFIEAANSLRVHNEEYRLYYQSKYKEVPKHQHKRALALTARKLVRLVFALLTKNRLYQEKIEFSKNGVNSSL

SEQ ID NO: 494759 - protein, 348 aa, unidentified
MPNYNKPHQFYAGVDLHARSMFVHVLSAKGKTVFERDLPAEPDAFLDAVKPFRKNLVVGCECMFAWYWLADLCEDKRIPFVLGHALAMKHIHGGKAKSDKIDAGKLAAMLKGGMFPLAYVYPRAKRQTRDLLRRRSFFVRQRSQLITHIVNTNSQFNRPPFSKKLSYAANRSEEIATRFTDPSTQLSIHADLNLIDAYDAQIATVERHLLKSAKVDEPVTFGFLRTIPGIGPILGLILLYEIDRIERFPEAGNFLSYSRLVRCAHESAGKVKGFGGKKIGNAHLKWAFSEAACLMLRTCPAVKAWMQRQAKKRGKRKALSVLEAKIGRTVYHLWRKQQAFDVKKFLHS

SEQ ID NO: 494760 - protein, 316 aa, unidentified
MTEDGDVLETVKVHNDPLAFLQAVTKDARELEVALEATYGWYWAADLLQAEGANVHLVHPLGLHWDSRRVKNDERDAAELANRLRRDDLPESYIAPPEFRELRELVRYRAKLTALRTSAKAQIHAVMAKEGFLPTFDDMFGPGGQKALDEMAFEGVYALRVDSLRKLLENYKDELKVVEGHLAQQLKGDAGYLAIQAIKGVGPIMAGIFHAEIGDATRFSSARHLCSWAGLTPSHHESDTKVRRGHITRQGNHLVRWAAIEAVARYHGGAPIAPTYARIAARRGNMIARVAAARKLLSLVYYGLRDGEIRCLKEAS

SEQ ID NO: 494761 - protein, 389 aa, unidentified
MRKHYASVACGGMDVHYKSSHVTFRDADGRVVAREQLDHTNRAGLREQLVRWPKGIPIVLEASFGWGWLSDLLEEVGLDPQLSNCYKVEGMRKARGWVKTNKKDADLLSLLPAETPSDPEPWWQVWRAPADVRDRREWMRYRADMVGLTTGTKNRIHAVFHRHGIFFEEGTDLFGGLGRRFLDRLSQDGRHAGGVLPDGARQALRGLVNLHTYLRGQLLEVAKTLHGQLERDELAKRLDGIPGIGLILSHTLRSEIGDIGRFKNHRKLAAYACLAPRSDDTGEAHPERAPLGRHLGGRGNRTLKWTFIEAAHGAVKRGGKWRAMFDRATDGGRKNRGRGYIKVARELVKVVYIVWSRNVAYCEAPPQRPGNGRQTRRSRKNSRPGTGQP

SEQ ID NO: 494762 - protein, 347 aa, unidentified
MNSVGIDLHRSRSHVAVLADDGTELLSRRIVNDPAIFLELLAEIDGESKIALEATYGWEWLADVLQDAGYELHLAHPLRTKAIASARVKTDAVDARTLAHLLRTELLPEAYIAPRELRELRDLLRHRVALTRMRSALKNRVGAILAKQGIQRPFSDMFGPAAMRFLAEVELRESPRRRLDSTLALIADFTREIDLTTREIEARAKDDAYVDVLCQIRGVGRYIAMLVIAEVGDVTRFRTARQLCSWAGMTPTVRSSDMRTRLGHISRQGSPALRWALVEAAQHASHGGGPLRQAFERISKRRGRQVAKVAVARKILTLCFYGLRDGEIRCLAPRAGARTLRTPAVTS

SEQ ID NO: 494763 - protein, 383 aa, unidentified
MKNNNSKNAQKNVVVKEQGEEKLFLMRMTQRQPMKGLTVGLDLGDRRSSWCAVGADGEVIARGEVVSEKQPMELFFSRIAVSRVAMEVGTHSPWVSRLVEKEGHEVIVANAHRVKLISASSNKNDRRDAEFLARLARADLKLLAPIRHRGEATQGDLVAVRVRAQLVEMRTEAINSVRGLVKSFGQRLAKCDADDLGKEHAQHLEPAIRGHMERMLEVIEGLSKQIKECDKELKKISEERYQWETAQLQQVGGVGVVTALTFVLTLDDATRFEKSRDVGCFVGLRPKSKQSGASEPEMRISKEGDVYLRKLLVQCAQHILGKRGEDTDLKRWGLQIAAKGKKKAKKRAVVAVARKLAVLLHRLWVSGERYEPLRNRGQASKAA

SEQ ID NO: 494764 - protein, 417 aa, unidentified
MRIVRPICCGADIHKDLIVATIAATNQDGITEYIQSSFSSQNFDLVRLKAWLIEHHCFEIAMESTGKYWIPVFNVLEGEIKVFVVHPKYTKAIKGKKTDKKDSKWNADLFKHDLLKFSFIPPKEIRELRELSRYRIKLIAMRSSERNRYQNSMTISNIGLASILSDPFGKSSRAVMKEVIRSSSVTEERISKLLERNAKKKVKEVLQSLVGSHIESDQRLKMNIASQHMDQIDSHVRRLETEMAIRCIPYATLINLLLDIPGISYLSAMTIIAEIGTDMSVFETSKQLSCWAGLAPANNESANKKKSVRISKAGSYLKPLLVQCALAAINSKSNPYYRIKYNRIKKRRGHKKAIIAIARMILVNIYHILSTGEVYSPCDMEQIINPKPVKKVMTIQNAIEFLQSQGFDTSKLISSSS

SEQ ID NO: 494765 - protein, 364 aa, unidentified
MKTLHYVGMDVHKETIDVVIFQEDEREPFLERTIRNQEGVIRKLFKKLMEGGSVIACYEAGCMGFGLQRMLEEMGVASIIASPGRVPRRPTDRIKTDRRDSRRLAEQLRAKTLEAIHIPSRDDEAVRDYLRAREDVRLELVKTKQRLQKFLLRHGYVYESTRYWTGRHDRWLRGLEFDKGMLKEVFEEYYFMIGTLTEKLQLMDRRIEEIALSGPYAVRVGRLRSFKGIDYLTALSIICEVGDFRRFSHAETFMAFLGLVPREASSGEKRRQGGITKSGNTHLRKLLIESSWHYRYKSAPSKRLTERRKGQPAEIIAYADRAMRRLQWKFFRLIMKGKTKQAAVTAVARELAGFVWGMMVGQTA

SEQ ID NO: 494766 - protein, 415 aa, unidentified
MEDLGLRALYRRVAGIDVHRMLHVVTVLLEQPDGSMQRQTRQFGGFWRDCRELAAWLAELRIELVVLESTGIYWKSVYAHLENAGVPARVVNAHRVKHVPGRKTDTADSEWLAVLARFGLVKASFIPPKDLREPRLVSRYRRKLNAMRASEINRLHKILDDGGIKLGGVVSDIDGVSARAMVKALIAGQPMEQMLSLARGRLKQKREELSASLDGDLSARHLFVLGHIEAHIETLQRELAEIDRYMFNALQPYAWAHALLQTIPGIDEIAAALILIEIGDGMARFGRPQSLACWAALSPGNDESAGKRKSGRIAHGNSVIRCILCECANAARMTKSTLAAKYRSLMVRKSHKKAIIAVAHKMIRLIYLMLSRRQPYIDQAIDYTAMSAKKNAPRWIKQLKSIGRWPSPTPAATSA

SEQ ID NO: 494767 - protein, 372 aa, unidentified
MASIIYVGMDVHTTNFTFCCYTADSDRGFAVAQTEPDYRQVIKYMERVQKQRGEECKFVCGYEAGCLGYSLYHQLTRCGVDCVILAPSTMHQEKGKRIKTDRRDAENIARCLAFSLYSPVYVPTTEDDAVKEYIRMRDDIKADLKRVKQQIIAFTTRHGFAFDGKSYWTQKHLKWLETLVFEHPLYKETLQEYLILYYMLDEKVAVYDTRIGEMSHLEHYEENVQKLCCFRGVAAHTALSLLVEVGDFQRFRSAKHFAAYLGLVPGEHSSSDKQIRTSITKAGNTHLRRLLVEAAQSYNRGAIGKKSAALKARQGGNPAEVIAYADKANERMQRKYYRITFKSRHNIAKTAIARELACFVWGMMTGNISNAA

SEQ ID NO: 494768 - protein, 467 aa, unidentified
MSKKRNQRHVQGPRGEAFLRLTRGVPREQVVCVSIDVHKYYHKVMLLNGYQEVLEPSFEIDVFRSGFQRLCDVIDRVVAETEAKVLFIGMEPTGHYFENLAQHLRSRYPHVRLVNTFAVSQNRGQKMNPKLKTDEIDLGSIGDLVLRNECFPYQPLSGDHLHLQNGVRFRRGKVKARTALRNQIIGHLDRIFPGLVRPNKDAQGDHPALFAKFWENQTAQHLIRLCPDPRKLAHMQPAELVEMFHAHHWRMGEVTATRIIQFAQQVLLPSEEMINARLPYLQYDLMILEALDGVIAEAEKQIEHYLAQTEGQILSHIKGVGILHAASYVAGIGNPSHYEHAGQTFKRSGLISGRNDSGLHQRAGAGHRVTKVGDPYLRSALIQITRSLCHWQPYFGQYYAYLIERGKHPGVAMVATARKANGVLFALMRDQSEFDPRDEQGRPILSRTSVRDPGKETPGRGSCKAKA

SEQ ID NO: 494769 - protein, 368 aa, unidentified
MHESITAYVGLDVHKDSIAVAVAGNDREVPHFVGTVRPDVKQVRKALSRYGSPSSLQVVYEAGPCGYTLARQLLADGFGCQVIAASRITRSPTERIKTDRRDALTLARLARSGDLIAVRIPDERDEAVRDLSRARQDAVRACLKARQQLKAFLLRHGRPLRGSKPWSATGELYLSKISFAHPAQNIAFADYRQAVLDTHARVERLTEALRAQCENWRMQPLVSALACLRGVDFLTALILVAEIGDFTRFAHPKELMGYLGLVPSEYSTGERHHRGDITKTGNAHARRVLVEAAWNYRFPARLSHKITRRQEGQSKPVRDIAWKAQLRLGHRYRRLQSRKLHQNKIIIAIARELSGFLWDIARQVPLAA

SEQ ID NO: 494770 - protein, 388 aa, unidentified
MSPSDHPTHDQIAIRTDLAAIFVSLELSRRVWLITSLSPGKGQTMSRHSVKAGELAGLLTRLADLKAKARARTGVEFPITLIMEAGLDGFWLDRVLGEEGIESHVVDAASIAVPRRKRRAKSDKIDGQALLRALMAYKRGEPRVCSMVRPPSPEAEDRRRITRERRTLVTERTLHINRIKGLLVAQGITDYEPARSDRRRALEGLETGDGRPLEEHLKLQIGRELDRLELLMTQIKAVEAERDALLAGLPQDRPAPGARVMKLKGIGPEFGAVLGGEAFWRDFDNRRQLAAYSGLAATPWKSGSIDREQGLSKAGNPRLRTALIQMAWLWLKHQPRSQLSVWFHERVGLDRGRMRKVMIVALARKLLIALWRFETQGEIPQGAVLKAA

SEQ ID NO: 494771 - protein, 355 aa, unidentified
MNSIKYIGMDVHTATISIAVLDDAGKLIMDSVIETKASTVLQFIHGLRGDLYVTFEEGTWAAWLYDLLKPHVTNIVVCDPRRNALLKEGSKSDRIDARKLAELLRANLLRPVYHGENGLRALKELARAYLTIGKDLTRVMNRVKAIYRSWSIPCGGKSVYNPRHREEWLRRITQASVRRRAELYYEQLDALVLLRKQTRKELLAEGKKHQAWTLLGSIPALGPIRAAVLMAIIQTPHRFRTKRVLWKYSGLGVVTHTSADHRYVQGQLERSRKPALVRGLDPVHNHDLKNVIKGAAIQASTGKGPFRDFYQALVAKGMRPEMARLTVARKIAAITLTVWKKGVAFDAKYLKPQTA

SEQ ID NO: 494772 - protein, 449 aa, unidentified
MEVTYTHCAGLDIHKKSVVACCITPGERGEKRIEMRTFGTMTADLLALSDWLLSKGVTHVAMESTGEFWKPVYNILEGNFELLVVNARHIQNVPGRKTDVKDAEWIADLLRHGLLRGSFIPPQAQRDLRDLTRQRTNLVQDRARVVNRLQKVCEWSNIKLSAVATDITGVSARAMLEAILAGNTTPAALAELARGRLRTKRNELERALTGVVRAPHRFLLAQHLMQIDFLDEQIALLDEQIALHMAQTDTNNAQQPPASPDLPTDTPEDTTGEAPSSAAAPPGWEEAVALLDTIPGVNRRTAEVLLAEIGADMSRFPSAAHLASWAKVAPGNHESAGKRFSGATGHGNRWLRTALVQAAWAAIKVRRSYLAAFYHRLAGRRGAKRAIFAVAHRILTAIYHMLSRREPYRELGATYLDERHKSNLIKRTVRRLEQLGYKVNVEPVQPAVV

SEQ ID NO: 494773 - protein, 339 aa, unidentified
MEQVSTIGLDLAKKLLQVHGVDAAGAVVVRRTLRRGQVLAYFAKLPRCLVGMEACATAHYWARELIKLGHDVRLIPPAYAKAYVRRSKNDAADAAAICEAVSRPSMRFVAVKSEAQQAAAGLHKLRALLIKQRTMVINQLRGLMAEFGIVAARGPGHVGELAAVLADPTAAPVPAPLAEALAPMAALWRDLERRIATLDKQILDWGRTNPTFGHLITIPGFGPILASAMAAIVVDPGTLRSGRDFAASLGLVPRQDGTGGKVKLGPISKRGNGYLRALLVNGAMAVLASRRARQDAWLGRLLATKARKVAACALANKMARIAWAVMMRQEDFRARPQAA

SEQ ID NO: 494774 - protein, 376 aa, unidentified
MHSMTQDTPLVVGGVDAHADAHHVAALDTRGALLATSSFPTTTPGYAQALAWLSSYGTIDAIAVESTGSYAAAFVRYLREHAIDVVEVNQPHAHTRRRIGKSDPIDAEMAARMLLAGKATAIPKQTDGIVESIRMLRVARNSAVKARTATMIQVRDLIITAPQPLRDQLTKRKTLRGKATICSRFRLSDRDLARPSQASKFALRSLAQRLQALDHEIADLDRELAQLVAIAAPRTTQLLGISTGHAGQLLVTAGENIERVKSESAFAALCGASPIPASSGKTTRHRLNPGGDRQANRALHLIAVCRLRYCQRTQAYAARRTREGKSQREIMRCLKRYIAREVYSALRADLTPQPQPRQSTTILCGSPGFGINRKRT

SEQ ID NO: 494775 - protein, 370 aa, unidentified
MRIIGCDLHARQQTLAMLDTETGEVVNLTLMHEGNNVREFYSKLPRPVLVGIEATGSMHWFLNLMEELGIECRVGHPAQIRAAEPRKQKHDRRDADLILKLLAQNRFPAIWLPSKELLDLRALLLHRHQWVRMRVRMQNALQAIALANGLRRGPALWSYDGQAKIAFLPLLPHAAYRRSALQAMYKNMQSEIENLTRRVAEQAGNRCGARLLMTHPGVGPVTALATEVFLGDPQRFTDSKTLASYVGIIPREYSSGEHQRLGGVTKQGSPLLRFLWGEAGAHAARRDPELKRFYRRKLVHKGLGKARVAVARKLGIRLWIMLRDEIDYQEFCRRGQLQQKTVRPVVGMPETGNGAKSHRPSDEATRLPES

SEQ ID NO: 494776 - protein, 348 aa, unidentified
MTIVAEKYAYVIGVDTHSKSHTYAITDTRTGACTGCKTFPANDAGIKRAIGWIRQLSQDPILAAVEGTGSYGSALTTALTAESIPVTEAIPPKKKSRRGKGKSDPIDARAAATSVLGTEVERLIQPRCDGPRQALAVLLASRNRIDSHKTAERNALNALVRQIPLGLDTCKALTNAQIKQISAWRPRPGDTLEQRIAREEAVDLARSILTAQVRLKQNEAQLRTINEEIAPGFQAHRGLGPVSAAIILAAYSHLGRIRNEAAFAALAGVSPLQASSGNTIRHRLNRRGDRQLNRAMNIIAKSRMKCDPATKAFVERRTTEGKSKREITRVLKRYIARSIFRLLQQQFS

SEQ ID NO: 494777 - protein, 512 aa, unidentified
MQGSRTVASSTPVRISVPDRGPRATRAVLMVLKGGGDDVVTKAPEVILDEANEQIVERVCAIDVAKDSGKVCVRVPAESGSGRRVSKVWDVPARTKAVIELGDHLACQGIEKVTLESTSDYWRIWFYLLEARGLDVQLVNARDVKNVPGRPKTDKLDSMWLAKLTEKGLLRPSFVPPRQIRVLRDYTRLRVDLTAERTRHWQRLEKLLEDALIKITSVASRIDLLSVREMIEALIGGQRNPRVLAGMARGRMRLKHADLVEALTGQFDDHHAELARMLLDQIDALTVQIDTLTERIDVVLADIPVPAPQPEPDPDDHGPGTSDDAEVTAVIRPSHGGAPRPRTAARAVTALDLVDILDEIPGVGRHNAHEIIAEIGLEMTRFPTAGHLVSWAKLCPRTIQSGAKSSAGKTGKGNRYLRAVLGDAAAGAAKTQTFLGDRYRRLIKRRGKLKALVAVARSILVIIWNLLANPGMRYHDLGVDFHTKRMDTERRTRNHIRQLEALGYTVTLTAAA

SEQ ID NO: 494778 - protein, 339 aa, unidentified
MKNIKYYIGLDVHKAKTTYAIRDKNGNIIQEGITLTSYSELFKSIETYLKSSIIGLESSTSYYTLYKGFLKNGYNIKVANTIQLRQLITKNDKLDARRLSEMLRLGTFPTSYIPNEKIQHLRSLLQVRHSLIEEKTRCNNRIQALLDRNGIVMPNQEAFGKKWRQKLLQYIGSGEVSLELRYEYDHFKYLEEKSEHLGLEISGYTQKHWKKEYRLIQSITGFGPVLSCYVIAHILPINRFSSNRKLRRYAGVVPTTHESGGKKSKGHIPKTSSRKHLRWALIQAANSAGRTNTKLGYYYRKKKKQKNNASIAHVAVASSMIDIIYKVLTTKKPYNPKNC

SEQ ID NO: 494779 - protein, 367 aa, unidentified
MEAQVKKFDFTDQNIYVGFDAHLNSWKVTVMAEDIVYKTFTQPPKPDVLYNYLKKNFPGGNYHSAYEAGFCGYWIHDKLLSFGIKSIVVNPADIPTTDKERVQKEDKRDSRKIARSLSTGTLMPIYVPSIQTQRDRSLLRTRAMLVKDLARYKNRIKSFLYFYGISIDDSFSNPQSHWSNRFMSWLESIEIDGGSGEETLQILISECKNLRTSILEVTRQIRKLSQTSTYNNRVILLKSVPGIGLLTAMIILTELESISRFNNLDKMCGYIGLIPSTKSSGEKERTGDITPRGHSVLRTAIIESAWTAIRNDPSLMKSYLSYCKRMESNKAIIKIAKKLLSRIRFVLNNNKPYVCLIENNNISIKTR

SEQ ID NO: 494780 - protein, 342 aa, unidentified
MEQSIRCGIDIAKLVFQIHCVNAKSGETVMVKKLARHDMLRFFANKPPMLIGIEACGGAHYWARELTKLGHTVKLMSPQYVAPYRRGGKNDANDAEAICEAVARPNMRFVAVKSESQQAVLVMHRMRDQLIHERTALMNQIRSYLHEFGIVIAQGRAPLAKIFPIIAEDCQLPLLLQQSIAELADRLADLERRIQTLDQRISAWSKQDNAAKALLTLCGVGPVTASAAVATAGNVSVFKNGREFAAWLGLVPKQNSSGGKSKLGAITKRGDRYLRTLLVQGARVVMIAAQKAKLTQKDNPMFDWIYKLLERRPSNVVAVAIAAKQARMLWAIMKKQQNMVTA

SEQ ID NO: 494781 - protein, 333 aa, unidentified
MDTGSGEFEERRLQHRDEAERFYRELATQKVAVRVGMEASGHARWLEHLLKELQFELWIGDAAEIQTKRVRKQKTDRQDAQLILKLLLEDRFPRIWVASAENRDLRQLLWHRHRMVQARTRIMNQLQAVALNEGLRCKKKLWRERGRQQLESILLLPWASRRRSDLLQLLDQLNPMIAELTRAIEREADNCAAARRLMTHPGVGALTALAFVLIIGEPERFHCGKQVASYLGLVPLEKSSGKQRRLGHITKQGSSMSRFLLIEAAQATVRSDPRWRSRYFHLTMRRGRKTAKVAMARRLAVELYWMWRKGWNYEQLISFGSHAGQPGNPYGVQ

SEQ ID NO: 494782 - protein, 392 aa, unidentified
MVVSVGIDVSKDKHDCFIVSSEGEVLADVFTIPNTMDGFAYLLQRIRECTTLQDKIKVGLEATGHYSYNLLGFLLDNGLATYVLNPLRTNLYRKSLSLRKTKTDRVDARTIASMLLSDAGLKPYTDTAYHNEELKSLTRYRFDKVKERAKLKTSISRLVCILFPELEKLVSTLHMASVYALLEECPGAKQIAAAHLTRLKTLLETASKGHYKRDIALEIRDAARSSVGSRMPAKSLELQHTIRLIRELNSEIAEIEEQIQAIMDELNSPIITIPGIGFRMAAMIFAEVGDFARFDSPDKLLAYAGMSPSTYQSGQLKNCYPHMEKRGSRYLRYALYNATKYVCHWDPTFAAYLAKKRAEGKHYNVALSHATKKLVRLIFSIEKSGQPYCAAA

SEQ ID NO: 494783 - protein, 460 aa, unidentified
MAHPMVQVKPSRRQRDMSPVHPNAAAIDIGARMHVAAVGPDRDPEPVRTFNTFTDDLHRLADWFEQCGVKTVVMESTGVYWIPIYEILEQRGFAVSLVNARDAKHVPGRKTDVSDAQWLQRLHEYGLLRSSFRPQGEIATLRAYLRQRERLLDNAAAHIQHMQKALTQMNLQLHHVVSDITGVTGMRIIRAIVNGERDPDVLASYRDRGCHASVETIRQALIGNDREEHIFALSQALELYDTYQAKVVECDKRIAAVLKRLEASPTPADPLPAARHKGRSSNPLTFDVREALHAVIGIDLTQIHGLGPYLALKLVGECGTDLSAWPSAKHFTSWLGLAPHNKISGGKVLSSRTRRSGNRAASLLRLAAVTVGRTDTALGAFYRRLSARVGKAKAVTATARKIAVLFYNALRHGMDYADPGASYYEERYQQRVLANLQRRAKSLGYVLQQADTAPAAVGVS

SEQ ID NO: 494784 - protein, 341 aa, unidentified
MGARNYFVGVDLHRNQFTYCVRYSNGEEKVGKEPIEDLERFARRLGNHASVAVEATGNTWMFCQVLKQYAGRLVVVNPNQFKVISHSVKKTDKNDAKVLAEFLEKDLLPEVRMKNELQAKVASLTQTREKLVQLRTVLKNKINNLFASRFINLKREELSSEKGLLKVLSYHFDAISDVELRVMVDQIRSLNRSIEELDKAIEDSGSKMDGFDNLTSVKGIGAKGASTLLSVIGNVNDFRSAKQLAAYIGIVPRVSDSNETVHHGRITKLGSKIARTTLVQCSLIAKRYNPYLHAFHERIKARRGGAKANIALARKFLEIIYRILKYKLVFEDFTTFKLKTT

SEQ ID NO: 494785 - protein, 378 aa, unidentified
MGKYTTYVGMDVHARSIDAQAMNIETGEHFRKTFTGCPSAADVAEWLGTLPQPVYSAYESGCTGFWMARELTVLGFACDVIAVSTLPKSTKDKQHKCDKLDAKAILREVANPASDYTTVWIPDEKTEAERDLVRAYRAAVDAAKHAKQRLLAFLQRHGRVWCEKTKAGRAKKAWTREFDAWLNNIAFQEISAEKTFEAYRRQVRDACREVKELKALVRELAGSSEHKPYIDALTLLKGIEVENAMLARVEFGLFSRFDTGRKTSCWLGTIPSNGPSGPVASHGHITKAGNKHLRRALIEGYSGIAAWKSGRKAVPEGIGVSGAVQAIAAKANARLYERYTHLRTCGANANKAKVAVVNELVRWIWVIGCAIEKEQANA

SEQ ID NO: 494786 - protein, 375 aa, unidentified
MKKNVRFLGLDVHAETIVVAIAEPDGEVRSLGTIANRAESIRKMVKKLGPVEQLKACYEAGPTGYILYWQLAELGVACEVIAPTLVPMKAGDRVKTDRRDAERLARSYRSGDLTAVWVPDEGSEALRDLVRAREAAKQDQLRARHRLSKFLLRAGQRPAAGVKAWTQLYMAWVRQLRFAQVARESTRLDYLHEVEHMAERVKRLEQAIAEAVKLASPAVQEVVKGLQALRGIAQISAVTIAAELGNISRFEGARQLMGYSGAVPSENSSGQRMKRGSITKTGNAHLRRIIVEAAWSYRLRPSVGPALRKRQEGVPEEIKEIAWKAQVRLSKRYARLAAAGKDQRKIITAVGRELLGFVWAIGIKAEQAAKQQMAA

SEQ ID NO: 494787 - protein, 376 aa, unidentified
MNEKLRFLGLDVPAETIAVAVAEPNGEVRSLGMIANREDSIRKFIRKLGSPEHLRACYEAGPTGFVLYWQLTQLGVKCDVVAPSLVPKKPGDRVKTDRRDALKLARSHRSDDLTAVWVPDEGSEALRDLVRAREAAKQDQLRAKHRLTKFLLRTGQRPPLGVKAWTEKYVEWVQQVRYTHPAQEATLLDCLNEVQHMEERVKRLEQSIVEVIQLAPAPMQEVVRGLQALRGIAHISAVTIVVELGNITSRFESARDLMGYSGAFPSEDSTGKRIRRGGITKSGNAHLRRIVVESAWSYRHRPAIGARLRRRQEGLPAEITEIAWKAQNRLHKRYMTLMARGKEQRKTMTAIARELLGFIWAIGIKAEAACKQQMAA

SEQ ID NO: 494788 - protein, 347 aa, unidentified
MSEISIIGLDLAKQVFQIHGADPAGRCVLRKQLKRREVLQFFAKLGPCTVAMEACGTAHYWAREIGKLGHCTRLIPPAYVKPYVKRGKNDAIDAEAICEAAGRPTMRFVPVKPMENQAIVMLHRSRDLVIKNRTMLVNALRAHLAEFGFVAGKGIWKLPDLVKIVSQAPAEALPELVRATLSGLLDIIAAISSQLDAIEKRLREWHKKDARSKRLDTIPGIGLIAATACRALVPDPKLFRNGRHFAAWIGIVPKLGGTGGKTRLGRISKAGDRYLRRLFVLGATSLLRSLENKSTRLALWVQALLARRTKRTVTVALANKLARIAWAVMTRDEAYKPLAAAQSAGRA

SEQ ID NO: 494789 - protein, 313 aa, unidentified
MTEHTIGIDISKSHLDAFRLEDQAVKRFENNPRGFRALIKWLGTTPVARVVFEPTGPYHRAFEKAVSGKFPLVKVNPLQARRFAEACGTRAKTDAVDARTLARLGAALALEPDEPASEKLLELRDLQIARTALVKERTRLRNRSQVQSNAVLKRQTKTRLALVERQIAELDAEIARRIAEDQSTARKRDILCSIPGLGSIATALVLTFLPEIGTLGRKQAGSLAGLVPHSRESGQWKGKSFISGGRKSLRDALYMPALVAMRFNPDLKAKYNALREAGKPAKVAIVAIMRKLLETANALVKADRLWDEKLACA

SEQ ID NO: 494790 - protein, 335 aa, unidentified
MTDTTTLAATTLAATTLAATSTLTAGIDVSKATLDLAIHGQKNITHVPNTPAGWTLLASQLATAGVGRVGLEATGGYERGVMEHLRAQGLAVTRLQPFQVKAFGMLHLRRAKTDRIDAALIAACTHVLGEPGTMAPDGRLEALADHLAFIEQVEEDIARFKTRLEHVTDKRLRRAVEANIKRETTRRLAEIKRLLAELRRHADLSRRLDLALSVPSVAERTAPALIIRMPELGQVSREQAAALAGLAPFTRQSGKWQGQTHIGGGRVRLRRSLYAAAFPGAHHWNKALMDMHARLRARGMAHTSIIVACARKLLIQVNAVVARGTPWEARTATPA

SEQ ID NO: 494791 - protein, 362 aa, unidentified
MNYVGVDIHKKYSVLCAVDERGRKLREARVEGNAPFGFAQFFSGLGGPSKAVVEACWNWSLIYDELEELEGIEEVVLAHPYKTRLIADAQIKTDRLDAYALSTLLRGNLVARAHVPRRETRMRKNLLRQRLYWARLRTMLRNRIHALLDRQRGLELPQCSDIFGVRGLSFLRRLELPETDAALLREQLALHDLIAQQMKAQEKRIGLEFGSEAMHQQLLSVPGIGPTLAAVIACEVDSIERFSSAEKLCAYAGVVPTTHSSGGKTRHGQLLPFCNKWLRWALIEASWVAIGCSPYFGALYKQHRARGKKANSAVLIVARRMCRIIWQLLHEKRDFEKRPLRPNFNFPGCSVVRLTAATASRP

SEQ ID NO: 494792 - protein, 428 aa, unidentified
MSNQELIRRKQYCQIVKEITGSDQYMVVGIDVGKDNHHAFMGTATGKSLFRKLIFENNLEGFSKLLKTSDLIKTRNNLSKVVYGLEPTGNYHKPLARHLIRCNSNVVLVSGEAVNKNRSLLDGRWDKHDTKCAANIADLVSRGRCLYYDSPSPGIIELRSLLSLRKRLKKEDHSFRMRIRNNLLAQYFPELDRFYSACESESLAIVKWCLEPDQIAGMAFEPFFQMVTRTRRGSAQLLRLRKIHQQAIESVGCPMGSAAAFEAQLLVDKLEQVRQQLKDTEAAIKDVALEFDEYRYLLTIPGFGLYISSSVIAAIANPFRFKNRKQLLRMAGYDLCAKRSGKTSDNAVPVISKKGNSNLRYALFQAAKIASARTEIFRNYFAEMLRGRERERGIITKMRVKLAAKMLIIAWTLMKKREPFDPAYLTIE

SEQ ID NO: 494793 - protein, 342 aa, unidentified
MEEISTVGLDLAKHVFQAHGADSSGAVVVRKRLRRDQVLTFFAALPPCTVAMEACAGGHYWGREIAKLGHTVKLIAPAYVKPFVKRQKNDASDAEAICEAAQRPTMRFVAVKSEEAQASAMVFRTRDLLVRQRTQAINALRGHLAEFGAVVAQGPVHVPKLIAIVEDPASELPETARVILALLVDQLRALDERVAQLDRDIARRAKEDTIARRLMTIPGVGPVTATALAALAPPVETFRRGRDFAAWLGLTPLQRSTGGKQKLGATSKMGERTLRRLLVIGASAVVRHAARRGSPSGSWLARMLQRKPRMLVTVALANKMARIIWALLSKGGVYKAPVVLAA

SEQ ID NO: 494794 - protein, 391 aa, unidentified
MTKPKTKTVNDFSRCLDPLDMDATLIAVIEMSQSSWLVAGIVPGVEREPLKKLAIDEHALLSLLNRWRAEAEKQGHRITRIAVAFEAGHDGFWLARWLAAQGVEAHVIHASSVAVTREHRRAKTDRLDTELLKRAFLGWLRGERGHCKMVAVPTLAQEDAKRPSRERETLVGEASRIITRVKAAFVRLGIRGFNPKLKAAATRLETLRTPEDEPIPPNTLAALKRDLERHQIVKKQIREIEQTRLDVLKQAPEKGPHAMVLLLARVIGVGVETADMLVQEVLSRTMRDRRAVGRYAGLTGSPDESGAKRRDKGLARSGNARVRHGMIQLAWRFLLFQKDSALAQWYRQRTADAPSTRKTLIVALARKLLIALWRLAREGVVPEGVRMRPAA

SEQ ID NO: 494795 - protein, 330 aa, unidentified
MKTILVGIDVASKTLAIALEHPGRSSRVFEVPNTPGGHRRLIRRITARKIPARVCMEATGVYGFELAWTLHRTPGIEVQVANPRAVRDFARAWLQRSKTDAIDAQVLLEFARRMPFAPWRPPSLRILEIRAITRRIEVLTRARTREKNRLHMVDRCREISAVVRQDILQHIEQLNRSLRHLQQVASSLVRKDPVLARRFEFLQSVRGIAETSALHILAELATLPEDMSPRQWVAHAGLDPRQYESGSSVSRPARISRVGNSHLRRDLFFPAMVSARREPHVRAYYEHLLARGKKPLQANVAVMRKLLHAIHGMFSSQSTFRGEKFYAISA

SEQ ID NO: 494796 - protein, 332 aa, unidentified
MPELKVRFTRQGSTKMSKTNTPTAGIDTSKAKLDVAIHGRAGCSQVENNPSGWRRLVAELTEAGVARVGIEATGGYERGVVRHLREAGLVALILQPTQVKAVARLHLRRAKNDKIDAMLIAACAAAIEEPGIAPDQRLAVLADQLTFIEQIEEDMARFKIRLEHVDEPRLRRMVLADIARLKVRRAAEMLRLATAIRSHDDLARRLELVLSVPGIGERTALALIIRMPELGRVSREEAAALAGLAPFDRDSGIHKGQRHIAGGRSRLRRSLFAAALPAAFRWNKALIGFYERLVARGKPHKAALIACARKLLVYANTVVHRGTPWLDQTAAL

SEQ ID NO: 494797 - protein, 456 aa, unidentified
MKIPQSTIRLLTGRLVKILLYREVSTMKSNTQNAKIEAITEKTLVLGIDVGSETHYARAFDYRGIEYSKKPFKFSNTEAGFVTFKEWILDLKDRHEKEKVVPGMEPTGHYWFNLGKFLQDNEMKPVLVNPHHVKKSKELDDNNPTKNDRKDPKVIAGLVREGRYMIPYLPDGVYADLRTASNIRFQLQAELTRIQNRISRWFNIYFPEYKTVYGKPDAKSGMLILKAAPLPEDILTLGIDGVNQIWRDAKLRAVGKARAKTLIEAAGHSVGSKEGAVSARMEIRMLLEDYESRNMRLQEVMVLIEELVKGIPMAEKLLEIKGVGIRTVSGFLAEVGDISRFNNPKELQKLAGLALVENSSGKHKGGTTISRRGRKRLRYLLFEAAMSLVAKNPEFRELHNYYTTRRLNPLKKMQSLMAIAAKLIRVFYAMLTKGVDYDPKKMVSDIRRPEAYLQAA

SEQ ID NO: 494798 - protein, 420 aa, unidentified
MNKVTSLSRKVKGQSKVSVLSKASSVVGIDIGKENLSCALMDIKETMKCRFSVEASLAGYKALLARVRTETRGKVVFALEPTGHYWMVLGQFFEDHNQAYVLVHPLAVARSREVDRLNRGKTDRLDASLIAKLACRGDVTRTQIPEHYWATIRFFAREFLDREKDVAREKNRITSYLETTLPGFLEIFPCPLSGTGRACLRVLANFKEAVRADFVSFENTVRACFTGKRLLTSRVRLLHDTLRHDHVLGLRSGRRAMFFRIINALDRLELHERQKHAAEQSLLAAYSQTEFKQYFDSIWGTTSTVNALALAFIGDPTSYDTPKALVKLAGSDPVVNESGKFRGRTFISHRGRSLLRKAGDRIAFLLEKRNAIFRTFHQRLMRRSKNRLTKRQARVACINKYLRTIWVLCNHRVPFNPALA

SEQ ID NO: 494799 - protein, 349 aa, unidentified
MEHVAIDLGRPNSVMCELGAEGKKVLRRFRLDRPTLTKLFASRPRCRVLIESSTESEWVARHLEGLGHEVVVADPNYAAMYGERNRRVKTDGRDADALFEANRLGIFRRAHRRSDPQRRVIAQQGVRGALVRTRTRWINVVRALLRREGHHVPSGSPENFRERVEDLEVPGELRELVGPLLALMDPLNERLAQLDRETASLGKTDARVRLLQTAPMVGAHTSTAFVALIDDVTRFPKAHKVESYLGLVPSEWSSSERRIKKGITKRGDSRVRWLLVEASWSILNRPRPDTLDLRTWALGIAARRGKKVAVVALARRLGGILYAMLRDNKPYDPTRLRASQSHRTRSAAA

SEQ ID NO: 494800 - protein, 482 aa, unidentified
MKKRNIYQNQSQELLHLFEGAGSSEKVMCVPMDYAKKDHLVMFCNGHGDILRKPFSVKNTPEGIAYIADQVTRSCRRRGIKKKHVFFGGEDANSFAKNFVSTLRGKGFLVANVNAHDAKKQRGNVQASTDRIDLMGIATMLLNCRANCGPAQSGIYRNLRTLVRHRRKLVQMLTEVKNRVHGIVDELFPGFLNEKNSGIIPFTQSSLYLMEDRFSPKQIRRRRRQKLIEILKRFGTSKAERTAVKLQQYAAKVLHAPVEYVDTMQLSLAQHVKHIRCLKESVAQMDKEIALNLAQTQGAFLTSVRGIGLVLAAGVTAEIGDLNEQKPLNNLASYSGIIPRVKQTGGSDGKTYTGPVAKRCNRILKDYVVKSAYHLGLHGPKDLMADYKRRDASGQHADFGMGRRYLRMAISLMRTSQVYLPPNLRRDDYTLEERAGYYLTSWPYLKEKWKKVGALEAAFAKDRPLGLWRQIVQELYDIKLKL

SEQ ID NO: 494801 - protein, 351 aa, unidentified
MTKDKYVAMDVHSAITVIEVQDASGKVLNQTLMETKSEHLRDFFTGLSGTVHVTFEEGVQAAWLYDVIKPLVAELIVCNPRENRLMHTGNKSDKVDAHNLADLLRLGRLKSVYHGDGRTRDLKERVRSYDGLSRDCMRVMNRIKAIYRGRGINCKGTAVYREGVREEWVKKVKDPGATDRLDLLYKELDCLSGLRKEARKGLVKEVRRQSAFKVLMQVPTLGPIRIAYIIAIVSTPFRFRTKRQFWPYCGFSVVTSTSSDYELVQGKFRRSKKPIGTRGLNRNYNRNLKYVFKSAAVAAKSREPFKQYYDRLIERNVKPEIARVSLARKISAVTLAVWKKGEGFDANRIGA

SEQ ID NO: 494802 - protein, 360 aa, unidentified
MFHERTSVGLDVHARSIAASAIDGFSGELVTERLVPDPEVVVAWLRKLPGPIAVAYEAGPTGYGLYRALAAAGIDCVVAAPSKLIRPAGDRVKTDSRDAVLLARLLRMGEIVPVVVPTVAQESARDLVRAREDTRSELMRARHRVSKLLVRHAHVYSGGATWNGVHDAWLRRIRFEQAGTRTAYENAYATVQLATTRRDRLDAAITEMAADSEYTDVTRRLSCLRGIATLTAFSLAVEIGDWHRLSGGTIGAYLGLVPSEHSSGERRSQGGITKTGNSHARRLLIESAWHHKPRYAPGKTIRDRWALAPAPVVARADAGNRRLHHRWVQLETRKKKHTITTTAVARELAGWCWSLAVMDT

SEQ ID NO: 494803 - protein, 362 aa, unidentified
MNATTVAVDLAKSVFQLAVADSHWKLIETHRLTRSQFECWFHNRDVSLVIMEACGSAHHWARYLSGLGIEFKLLPAQYIRAYVKRNKTDAADAAALLEAARASDIRPVRIKSIEQQALQGLHRTRSLWMSTRTSRINALRGFCREFGLAIPQGARTGVESIARLLADPGTVIPELIRGPMKLLVEEIRLLEQRIAQLEKTLSELVRHSPACQELLSVPGIGLLTATAMVAETSGEVSHYRNVRHFASWFGLTPKEHSSGSTRHLGRISKRGDRYLRMLLTHGARAVLRAALVAKQAGRQIDDLKAWALYVQGRTNHNKAACALANKLARICYAVLRDHEPYGKLSVREENKKMNRTAYAVAV

SEQ ID NO: 494804 - protein, 412 aa, unidentified
MDVLHPCCAGLDVHKDSVYACVRRIAPGGGVREAVRVFGTMTPDLLRLADWLAAEGATRVAMESTGVYWKPVYYALDGPFELVLANAQQLKRVPGRKTDTQDCAWIAKLMPHGLIAAGFVPPEPQRDLRELCRQRVQLTRQKAAVANRIQKVLEDANLKLGSVASDVLGKSGRAVLRAIAAGETDPVAPAELALGRLRKQLPRLRPALTGRVTEHHRFVLKLFLDEVEMVEEWVRRLEERIAAVLGPFAEAVRRWTTIPGVDRRTAQAVAAGIGTDMSRFPAEGHLAAWAGMCPGNDESAGRRRSGKTPKGSPWLKRALVQAAWAASHTEGTYLSAFYRRLAARRGRKRALVGLGHAILGIMCHPQRNGTDYADLGGDYFERRDTDRLTRRLVRRLESLGLKVTPEPTPQAA

SEQ ID NO: 494805 - protein, 433 aa, unidentified
MQDVQDEPLFAERVAGLDIAKAGVEVTIRVPSDTAAGRRQQETRAFATTRRELESLADWMHSWGVTRAGMEATGDYWKPVFFLLEARGFDCQLYNAAQVKALPGRPKTDRADSVWLARITERGSVASSFVPPEPIRRLRTHTRYRRHLTQARTAEKQRVEKLLEDGHLKLSSVISDIHGVSGRAMLEAIAAGQRDPQALAQLARGRLRGKIRRLEEALDCSFFTGEHAAVLAMMLAAIDHYTRQIEALTARIEELTEPWLHQVAQLDAVDGIGPVCAQDIIAEVGTNMTVFPTAAHLVSWAKWSPQVRQSGGKRKGSNATGRGNPYLGAALGEATICAGRTQSFLGAKYRRLARRMPKKKALVATGNSMLTSIHALLSDPQASYTDLGPGYHEQRMHIGRQTRNHVKSLERLGYQVTIQAINPGTGELQATTT

SEQ ID NO: 494806 - protein, 413 aa, unidentified
MDWVACVGIDWGDQEHAYELRGGDGAKDCGTLGSSPEKVHEWVRSLRERFPTGTIVVGFEHGRWSLIYALMMYEFLALVPINPRASKAYRDSLRLSGASSDPSDAAFIREFVVKHLSELRIWQPDDSVTRKMRLMVENRRTLVDQRTGLTHTLADTLKQYFPQALQWFGGESSRLLRAFLARWPTLEQLRKAGIDEITAVMRAHRRRKAAAAAQEVVEKIGTADPLTSDKAIIDGYAMYAQSLVEIIDPLDSQITKYDQAIATAWATHPDRTLFDSLPGAGAVMAPRLAVAFGRDRSRYDAANQVQCYSGIAPVIEQSGKQRWVHARWGYPTFMHQTFHEFAETSLPHSAWAKAVYHEQREHGAGHHQAIRALAFRWIRIVFRLWKSGQQYDEQRHIEELTKRQSPIVRRLAA

SEQ ID NO: 494807 - protein, 407 aa, unidentified
MVSDIIALDVSMGRSNVAWYRRKTRLNEFVFFHTRSGFKQLLSTIQSANYPVVYFEATGVYSRPVERFCIDHHLKYCLLNPLQLHLNSEDLRRVKTDRQDARKIASTVQKKSFRLTVPRSPRFARLHELSRFYNQLNHDWNHRLVQLHIALEQTFPELKQLFKNRASKLALNVVELFPHPDLVKTLSRTKLKNQLVKLTDKNLSNMKGFKYADQLLKLAQDSYPAFPSDSIQVEEVRYYCRRLIELTKQREKVVKQMITTAQGDEAFQYYTSFPGIGDQTAAQLMGELGDITRFDNANQLNAYVGIDLKQYKSGNGGYQDHINKRGNPIARKLLYFTVGNMIRQQHAAPNHIVDYYYRLRQKRPYPKLNKVAMVACMNKTLKCLLSMIKHHTKYRYRYTDSRSHVKN

SEQ ID NO: 494808 - protein, 359 aa, unidentified
MIIRCDFHPRFQQIAYIDQETGEYGERRLSHPEEAERFYRSLAGRQVRIGAEATGNFRWFRRLMQEQGLEFLLGDASAIRACCPRKQKTDQRDARHILTLLVEDRFPAVWQPPVENDDLRQLLLHRCRLVRMRTRVKNQLDSMAKDDGLLISRVWSPRRRCEIEALPLPGWYAQRRADLLGLLDGLDKQIRPLDEAVRKAAEGNREACLLMTHPGVGPIVSLAYVLSIGDWRRFPRGKQVGSYLGLIPAEESSGDKRRLGHISKQGNSLLRWLLVEAASKAQSSDASWHRQYVRLSMTKHHGVAKVAIAHKLAVRLYWMLRSGEDYSKEMERGSYAGSPCSAVARLVAERLIGRPASSL

SEQ ID NO: 494809 - protein, 400 aa, unidentified
MISVGIDVSKGKSTVCLLKPYGEIICKPFEVQHTEKDLEELANLLEKLDGEIKMVMEATGIYHLPILTFLLEEGFFISVINPFMMKRFARDNSLRGAKNDRLDSVMIASYGIEKWHKLKKYEVNDGIYPELRFLGRQYHRFMQTHVKHVQELTHLLDHTAPGLKAMFNSWNEHSNRDKLSDFVERFWHFDLITSLSREEFVEQYLLWAKEKKYHQSRSKAEKIYDLASNGIPTLSSRTPSTQMIIQEAINVLRIVNNSLYRILSRMKELAKSLPEYATVRSMGGVGDALAPQLIAEIGDVRRLHNGHALVALAGIDPPPYESGQFVGTHRKISKRGSPILRKIGFEVMRMLKSHKEPEDNAVYNYILKKEAEGKNKKLAKIAGLNKFLRIYYARVMEVYR

SEQ ID NO: 494810 - protein, 345 aa, unidentified
MDHFAGLDVSVKETSVCVLDDTGRIVREVKVASEPEALLPVLTNPLYRFKRIGLEAGPLSQWLFSALAEAGLPAICVETRHMRAVLQAQINKTDRNDARGIAQMMRVGLYRPVHVKTLRSQKLRMLLTHRKLLQSKAIAIDNDLRGTLRNFGLKVGVVGAAKFEARIRELVENLPDLAELVEPLLIVRRTLREQIGILHGRLLAIVRTDDVCRRLMTVPGVGPVVALTYRATVDVPARFRNSKAVGAVFGLTPARYQSGEIDRSGTISRCGDEMMRAMLYEAAHIMLVRVAKWSWLKAWAMKIARHRGMKRATVALARRLAVIMHRIWVDGSEFRWTREQAAAAA

SEQ ID NO: 494811 - protein, 348 aa, unidentified
MTAGLDLGDRYSYLCLIDTHSGEVVEEGRLRTTPEALRRRFASEPSLRIAVETGTHSPWVSRLLEECGHEVLVANARKLRLIYANKRKTDEVDAENLARLARLDPKLLYPVRHRGEGSQAHMAIIRSRQALIGSRTQLVNHVRGAVKSFGARLPKCPARTFHKNVAEHIPEALLPALEPVLEQIASLTERIRDYDRRLVAISKDYYPETELLCQVEGIGPLTALAFVLTLEDPYRFERSRSVGAYLGLVPATERSGERDPQKRISKEGDELLRKLLVGSAHYALGPFGSDSDLRRHGERVASRGGKSAKKRAAVAVARKLSVLLHRLWVGGEVYEPLHNAHGCGDVAA

SEQ ID NO: 494812 - protein, 421 aa, unidentified
MNKNDDSRLAGFRQLKREIRGSTHHVVVGIDVAKERHHAFFGTPSGKTLLHRLVFDNSKEGFEKLCFQAEALKTQKGLTDLVFGVEPTADYHKPLGEYLIGKGHSVVLVAGTAVKKNRELLDGRWDKNDTKDAANIADLITQGKCLFYDLPSMDLRELRSLLSLKRRLRKSEQGYKVRIRNHLIAQYFPEMDDYFAYIEGPDIVRRCLDPKKLAGLEFQEFARMVPSGNEKQKERLGEIYAKASSSIGCSAHPSVGFEASTLLDGLKGLRLTIRETDKRIAEVCMRFPEYPFLLSIPGFGPDVSAQVLGAIGNPSRFENHRQVLKMAGLDLSADRSGKRTATTPVISKRGKADLRYGLYHSAVVASTRNPHFIGYFTDKLKGREKEKGITTKMRTKLAAKLLVIAWTLMKKKEVFDPDRMK

SEQ ID NO: 494813 - protein, 387 aa, unidentified
MSTQYFCGADVSKNSFSIAVKNETFILENSFSMDSKGFESMDKILSPYKDKLLIGMESTGIYHSNLFYFLKNKSYNCFVVNPYKMRQFFNFISDKPTKTDKKDAKAISMCVEFNRDKIETLSSQQKYQVRYLVREKETLAHQIAKTKTEIRTILCLVFPEIEKFSIFGSGMLSLLYNFPSAACIRSIPEKEFIKTGEKLINTRGRKLNIAMTSIYQLATTSIACCYPVYEQLLKMKIDTLNILTQQAQIIKQLIEKQAEKYFHREIEILTSIPGIGKESAMYFLSEVVDIKRFNGWRKLIGFCGLDPVIKQSGNYNGKWKLSKRGNKHARRIAFIMAGCVKRSCPYFRQYYIKKRNEGKSYTEAVVATSTKLLRTIYTLLKEDRLFI

SEQ ID NO: 494814 - protein, 348 aa, unidentified
MDHYVGLDAHKNSCTFVTQDEKGKIKRKAVIETHDQDLIQFIKSIPGRRYLCTEEGTHSQWLFDILQSHVHDMAIVEGRKHRGNKDDFRDALDLANRMRIGDLGPRIWKVPEQLSTLKDMVRSYELINRDLTRVKNRIKHLYRSRGMAYSNKEYPCCAEDLNCIKPGFHHILNLLRKQQEFLEPLKAEAQKAMVTEAKRYTITRILKTAPGFGPVRSSQLIPIVISPYRFRTSRQFWKYCGLGIVMKSSSDWVKHPNGQWVRSPVYQTRGLNRNFNRTAKAIFKGAAMTVIMSMHKDPLHKDYERLLENGTKPNLARLTIARKIAAIVLAMWKNKEVYDPAKYRVKDK

SEQ ID NO: 494815 - protein, 355 aa, unidentified
MNVSVNHYIGFDVHKKSISYCVKLADGRIVEEGKLAARRVTLCQWASKRAEPWHGAMEATLFSGWIYDTLKPFAAKLEMGHPGRMKAIGASKKKNDKLDARTICDLIRANLLPACWVAPSEMRELRRILRYRNLVLEQAVRMKNKISGLLMESGVEYNKKRLHGEKYFHELLENLAAEVPESVKDLLKLSRGWLESFQATQQQLLVKLQKHPILMERLKRLKSIRSVGEVTALTWALEIGDPHRFSSIGDAVSYCGLTSALVESADKQKRGPISKQRNAHLQTVLIEAAKLAPRWNPRLAELHQAEIDNGRHRNRATLEVARKLVAYLLAVDKSGKDFAVRTPSGKSEGEVKPAA

SEQ ID NO: 494816 - protein, 359 aa, unidentified
MRSIVYIGMDVHQDFIEVAGIGEQSSEKIFSFRVSNNRESIRREFKKLKALYQLSCCYESSSCGYVVYRWLRDMRIACDIIAPSLIPQRPGDRVKTDRRDALKLALLYRSGVLTRVYIPDERFERARALVRCRQALNQDVVRSRHRVLKFLQVRGLVYRGGRNWTLKHWGYIRSLTFEGTDEIVFNEYISQLEYNISRVKELDSRIELLAGEQEYGAAIRTLCCLRGIGTLTAMVILTETIDFKRFAKAGQLMSYYGLISSQSSSGNSVRMGQITKAGNTRCRLALIESAWHYRHKPAIGSRLKGALKEQPAEVAVISWKAQQRLYKKYWGIANRKDSNKAVVAVARELVGFIWAMMQR

SEQ ID NO: 494817 - protein, 365 aa, unidentified
MKNSQNEKIKAVTDKTLVVGIDIAKEYHYARITDSRGIELRKPIKVNNSQEGFVNLLEIVEKVKQKYTAEKIIIGMEPSGHYWRSFGWYLKLHESMPVIVGVNPYHVKQSRELDDNSQTKSDKKDALVIAHLIREGRYFDMYFPEGEYAELRILNEERQRVMKQINRASNIIIAVLDEYFPELALVWKDVICVTSLTIMKEIAFPAEILKISKTELIAVIKEASNGTEGEKLATGLVKAAHNSVGVQEGQRAAKSRLLRLIGELEYYQVRLTDVEKELEAVMAKSDLSEILQSMKGVGTVISAAFLGEVGEISRFDDWKQVRRLAGLNLVENSSGQQKSKTKISKRGRPYLRHMLYMAGISGCPA

SEQ ID NO: 494818 - protein, 343 aa, unidentified
MQTITTIGFDIAKSVFQVHGVDAAGEVVIRRQLKRRYVLAFFQKLSPCLVGIEACASSHYWSRELQALGHTVRLMPPAYVKPYVKRQKNDMADAEAICEAVTRANRRFVPTKTPEQQSCLMLHRTRQLFIRQQTAVINSIRAHLAEFGIVAPVGRKGVTELLHVVADPSDKRVPEVARACLAALGTQLLSLKQQILEFDRLIMAWHRSNQTSKRLHYIPGVGPMLATALVASVADPRTFRSGRNFSAWVGLVPKQHSSGGKDRLGSISKQGDRYLRSLFVAGALAVIRYAKIHGTKHRPWLTALLGRRPTKVAAIALANKIAGMAWAMMAKGERYKQPVALAA

SEQ ID NO: 494819 - protein, 366 aa, unidentified
MKKTSTVRVNGNMIFKGHKLTIGLDLGDRWSNYCVLDEAGEILLEQKVATTPEAMKQIFEKIPRGLIAMETGTHSPWVSRLLRELGHQVLVAHAQKVQLITKSNRKDDRHDARTLARLARIDPELLGPVRHRSAQAQIHLTVIRARAELVRARTALVNAARGLVKSYGQRLPKCGTQQVSRELGVGLNAELREVLEPLLKEVESLNERIQEYEVRMEKIAKESYPQVELLKQVKGVGTQIALTYVLTLEDPHRFPKSREVGCFLGLRPGRRDSGESQPQLHISKEGDRYLRTMLVQGAHYILGPFGADSDLRRWGLKLAARGGKNAKKRAVVAVGRKLAVLLHRLWVSGEVYEPLRNSHQAMRAVA

SEQ ID NO: 494820 - protein, 407 aa, unidentified
MNETGKRYIGLDVHKHYLIALGVDADLNVVLPARRVELSHLEAWMKKALTKQDEVVLEMTTNTWQLYDELVEYAGSVLVVHPPHVALITRSQVMNDKIAASILARLLAKGLLVGIWIPPQEIREARGLVAQRQKMVRLATQAKNRLHAVIQRHHLVPPAGNPFGASNKAWWQSLPIGKLEKLNLQSDLETLQFGEKQVQDMTEIMEGLAAEQEEIGRLLHLAGFGIVTAVTVWAAIGDIRRFAQPRYLVGYAGLGTRVHASGMTSRSGKITKAGRRDLRTVLIEAANVAANHHPHWKAELARLEPRLGRNKAVVAIARKLLIAVWYVLQGQTDKYAEPEAVAQKMLRFAYTVGKSNRPKGQTAAQFARVRMDALGLGSELTSIPWGAKKPIPLPPSALKERSNVPNR

SEQ ID NO: 494821 - protein, 322 aa, unidentified
MRYIGIDVSKATFVVAYSSDKGGEIRTFNNTTTGIKQFIGALPKDGSIHGVMEATGNYSALLLYMLNVAGITVSMENPLKVKNFAKAMLSTIKTDKSDARLITLYGEKMNPRPFKVQGEAILRLRQKRTVIRQLTKQITAMSNLRGSLACLPVPDKGATHTVDETIKFLEKKRDRLQSELTDLVEVEFSRQLALLTTIKGIGITLATALIITTGGFTYFQNAKQVSRYLGICPTYEQSGTSVNIKGHINRNGDAYTRGLLYIAAWPASRFNAQCKETYTRLRQNGKSGKLAMIAVANKLVRQAFAVVAHDKEYVDGFVSNRP

SEQ ID NO: 494822 - protein, 433 aa, unidentified
MFETVNSHSAGIDIGAEKIFVSVDGLAVVHFSTYTADYKRCIAYLKEAGVVRVAMEATGVYWIALYELLELSGLQVCLVNPKEVKQVKGRKTDVKDCQWIQKLFSAGLLRESYIPAGKLKEVRMMVREREDIIEMGSSYVRKMQKALELMNIKLTNVLSQLHGRSGRNMIEAIIKGERDADKLLSLCSKQIRINKAEDIKLALEGNYNETWLFLLSENYKMWKQHQSHLLIIDKKIESLLEELNETRPCLQPTQPAKPIRHHKPEVANLNQKILTLYGVNVSSLSGLTDYSALRLVGETGYDLSRFPTGKHFISWCQLSPRNSQSGKMNRRIKMKMKSKAGQIFREAAQSLINSRKIAIGAFMRKIRSKKGSPIAVKAGARKLAAAYYDLVTKGQEYVEMGVKKYEAKLRDHEIRLLQKLADKHNISLSINTV

SEQ ID NO: 494823 - protein, 351 aa, unidentified
MIIVGCDCYPKWQQVAVIDAETGEIGEHKLMNGDGQAEQFYRSLPAPALVGIEACGNSQWFIDMLERLGHEVWIGDAAQIRASYVRKQKTDRRDAGHILRLLIEKRFPRLWQPTAAERDLRQLLIHRHKLVEIRTRVKNGLQHLALNRGMQKQHSLWGARGMDAFKNLSFEGWSEKRRGDLLRLLAELDERVEELDTAVTEAAQTDARARLLMTQPGVGPITALAFAVTIGDVSRFPTSGQVASYLGLIPGEHSSGGKQRLGAITKQGNRFMRQLLVEAVQTTNRLDEGFRRQYQARCHKKPKGVAKVAAARKLTVRLYWMLKTNTSYPQIAHIESSSGVPMVAQAHRAFD

SEQ ID NO: 494824 - protein, 427 aa, unidentified
MNCNTQNARIAEVDEKTLVVGIDVGSEYHYARAFDNRGVEYSKKAFKFGNTEDGFEAFKAWILSICKEQNKNKVIPGMEPTGHYWFNLGKYLQDSGMRPVLVNPFHVKTSKELDDNNPTKNDRKDPKVIAGLVKDGRYTYPYLPTGIYAELRTASNLRYRLQSELTGIENRLARWFSIYFPEYKTVYGNLDAISGLMVLKAAPLPEDIVALGVDGVNQIWRDAKMRAVGKKRAQTLVAAAEHSIGTTEGLTAARYEIRLLLEDYESRSVKLKEVMDLIEELVHQIPMADKLLEIKGIGIRTVSGFLAEIGDLGRFSDPKQLQKLAGYALKENSSGKHKGQSKINRRGRKRLRHLLFEAAISLVGKNQEFKAIHHYYTTRKDNPLKKMQSLIAVACKLIRVFYAILVKGVEYDPKKMVSDIRRPALAA

SEQ ID NO: 494825 - protein, 345 aa, unidentified
MKIIGCDFHPSFQQIAICDLETGEFQERKLSHAEGEAERFYRELGEPALIGIEATGNSQWFLDLVQRLGHEIRVGDAAKIRASYVRKQKTDKRDAGHILKLLLEKRFPQLWTPSAAMRDQRQLLRHRDKLVEIRTKVKNSLQHLAMNRGMQKKSRLWTRQGMEQFQQLAMPGWAGTRREDLLQLLKELNGQIEPLDQAVKQAAEQHPQAQLLMTQPGVGPVTALAFVLTVGDVARFAGSKQLTSYLGLVPSEHSSGSKRYLGAITKQGNCFLRKLLVEAAQTTVRKDEGFRKEYQRRCHHRPKAVAKVAAARKLAVRLYWMLRSNVGYPEIVHIESNPRVPLGEV

SEQ ID NO: 494826 - protein, 343 aa, unidentified
MGEVSTIGLDIAKSVFQIHGVDVDGTVVIRRRVSRAKVSEFFAALPPCLIGIEACPTAHHWSRKLQALGHTVRLMPPNYVKAYLKRSKNDANDAAAICEAVTRPSMRFVPTKSEQQQSGLMLHRSRQLLVRQRTMLSNAIRGHLAELGIISAKGRNGTVELLEVIANQEDDRIPAVARFSLEVLARQYAAIAAEIGVIEKRIHAWHRSCEESRRLEEIPGVGPIVATALVAEVGDWRAFASGRSLAAWIGLVPRQHSTGGKERLGGISKQGNRHLRWLLVAGAMAVIRYARQHGTKRPWLARLMATRPIKVAAVALANKIARMAWAMMVRGERYKEPTLMIAA

SEQ ID NO: 494827 - protein, 341 aa, unidentified
MKQDISVLGLDIAKRVFHAVGLDAMGKIVLRKPLSRHALMSFIAQLPPVLIGMEACGGAHDWARRFREHGHEVKLMAPQFVKPYVKSNKNDARDAEAIGEAVTRPTMRFVPTKEVDQQDIQALHRVRERLMGARTALVNEVHGLLHEYGIVLPKGVAKFRQAVVGILESEKDKLTPLSREMFWKLVDEFAAVEEQLASDQEKLETVATTHPECRRLMTIPGIGPLTATALLAAVSDASAFKNGRQFAAWLGLVPRQHSTGGKERLLGISKRGDGYLRKLFVHGARAVVRGVREKTDRRSGWIRGLIARRGFNRTTVAVANKNARIVWALLTSHQDYQPTTG

SEQ ID NO: 494828 - protein, 428 aa, unidentified
MITDRVPCRKFIHGGAIMDKIYDNCCGIDVHKKIIVACFRKGNKQEVREFGATTRELLELADWLKAGDCKMAAMESTASYWKPLYNILESSDLNAMVVNARHMKAVPGRKTDVKDAEWIADLLQHGLLQPSYIPDKDQRELRELVRYRKSLVGERTRELNRLQKMLEGANIKLSGTVSDINGKSARSILEYLLTGESIDSAKYDEMYEQKVIAHNLKATKEQIIDDLNGVMTPLQRRMMKELLAHLDELNAHIRNLDDEIDNFMKPEEKQASNAIQEVTGIGNTSAQAIISVIGTDMGRFPTDRHISSWAGLCPGDNESAKKRKSGKTRKGNVLLRTTLITCAHSAVKNKKSYFYAQFMRISAHRGSKRAYVAVAHSMLIAIYHILKDGVVFKDLGADYYNQFNKERKINAYLKKLKALGWEAPAVAT

SEQ ID NO: 494829 - protein, 387 aa, unidentified
MLYVGIDIAKEIHEASLVDAQGKLQGRSIRFSNTLTDFHRFLEWLPKDTLEMAMEATGHYWLPLYDFLKGQGYDITVLNPLQTEAHRRGQIRKTKTDKRDSFIIADLLRTKAISPSYIPDEWIHQLREITRFRFGLIDSICDLKRQILCVLDKVFPEFESLFSNVFIKSAQALLKEGTLPEEIAEMDLSELTGILNSSSHGRFGLAKAQDVQSKASSSVGISYLKDSAKVQLRCLMAHLEFLQSQIEEVDKCIQDLMSQRETFLTTIPGISQILAATITAEIGDIDRFDSPEKLAAFAGIDPTVYKSGKFTGTRMAMSKRGSPYLRRALWMASASARRFDPELTAFFQRKLAEGKHYNTAMGAVCRRLLNRVYSILKEHRPYQPKFS

SEQ ID NO: 494830 - protein, 309 aa, unidentified
MTVPVLVGIDVAKASLDVAVRPSGERWQLANEAAALPTLLARLQPLAPTLVVLEATGGFEHAVAAALAAAGVPIVVANPRQVRDFARATGQLAKTDAIDAQTLALFAERVRPVPRPLPDAAAQALDAVLTRRRQLLEMLTAERNRLGLARPPVARRIRHHIRWLERELADVDRDLGRLIEQSPVWRAKDDLLQSVPGVGPVVSRTLLGELPELGRLTPKQIAALVGVAPLARDRGTRCVWGGRAPVRAVLDMGALVATRWHPVIRLFYQRLRTAGKPKKVALVACMRKLLTILNAMVRSETYWRHATAT

SEQ ID NO: 494831 - protein, 424 aa, unidentified
MDDELFVGVDWGSETHQVCVIDAQRKKLLERGFEHSGTGLSSLAEKLLELAAGDSRRLSVAIEVPRGPVVDALLERRIAVFAVNPKQLDRFRDRHTVAGAKDDRRDALVLADSLRTDRSAFRQVQLGDATLVQLRELCRLQDELKAERITLGNRLREQLLRYFPQILELDNIYKRPWIWALLTKASTPQEAAHLSLAKLKSLLNAHGIRRLTPEQVRETLKAEPLHVAPGVIQACQRSVASLLPRLRLAHEQKLQVEREIGELLEQCSKPDVEGKVEHRDASLLQSLPGLGKLVCATMLAEAGEALTRRDYMNLRGLCGVAPVTRRSGKQLAVSMRHSCNKRLRTAVHQWASRAASCDGYWKARYAALRAKGHAHARAVRGLADRLLAVLLAVLKTGQPYDPARKRAVPGAITSHPLPVDLALA

SEQ ID NO: 494832 - protein, 450 aa, unidentified
MSLEVVNPNAAGIDIGSKSHWVAIGQDAEDVREFGVYSDDNMQMCQWLHDNKIKNIAMESTGTYWQNLFSCLVSQGFDVILVNGRQTKNIKGKKTDIKDCQWIQKLHSLGLLSSSFLPDSTTDVIRTYSRHRQNLIKQSARTVLKVQKYLRLMNMRLDVVVNDIVGLTGTKIITEFILGETSGKRLAQNRHYNCHKPEDEIAKALQYNGRDDYLFALKQEWETYLHIQKQIEAVDKEIKKLLEDIIEKDDNKKQHVADTKQHKRKNKNTIKGADINRLSYQYFEGIDLMRIEGVNDATIMAIISEIGLEGIKKFNSGKQFTAWLRLAPNNKISGGKILNHHIPKGSSRLKIAFRNAANAIGNLKEGHLADFFRRINYKKGRVTAINATARKLAVIIWNMLAKGVPYNPPAEYLFLDQKRKMKLVSRIRKNITKFDLKPEDVGFLQIADYQ

SEQ ID NO: 494833 - protein, 343 aa, unidentified
MDHFAGLDVSVKETSVCIVDDTGKIVREVKVASEPEALLAALKDPAYNFKRIGLEAGPLSQWLFSALAEAELPVICVETRHMQAVLKTQINKTDRNDARGIAQMMRVGLYRPVHVKTLRSQKLRMLLTHRKLLQSKAIAVENDLRATLRNFGLKVGMVGTVKFEARIKELVENLPDLAALVEPLLIVRRVLREQIVMLHRRLLAIVRDDDVCRRLMTTPGVGPVVALTYRATVDVPARFRKSKAVGAVFGLTCSKYQSGEIDRSGRISRCGDEMMRVMLYEAAQSMLRSKKWSWLKAWAMQIARRRGMKKAIVALARRLAVIMHRIWVDGTEFRWTREQPAAA

SEQ ID NO: 494834 - protein, 346 aa, unidentified
MSQTAVAVIGIDIGKNSFHIVGHDERGAIVLRQKWSRGQVEARFANLPPCLIGMEACVGAHHLSRKLNGLGHDARLMPAKYVRPYSKGQKNDFRDAEAIAEAVQRPTMKFVATKTADQLDLQALHRVRERLVSQRTGIINQIRAFLLERGIAVRQGQRFLRAELPRILATPPDVLSPRMARVIEDLAGDWRRLDERIESLSSEIEAVARQDAGCERLMSVPGIGPIISSAMVAAIGAGDAFTKGRDFAAWLGLVPRQMSTGDRTILGKISKRGNRYLRVLFVQAAWAVLIKPKSWERHGLKPWIEAAKKRLHHNVLAIALANKLARIAWSVLAHGRNFEVSKIQTA

SEQ ID NO: 494835 - protein, 346 aa, unidentified
MMIIGCDFHPSWQQVSWLDMETGETGEQQLVQAAGDAERFYRQIPAPALIGIEATGNCHWLVDLLAELGHELWVGDAAQIRASYVRQQKTDKRDAAHMLKLLVEGRFPRIWMPSSEVRDLRQLLLHRYKLVIIRARVKNELQHLCLNQGVQRKRKLWSQAGQQMLRELPLKPWAGRRRDDLLRLMAMLDQQIIPLDEAVKAEAQQDKMARLLQTQPGVGPITSLAYVLTMGDVSRFPRGKQVASYLGLIPREHSSGGRQKLGAITKQGNRMMRMLLVEAAQIAVRYDPEFRREYQHRCHAKPKAVAKVAAARKLAIRLYWMLRTQKPYPEVVRIESSPRVPLVGAS

SEQ ID NO: 494836 - protein, 375 aa, unidentified
MEKLIRIGVDTSKSVFQLHGVDVLEQPALIKKLHRGQVIAFFKKLPPLKIGLEACGGAHHWGRELEGLGHEVFLIPPQHAKAYLRRGKHDAADAEAICEAMSRPRTRFVPLKTSEQQAAQMLAGVRDQLIRRRTQLSNTIRGHAAEFGLIAPTGLARIEPLLAQIASEETVPALAKELFAVLAEDYRALGSRIGKVDAKLMVFHRQDEVSRRLAKVPAIGPIGATLLSIKVSDAKAFRSGRDFAAWIGLTPKNHSTAGKTRLGAITRAGDAMLRRVLVVGAMAVIQQLKRRKEPPPSWLGELLKRKPAMVAAVALANKTARIAWKLMVTGERYEPRPNQAIVAPCSAPSRPLRAADRGGLRPALTAPALRAPASP

SEQ ID NO: 494837 - protein, 400 aa, unidentified
MPVPGNRGIEYSKKPFKFSNTEAGFATFKEWILDLKERHEKDKVVPGMEPTGHYWFNLGKFLQDNEMKPVLVNPHHVKKTKELDDNNPTKNDRKDPKVIAGLVREGRYMIPYLPDGVYADLRTASNIRFQLQAELTRIQNRISRWFNIYFPEYKTVYGKPDAKSGMLILKAAPLPEDILTLGIDGVNQIWRDAKLRAVGKARAKTLIEAAEHSVGSKEGAMSARMEIRMLLEDYESRNTRLQEVMVLIEELVRKIPMAEKLLEIKGVGIRTVSGFLAEVGDISRFNNPKELQKLAGLALVENSSGKHKGETTISRRGRKRLRYLLFEVAMSLVSKNQEFRELHNYYTTRRLNPLKKMQSLMAIAAKLIRVFYAMLTKGVDYDPKKMVSDIKRPAVYLQAA

SEQ ID NO: 494838 - protein, 418 aa, unidentified
MQHAPKHTLVGAGPARPTAGVDWARDDHVVTVVGAMGEVAERFTVPHSADGLRHLVRQLARLGVHEVAIERPDGPVVDALLEAELTVVVISPNQLKNLRSRYGSAGNKDDRFDSYVLADTLRTDRARLQPLRPDSPATVTLRAACRARKDLVAHRVALANQLRAHLQRAFPGAVGLFADIDSTISLRFLERFDCQDRADWLSPKRMAAWLVSVGYCGRVASETLHARLAAAPRGATGADGAAQAHVTRALLATLTTLVEQIKILSEQIEEQLALHADAQIFTSLPRSGTVRAARLLSEIGDCRARFPTPDSLACLAGVAPSTRQSGQHRAVGFRWAADKQLREAVCDFAADSRRANPWAADLYRRAVLRGHDHPHAVRILARAWLFVIWHCWQSATPYDPTQHRALQAVLSGSRPQAA

SEQ ID NO: 494839 - protein, 346 aa, unidentified
MMIIGCDFHPSWQQVSWVDSETGDCGERKLVHVTGDAQQFYQQLVAPVLIGMEATGNSQWFIELVEDLGHAIWIGDAAQIRASYVRKQKTDKRDAAHILKLMMENRFPRLWTPDREQRDLRQLVLHRHKLVILRARVKNELQHLSLNKGVQRKHRLWSQAGQKMLRELPLKPWAACRREDLLGLLSMLNQQIGKLDGAVQTAAEENPQAKLLMTQPGVGPNTALAYVLTIGEVSRFQRGKQVASYLGLIPREESSGGRQKLGSITKQGNRMLRSLLVEAAQVAVQHDPGLRQQYLHRCHQKPKGVAKVATARKLAVRLYWMLRTQVVYPEIVRIESSSGLPLVGAS

SEQ ID NO: 494840 - protein, 327 aa, unidentified
MTNPYQERKTHVGIDVSKRTLDVCILPEGASRGESFVVANDQEGVDELLSRLAEPGANPALVVLEATGRYERLAASSIAAGGVSVAVVNPRQARDFAKAIGRLAKTDKIDAFVLARFASAVGPSPSAIPDEEARHLQYILARRRQLLSMLTAEKNRLQMAPSAFEGRVEAHMKWLEKEIGRTDRGLDEAIEASAAFEENESPLRSVPGVGRVLSRTLLAELPELGKLTHKRLCALVGVAPFNRDSGQGRGKREVWGGRAPVRATLYMGALVATRHNPAIKEFYERLLAAGKPKKSVALVGCMRKLLSILNAMMRDRAIWRCPHALTP

SEQ ID NO: 494841 - protein, 401 aa, unidentified
MKYGVGIDISKGKSTVSILSEHGEVIEMPFEINHDNDELNHLKEILNKYPKESLKIVMEETGTYHLPVLNYLLDNDFFVCADNAFKIKKHLDHDIRKVKNDNKDSLKIAEYCCNNWYRIKKYCQTDEKYEQLKFLSRQYTAQMSVQTKEKVQLSNLCDLLFSGFYSLLDENNFILGITVFKKYCHPKLVLKKKKTSFINEVDKIAKKLGHRSAGITLANKIYELANKTVSPYPYNEYSQLSVDCCVDLLILTINTTSNIITKMEELASTLPEYDTVRNMEGCGAKLTPRIIAEIGDIRRFKNAGSIIAYGGLDAPPYQSGQFEATIRHISKRGNKYLRKAGYEVMKSIKSSGKAGNELYDYISKKEEEGKAKKVAKIAGLNKFIRMYYGKVREKYRELEIW

SEQ ID NO: 494842 - protein, 463 aa, unidentified
MEGKARRIRRTHRGPSLLERVNHNAAGIDCGSAEHYVAVPVDRDPEPVRHFKTFTADLHRLADWLVSCRIETVAMESTGVYWIPVYEILVARGIEVLLVNARHLKNTPGRKSDVTDCEWLRELHSVGLLRGSFRPDEEIVTLRSYLRHRDTLVQNAATAITRMQKALVQMNLQLHIVIRDIMGMTGLAIIRNIVNGQTDPGRLAKHRDAHCKASEADICAALTGHYRAEHLFALKQNLEIFDSSQRQIEACDAQIEACLTALAERMAPPSVPLPSRRSRRNRRSNEPRFEVRPMLHRLANTDLSELDGIGPYTALRLISEIGTDMSRWRTDRHFTSWLTLAPNNRISGGRLLSSKTQPSASRAAATLRMAAQSLARTQTALGAFYRRLAFRIGKAKAITATARKLAILVYHALKGDFVYKDPGAAAYDARHRDSVIRRLRKRAATLGLSLVDGQTGEILDGVS

SEQ ID NO: 494843 - protein, 388 aa, unidentified
MQTVADRPEVPIAIHTDLGAIFVSLELSRSTWLITSLSPGAGEKMSKHVVRGGDVAGLLERFAQLREKTRARTGKVFPFVVIQEAGLDGFWIDRALQNEGIESHVVDPASIATSRRRRRAKTDGIDGEALVRALLAYKRGEPRVCAMVKAPTPEEEDRRRLCRERKVLIGERVQHVNRVKGLLFSQGISGYEPLRRDRRERLDTLQTGDGRPLPDHLKAQVCRELDRLELLLEQIKAVEAERDVLLAAQQVAAPAPAAMLLDIKGIGPEFAAILWSEGLFRHFDNRRQVASYAGLAPTPWQSGSVDREQGVSKAGNPRLRTTLIQLAWLWLRHQPQSALTLWFEERVRRNGGRLKKTTIVALARKLLVALWKYVTAGVVIEGAVMKRT

SEQ ID NO: 494844 - protein, 371 aa, unidentified
MCIVVGLDVHVKSKSVYCIMDKETGEVIAKGKFESNYEGFKKALGKILKENPKTEVGLENGTGSYKWASIIQDLGGIGKVYSADEVSSKSRSQRKKCDYRDAEDLCNNMRGGVLTKEIRLPPLKIKYLRSQMKLREMYVRQGVQVQNNTRCIVREYGIKEEFRSLNEERGWEILLSEKMPKVVKEMIEINHRQFIEIKKRLEELEKEISKYDRELKEFEILRSIPGFGDVSTRTMKALIFDINRFDSGKKLVSYLGLSPSSYDSGERVRHGRITKEGNKLGRKVLIEVAQKSSMKWHPLNRVYRRYVVKKGHNKAVVAIAAKLCRIMYRMLKNKEEFSVGKLLIKEPVTKKNAYLINNVSVKTEGKAVKEG

SEQ ID NO: 494845 - protein, 412 aa, unidentified
MQAIIERCCGLDVHQETVVACLLIGAPGTQPKKEVRTFRTVTRDLEALRDWLQEAGVTHVGMESTGVYWRPVYAVLEGHFELIVGNARHIRNVPGRKTDVKDSEWIADLVRHGLIAKSFVPPRPLRELRELLRYRRKLVESQAAERNRLLKLLETANIKLASIASDVFGVSGRAMLRALIAGEASPQAMADLARGRLRGKRADLILALDGRLEEHHRFLLTMQLRRLEAIEADIAALDLRIGERLEPYRAAHALLMQIPGVDWVVAAVLIAEIGVDMSVFVSVYHLAAWAGVCPGNHESAGRQKSGRARKGNIHLRTILVGAAISASRTKGSYLKDKFYRLKARRGGLRAALAIAHKILVSAYHMLIKNVPYRDLGEAYLDQIGQTRTVANLKRRLERLGYRVILEPNAQAT

SEQ ID NO: 494846 - protein, 351 aa, unidentified
MQDVTAASVYLGIDAHSETCTFCAVDKQGKIIMRCTVSTNARQLRAAVRDLPLESTWAMIESSSVSIFVREALASVLDRVIICETRENRLISKSGDKSDEKDAHRLARLLRLGEFKEVYVPSRSWQEIRELLHVYQKVVGDVTRTKNRIRAKYARYGVRITDSAYGDGRHDALKQLNRPALKPVFDAMYGILDAAEDAKDDLDHALRARLSQIKGYKVLKTIPGVGPVCAAILVAIIVDPNRFSSKKRLWSYAGIGTSEDSTGKTVRVKRMKHYNRLLKYAAMLAAQAAIRCDNRFARHYQALVEKYEDPKKPKRAAAMARRTVARGILAAALAMWKTGTVYSENSLAKSA

SEQ ID NO: 494847 - protein, 352 aa, unidentified
MTRITTIGIDLAKKVFQVHGVDAEGKVVVARKLRRKEVLAFFAKLPPCLIGMEACGSAHYWGREIAKLGHTVKLMPPKYVKAYVKRGKTDAGDAAAICEAVTRPSMSFVPVKGIEQQGLSMLHSARTQLIGQRTQLINGVRGHLSEFGIIAARGLLGLAELAAIVRDKSNRRLPATARAALMILVRQIGAVSAEIAELDTALRKDNNASELGPRLETIPSVGPVIASALRARVTDARLFENGRHLSAWIGLVPENDSTGGKIRQNGLSKKGDRYLRSLLVNGAMAVVQQALKRPDKNPWVTKLLGRMTAKQAAIAIANKTARIAWAIMVHGGVYEAGHRAPQYRAEACAAAA

SEQ ID NO: 494848 - protein, 343 aa, unidentified
MSKISIVGLDLAKNVFQVHGVDASGGVVLRRQLRRGAVEKFFAQLPPCTVGVEACGSAHHWARVIGRYGHQVRLMPPAYVKPYVKRNKNDGRDAEAICEAVSRPTMRFVPVKSVEQQATMAVHTTRALLVRQRTMVANSLRAALSEIGIVAAQGIEGLRELMAKLEAPHEEVPEIMRGALLLLAKHWQALDADERVLERQIAKAARSDREARRLMEVPGVGPIIASTVLAKVPDAKVFRSGRDFAAWIGLTGRDHGTGGKHRPGRISKQGDRMLRALLISGASAYLRHQRTRGVSDPWLRDLLARRPYKVVMVALAAKTARILWAMLVKGEPYRDRASASAAA

SEQ ID NO: 494849 - protein, 403 aa, unidentified
MNMNAVGIDVSKGKSMVAILRPFGEIVSTPFEVKHTVSGIRSLIEHIKAIDGESRIVMEHTGCYYEPLVRELSQADLFVSAVNPKLIKDFGDNSLRKVKSDKADAVKIARYTLDSWTELRQYSLMDEIRNQLKTMNRQFDFYMKHKTAMKNNLIGVLDQTYPGANTYFDSPASEDGSQKWVDFATTYWHVDCVRKLSLNAFINHYQKWCKRRKYNFSQSKAVEIYEASKEIVSVLPKDDLTKLIIKQAVEQLNMASQTVEQLRTMMNDAASKLPEYPVVMAMKGVGKSLGPQLMAEIGDVSRFTHKGAITAFAGVDPGVNESGSYEQKSVPASKRGSGTLRKTLFQVMDALIKTKPQDDPVYLFMDKKRSQGKPYYVYMTAGANKFLRIYYGRVKEYLSSLPK

SEQ ID NO: 494850 - protein, 323 aa, unidentified
MTFYIGVDFHPYQQTLCWCDEETGETGALKLFHDIEKVREYYSSLGKQAVIGIEASSRCGWFERIVAEAGHTLLVGNPVSIRKTALSRHKNDRIDAEHMLWLLMRNEFPAIWRRPIQSTEILDVIKLRSSLVGQRTQIYNRLSAVARDIGMPKSLMRTVAAQKVIKEVDMCEASALCRDQLFSTLEHLKARILEVESWLKQKATADTKAQLLMTQRGVGYLTALIFVHTVGDVTRFDKGTKAVTRFAGYDPVERSSAEKIRFGRISKAGPRLLRFHLGQASDSRSLGCETERILQTALKEETQGCGQNGHCPQTSGQTLDNAS

SEQ ID NO: 494851 - protein, 408 aa, unidentified
MRYFAGLDWGSVEHAACVLDEQGQVVQRLAVPHTAAGLHTLLSVLARCAPAPEMPIAIERPNGLVVDTLIEAGHPVVPVHPNALRACRPRYRAALGKSDPGDAYILADVLRTDGHRFRALRPASDEMRALQALVRTRGDLVAERVALANQLRALLDSFWPGAAALFCDIDSPIALAFLERYPTPSSARCLGCKRLAAFLARHGYCGRRSPESLLARLHAAPAGLAGEAEQEAKGELVRALVAVLLTLVAQLKHTSAAVEHAVAQLPTGQVLMSFPRAGKINAAQILAELGDDPQRFATDDQLAAEAGVAPVTYSSGKHHGVGFRYACNKRLRQALTCFADNSRHLSPWAQHVYARARGRGCDHPHAIRILARAWVRVLWRCWHRAAPYDPAHHGAAQPFIHPPSPSEA

SEQ ID NO: 494852 - protein, 377 aa, unidentified
MHSENIAAYIGLDVHKETLAVAIAAPERLGEVRYYGTINNEAQAVRRLFQKLQGLYGNILSCYEAGPCGFGLYHQLTAMNIKCQVIAPSRIPKSPTDRIKNDHRDAISLARLLRAGELTPVWIPDLTHEAMRDLIRARAAAKRDSRVARQQILSMLLRTDKRYAGKHWTGKHRTWLANQSFSQPSQQIAFQHYCQSLEQIEDRILQLDQEISRLLPEWSLCNLVCQLQALKGVGQLIAITLVAELGDFSRFSNPKQLMAFLGLVPGEYSSGNSIRPRGITKVGNSELRRLLYEAAWSYRTPAKVGAWLIYYRLDSVTQYSKDIAWKAQQRLCSRYRTLTAKGKKSQVAITAVARELTGFMWDIALAAQSSFSQQKQN

SEQ ID NO: 494853 - protein, 337 aa, unidentified
MKYSGIDLHSNNSVVSVTDEADRVVAEKRLPNDLPKILAFLSPWRVELAGVVVESTYNWYWLVDGLQAAGFTVHLANTTAIKKYDGLKHSGDETDARYLAQLLRLGILPTGTILPPEQRAMRDLARKRMQLVRSRTSHILAVENITGRQQGTRLSCNQIRRLTTDAIGQMPLPADVALAIQANVAVITTLSTQIDVLEKRLQQIVKPRAEYALLNTVPGIGQTLATTILLETGPIERFARAANFASYARCVDSQHTSNGKKKGEGNTRNGNKYLAWAFIEAANLALRYCAEAKQFYERKKVRTNSIVATKALAHKLARACFHILKEHKPFDVTRCFS

SEQ ID NO: 494854 - protein, 355 aa, unidentified
MESVKYVGLDVHQSTISAAVLNGEGKLMMQSVIATKATAVMDLLKGLRGVLQVTFEEGTYSAWLYDLIVRQVARVVVCNPRKNALLKSGNKSDQIDARKLAELLRAGMLSPVYHGEQSTRTLQQLVASYTALTEDTGRAMRRIKALYRSQAIACAGKKPFGKRHRGEWLARLSDSGQRRRAEWLYQELDAVQILRREARQAVMVECQKNPAAKILRSLPFFGPLRAAVLIARVQTPHRFRTKRQFWTYCGLGLDTRSSADYVEQDGQIMRRRKPVYIRGLNWNYSHELKNVFKSAATTASVMDGPFRAFYESRIANGMLPAMARLTLARKMAAIALILWKKGEAFEAEHLKPQTA

SEQ ID NO: 494855 - protein, 364 aa, unidentified
MAISGLSPTELTKEAPIIMLHIGLDLSRKRLDFDLLCEDGSRLERGAVPPDADGLRGLARRVGVFGEPVCAAIESMNGARFVHDRLEELGWQVEIADAQKVKGLAPLACKTDAIDAGVLAELSRRDLVPAIWLADPAVRAERERARWRLHLVRHRTSLKNRVHATLLAFGVPCPVSDLFGARGRGLLERLELPNPWAQTVNASLALIEDLDEQVRSCERELRGLGADHEYVPLLMSAPGIAWVLGYTIAAEIGDINRFRSPSKLCGYTGLCPRVYQSGERDRRGSLAKNGPKYLRWAMIEAATHAVCSPVYRERYQRTAKRLGAQRGRKVARVDIARKLTEAIWYMLTRNQPFAPAGATTPLAA

SEQ ID NO: 494856 - protein, 482 aa, unidentified
MKKRNIYQNQSQELLHLFEEAGNSEKVMCVPLDYAKKDHLAMFCNGHGDILRKPFSVKNTPEGIAYIDDQVTRSCRRRGIKKKHVFFGGEDANSFAKNFVSTLRCKGFLVANVNAHDAKKQRGNLQASTDRIDLMGIATMLLNCRANCCPAQSGIYRNLRTLVRHRRKLVQMLTEVKNRVHGIIDEIFPGFLNEKNSGIIPFTQSSLYLMEDRFSPKQIRRRRRQKLIEILKRFGTSKAEKTAVKLQQYAAKVLHAPVEYVDTMQLSLAQHVKHIRCLKESVAQMNKEIALNLAKTQGAFLTSVRGIGLVLAAGVTAEIGDLNEQKPLNNLASYSGIVPRVKQSGGLDGKTYTGPVAKRCNRILKDYVVKSAYHLGLHGPQDLMVDYKRRDVSGQHADFGMGRRYLRMAINLMRTSQVYLPPNLRKGDFTLEERAGYYLMSWPYLREKWKKVGALEAAFANNRPLGQWRQIVQELYDIKLKL

SEQ ID NO: 494857 - protein, 427 aa, unidentified
MQQTSIPVERVVGLDAHPDSFTAALVQGPNPRAAIVEKTFDKVPMAQLIRWAKKHTTPSDLIVLEASGNSFHLARSLRTQGFKTEVLESAHLGKLKEAHANNDKISAVRIAKAYLAGTTKSVWVPDETTQKRRDWYHAHRKAVELVTALNNSLLSYLSDNGVRPDKSNSVLKQTQAKTMKWLRSARPWSVSQWQVIEIRLKDLYHAMESRRLWESLLAQEVAQDPLLLSLVRQTGVRDVVAFALGAVVGDIKRFAKPPNLVSYVGLNPAFDASGNERWEGGVGGRGHRGLRNLLIESAHSVLRSREHPLGIRGRKLLARKGELKLVVAAVARWLLVSIWYQMMGLAEPVGEISKSLDQKLGVIISRIGKEGLAKLNLTRKDLREQMHQRLKTGRVYLLKPKGRSPESPPDEDSTQGLQIELDRVVPA

SEQ ID NO: 494858 - protein, 352 aa, unidentified
MQEIRRKNWAGQRLFVGLDLHKKNWVATVRSRDLHLKTFTVPSGEEAFWKTLNHQFPGAQFIVAYEAGCFGYHIAEYINNNGGKAVIFPPHRIPTPPGVFVKTDKIDSRKLALELSKGLGGIYQPDRFRLYHRSVIRKRSQLVQRKVEIQNQIKSDLLFYGIRIDTLGRYWSAEFLRRLWELEFVAPGYTRTFRIILQEYQEIVRNIKETTDYIKEMAQSDLYKERVCLLKSVPGVGDLSAMTILLEIFDINRFASAEKFASYVGLVPSEYSSGEKIRKGSLSGMGNKTLRSLLIEVSWVVIRKDPVLFEKYNRVKKGKTGAEAIVSVANSLARRIHYVLTNRSPYCLGVVA

SEQ ID NO: 494859 - protein, 293 aa, unidentified
MELYAAFDLHSRSSHLAVLDDQGNKVFRAKLRNDTEIMILALEPYRERLGAVAVESTFNWYWLVDALMESGYRVCLANPAAFQKYKGLKHSDDSSDAFWLAEMLRLGILPQGYVYPREERPVRDLLRKRMHLVKLRTSLMNSLDNIIARNTGVSLKARKIKQLTCDHVSPLLEGDDDLALSGRVSKQTIDYLTRQIKTVEKAVESRVQLKREYELLLTIPGVGTILSLTIMLETGPIDRFAQVGKYASYCRKVPTRWLSAGKGKGKGNKKNGNKYLAWAFSEAHIWRCSLMLS

SEQ ID NO: 494860 - protein, 334 aa, unidentified
MGSMLAGVVDFVVGVDTHRDTHTAAVVDARTGGVIDQITVPTDAFGYRRLRSFADQQAPERRVWAIEGTGSYGAGLTTSLLEHGEWVVEIDRPARPARRDGAKSDDLDAVRAAREALSREHLAAPRARGDREALRVLTAARQGAVVARTKAIGQLKALIVNAPQSLRDQLRRGTTDQQLQRCARLRTLPQHSIEHRATIRAIRGTARRALALEAEAAEYETELEQLVVAICPVLLAQPGVGTITAAQFLISWSHAGRIRSEAAFASLAGAAPIPASSGTVTRHRLNRSGDRQLNRALHTVALSRLRIHEPTKAYAARRQAEGKSPREIKRAHHS

SEQ ID NO: 494861 - protein, 316 aa, unidentified
MLYVGIDIAKNKHDVTALNVPGKTVLKPLTFSNNKAGFELLDLSLRQLNQDCLIALEDTGHYAFNLLNFLHEQGYKVYTYNPLLIKEFAKSLLLRKAKTDKKDAHGIALKLLSDPNREQFQHDNRQVELKILARHIHRLKKKQSDWKVQYTRCLDIIFPELDKIVGKHSEYTYQLLTCYPNPQKRLEAGFDKLIEIKRLTASKIQDILSVAPRSIGTTSPAREFEIIENIKHYKRLIDKAEKCVNDLMAELNSVITTVTGIGNRLGAVILAEIQNIHAFDNPAQLQAFAGLDSSIYQSGQIDLAGRMIKRGSPHLR

SEQ ID NO: 494862 - protein, 430 aa, unidentified
MTNRLQVGIDFGQKRADFCLLFPDGRPLEMHQSFANSCSGYSLAKHLLLDALDSHSFDGIDLSGEATGYYWLPFFLQLDADPDLADHDLNLFLLNPRWVKWFKKCFAQDHKCDEKDPFYIAERTRTRRPDVVWSPLDSLPLRFYTRLRFHLVQSLAREKCYFSSFLFLKASSYRCLKPFSDVFGVTSRIVLTQQPSLDELAELPVEDLAMHLHELSGHHLRDPFDNARKLKRVAQESFPLNETLALPVQRILDLTLEHIRFLEGQVEQVNTWIATELESYPVIAQLATIPGIGPVFSSGIGAEIGDTQRFLQGSKWNQKRKRYRPRNLRDAEDAVAKIAGLWWPRSASGDFEAEDRRMAKTGNRYLRYYLIQAADHMRKRIPEYTAYYARKFKESAKHHHKRAMVMTARKSIGLVVGLLHRNEPYRSKGP

SEQ ID NO: 494863 - protein, 351 aa, unidentified
MDTEVSPKLFIGIDVHKRQWSVSIFTANCHHKTFSQVPNPKALKSYLDKFFPKHQIICCYEACKFGFWIYRELCSFGYECLVINPADLPTTNKESSEKTDPVDSRKMAKALRAGLLRGIHVPTQETEGDRQLFRYRKRLWADLVRVKNRIKDKLLQNGIETPHKYDNPYWTKDFLDWLAVVELPSASSRLVMDLLLDQFEFTYRHFLKVSISVRSLQRKAKYKANSKLLRQIPGIGPLTTVQLLTEIEDIHRFRNFKHFNSYIGLKPMVHSSGESDRKGYMTYRHHQGLRSSLIECAWTTVQRDLVMLNRYEELLQRHTGKRAIVIIARKLLSRIYHVLKTGELYQVGYST

SEQ ID NO: 494864 - protein, 317 aa, unidentified
MNRELKVVGIDVSKARLDVCVLPEGAASSQANDEAGIVGLVEALKRLRPDLVVMEATGGYETEAAMAISAAGLRLAVVNPRQVRDFAKASGFLAKTDAIDARVIAQFGVAIDPQVTAVPGEDAQELQAMMVRRGQLIAMRTQEKNRLALAFGTMRKPIKEHIAWLDRAIEGLDIDLTHKLRTSPAWKAKEDLLRSFKGIGPVSARTMLADLPELGSLNRKKIAALVGVAPFNCDSGTFRGQRHIWGGRARVRTALYMAAVAAIRSNPAIRAFYEHLTASGKPRKVAIVACMRKMLTILNAMAKTQTRWQPPAALQPA

SEQ ID NO: 494865 - protein, 376 aa, unidentified
MEHDSTLYVGLDVHKDSITIAYALGMGEVELLGKIGTSKADIDRLCKRLQSKARHIRIVYEAGPCGYGLYRQLAGKGFECMVCAPSLIPKKPGERVKTDRRDAVKLVRSLRAGDLSAVYVPSVEDEAFRDLSRAWVSAKNDLKRARQRLKAFLLSHGVRYTGKADWGPAHQRWLSAFAFGSVWQQLAFEEYRRTIEDRIAQCSRLEAALRDAMVNWRFYPAVLGLQTMRGIDFTTAVGMLAELGDLSRFTHPRQLMAWLGVTPTEHSSGEKRRQGSITKNGNSYARKLLVEAAWSYRHPARVSPQIQRRHEGIPKAIVDRSWDAQVRLCRRYRRLAARGKNPNIAVVAVARELSGFIWDISRLAMALAVPNEAPTM

SEQ ID NO: 494866 - protein, 368 aa, unidentified
MIKQTIVHHEGAAALTAADQNSKTQPATIKLGVDIHTERYVSVAQYDHATLQPPRRFRPEEFVPFVENLLARGHKVFIVYEACGFGFGLQRRLSALGATCYVVAPCKLDEQNKRVKTDALDAGALCQRLSRYVDGNTKELATIRIPTEEEEQLRHIHRQRTALVRARTKLQAQGRSLMVNHGKPALARWWREVGWKALSRVLPAWLLERLEIYRPLLELLDEQIATLTVQIEAAAPKELPSGLGKLTSVVVTREVCDWHRFKNRRQVSSYTGLCPGEYSSGSKRVPGSVTKHGNPRLRASLVELAWRLVRFQPAYPPISKRIEILRRGAKATGCARKKAIVAVARQLAVDLWRLHTGQCTAEKLGFQS

SEQ ID NO: 494867 - protein, 404 aa, unidentified
MIFVGDDWAEDHHDIHVMDADGVRLASRRLPEGLPGIGGFHELVAAHAAEPSQVVIGIETDRGLWVQALGAAGYQVYAVNPLAVARYRDRHQVSGAKSDAGDAKLLADLVRTDRHNHRPMAGDSSEAEAIKVLARGHQNLIWARTRHTNALRSALREYYPGALEAFDDLHDRDALAVLGRAPTPTEAAHLSLAKIRSALKRAGRQRNLDTRAQEIAAALRTEQLAAPAAITAAFAATTRAAVGIIIELNRQIADLEAELATHFEAHPDADIYLSLPGLGVILGARVLGEFGDDPNRYTTAKCRKNYAGTSPLTVASGKKRAVLARHIRNRRLYDAIDQWALCALTNSPGARAYYDQHRAADDSHHQALRALGNRLVGILHGCLRHHTAYNENTAWAHRQITQAA

SEQ ID NO: 494868 - protein, 414 aa, unidentified
MRIIYPKAAGLDVHKKVVVAAITVLGPDGQSYQEKRNFETMTADLLALSDWLMSHGVTHVAMESTGEYWKPVFNILENNFEVMVVNAQHVSKVPGRKTDQSDAEWIAELMQFGMLKASFIPPVEQRELRELTRYRSTFVRERVNLVNRIQKLLESANIKLASVATDVMGMSGRAMLEAIIVGTASPEEMAELAKGRLREKRDQLVKALEGRVKPHHRFVLTELLCQIDSLDETLARFDEQIEAYCRPFEEAVQLLDTIPGVGRRAAEVIVSEIGTDMSRFETADHLASWAGVAPGNNESAGKRRSGKTRKGNQSLGVILNQSAHAASRTKNTYLSAQYHRLAGRIGKKKAIVAVEHSILVIGYHLIERKEPYRELGGDYFDKRRPEATAKRLVKRLEKLGYQVVLQQQPVSAAT

SEQ ID NO: 494869 - protein, 400 aa, unidentified
MERSTTVWVGADIGKTHHWICTVDSDGRPLLSMKVANVQADLVAALAKVADLADQAVWAVDIIGAPSALILALLAREATPVFYASGRVVNTMSTAYTGEGKTDAKDAYVIAETVRMRRDLPVIDAVAELTRELALLTAHRADLIADRVRMINRLRDVMTSVFPTLEQEFDYSSHKGALVLLTEYASPKRLRRLGETRLVQWLRRQQVRDAAGVAARAVAAARGQDVELPGQQVAEMIVAELATSILRLDRRVKDLNQQIAATFHRHHQAATIESMPGFGPILGAQLLVAAGDLGAFPSAGHLAAAAGLVPVPNDSGRRSGNLHKPRRYSRPLRHVFYLSAQTSMMREGPNRDYYLKKRARGHPHTQAVISLARRRIDVLWALLRDDRIFSLSPPSLTAAA

SEQ ID NO: 494870 - protein, 410 aa, unidentified
MDVMIVCCAGLDVHKDSIEACVRRIDKDGKLQQQNRRWGTMTRELESMAEWLSREAVTHIAMESTGVYWKPIFNILEKHFQVLLVNARSIKHVPGRKTDQKDSQWIAQLLQYGLLKGSFIPPRQQRELRDLTRHRAQVMGEHSRILNRIQKVFEDANIKLGSVASDVGGVSGRLMLQAMVEGEKDAEKLANMAQGRLRSKRAQLREALHGRMSEHHQWMLRLLYDQLLSVESFLSKLDEKIEQLTRPQQPVVEKLDQIPGIDRRVAEVLLAEIGTDMSPFPSSAHLTSWAGLCPGNNESAGKKKSGKTTKGSRWLRQALVQAAWAASRKKDSYFQAHGRNLMRRRGKKRGLVAVAHSLLVVIYHMLKENRDYVDLGAKFLDQIRSQHLIRFHTKRLEELGLKVLTTPMAA

SEQ ID NO: 494871 - protein, 368 aa, unidentified
MKQYTLKAAPAAEAKEIKNQKAPKAKRILVGLDTGLGTNQACRKVDNAAIGPVQNLRSETEVELYIEHQLELADEVVVVYEAGPFGYGLYRKLTARGAKCLVCAPDSTQQKRKRRKNNPIDSRTLASNLFNYLNGNEAALQLVRVPTPEQEQARLVSRQQDQLVEERKRLGAMGNALLLSQGFGSWKNWWRPKAFNSLKRVVPGWLLEMLGSWVDLLKVLDEKIQKAKAAQAKGWSGPRPKGAGANSLVQLQSHVLDWNLYPNRRKIACLAGMVPSEWSTGKSQRLGSITKVGVPAIRRIITEMVWRIILFQPHYRPVQKWQEVLRGTNKTLKKKAVVAIGRQLIVDLWRLQTGRLSAQELNLVLIGG

SEQ ID NO: 494872 - protein, 412 aa, unidentified
MNQKVYVGIDLAKDSSRVAVVDKDGSKLTSPFSIKNTRDGMEKLLSKLNSYKNDQILCGMEASSNYWENVYSYLKDKKVSCLLINPYQVRRYRQALGLKIKTDSVDAEAVAQLIRAKKYDNLYISDEVAVELKELVRIKFSFARRAKDLKKGVMSLLCLVFPEYTRIIPHPFSKVSTEILSKYPTSCHMAKASVSKLVKIFRRYQGCRFGADTAKELISAAKESFYSGRASRSRGMSISMQIEEISSLSKRMEEIEEEIKSILDPADPKGGPPSFGILNSIKGVGIGTISAFLGTVGDMSRFLNSDKLVSYIGFYPRIFESGKYKKKNPGIQKAGPRELRYMLYLSSVAAIKHNIYLKKYYNDLVSAGMPAKKALIKVAVKIVRMMYSMLKYKTHYDPSRVFLQYRPEKIAA

SEQ ID NO: 494873 - protein, 352 aa, unidentified
MEITTIGIDLAKHVFQIHGVDSTGKAVLRKQLRRDQLAAFIVQLPPCLIGMEACGGAHFWARKFKPMGHQVRLMAPQFVKPYVKSNKNDRADAEAICEAVGRANMRFVAIKTPEQQAVLALHRSRQGFVRARTAQINQIRGLLAEFGHVTAQGMAALRQRVPDILEDAGAELPATFKALIQRLLEHLNALDAQVSELDEQILAWHRSNAQSQKLQQIPGIGAITASALVASVGEVTQFSCARELSAWIGLVPRQHSSGGKERLLGISKRGDVYLRTLLVHGARSLIRQAQLHPERYAWLTALIGRSNANIAAVALANKNARIAWALMAHDKAFEANYRSAHNRPESAVPDNR

SEQ ID NO: 494874 - protein, 321 aa, unidentified
MSEASNQWWVGVDVSKDWLDCCCTGAPAEQQSSRWSNDAEGIGALLKSLSGAPIGLITLEASGGYETAAATRLAAATLPVVVVNPKQVRDFARAKGILAKTDRIDARVLAQFARLIRPAVRALPDDEQRELMELVDRRAQLVAMRAQERTRLATVQPVARESITEHIRWLDERIGKLDVDLTHRLRTSEAWKVKVDLLKAVPGVGKVTLFTLLARLPELGHLSRRAIAALAGLAPMAADSGQHRGKRFVQGGRAEVRAVLYMATLTAKQHNPLIRALFERLKAAGKPFKVAMTACMRKLLTILNAILKSQQPWNPSLHSNP

SEQ ID NO: 494875 - protein, 366 aa, unidentified
MKKISTMQAFSNELLKEQKLTMGLDLGDRWSFYCVLDEAGKILLEQKVSTTPAAMKQTFLKIPRSLMAMETGTHSPWVSRLLTELGHAVIVAHAQKVELITKSNRKDDRHDARTLARLARIDPELLGPIRHRSAKAQIHLSVIRARAELVSARTALVNAARGLVKSFGERLPKCGTHQVGEKLAEGVNAELRDVLSPLLREVESLSERIKEYDERMEKIAKEVHPEVSLLKQVKGVGTQIALTYILTIEDPYRFPKSRAVGCFLGLRPGRRNSGQSEPQKHISKEGDRYLRTMLVQGAHYILGPFGEDSDLRRWGLKLAERGGKNAKKRAVVAVARKLAVLLHRLWVSGEVYEPLRNSQKAMRAVA

SEQ ID NO: 494876 - protein, 358 aa, unidentified
MVDKVTEAAVVGGVDTHKDLHVAAVVDQNNKVLGTQYFSTTRQGYRQMLAWMTSFGTLKRIGVECTGTYGSGLLRYFQNAGLEVLEVTAPDRMERRKRGKSDTIDAECAAHAAFSGIRTVTPKTRDGMIESLRVLKTCRKTAISARRVALQIIHSNIISAPDELREQLRNMTRMQLIRTLGSWRPDASEYRNVTNVYRISLKSLARRYLELHDEIADLDVMIAAIVDELAPELIKRNAIGYESASQLLITAGDNPQRLRSESGFAALCGVSPVPVSSGKTNRYRLNRGGDRAANSALHIIAIGRLRTDAKTKEYVARRVAEGHTKMNAMRCLKRYISREGYTLLRNQNRRMNSIPITA

SEQ ID NO: 494877 - protein, 422 aa, unidentified
MLEETHDNDQIIQRVAALDIGKAELVCCVRVPHPDRPGKRLQEVGSYPTMTRSLLVLVDRLGELGVTRVVMEATSDYWRSPFYLLEAHGFEVLLVNARDVKHLPGRPKTDRLDAVWLCKVAERQMLRPSFVPPPAIRRLRDVARYRVDLVEVRTAEKQRVEKLLEDAQIKLSVVASDIFGISGRQMLAALIAGERDPKLLAQLARGRMRAKLSVLAEAFTGFFTDHHGFLLAKMLARVEALDADIAELDRKLEELIVPFGQAVDRLDEITGVGRTAAQLILAEIGTDMGRFPTAGHLASWAKFTPGVKESAGKKKGKSSTGHGNRYLARVLGEAAVAAGKTNTFLGERYRRIARRRGTKRAIVAVGRSILVIVWHLLSDPDARFHDLGPGFYDTRIDAERKKRNHIRQLEALGYKVTLQPAA

SEQ ID NO: 494878 - protein, 359 aa, unidentified
MEGGTDTRRQVVGGVDTHKDLHVAAVVDEQDRLLETRSFATTRQGYRQMLAWMCSFGDLQRVGVESTGSYGAGLLRFMQQAGITVLEVTTPDTQDRRRRGKNDDLDAQNAAHAAFAGKRTVTPKSRDGMIEALRVLTACRKTAVTARRIALQMMQNTVVCAPDALRDQLRRMTRMQLVRTLAAWRPDLTAYREVESAYRISLKSLARRYLELHDEIGDLDAMIAAIVDELAPNLIARNSIGHSGAAQLLLTAGGNPDRMRSEASFAALCGVSPVPASSGKTIRHRLNRGGDRAANSALHIIAIGRLRTDSKTREYVARRVAEGHSKLDAIRALKRYLAREVFTLIMQRQRQINASRIAT

SEQ ID NO: 494879 - protein, 343 aa, unidentified
METKRYIGIDLHRNCFTACIRLENGREYLREWKLKDLTTFTGKLRATDQVAVEVTGNTRLFYDAVAPHVERVVAVNPNQFKVITHSVKKTDPNDARNLALYLAKDLLPEVRMKDKTRAQIASLTQTRDSMVKLRTALKNKVNNICSAHGINLDKEFLASEKGLEAVLEMRFDPLVNMELKIIVDQIRSLNRSVAELEEAIGQEGRKLDGHKNLTSIKGIGGLSGSILLSIIGDIDDFADEGKLAAYFGIVPRVCNSNETEHSGRITKRGTKLGRTTLIQCALIAQRYNPYLRSYYERMKKRRGTGKAIVALARKFLGIIYRTLKNKWVFADFPNFVLAEEATR

SEQ ID NO: 494880 - protein, 342 aa, unidentified
MSEASMIGLDLAKTTFQVHGASADGSVAFRRKLSRRKVLTFLAEQPRCTVAMEACASAHFWGRSIRELGHAVRLVPPVYVKPFVKRQKNDAADAEAIAEAASRPTMRFVDVKSEPKQARGVAFKTRALLVRQRTQTINALRGNLAEFGVVAPQGPAHVERLRAVVADPDTSLPAAVVGPARMLLEQIDSLTAQIAALDRDIQQTARQHDSTRRLMDIPGVGPMCAAAVDAFAPAMTSFRNGRDFAAWLGLTPRQHSTGGKSRLGGISKMGQRDLRRLLIVGAMTVVRWAARRGAPEGSWLARMLARKPRKVVAVALANKNARIIWALLTRGDAYRDPAAAMA

SEQ ID NO: 494881 - protein, 427 aa, unidentified
MKYQVAAIDVHKKMLAVVVADVAGEGEYQFERRKFGTTPEQLHVLAQRMIQQEVEEIVMESTAQYWKPVWGALERLWKPARQQREGATKMSGKLHLCQAKSNRGQRGRKSDFLDAERLVKRLVAQKLVLSLVPDAEQRLWRTVTRRKYQLTRDKVRLHNQLESLLEEAHIKLSSFVSDLLGLSARRMLKALVEGATDPAAIAALADGRLRATPAQLRDALGASTQLHGVYRRLLKMMLEDLKQLEEQMEQLDGEMATLLEDHQEVVQRLAEVPGLGVSSAVQIIAEVRPQAEVFNSAKELSSWVGVCPGSEESAGESQSTRSPKGNRNMRRLLNQAAQAAVKMKGSIFEVTFRKLVPRLGYKAAIWAIAHRLCRLLWILLRKGVRYQEHGPAVSAKSQRARTTKMIKELRKLGYRIESGPLPAGAVA

SEQ ID NO: 494882 - protein, 370 aa, unidentified
MSIIYWVGIDDHADKWTIAVYRGDEARPSKEFELIPDKKGYQRLLSCLKGLGGEVRVVYEAGPCGFDLYRKLRKAGLNCEVAAPALTPTKPGEKVKTNRRDAAKLGRYLRSNELTLIVVPDENQESLRDLIRSRASVQKDVGRIKRQIVHLLLRNGHRYRDGKAWTQRFWMWLKGIKLSGVHSTFVLAEMIVEVEHRIENLKRYDQQVEAAAQTPEYKPYVDALRTLRGVDTISAMTFLSELGDLRRFPTAPQLMAAVGVVPSEYSTGDKTIRFAITKTGNAHVRRIAVESAWHYNRRLTLGRKLQARRKGQPPEIVAIAEKCERRLNAKFRRLTSRNKKSTVAVVAVARELIGFVWAIGQLAHPSQPKN

SEQ ID NO: 494883 - protein, 393 aa, unidentified
MICVGIDVAKDKYDCFILSSEGEVLADVFTIPNNAEGFDTLLQTIRRCARPEDKIKAGLEATGHYSYNILGFLLNEGLDTYVINPLHTNLYRKSLSLRKTKTDRVDARTIAAMLMSDVDLKSYTDTAYHNEELKSLTRYRFDKVRERAKLKQSVSRLVTILFSELEKLVSTLHMASVYALLSEFPGAKQVSEAHLTHLKAVLYDASKGRYGSDMATTLRDAARCSVGSVMSAKSLELRHTIRLIHELDAEIEDIEAAIQSMMGEIQSPITTIPGMGVRMGAMILAEIGDFSRFDSPDKILAYAGMSPSTYQSGQLSLSGAYSHMEKRGSRYLRYALYNATKYVCLWNPTFAAYLAKKRAEDKHYNVALSHAAKKLVRLIYALEKSKRPYSTAA

SEQ ID NO: 494884 - protein, 343 aa, unidentified
MNEISMIGLDLAKNVFQVHGVDASGKVVLQRQLRRGALETFFAKISPCVVGMEACGSAHHWARVIGLHGHDVKLMPPAYVKPYVKRNKNDGRDAEAICEAVSRPTMRFVAVKSVEQQAMLSVHTTRALLVKQRTMVANALRAQLSEFGIVAAQGHKGLHELMARLQAPSEAIPEMMRSALLALVGQWQALDANERALEKQIVKAARCDREACRLMGAPSVGPIIASMVLAKVPDASVFRSSRDFAAWVGLTGRDHGTGGKHRPGRISKQGDRVLRTLLINGASAHLRQQKRRGVSDPWLRELLARRPYKVAMVAFAAKTARIIWAMLTKGEAYRDRASAPAAA

SEQ ID NO: 494885 - protein, 323 aa, unidentified
MTRTICGVDISSQSLDARIGHEGAFAQFPNTTAGIAALRSFCQAHQVELAAMEATGGYEQLAFQQLSEQGLPVAILNPRSVRQFAQSMSSLEKTDRIDAGMIAWYAEVKKSRPTCVAPESQQHLRALVTRLHQLTDIRTAQLNQQRLVTDRAVQASFKKLLAVLARQIAELEKRIAALLEKDPLWRELDQAFRTIKGVADRTVARIMAEMPEIGVLSNKTISKLAGVAPLANDSGQHQGKRAVRGGRATVREILFIVASVVGRYEPDFIAFQQRLRAAGKPPKVVRIALAHKLLVRLNAKAREVRQRLATLQPDRMALLSGSR

SEQ ID NO: 494886 - protein, 372 aa, unidentified
MTSIIYVGMDVHTTNYTLCCYSMEDDRFFAEVQVEPEAKNILKYLARIEKQQSRDCRIVCGYEAGCLGYSLYHQLHAHGIDCVILAPTTMMTKPGKRIKTERRDARLISKCLAFHTYSPVYIPTEVDDAVKEYIRMRDDANSALTRVKQQIIAFCIRHGKIHDGKSYWTNKHLEWISSLDLGNKILSEVLQEYLIRYYQQREQVDMYDMRINELAQAEPYRQKVEKLGCFRGIAAHTALSFCVEVGDFRRFATAQQFASYLGLVPGECSSGDKQQYTGITKAGNSHLRKLLVETAQVFGRSATKSGKSAALKERQAKCDSLTVAYADKANARLKKKYFKIAMRSKVNIAKTAVAREMACFIWGMMTDNISCA

SEQ ID NO: 494887 - protein, 313 aa, unidentified
MTNVTFPQLIQRGCGIDVHLKVVVATIDGVGIQKETRSFNTFTSCLTEMKEWLLANGITHVAMESTGVYRKPVMRVLEEDIPNVWIVNARHIKNVPGHKTDKMDSEWICKLLLAGLLKPSYIPPKEQRQLRDLTRYRNKLIQTIAAEKNRMMRVLEDCNIKLSSVVANTSGVTATALIDMLCDGRKLTIEDIESVYHKKLSASPQELLEACTGFVEEHHVYMLQMIRKSIAQTQGLVDELSKRIKDILIKYDNVLEALKEIPGFNTKVVEDLISEIGLDMSAFPSEKHLASWAGICPGNNESAGKKKRKNHSW

SEQ ID NO: 494888 - protein, 319 aa, unidentified
MSKEIIPHVYVGIDISKDHLDVCLMPGDQRLTLNNDAKGLDQLTERLSKETSPLIVMEATGGYDVPIAGALLSKGFPAAIVNPKRVRDFARAMGRLAKTDSIDAFVLARFAQEMKPQIRSFPSEKERFIKELVSRRQQLIDVRTAEKNRLYRAVSPQVKKSIQLIIDTVNQQIREIEKQLDDEIKSNPVLHEKDQLIQSVPGVGPNTSRMLLAALPELGGLSGKQIASLVGVAPFNRDSGKMRGKRMVAGGRTGVRNLLYMAALVASRHNKIIREFYLRLRKSGKNGKVALVACIRKLVVILNAMLKKKQPFCHLMLDG

SEQ ID NO: 494889 - protein, 281 aa, unidentified
MTVVGIDISAQSFDLVSRRDGRNAKAQRFEQTAQGHARAIKQLKALKPECVVMEATGVYYLDLAMALHEANLPVCVINPRSFRHFAEIHLTASKTDAIDAALLAEYAERMTPRRWTPPPKHCLGLRDIGRQINRLIHARTQAKNRLHALSAKTATPELLIEDEQQGIAQLDRRIERLKQAAMELIAQSETLLSHFKHMSTARGMGEASSVAVLAELCTLPSDLKAAQVSRHAGLDVRLTQSGTSVNRPGRLSKAGNAYLRAALYMPAMAAIRHEPRAKAFL

SEQ ID NO: 494890 - protein, 449 aa, unidentified
MVRTQGKLSGLPIINEKAAAIDIGSRFHVVAVPPNLSAEPVQTFQAFTADLQRMANWLVALGITTVAMESTGVYWIAAYEILDSRGLDVVVTNARESRAVPGRKSDVNDAQWLQRLHACGLLRPSFRPSGDIAALRAYLRLRERHLDYAASHIQHMQKALTSMNLQLHHVVSDITGATGMKIIRAIVAGERAPSVLAAMRDRNCKSTVETIQAALVGNYQAEHVFALQQALALYDFYQARVDECDAVIQSVLAKLAADKPNPEEPLAKARHRADLSNGFQFDVRPVMRQLTGVDLTQIHGIGAYLAVRLVAECGTDLSRWPTAKHFTSWLTLSPGCKISGGKVLASHTRKTTNRVTALLRLAAVTVGRTSTALGAFYRRLAARIGKAKAVTATARKIAILFYNAMRYGMKYVDPGADHYEHCYKERVIKQLHRRAAEFGFSLQPVEGVS

SEQ ID NO: 494891 - protein, 482 aa, unidentified
MKKRNIYQNQSQELLSLFEQAANNAKVMCVPIDYAKKDHVVMFCNGYGDILRKPFSVKNSPQGVDYLTDQVMRSCRQRAISEKHVFFGGEDVGSFADNFISTLRSQGWLVAGVNAHEAKTQRENLQASTDRLDLMGIAKSLLNRRANCSPAQSGIYLNLRTVVRHRRKLVDITTEVKNRIHAVVDRLFPGFLNESKSGITPFSKSSLWLMKERFSAGQIRRRRRPTLIEALRRLGTKKPECTADQLQQYATQVLKPPQDYVHMLQLSLAQHVTHFCCLQESIVQLEKEIPVNLAQTQGAFLTSVRGIGIVLAAGVSAEIGNPFEQKTLNNLVSYCGIIPRVKQTGGPQGETKTGKVAKRCNRILKDYAVQSASHLGLHGPADLMSDYKRRDAAGQHADFGMTRRYLRMAMCLMRTSQIYLPSGLRKAQGQMDERADYYLITWPYLRDKWQKSGALEIAFKADQPLGQWRKIVQQFYGIKLTL

SEQ ID NO: 494892 - protein, 411 aa, unidentified
MTDYELYVGIDWATEAHQVCLLDPSGRRREERSVPHTGAGLAALADSLLTVVADPARIAVAIEVPRGAVVDTLLERGLHVFALNPKQLDRFRDRHTVAGAKDDRRDALVLADALRTDREAFRRLQVEDPRLIHLRELSRLHDDVVREHTRLAHRLRDQLLRYFPQVLALCPAADEPWLWTLLTQASTPAVAQRLPLGALRTILRAHRIRRVSPETLHAALQLPALRLAPGTVEAASEHVTLLLPRLRLIHDQRVQCERRLEEVLAALSTGAGPDAQQEHRDVTILRSLPGVGRVVAATMLAEASQPLAARDYQTLRAHAGAAPVTKQSGKRAIVHMRYSCNRRLRDAVFHWARNSIKSDPHCRAHYQRLRQRHGHARALRGVADRSLRVLIAMLTTRTLYDPARWGGQIAA

SEQ ID NO: 494893 - protein, 421 aa, unidentified
MKDSRTKTANRVQEGTLIVAVDIGMVTNHGYCTAVDGRSTKTFSFDNTREGLDTFWSMTLASKTRFQCTEVIVGYESTGPYGEPLIHYLKQKPVTIVQVNPMHTKKMKEINDNSPLKTDRKDPRVIADVIRLGHALSVVVPEGDAAYLRRVNNARERHVRERTSLLNQLQQFVFVIFPEFSRVIKTIDSKTALYILKKHTTPAKIGKVKLEKLGAEMRRRSMGKFGAEHAAALINFAKTTIGIEEGVEGLVMDIQHVLMQLEMINSLIAELEHEMEITLHRIPYSRKLLAIKGLGIVTVAGLIGEIGDFTRFTTQAEIAKLAGLNIYEISSGKRKGQRRISKRGRSLLRKILYYAAVQTIRKNGIMHDYYQRLIGRGMRRIMALVAVSRKLLRIIFAIVRDDSAFMANYESQRKEVIREAA

SEQ ID NO: 494894 - protein, 315 aa, unidentified
MSESGKEMFIGIDVSKEKLDVAVRPTGEFMSFSNNEDGISFVVDFVKSFSPKLVVLEATGGLETAAVGVLADKSLPVVVVNPRQVRDFAKATGKLAKTDAIDAHLIARFGEAVRPEIRLLKDQEAQKLTALITRRRQIVEMITAEKNRLHAAPKWTSKDIQTNISWLEKCLKKVDKDLKNLLKKSPVWREKDEILQSTPGVGPVLSMTLLSGLPELGTLNRKEIAALVGVAPLNRDSGLFRGKRMIWGGRANIRSVLYMSATCAMRFNPAIRIFYERLRLAGKLHKVAITACMRKLLVILNTMIKNRTCWSTVQS

SEQ ID NO: 494895 - protein, 399 aa, unidentified
MFYRPPLDIRVSVDVGCKSHQVAVGLSTGEVIDEFSINHQPDGFRKFFAKLEQLEQQYQCPVRVAMEGYNGYARPLDSMVLARGWQLNNINNLKLARFKEIFPGAAKTDVIDARRGLELFQLQDHLPTAKDVLQVVAEPPRENLMLKRLSRRRRRLVNERVRVLNTLQADLQAVCPSLLALTGEANNLWFLQLLVHTDDLRKLPRLHQKTLRKIPGVGAAYASRIGQWQKQAQFSAETEWVGEMIQQDAARILELHVQIKALEAKMAAAAEKSFIASTLATLPGFGPICTAELAGEIGHEARFTREAGLALYLGMATLDNSSGQYRGTKIPRQVNSRAKAAMMIAVDRHRKQVPASQHYYEKKRTEGKGHNQAVRALGRHLSRIIFKMLKERRAYVPPN

SEQ ID NO: 494896 - protein, 356 aa, unidentified
MSSKLNTAIAVAGIDIGKNSFHVIGLDKRGAIVLRQKWSRGQVEARLANTPPCLIGMEACVGAHHLSRKLQALGHDARLMPAKYVRAYSKGQKNDFRDAEAIAEAVQRPTMRFVATKTGDQLDLQALHRVRARLVGQRTGIINQIRAFLLDRGVAVRQGLRFLRIELPGILAKRTDVLSPRMLHLIEGLADDWHRLDERIEVLSSEIGALACGDPACDRLMTVPGIGPIISSATVAAIGNGAAFSKGRDFGAWLGLVPKQISTGDRTILGKISRRGNRYLRSLFVQAAWVVLVRVGPKHWDRYGLKSWIEAAKKRLHHNVLAIALANKLARIAWAVLNKERKFECIRTNKMSPRAA

SEQ ID NO: 494897 - protein, 406 aa, unidentified
MKQIVSVGIDVSKGKSTVCAMIHPNMIIKESFEVLHTVEEMSMLADYIGSLDGEIRIVMESTGHYHLPVAQFLYQKGFFVCVENAYIIRQFSRIMLHGAKTDPLDAKKLAKYGLAYWSELKPYKFHPSCYTELSLLSKQYQTYIKLLIAAKQNVIHLMDEMLPGFKEALDTASSVQFSKVKYVDFAKEFYHVDMIKTMGKEIFRENYKQWCKEKGYRFQSEKADELFHLAEDGIPTLPTEFPSTRLCMEVATEQVSQLGYALEQILSQMQNLAKTLPEYQTIRQMGGMGEKLCVRFIADIGDVRRFHNGKALVAYAGIDAPPYQSGQYTGTKRRISKRGNSALRKTGYEVMKSLKSHPPKTDTRVYDFIIKKENEGKSKKQAKIAGLNKFLQIYYARVIEIYKNIV

SEQ ID NO: 494898 - protein, 464 aa, unidentified
MPYRPPDMQRSIQEPPAAPGVSPSECFGFVGLDVSQDEVVACMLGPDGQELAAPWSIPNNQPGAQGLAQRLLHLSQTRGLRRVRIGLEATSLYWWHLACFLKDTPTLAPLQREVYLLNPILVKGLKKVYPDRGKNDRLDAFYIAERLRIGRLPAPFDLDLHYAPLQRLTRFRVHLAEALAREKNYFLTFLFLKFSSFGQAKTFSDPFGATSSALLEEFTTEQLAQTPVEELAKYLNAKGRGQFEAPDDLAASVQRLARDSYRLDKMLDEPVALVLATTMANIRAFQRQLETLDKTIVRELEALPLERRVIRSVPGLGPVLTAGLVAEIGNIHRFDNEAALAKMAGLVWNQFQSGSFQAEDTTLAKTGNAYLRYYLIEAANSVRHNCAEYQEYYAAKFAQSTKHAHKRALVLTARKLVRLIDSLLRAGAVYQASEARQDQREVLTAPRAARPQPPRRARLAAAAG

SEQ ID NO: 494899 - protein, 389 aa, unidentified
MTQVDDLSRSLAAFDQNSTLTIAIEMSAASWLVAGVIPGIDRLPVKKLQPDPDGLLRLVERWRAEAVKAGRTIARIVLAYEAGRDGFWLARWLRTRGVEAHVIHSTSVAVSREHRRAKTDRLDTGMLIRVFLGWLRGERGHCGMVAIPTLADEDAKRPSRERENLVAERTRISNRLKSALARLGIRGFKPTLRKAPQRLAGLRTLEGMPIPPNTVAEMQRDMARLAVVREQIDEIERARLQALQQAAKSGPHAMVRLLARIVGVGIETADMLVHEVLTRNLRDRRAVARYVGLTGTPDESGSKRREKGLAKSGNSRVRRGLIQLAWRFLRFQKNSALARWYRARTEGPKGARKTTMIVGLARKLLIALWRMARTGVVPVGVELRQLASA

SEQ ID NO: 494900 - protein, 321 aa, unidentified
MTRPEVYVGIDVAKDQLQVALRPSGEQWPVSYDRPGLEELTKRLRTVKPTMVVLEATAGMETPVAAALAAIKLPVVIVNPRQVRQFARATGRLAKTDAIDAQVLAQFAQAVEPPLRPLPDAATQQLNALVTRRHQLVEILAAEKNRLGQAAESVRTDIQEHIRWLERRLAELDRDLAAAVHQSPIWRERDNLLRSAPGVGPVLSTTLLANLPELGRLNGKQIAALVGVAPLNRDSGRFRGKRTIWGGRARVRTALYMGTLVATRCNPVIRPFYQRLLAAGKPKKVALTACMRKLVTILNAMVRSQSSWQITDLTLARQDSC

SEQ ID NO: 494901 - protein, 390 aa, unidentified
MIYVGIDVSKFKHDCVIINSDGEILVDVFQVSNNLEGFTKLKNIILENVPNNDLQKIKVGLESTGHYSNNIINFIHQNSFPLTIFNPLSTNLFRKAQTLRKTKTDKIDAIFIATMLFSDNSKPYSPKSYHMTEIKSLARHRFRLIDYRAKLKISYTRLLDIVFPELASVIWSVHQNSAYSLLLELPTTRDISLCHLTKLTNILSKASKGKYGKDRATEIKELAKNSIGTCSLGVSFELQQTIRLIKNVDDEIKLLDKKVKVMLDELNSPIMSIPGISYVLASIILSEIGDIQCFSTPAKLLAFSGLEPSTHQSGKYTASHSKMVKRGSKYLRWALLQAALLTTNKTQTFKSYFQKKKSEGKHHLVCLSHVAKKLLRVIYHLENTNTAFID

SEQ ID NO: 494902 - protein, 338 aa, unidentified
MLHSGIDLHKRTIVFSTVTSEGQPVRDASVPATRAAVRAYFAALPGPHRAVVESTATWYWLADLLRSEGVDLRLGHSKYIKAISYAKVKTDAVDAATLAQLLRSALIPEAHMISPEWREARDLLRARLRLVAQQVRCKNTLDGLLAQYNVAAPAALPSLVQLRTTLLTEQLALLGAQAKRLGAALNPRLIPMPDVQRLVWVPGIGRIVAFTIVLEVDGIGRFPSARDFLSYCRLVPGAGNSGGKTRHKRTKDGNRYLKLAFSHAAVRAIQYFPEIRAFYRATARRKPPALARALVAKELARIVYYMLSKQEAFNGTFKGTPLSRTKTPKWPRLASPPV

SEQ ID NO: 494903 - protein, 381 aa, unidentified
MPSMQLRRDDVIVGVDTHKDNHVAVAIDGLGGRLGDIIVPTTIAGFEELLAFCLAFVGSAGRLIGFGIEGTGSYGVGLARYLRNQGLEVHEIARPARAAERRLAGKNDTIDAEHAARQLLAGHGLSTPKTADGAVETIRLLKIAYDGAVQARTTAMITLKATLATGSEALRAELEALTDHKLITACAALEGPAPLPPVRRGAPAVVVPADPDAAMRHVLSSMAKRWLALHEEAKAHAASLKTLTAAAAPQLVEAVGVGYDTAAQMLITAGDNADRIKSEAAFAKMCGACPIPAGSGKTNSRHRLYRGGNRQANAALYRVVIVRMRWHQPTIDYVARRTAEGMSKREIIRCLKRYLARELFRLLPAPDTIANPGGEELEMVA

SEQ ID NO: 494904 - protein, 412 aa, unidentified
MKQQVIEDVNIMPQLDKACGLDMHKDKIVGFISGKDGSNQEFREFGTYTCELKQIRDWLQESDIHHCLMESTGIYWMSLYAILTEAGIEVIVANPVHIKQMPKRKTDRKDAKWLCTLLLHGLVRPSFMPDNTQRIIRDYCRNRLFYTWQLNRIRNRLLKILESNNIKLRSVISSIHTLSAMDMIRLLAKGVTDHQELLNCARGKVIKKKDQLVKALDGTLQPYHHTQLQMLLQDYDHVQKQVDFLDKSITEIISEHYAQAFECLDSISGIGVKSAEIIISEAGKDMSRFPSADHFTAWCGIAPGNNESAGKRKNTAIKKGNSYLRVAIVGAAWAAVRMKDSYWHALFDKLRKRMKAQKAIVAVARRLLKVVYNTLETLTIYKEKGIAYFVDLQAKAALYQHAKLQWPQTNDI

SEQ ID NO: 494905 - protein, 341 aa, unidentified
MLIIGCDYHPSVQQIAMMDTETGECQERRMAHRAEAEQFYRTLRQQSASVRVGIEATGHSRWFERLLAELGFEVWIGDAARIRAKQVRKQKNDRKDAEHLLHLMLKDDFPRIWVPSAENRDVRQLVWHRHRLVQMRTRVMNQLQAIAMNEGIRRKRGLWTQRGRAQLEELSLPSWTSRRRQELLELLDRFDPNIEQLTEAVRQEAERRPEVERLQTHPGVGPITALAYVLVLGTPDRFRCGKQVGSYLGMIPCEDSSADHWRLGHISKQGNGLLRFLLGQSALSAIRLDDDWRRQYAHLTMRRNHAVAKIAMARKLAVRLFWMWRRGWDYEQWKKFGSHAG

SEQ ID NO: 494906 - protein, 353 aa, unidentified
MSIVAHVYPFVIGVDTHARNHVLAVLAPDGQLIDTASFPVTKAGIGRAISWAGRRTGADPGVLWAIECVATYGAGLAHAVAAAGYPVIEAPAMNARAYRTGKSDPIDARRIGEATLALEEDHLRHPRTDDGERAALRVLVAARDNMTGERTAAVNALTALVRTVDLDVDTRGPISATQITMIAAWRTRAEPIAVATARTEAIRLAKRIRALDDELKANHKTMTRLLTATPAAGLLDKTGIGPVTAAIALTAWSHKGRLRSEAAFAALAGVNPIPASSGNTVRHRLNRGGDRRLNRALHMATITRMTHDPETRAYVERRHAEGRTTKEIRRCLKRYLARQIYRFLNTATTPTPA

SEQ ID NO: 494907 - protein, 375 aa, unidentified
MRYSSEAFVAFDTSKLRNAVAIAEAGRSGEVRFLGEIDNTVAATCKLVRKLATQYDRLWFCYEAGPTGYGLYRQITSLGHACIVVAPSLIPKKAGDRVKTNRRDALGMVTQLRAGELTAVWVPDPAHEAMRDLVRARGAAVEDLRRKRQHISSFVLRLGLAYAGKKTWTKAHMKWLASQKLEHAEQRIAFEEMLLAVREAEQRIARLEEAIRGALADWSLAAVVHALMAMRGIDLISATVLLAELGDLSRFGTPRELMAYLGLVPSEHSTGDTIKRGPITKTGNRRARRTLVECAWAYRHPPRVGQEKQARVEAAPRAVREIAWKAQHRLYARYRALTRKGKLKTVVVTAIARELAGFIWAINREITGARAVATP

SEQ ID NO: 494908 - protein, 341 aa, unidentified
MSELSMIGFDLAKSVFQVHGIDEAGRVVVKRQLRRAEVLRFFAGLRCCLVGMEACASAHYWARELVKLGHDVRLLPPAYVKPYVKRGRKNDAVDAAAICEAMQRPHLQVVPIKTEAQQAVLSLHRVRSLLMTQRTMLGNALRGHLAEFGVVAPQGNAGLGRLVILALDAEDCALPQAAREALAMLAMQWRETDAKIAAIDQEILTCHRADADSRRVATIPGIGPLTASALVAAIGDPGRFETGRQFAAWLGLVPRQNSSGGKERLGGITKMGDRYLRSLLVVGATAMLRHRQKEQGTWLANLRARKSARQVTVALANKMARIAWAILAKGGVYQDPAALAA

SEQ ID NO: 494909 - protein, 380 aa, unidentified
MSDVSSTAPADVNQWIVFDVHKNSLVAGVLPASGGTPQVSRLENTERAIRRFIERTGDPATLAVAYEAGPCGYDLFRFLSGMGVACDVIAPSLIPIRAGDRVKTDRRDAKKLVRLYRAGELFFVQPPSPAQEGLRDLVRCRDDLRCARTAARHRVAKALLRHGHIYREGKTAWTAKHRVWLDRQRLDDPLAQLALEQMRAHLDGLDAQLATLDHELAQIAEREPWSDPVAWLCSFRGIATHTALGLLAEIGDFRRFAAPRELMSYLGLTPSEYSSGDQQHRGHITKTGNRHARRLLVEAAWHYQHPARLSKRIATNRRHVPAQVSSRAWQAQIRLHHRHRTLTSNGKRPTVATVAVARELCGFIWAAMTDQPLREEVAAA

SEQ ID NO: 494910 - protein, 495 aa, unidentified
MHNIGDVAVRKSCYDPVRKIARKRILRLWTCDSRFSRVEDSMSQRKKRSKGFKAIELPRQLQHVNLNAAGIDVGSDRHLLAVPEGRDVVSVREFGAFTTDLEALADWLTKCGVTTVAMESTGVYWIPLFELLERRGFEVKLVDARRVKNVPGRKSDVLDCQWLQQLHTYGLLAGAFRPSDEVCVLRGYMRQREMLVQTSSMHIQHMQKALQQMNLLLHNVVTDITGVTGMKILKAIIAGERNPKVLASHRDQRCQNSAATIAKSLVGNYREEHLFALKQAVELYETYQAKIVDCEAAIASYLGTQPKRTDDEPPANEKGTRAKDCVRGEVDMRAQLFQLTGVDLFSISGFGADTLLTLAGEVGFEMTAWKTEKHFSSWLSLSPGTNKSGGKVLNSKTKRSANRAAAAFRIAASSLARSKSALGAFYRRIKARAGAAKAVTATARKLAVIYYSMLKNGTTYVEVGQAAYEKKYRQRRLKGMQKQALAMGYQLVPIS

SEQ ID NO: 494911 - protein, 406 aa, unidentified
MLFVGDDWAEDHHDVEIQDETGRRLAKARLPEGISGISELHGLVGRFLPDDGDAAQVKIGIETDRGPWVAALVTSGYQVYAINPLQSARARQGHGVSGAKSDAGDAHVLADLVRTHSHQLRTVAGDSEQASALKVLTRMHQTLIWDRTRQVLRLRSSLREFFPAALEAYEDLAHSDVLELLTKAPEPDSAARLTRAQIIAALTRARRRDREGKTTAIMGALRTAHLTQPPLIAAAYGATVRALAALITTANEQITALEGQVEAYFGQHPDAEIYLSQPGLGPVLGARVLAEFGDDSSRYAGARARKNYSGTSPITRASGKKKVVLARYVRNNRLTDALHQQAFSALSGSPGARAYYDALRDRDIGYNAALRQLGNRLVGILHGCLKTHTPYDEATAWNQHAQHAAA

SEQ ID NO: 494912 - protein, 339 aa, unidentified
MGRYVGVDLHKNMFVVSFYNTDTLKHEVKSYLLKEIGCFIDDLDTADAVAVESTNNTRYFVNCICEHVREVKIVNPSQFKVISKSVKKTDTNDAKVIAEFLSKDMLPEVRMKDKKTAQINSLANTRDKLVKLRTALKNKIHNILSSHGILLKKESLSSEKGLQRILDQPVDPVAFVELEVIVSQIRGLNEGVKKLDKELEDRGSKLPGHENITSIKGIGKKSGSILLSVIGDINDFDNEKKLAAYFGIVPRVSNSNQSEWQGRITKRGSKLGRTTLVQCTLVAIRYSPRLRAFYDRIKAKKGSGKAIIATAKKLLNIIYFTLKENIIFEDFTNGVIRTT

SEQ ID NO: 494913 - protein, 364 aa, unidentified
MNATAALPIVGVDLAKSVFQLAIADASWQVIERQRLTRTQFERWFVNRAVGLVVMEACGSAHYWARWLTGLGIEVRLLPAPYVRAYVKRNKTDAADARALLEAARCAEIVPVRVKSVEQQAVQALHRTRSLWMATRTSRINALRGFCRKFGINIAQGARLGLEQIGRVLADPKSAIPELIGGTMKLLVEEIRLLEARIGELEQALTQTARQSPACATLLSIPGIGLLTATAMAAATGGSVNHFGDARHFASWFGLTPKEFSSGSTRRIGRISKRGDRYLRMLLTHGARSVLRAASAASQAGRSVDPLRTWALAVQLRSNHNKATCALANKLARICYACLRDGSPYGEVRRPEKKITRSAFPIPA

SEQ ID NO: 494914 - protein, 316 aa, unidentified
MYLGIDVSKLTIDCCLIVDGQNYQKKFQNNKGGFEQLINWLQSHKVNDKLHCVCEATGTYYEALAEYLYSRYTITVENPRKIKGYAIAELQRSKTDTQDAKLIAQYCQDRKHKLKAWKPPTKEQKQLQEIARYLDYLKQQRATEKAKQHEAPDYIKSHIQTTISNLTAQTQIVKKQLLQFYKDNPSYNNLRKRLKTITGIGEQATAVLLSTYKRHEFKNARQFTAYLGLDPRKFQSGTSVNGKSRISKIGSSEIRKSLYMPALVAYRCNAFPEFVGRLKNKGKHIKLILIAIMRKLAVIAFTILQNGQDFQVERYK

SEQ ID NO: 494915 - protein, 294 aa, unidentified
MNKAVVYVGVDVSKAYLDVAWAERSRRFANNKSGLSALMKWIQQSPVHLICEASGGYERGLLEAAEQNAIKLSLVQANRVRQYARAAGILAKTDQVDARVLCAFGSALQPKPRAPLSAQQKQLRELETQRRHYSRMLTAEQNRLAQLNDKELQRLTRRLLAALKKQMAAIDARIATLIAQDQALDEKAQKLTSIVGVGTRTAVLLLAQMPELGTLNRAQVAALAGLAPFNRDSGTLRGKRTIFGGRRALRSRILSDFYQRLRTKGKPHKVALTAVMRKLLLALNHTLKPTACFA

SEQ ID NO: 494916 - protein, 342 aa, unidentified
MLYVGIDIAKNKHDVTALNVPGKTVLKPLTFSNNKAGFELLDLSLRQLNQDCLIALENTGHYAFNLLNFLHEQGYKVYTYNPLLIKEFAKSLSLRKTKTDKKDAHGIALKLLSDPNREQFQHDNRQVDLKILARHIHRLKKNSLIGKYNTLVVLISSFLSWIKSLESIQNIPTNLLTRYPNPQKRLEARFDKLIEIKRLTASKIQDILSIAPRSIGTTSPAREFEIIEIIKHYKRLIDKAETCVNDLMAEFNSVITTVTGIGGRLGAVILAEIRNIHAFDNPAQLQAFAGLDSSIYQSGQIDLAGRMIKRGSPHLRWALIQAAKACARFSPAFKAYLKTKLE

SEQ ID NO: 494917 - protein, 345 aa, unidentified
MPIVGGLDIHRKQITFDYLDTATGEVKRGQIAPAGREHLRAWLARFAGCEDVAFAVEGCCGWRYVAGELAAAGVGAHLGEPADNAALRGRKRHAKTGKTDARHLRSLLAEGRLPECWIPPAQILEYRALLETYHDLRRAHTAWVQRIHAVFFHQGAPPLSEGMLRTEPGLEALRAAAAVHLPAAGQQQVATALDMLAATEAQLGPLRHQLRDAARHLTGARVLAERLYGVGPLTALALTCWLGGKYRFSSSAKAVRFTGLDITGHSSDRKGPPGRLSRQGPPVLRWAVYEAGKTHARTSAPDHGYYAAVADRKNTKRAALPEARKIVRQACHILTELGDDALTAA

SEQ ID NO: 494918 - protein, 343 aa, unidentified
MVHYVGLDVSLKQTSICVVNQLGSIVREGVVDSEPEAIAAFVRLNAPGAVRIGLETGPTATWLWTELKQLGLPVICIDARHAKAVLKMQINKSDRNDAAGIARIMQTGWFKEVRVKDLDSHSVRALLASRALLVKIKRDLENQIRGLLKNVGLVIGRAKFNVFTVRAEELIEDRPELMAVVRPLLKARQAIEQQTDDLDRKVLKLARYDAQVRRFMTVPGIGPITALCFKATIDDPTRFKRSRSVGAYVGLTTRRHASGEIDWTGRISKCGDAMLRSYLFEAAGVLLTRVPKWSALKAWGMRLAKRNGLRKATVAVARKLAVILHRMWIDGTEFNWSKKEVAA

SEQ ID NO: 494919 - protein, 363 aa, unidentified
MIESMTVTVGLDVHARSIRLAAVRADELLEERTLPYDEEAVERALRRWPAVRCCYEAGPTGFGLHRYLAERGIDCWVVAPGLVPQRPGDRIKTDPRDARKLARLHAGGLLEAIHVPTPEQEAARDLVRAREDARLDRMRDRHRLSKFCLRHGRTLPTRSWTVVRRKWLSEQRFQFAAQQITFDTYVHAVDLVDARIDALERSIRETAELEPWRELVGRLRCVRGIDTLTALALVTEIGDFGRFARAEEFMAFVGLVPSERSSGEQRRQGSITKVGNAHVRRLLVESAWHARRRPKVGYELSRRQRGQDPLVVERSWRCQERLYSRWGRMAGRGKPQQKIVVACARELAGFVWAIATDQPLRTT

SEQ ID NO: 494920 - protein, 403 aa, unidentified
MNNVAGIDVSKGKSMVSVLRPFGEVVAKPFSVGHTGSELKELADYLKSLDGETRVVMEHTGRYYEPVARFLHDEGVFVSAVNPKLIKDYGNNTLRKVKTDKADSRKIARYGIDNWAELRQHTPMDTIRMQLKTLNRQQSLYTKTKTMMKNNLIALLDQTYPGVNALFDSPVREDGSQKWVDFATTFWHVDCVRNMSLTAFAERYRKWCKRHGYNFSQSKAVEVHAGAQDLIAMLPRDALTKTMVRQAIDALNAVSASLERLKAEMQALAAQLPEYTVVMAMHGVGDSLGPQLMAELGDVTRFTHRNAITAFAGVDPGADQSGTHEAKSTRVSKSGAPELRRALFLVMDCLLKTQPQDDPVYRFMDKKRAEGKPYLVYMTAGANKFLRIYYGRVKEYLASLEGN

SEQ ID NO: 494921 - protein, 426 aa, unidentified
MSYRIAGIDVHKKMLAVVVADIETEGEYALQKRRFGTSPSQLRLLAEWLNGEQVQEAVMESTAQYWRPVWQALERYWQPECRKRQEDSRLAGMLHLAQAESNRARHGRKNDFRDAERLVRRLVAQELILSYVPDAQQRLWRTVSGRKYQLTRDRVRLRNQLEGLLEQAQIKLTSLVSDLFGLSGRRMLQGLAEGETDAAALAALADRRLRATPEQLCDALGACADLHPVYRKMLRMSLEQLELMDRQIGELDQELAALLEPCQPAVQRLAEVPGIGPDMAQQIITQIGPEAAVFLSAKHLASWIGVCPGREESAEESKSNRSPKGNRTLRRLLNQAAHAAVRVKGSIFELTFRRLAPRLGYNKAIWAIAHRLSTVVWKILHDGVRYEERGPAVSAKSRKARAARMIRELRSLGYRIEAPQLQPGAC

SEQ ID NO: 494922 - protein, 468 aa, unidentified
MPAGQRVEVDEHEEIVGRVAAIDVAKASGMVCTRVPHATRAGKRVTKVWQVASTTNAILELADQLAGEGIERVVVESTSDYWRPFLYLLEARGLVVWLVNAHDVKHLPGRPKTDRLDAVWLAKLNERGMLRPSFVPPAQIRRLRDYTRLRADLTADRSRHKQRLEKLLEDALIKLGTVATDILGVSGRAMLEALIAGQRDPKMLAELARGRLRDKHAALVQALTGRFDDHHAELARMLGDQIDALSGQIDQLTSRIEQTIAAIPAAQPSASGPGGGPDAAVQAASQSAQSAPGAVDPETGELLAALLPVVDRLDEVAGIGRHAAQVIIAEVGLDMGQFSTPAHLVSWARLSPRTIQSGTTRRAGATGKGNPYLKSVLGEAATAAAKTDTFLGERYRRLVRRIGKRKALVAVARSILVIVWHLLADPTARFHDLGADYHASRIDRDRRTRNLVHQLQALGHKVTLQPAA

SEQ ID NO: 494923 - protein, 377 aa, unidentified
MSKIKFVGLDVHAETIAVAVAEWGGEVRSLGIIPNREESIRRLVKKLGPAEQLQACYEAGPTGYIVYWELTALGVKCEVVAPTLVPVKAGDRVKTDRRDAQKLAQSYRSGDLTPVWVPDAAHEALRDLVRAREAAKKDQLRARHRLSKFLLRQGRRPPAGVKPWTQRHLTWVKQAVHFEQPAQEFTLLDYIHEVEHATLRIGRLERAIDEAVQSAPSRMRTVIEALQALRGVAQIAATTIVAELGEVSRFAAPRQLMGYSGMVAKEHSSGQRIWRGGITKTGNAHLRRVVTEAAWAYRHRPSIGGLLRKRQEKLSEEVKEIAWKAQHRLHARYRRLTGRGKSKQQVVTAIGRELLGFIWAIGVQAESKVREPMRCAV

SEQ ID NO: 494924 - protein, 355 aa, unidentified
MKQQAIQYVALDIHQATLVVSVRDEQGWVVMRATVATEAKAIVGLVRGLGSRVQIVFEEGTQAQWLYDVLKPYAERVVVCNTRGRGTTDNKSDRIDADRLSELLRLGSLKSVFHGASGLLTLKELVRSYTNLVEDGTRVMLRIKALFRARGIKTPGTSVYGTSKRKGWLSQLEGRGARMRAEALFTELDVLKELRPKAKAAMIAEARRQPGWKVLRSIPFLGPVRVAEILAIMATPWRFRTKRQAWPYVGLAVVTRSSADQEFADGKLRRRRRAPLTRGLNRNHHPRLKSVFKGAANAAAATEGPLKDFYNACVARGVREDMAKLTLARKIVAIALRLWKTGELWDATKLTLQVT

SEQ ID NO: 494925 - protein, 324 aa, unidentified
MDILGIDIAKRKFDVALQREERIIATGQFNNDGQGFLKLQKWLRRRKAEQVHACLEATGRYGDELALFLHEQGHEVSIVNPSRIKAYAESKLQRTKTDQVDAKLIADFCATQRPGAWEPPSEAQQELQALVRHIERLKEERTRAKNRRQSRVPSAVVLEAIDEHITFLDAQIEKLEQRIRDLVDDDPDLRRQVELLISIPGISETTATRFIAEVDVNRFSKANQVAAYAGLTPRKHESGSSVHRRGHLSKVGNRRLRAAFYMPALAAMRSNPIIMNLVQRLEERGKSKMTIVGAVMRKLIHLAFGVLKTRRPFDPNFINNPVST

SEQ ID NO: 494926 - protein, 387 aa, unidentified
MPQPNDLSRSLVALDHNSTIIAVVELSQSSWLVGGMVPGIERQPRKKLEPSPERLLAVLHRWRDEAVRAGRTITRIVVAFEAGRDGFWLARWLEAGGVEAHVIHPSSVAVSREHRRAKTDRLDTEMLKRGFSGWLRGERGHCSMVRVPTIAEEDAKRPNRERESLVGERTRINNRIKATLARLGIRNFKPTLRQAAERLATIHTPEGMPLPPNALAELQRDMARLGLVIGQIREIENARQKRLEQQPKTTPHAMVRLLARVVGIGIETADMLVHEVLSRPMRDRRAVARYAGLTGAPDESGARRREQGLARAGNARVRRGMIQLAWRFLRFQKQSTLALWYRARTADSRIGTRKTMIVALARKLVIALWRFVTTGEPLEGVALRPAA

SEQ ID NO: 494927 - protein, 374 aa, unidentified
MKEFSKYVGLDTHKETIAVAVADAMGGKSRFYGEIANTPEAIGKLVKNLCPDGEVISFCYEAGPCGYELYRQISQLGHHCSVVAPSLIPTKPGERVKTDRRDSEKLSRLDRAGELTPVWVPDQEQEAMRDLTRAREDMKGLERTTKQRLNAFLLRYGRIYESGKSRWTRAHFRWMEGLKFDVTVQQIVFQEYVDAAKQAEARVAGLEREMEKALENWVLSPVVEALMALRGIKLISAMTIIAELGDITRFDSPRQLMSFLGLVPSEASSGLNRRQGGITKTGNGHVRRVLVEAGWCYRFPARKTAHLQRRAEKCSAAVQAIAWKAQKRLCGRYRHLFGRGKLKVQVCTAIARELVGFIWAIACQVMNRPVESAG

SEQ ID NO: 494928 - protein, 403 aa, unidentified
MVSIGIDVSKGKSMVCMLKPYGEVVASPYEVAHAEQPIRELTHRIGSLEGEVRVVMEATGAYHLPLLEELKKAGIFVSVINPLVMKKYASSSIRKGKTDKMDAVRIANYGIDNWFKLTEHVSSEDIRAELCILGRQYAYYITVKVSLLLALTNLLDRTMPGIKKLIPASSNPTASEKYKLYDFVEEYQHFDRIAKMGRKRFVASYVRWAKKKGYHRNEAKAEAIFDLASEGIPTLPSGAQSTKIMTLESVRVLREVCKTVKTILSQMQTLAQTLPEYGTVRAMNGVGDTLAPRLIAEIGDVRRFKSGSCLVAYAGIDSPPFQSGAFTGTRRKISKRGSSLLRKTGYEVMKCLKTTKPAKDNAVYLFILKKEAEGKAKKAAKIAGLNKFLRIYYARVMEVYAEA

SEQ ID NO: 494929 - protein, 429 aa, unidentified
MNFRPIAGIDVGKFFSEMAILSPSNEVVARMKIRHDSSTDVERAVELLKKTEKDFDSRPFIVMESTGHYHKILFHSLCKAGFEVSVTNPIQTDSIKNIGIRKVKNDKVDARKIALLYRFQELKSTNIPNENIECLRSLCRQYYKLNDELTAYKNRLTGIVDQLMLNFKDVFSNIFSKAAIAVLEEYPTPAHILKANRNKLISLIQKKSRKSLKWSTAKYELLVSKARDFAPLSIHNASNVAMLGVYISMIKTLEENLEKVLKSIRLLIAEDMAKDMPMLALTLELLQSLPGIGLLSAATILAEIGDFSAFSKPSKLVAYFGVDPSVMQSGEFIGTRNKMSKRGSRLLRRVLFTIALANIRSKRDKTACNHVLLEFYQQKCRSKPKKVALGAVMRKLVCIIFAVLRDRKPYQLRSPQEHAQMLAAKHTAA

SEQ ID NO: 494930 - protein, 434 aa, unidentified
MEETGDEPLFCERAAGIDIGKQMVMVTIRIPSHTRRGGRQQETREFGTTRRQLLALADWLRCWGVERAGMESTSDYWKPVYFLLEREGFDCVLYHASQVRALPGRAKTDKLDSAWLAKVTERGSLAGSFVPPEDIRRLRTHTRYRRRLTQVRTAEKQRVEKLLEDAHLKLSSVISDIHGVSGRDMLNAIIAGERSPRALASLARGVMRRKAAVLQEALDCSFLTPEHVFVLQMMLGNIDHYTKQIAVLDERIASLCEPWERQVAQLDAIPGIGVTNAQDLIAEIGVDMSVFPTAGHLCSWARLAPRVTESGGKRKGKSATGRGNPYIGAALGDAAATAGRTQTFLGAKYRRLCRHMPKKKAQGAIMRTQLAAAHSLLSGPGAVYLDLGPGYYEQRADARRRINGHVRSLELLGWKVTLEPLDPETGEAITPTAS

SEQ ID NO: 494931 - protein, 377 aa, unidentified
MKKELAELAKQEQYGTLEDELNSFTEPQVIFESTGIYSRSLRAYLQRNKWQYAEINPLRSKIDMEGFRHDKTDALDARGLALAMKKHHYKPTYQQAPVYSELHDLERTYQDYNDDVVRAKNRLHKALQLTFPELEHVLSKQDGGLYWHLVQRFAHPDFVLKYGVSDLADQILDATPKNMGVKRALKIANKLLDLAERCAPSVSSNAHGVRAVVHLAQEVERLDGLKNEIIDEMTQLSQGLDEVKYLLSFPGIGIKTVMCLIGELGDIRRFHSANAINRYIGIDLIRYESGDHVMKSGISKRGNAYARKILYRAIMNIVSAARSKPSNVSDYYQKKKRSSSIKRTKMITIGAMSRLIRTLYHLVINNDYFDPKKSLAG

SEQ ID NO: 494932 - protein, 291 aa, unidentified
MSDVPCFVGIDVAQAQWDIALRPSGERWAVPNDTSGVTMLVERLQPLHPTLIVLEATGGLERLVTSALAMAGLPVVVVNPRQARDVARATGQLAKTEALDARALAHFADVIRPTPRPLPDAQTQELRGLLGRRQQLMVMRTAEQNRLAGTSERLTKDIVAHITWLNAAIATLDNDLETTLRASPLWRENDDLLQSAKGIGPVCARTLLLELPELGTLTRQQIAALVGVAPLHGDSGTLRGRRMIWGGRACAHGVIHGHAGGHALQPADQSLLRTAPRSGESQKSRPDGVHA

SEQ ID NO: 494933 - protein, 349 aa, unidentified
MLADKLDYVVGVDTHRDQHVLAVVAAATGALVAQRSVRTNALGYAEAVRFANEYAPCSRIWAIEGAGHYGAGFTRYLSGRGETVHEVGRSTRAERRLRGKDDALDATRAARSALASETHALPRSGQRQEALRVLLLTRRSAVDVRRVALVQLRSVIVTAPEDLRNELRLLPVGELLRRCSRFRRSSSRTPAQLATIIVLRSLAQRIQAATLEAAELEREILAHVKALVPELLDEPGVGPIVAAQLIVTWSHRGRVSTESAFARLAGVAPLPASSGQTIRHRLSRGGDRQLNRALHTVVLHRRQHDPATRDYIARRIAEGKTSREATRLLKRYLARHLYRVMQSATPLTT

SEQ ID NO: 494934 - protein, 342 aa, unidentified
MGEVVTVGLDIAKSVFQVHGVGVDGEVLIRRRLTRARMLPFFAKLPRCLIGIEACNNSHYWARELSALGHDVKLMPAQYVKPYVKRQKNDAADAEAICEAVTRPTMRFVAVKSPEQQSLMMLHRVRLMLNRQRTQISNAIRAHISEFGVVAPVGRLGVDRLLKVVADAGDDRVPEDARLCLQMLAAQLEVVKRQILENDRRVLASARRTELGRRLMEIPGVGPLLASAFVASVADPTVFKTGRDMAAWIGLVPKQNSSGGKDRLGSITRAGNRYLRQMLVVGAMAVIRYAERHGTKRPWLVQLLARRPAKVAAVALANKNARMVWALMTSGERYREPMPMAA

SEQ ID NO: 494935 - protein, 409 aa, unidentified
MERQLERCCGLDVHRDTVAACVRVPGPNGKRQQEVRTFGTTAAELLTLRDWLQAHAVTHVAMESTGVYWKPVFYVLEDAFTVLLVNAAHIKQVPGRKTDVQDCIWIAQLLEHGLLRGSFVPPAPIRELRDLTRHRKVLIQERTRAANRLHALLQDAGIKLASVATDILGVSGRAMLEALVQGTTDPAVLADLARGRLRKKLPALRQALAGRFRPHHAFLVGQLLAHLEYLDEAITAVSQEVDDHLAPFAQQLTQLDTVPGIHKRTAEVVIAELGVDMSFSPSDRHLASWAGLCPGSHESAGKHKAATTRKGNRWLRIALIEAALGAIRTKDSALAARYRRVMRHRGHNKAVVAVAHAILRAIYHLLAEGTTYRETGADYYDRRHTQRVTRRAVQLLERQGYRVVLEPAA

SEQ ID NO: 494936 - protein, 344 aa, unidentified
MKDVRILGVDLGKNSCSIVGLDGAGRVLLRRRTRREGVIALAAKLPGCVVAMEACCGAHHLGRLLVEQGHEVRLMSPEYVRPYVKAQKNDDRDAEAIAEAATRPTMRFVALKSEAQLDVQVLHRVRDRLVGQRTSLTNQIRSILLERGIVVPQGRRSLLEALAVLSSEPDGSRVGTRVQRLLDDMLDQWRALDARIKALDDEFAEMARNDPAARRLATIPGIGVLNATALVAAIGDGRTFSRGRDLSAWLGLVPHQATTGGRPKLLGITKRGSKYLRKLVIQGARAALPSLARTATPLGGWLRGLLARAHGNTVVVALASKLIRIAWALLRNETTFVAGGAAVA

SEQ ID NO: 494937 - protein, 413 aa, unidentified
MVEVLYERCCGLDVHQKTVVACLITPGRGGQPHKEIRTFGTMTADLLELADWLRAAACTQVAMEATGVYWQPIWNLLEEEFTLLLVNARHIKAVPGRKTDVKDCEWLADLLRHGLVRASFVPARPQRELRELTRYRTALVRERTAEINRLHKTLERANLKLGAVASKVLGLSGRQIVTALLAGTTDPAALAELAQGKLRAKRPQLERALVGTPGEHQRFLLAQQLAHIDFLDETLGEVSAEIAERLRPFDAALERLDAIPGVGRATAEVLLAEIGPDMSRFPSAAHLAAWAGMCPGNYESAGKRQKGKTRKGSKWLRAALLEAGQAAARTKETYLAAQYHRLVPRLGKKKAAVAVGHSILRSVYYLLQRGTTYQELGGSYFDARNREHLERRLVRRLEKLGFAVTLTPNHSAA

SEQ ID NO: 494938 - protein, 338 aa, unidentified
MDRQYVGIDFHRRRSVIVRLNSAGERLAVARVANDPFEFASAIAAAGDAPAVVIEATYGWYWVVDLLQDLGATVHLANPKALNWGDRRVKNDVVDATDLADMLRMGRLAHAWIAPAATRELRELVRYRAKLVQLRSGLKAQVHAVMAKEGVLPGTLDMFCQRGELQLDAMDLGRNYAVRVQSLRELIGHYDRDIVTLERDIHQHLRGDRGYQAVQAINGVGRTIAAILVAEIGDVSRFPTPAHLCSWAGLTPRHHESDTKTRRGKISKQGSRLLRWALIEGISRYHGGDVLKHSYQRIAKRRGTNKARVAVARKALTLAYYGLRDGEIRCLAPAQEAA

SEQ ID NO: 494939 - protein, 533 aa, unidentified
MWGATTSSAGQNIEALRRPLHVLCAGWTCRNRRFPLVLIQEPDELGRKGGDTATKAPALVTSPDRAAHAPKERIYVGLDIGYREHVAAASPLSVFNVRRNPDGWKRVKPIHFASDAAGFGRFQRYLDRHSADPRDFLILLEPTGSYGLTVLLYLLGKGYRVLQVENRAVKDYREKIFGSETKTDDTDARLMARMGFLHELVGEEFSIQPVLLMNPDAAALRGMVHDLAKLQKEITRRRNQLQQMAALTFPELKTFFKGSTPAPAARALLEYFATPQELATASTEHVAEVLRSAHAYSHATRAAELQALARATAGVPTLTHHQWRQAWLIKQLSVVERARQELVDEVALATATHPYTRIIESLPIKSPIWTATLIGAIGDVSRFSNVNQSKAYLGWSPQLTRSGSSVDHSELAKTGVRPARNVLGQMTVIMLSPTIRASPFREVYHCLTGRGMRPASALGHVAGKLSVVLYGMLKNMTPYDQEKHRRQLGLVQSADQTGSPPVDVSLELVDLADSRNDLVDDDLTVTDEPQLAF

SEQ ID NO: 494940 - protein, 340 aa, unidentified
MFTNFVGIDVSKSKFDLALIKSQDKDHVIQGVFDNTRNGIKSMSKFLEKEHCVQLSDTIFCMEFTGIYCYPLTDFFVKKECHVWIEMPVNIIRSLGLQRGKNDRIDAHRIALYAFKNRDDVKLWKPQREAILKLRDLLALRERLITAQKSLQMPIDEKIAMGDKKGAETLRKGCQKSMSSLKNEIGQIDKNLDDIIKGDPQLKELFNLATSVPGIGKLTALFMICFTNEFSMYTNPKQLACYCGVAPFEHKSGSSIRGRTRVSHMANKVLKRMLHMGAMSVISRDPELRDYYQRKVAQGKNKMLVINAVRNKIIHRLCAVIKRGYGYQSENIFKERLVLS

SEQ ID NO: 494941 - protein, 382 aa, unidentified
MRTVSGLDVHKDSIFMCILDEQGKKTEEKFGVTTREIKRMGLVMRSFYVSDVCMESTSVYWMPIWRLLEHDFQLHLVNPLFLKQLPGRKSDVRDAEWIATVLLKDLVKDSFVPDGNIQHLRQYGRRINELDRDIVRSEQRVDMILQRCNIRLSNRVSRTKNKSYRKVVDALIKGETSADALVKLIHGRTVNRHGKSLVHDSLEGCVAQSDRDLLKQYTQMTDMYETQKQQCIEAMVEMCQELYNDAFLFLLSIPGVKRLSAAIIISEIGDNMELFATAAALVSWAGLRPRNDESAGKIKSRQITHGNKYLRKALMECAWGAARTKDSVFYCRFWHLKGMKKHHNAVIVAIARQMLTIVWTLLSRKEYFDKSYQLTKKASLER

SEQ ID NO: 494942 - protein, 375 aa, unidentified
MRNFSTFIGMDVHMETIAIATAGKHGAPRYYGEIANTSEALTKLVKKVIPSGSRAVFCYEAGPCGYGVYRQITDMGHRCDVIAPSLIPKKAGNRVKTDRRDAVTLVRLLRANELTAVWVPDQQQEAMRDLTRIREDMKSMERRARQRLNGFLLRNKRIYTGQNKWTQAHFRWLEKISFENPIQQIVFQEYVDAVKHLQGRVVSLEEEMSRALSGWSLGIVVVALMALRGVNLVTAMTIVSEIGDISRFKSPRQLMAYLGLVLSEDSSGKRKRRGEITKTGNGHVRRVLVEASWSYRLPARKTAHLQRKAEKASEAVQAIAWKAQKRLCGRYWHLTQKGKLKVQACTAVARELAGFIWAIGCEVMGKNNTPVVKVA

SEQ ID NO: 494943 - protein, 365 aa, unidentified
MKEDTRVGPELTIGVDLGDRYSHLCVVDEHGEVCEEGRIATTARAMRKRFEGMARCRVVIEVGSHSPWVQRLLDELGHEVITAHTQAVRLIYGGTNKNDRLDAERLARLGRVDPKLLHPIQHRGATAQADRAVVRSRHVLVGCRTKLINHARGMVKSMGGRLPSCSAESFHKRAGTELPDELKPALLPVLETITSLTQEIRRYDQRIETLASERYPETNLLRQVSGVGSVTALSFVLTVEDPRRFRKSRALGAYLGLQPRRSQSGDKDPELRITKAGDDDLRRLLVNAAHYVLGPFGPDTNLRRWGLALAARGRKNAKKRAVVAVARKLAVLLHRLWVTGEVYEPLRNQPRRANTSGGIAQAMSA

SEQ ID NO: 494944 - protein, 324 aa, unidentified
MNKNTKFFGIDISKDVFDVVDSSEKHHQFKNDPSGFKKFGKLLNKNAHCVMEATGSYYQGLATWLFSQSIDVSVVNPLSVKRFIQMRLKTSKTDKMDALMIRLYGESEDPKLWPPPSKLIIEATELHKLIELLVRQRAGLKNRLHALESKGITKSLVLTTVRRQIRNLGNEIADLELNLESVIKEYEPDLLTRLCSIPGIGKRTAIYLIVITHGFEKFESSRQLIAFFGLDPIIRESGSSLRGKSRISKTGDNQVRKLLFMCAFTACEHNKACREIYQRLTAKGKSKKLALIAVANKLLKQSLAIAKSGLYYDENYRSVNVNLG

SEQ ID NO: 494945 - protein, 369 aa, unidentified
MSQRTRFLGLDAHAKTIAVAVADDAAQPEAYGEVPNDPSAVRKLIGHLGGDGIRLVAAYEAGATGFALHRQLTTLGVECMVVAPSLIPTRPGDRVKTDRRDALKLCRLLRTGDLTPVWVPDEEHEALRDLVRARSDAKQDEVRAKHRLSKLLLRRGITPPLNVRPWTRAYLKWLDQLRCGHIADQIVLDDYRQQVRSARDRVARLDVSLVHCASTGRHAPLLNALQAFRGIGFLTAVTIVAEAGDMRRFATARQFMSFTGLVPSEHSSGGSQRRGHITRCGNAGLRHVLGESAHHARHAPAVTSTLRRRQRGIAPEIVQASWRAQERLHHRYRHLAGRVGRPIALTAVARELAGFVWAVGQQVEVIAAA

SEQ ID NO: 494946 - protein, 327 aa, unidentified
MSNFTYIGIDVGKDDLCCSLPGIKPFFVNNDPAGIRSLLKKASALGSPDKLCFVMESTSVYSSRTAEMLLELADTWVAIVPPVCVNGFKQAGLVTTKNDVVDAIAIREFAEAKKPAPWLPPNEAQRRLRNLEVVMDNLVRARARLKNVREKLRNEYHRDTIALASVDRMLSQLDAEFDTLQAEFDLVIAANDTLAADSAHLLSIPSIGPRVRNVVMAVIYEQLRTLSERKLLKHCGMTPREHRSGKHKGRTLMSKAGDGRVRGVLHMAALTAIRKGGLMFEYYQKQKAAGKPSKVAIVNVMRRLLYIIQGVVRSNAPFDMDIFLARS

SEQ ID NO: 494947 - protein, 401 aa, unidentified
MSKTNAVIIGVDPHKMSVTIEVVDTHERLLGSGRFETTNAGYAAMRRYVKQWPDRVWAVEGANGAGRPLAQRLVAAGEQVVDVPAKLAARVRLFDTGHNRKTDALDAHSIAVVAVRTEGLRVVVEDGELEALRMLTDRRDELAHQRVQTVNRLQRLLSELLPGQRKRDLSAAQAKAMLATVRPRDIAGKTRRRMAAEEIADLVAIDAKLKKIKAELKAAVLERGSHLMDIYGVGPAGAARVLADVGDVARFADRNRFASWTGTAPLDASSGEQTRHRLSRAGNRRMNHLLHIAAIVQIRHDTAGRAYYRRKLAAGKTPMEALRCLKRRLSDVVYRQLVTDAHRAEKDDGADPGGHCGATLHSSAADSHPLIDTSDQPLPGPAQPTLRRPSTGRKTLAKAAP

SEQ ID NO: 494948 - protein, 344 aa, unidentified
MGEVSTIGLDIAKSVLQVHGVDGAGAVVMRKRISRAKMLEFFADLPRCLVGMEACPSAHHWSRKLQALGHRVRLMPPSYVKAYLKRSKNDANDAAAICEAVVRPSMRFVPIKTKEQQAGLMLHRTRQLLVRQRTMLSNALRGHLAELGIVSAKGRNGIGQLLGIITDVTDNRVAPAVRGLLDVLARQYNAIGAEIRSIDKSILTWHRSCEASRRLEEIPGIGPIVATALVAEVGDWREFRSGRNLAAWIGLVPKQHTTGGKERLGSITKQGNRYLRWLLVTGAMAVIRYAKKHGTERRPWLARLLERRHTKVAAVALANKMARMAWAIMVRSERYEEPKLLLAA

SEQ ID NO: 494949 - protein, 316 aa, unidentified
MNEKKNVVVGIDVSKAVLDVASVPDGEQFQASNDAGGIEALTKRLTAAAVDLVVMEATGGYETAVATALIGAGLRVAVVNARQIRDFAKATGRLAKSDRIDARVIAAFGEAVDPEIRQLPDKDAQELQALLVRRTQLVAMRVQEINRLGLMQGAMRKGIKEHIAWLEKAIERLEIDITHGLRSSAAWREKDDLLQSFKGIGPITSGSLMVGMPELGGLGRRQIASLAGLAPFNCDSGTMRGRRSIYGGRARIRTLLYMAAITAIRSNPVIRAFYERLKSRGKPHKVAIVACMRKILTILNAMVRESTPWTPEIKPV

SEQ ID NO: 494950 - protein, 318 aa, unidentified
MLNESFVGIDVSKDWLDVGWEPAGQSERLAHDEVAMVGLCERLAKERPYLIVLEATGGLETHLASALAAAGLPVAVVNPRQVRDYARACGRLAKTDRIDALVLAAFARAIRPQVRAPKDDETLELGALLARRRQLIDMRVQEKLRLERASPVQRDSIKEHIIWLTERIARLDTDLTHRLRSSSLWRDQEDLLKAIPGVGTITRVTLIALLPELGRLNRREIAALVGLAPFNRDSGQHRGERVIWGGRAQVRRVLYMAVVAAIRSNPVIRTFYQRLRAQGKPGKVALVACMRKLLTIMNAMLKYNTPWNPNALDLEHSC

SEQ ID NO: 494951 - protein, 351 aa, unidentified
MIIVGVDYHPSVQQVAFLDTETGETGERRLNHSDGEAERFYRDLQRRQVKVRVGIEATGHARWFERLLAELKFELWIGDPARIKAARVRKQKTDRQDAQLLLRLLIEGRFPQIWVPSPENRDLRQLIWHRHRLVQMRTRAMNQIQAAAMNEGVRRKKTLWSKTGRRQLEALPLAPWATRRRQDLLELVDRLNTTIDELTAAAEQEARKRPEVLRLMTHPGVGPITALAFVLVLGSPDRFGCGHQIGSYLGLIPCEDSSADRQRLGHITKQGSSLLRFLLAEAAQAAVRWDPDWRRRFVHLAMRRDRRIAKVAMARKLAVSLYWMWRKGCDYPQTLQFGSHAGEPGYRHGVK

SEQ ID NO: 494952 - protein, 412 aa, unidentified
MDRWIERCCGLDVHKQTVAACVRVPGAQGRRTQEVRTFGTTTPDLLALQDWLAAHQVTHVAMESTGVFWKPVYYVLEARFTVLLVNAAHVKQVPGRKTDVRDCQWIAELLEHGLLRGSFVPPPVIRDLRELTRYRRTQIQERTRVANRLHKVLQDANVKLSNVTHHVLGVSGRAMLDALVAGTTDPDVLADLARGQLRKKLPALRQALTGRFRAHHAFLLGQILAHLDYLEEAIAAVSAHIEEQLRPFAPQVERLMTIPGVQRRTAETILAEIGTDMAVFPTAGHLASWAGMCPGNNESAGKRRSGKTRKGSKWLRTSLIEAANAAARTKATALGARYRRILPHRGHRKAIVAVGRHILEISHHLLRTDRTYQELGPDYFDRRHAERLQRRCIRQLEQLGLQVTITPASAAA

SEQ ID NO: 494953 - protein, 344 aa, unidentified
MQTMYYIGLDVHKRTISYCVKDSSGTIHAEGTIPATRFDLDRWMKTLPQPWTAAMEATVFTGWIYDHLQPHATALKVAHPLMLRAIAAAKKKNDRIDANKICDCLRCDFLPECYMPSTAIRERRRTLRYRNLLVRQMVQMKNKISGLLMEAGVNYNKQRLHKAGYFRELLATNPDIDEGLCSLLRLCRETVVRLQRTESALVRSLERDSLLLERVERLMTIPAVGPITALTWALEVGDVQRFSSIKKAISYCGLCGAEKSSANTVQRTPLSKQRNKHLQTTLIEAAKMAPRNSPELAMLYDNEKQKGNANRATLAVARKLVAYLMAVDRGQRNFQVVETNCIAA

SEQ ID NO: 494954 - protein, 392 aa, unidentified
MACVRHMANGLVRREVRTFKTTTKELLALSDWLAGEGCTDVAMEATGVYWKPVWHILSDGDVTLVLANAAHVKNVPGRKTDVNDATWLADLLAHGLIRGSFVPDEQTQEMRTLLRTRKQLVRECSRHVQRLQKTLEDANIKLDSVITDILGLSGRRMIEALIAGESDPGRLAQLAHPRLKATPEALREALRGRVTRHHRLLLRLHLQQIAAINAAIEQIDREVDAQVEPFRAMIALLTTIPGVDELSARVILAEIGRDMSRFPTAAHLISWAGLCPRSDESAGKRRSTRMRKGAPWLKTTLVQCAKAAARKKASYLQAQFHRLRARRGAKKATSALAASILTIVYHMLTNGELYRDLGPDHFDHRAKAANTRRLVTRLQNLGYTVQITPLAA

SEQ ID NO: 494955 - protein, 426 aa, unidentified
MAYRIAGIDVHKKMLAVVVSDVEVDGEYQFERRMFGGNPEQLRSLAAWLLEQEVEEVVMESTAQYWKPVWEALERYWKPLGQKREGAHRTLHLAQAQSNRGPRGRKRDFPDAERLVKRLVAQELRLSFVPDAEQRLWRTVTRRKYQLTRDRARLQNQLESLLEEAHIKLSSLVSDLLGASSRRMLKALADGETNPAALAILADKQLRATAEQLCDALGACTELNPVYRRLLKMVLEQLQFLEQQIGQLDQEVAGLLRQYQHAVERLAEVPGLGVDSATQIIAEVGATAATFASDKQLSSWVGACPGDDESAGVNYNHRSPKGNRHMRRVLNQAANAAVKVKGSIFEIAYRRSVPRLGHNQAIGAIAHRQCRLIWLILHRGVRYEEHGPAVTARSRQARTNRMIRQLRKLGYRVELENSQSSNPPAR

SEQ ID NO: 494956 - protein, 342 aa, unidentified
MAFYCGLDLGATHCQVCVINDAMEIQVERKVRNELSQITELLEQYDPAPQCVVESTFNWYWLVDGLMEAGYEICLAHALGVRLISGAKVKTDRRDAFALAKLLRAGLIPQAYIYPKATRPVRDLTRRRQRLVHLRGGEYVTIRRMLYQHGVLDHSRNKIKTLAEEEVTAYLDHPLVRVEARQSCERIELYSQQIGELERRILATVKDNTPFRRLLDVPGLGEILTITVYYELGDVTRFKNVRQCSSYCRLVPGVAQSGARERRGRGSKQGNAYLKSAFTQAAVQAVQWYPRIKRYFDRQFARHRGRGRKLIAYEIIAHKLACAVYHILRDGTEYQQTLLFGG

SEQ ID NO: 494957 - protein, 343 aa, unidentified
MSYFVGLDVSQKTTVICVVDASGARIWRGQCGTVPDEIAQTLRCHAGEDARIGIETGAMTPWLVHELRSQGLDMVCLDARHARAALKIQINKTDQNDAEGLAHIMRTGWYRAVHVKSFDAHRARALLGARTQLVGMTTRMSNHIRGVLKTFGLLPGAMRGLRFDRRVEQMLTARPDVAMIVRPMLVAWRQLREQIAVFDKAVRAKVRADPVCRSLMGVPGIGVLSVLAFVSTIEAPERFPRSRSVGAHLGLTPRQYQSGEIDRSGRISKCGDRLARTLLYEAANVILSRVRRSCGLKDWAQALARRSGPGKARVALARKLAVILHSMWRSGEPFRWIQPIATT

SEQ ID NO: 494958 - protein, 377 aa, unidentified
MKKNIRYIGLDVHAETIAVAVAEAGGEVRSLGVIPNRPEPVRRLIRKLGPAQSLRVCYEAGPCGYVLYWQLTGLGVHCDVVAPTLVPVKAGDRVKTDRRDAQKLARSYRSGDLTAVWVPDAAHEALRDLVRAREAAKKDQLRARHRLQKFLLRRGLQPPEGIKAWTLKHLDWVKTLRLEQFALDVTLLDYVTEVDRARERIERLERAIDQAVETAPAAIRAVVDALQSLRGVARLSAATIVAEVGQLSRFPKPRQLMGYTGAVPSEHSSGGSVRRGAITKTGNAHLRRILVEAAWAYRYRPNVGSELRHRQAGASEEVKAIAWKAQHRLHHRYSRLSARGKTKQHIVTAIARELAGFIWAVGVEVESKLATNSARAA

SEQ ID NO: 494959 - protein, 344 aa, unidentified
MQSTTIGLDLAKNVFQVHGITSAGEVVVRRTLRRVQAHRFFEQLEPCLVGIEACGTSHYWAREITKLGHDVRLMPPAYVKPYVKRGKSDASDAEAICEAVTRPTMRFVAIKSPEQQAMLALHRTRDLFVRQRTQLVNMIRSLFAEFGIEIRRGIEQALMLARRIAANDLADMPPLAAKVIATLSQQVLDLQAKLRELERELLVWHRSNDVAKRLVTIPGIGTVCATALAASVTDPHQFRSGRQFAAWLGLTPLQHSSGGKERLGRISKMGDKYLRRLLVVGMTSLVRRARYKPEAVDPWLADLLSRKPARLVTVALANKAARVVWAIMVRGGVYRRSTGAATSG

SEQ ID NO: 494960 - protein, 429 aa, unidentified
MTDLYISVGIDVGADFSFMSIALPNQTFVGKPFKITHSNLNSLRTAVSKIKEAEESNSLKARIFLESTGVYHYPLFCYLRDKGFNVSVINPIITNNSTNLNIRKVHNDKFDSKKLALIALKSDLKTSVIPSDLVLNIRNLVREYYRLKDQKSAYVNKLTAVLKVSFPEYLGIFSKITVNTSLALLDKYPSPELFLSARKSSVIKLIRKTAHFGESYAQKQYEKLLAAANAAKLFGHYLPSDAELIRLYISLIRTYDNAADSIMQSIKAAVESQSDELFVKQIKLLETIKGCGFLSAVTLMCEIGDFSVFSSPKKLYAYLGLDPAVKQSGKFNGTNVKLSKRGSRLARRILHMMALNNIGIYKNGEPKNPVLRSYYDKKCISKPKMVALSAVIHKLCNIIFAILRDNKPFEIISPDQHNLSYHLNQVSAA

SEQ ID NO: 494961 - protein, 362 aa, unidentified
MFSERTSVGLDVHARSISASAIDCWTGELVETRLPPGEGYREVLAWVGSLPGPVQVVYEAGPTGFGLARALRAQGVGCVVAAPSKIHRAPGERVKTDARDARLLARLLRNDDLTAVVVPTIEQESARDLVRLRMDNRSDLMSARHRTGKLLLRHGHVYSGGAAWTGAHAAWMRTIWFENTGTRTAFEESVELVRHLEARRDRLDAQIAVMATDSSFTPVVTNLCCLRGIATLTGFALATEIGDWTRFTGSSIGAFLGLTPTEHSSGGSRRQGGITKAGNTHARRLLVESAWLHKPRYVVGKVLQERWDAAPAAARVRADEGNRRLHHRWVRLDQRGKKHTVATTAVARELAGWCWSLATLQP

SEQ ID NO: 494962 - protein, 315 aa, unidentified
MTLPSPFVGIDVAKADLVVAVRPTGERWIVANDDAGVTQLVRRLRRLAPVLVVLEATGGDERAAVAALAAVRMAVVVANPRQVRDFARATGQLAKTDAIDADTLALFAERIRPEPRPVPDDAARTLDGLLTRRRQVLDMLGAERNRLTHALPAIRRDITQHIRWLERRLDDVDQDLDRTIRSSPVWRAQENLLRSTPGVGPVVSRTLIGDLPELGALTRKQIAALVGVAPLARDSGTLTGRRLVWGGRAPVRAALYMAALVASRHNPAIQTFYQRLLRAGKPKKLALTACARKLLTILNAMMRTQTPWRPTPQLT

SEQ ID NO: 494963 - protein, 386 aa, unidentified
MQRNDLSRSLVAFDQNSTLVAVVELSLNRWVVQGLVPGLSKQPLKALGPDASALLALVNRWQLEGTKGGGRIKRIVVAFEAGRDGFWLARWLRSRGIEVYVIHATSIPVSREHRRAKSDRLDTELLMRALLGWLRGERKHCQMVRIPTIEEEDARRPNREHQTLVGERTRNVCRIKSTLVLHGIRDFNPKRLKASERLETLRCPEGGSLPPNTLAELRREMAQLRLISGQLREIEKTREERLKRAPRQGTHPMVLLLAKILGIGIETADMLVHEILSRELRDERAVGRYAGLTGSPYDSGAKRREKGMSRAGNARVRRGMVQLAWRWIRFQKDSQLTQWYNNRTESARGDIRKTMIVALARKLLVSLWRYVTTGEIPVGAKLKAAA

SEQ ID NO: 494964 - protein, 354 aa, unidentified
MPKPASTQIAVIGIDIGKNSFHVVGHDKRGSIVLRQKWSRGQIEARLANLPPCLIGMEACVGAHHLARKLAALGHDARLMPAKYVRPYAKGQKNDFNDAEAIAEAVQRPTMKFVATKTADQLDLQALHRVRERLVSQRTGIINQIRAFMLERGIAVRQGIRFLRAELPIILASPTDVLSPRMLRVIEDLAGDWRRLDERIENLSREIETIARQDAGCDRLMSVPGIGPIISSAVVAAIGSGDVFSKGRDFAAWLGLVPKQISTGDRTILGKISKRGNRYLRVLFVQAAWVVLIKPMSWERHGLKPWIEAAKKRLHHNVLAIALANKLARIAWAVLAKGRGFETTRTIDGSTQPA

SEQ ID NO: 494965 - protein, 352 aa, unidentified
MVYIGVDLHRKRSQLAALDVAGEPLFNRSIPSQADEFLRVFGELQPEPIEVAFEATIGWGWFADLLADAGVKAHMAHPLATRAIATARVKNDAVDAKTLAHLLRTNLLPEAWIAPLEVREARRLVRMRAGLVRIRSRLKCQIHALLAEAGVSVSMTDLFGRGGRDLLAGLKLPAISQDRLEANLRLIDTLSGEIDAAERQIARRFRGDPRMARLLPIPGIGPLGAATIIAEVWDVGRFATPERLTSWAGLTPTERSSADHTRRGHISKQGSRWLRWICVEAATNAVRDPDLGRFAARIARRRGVKIARVALARRLLTLAYYALRDPQGCAAYPMVPARSVIRMASPDGRQTD

SEQ ID NO: 494966 - protein, 344 aa, unidentified
MRIASIGIDLGKTTFHLVALGEHNKVLVRKKFSRGQLLAYTANLPSSLMGLEACAGSHFVGTVLREQGHQVRLIPAQFVKPYRKSNKNDFLDAEAIAEAVTKENMRFVQIKSQDQLDLQAMHRVRDRLVQRRTALINEIRGFLLERGIVFAAQPIHLRKNLPGVIEDAEQNLTPRLRWLLDRLWQEWKQIDSDVQAISDEIERISEEDVRCRQLRQIPGFGPLVSTATVAAIGNGAAFRRGRDFAAWVGVVPRQYSTGGKARLYGISKRGNIYLRRMLIHGARAVLFRIKHNTGGFGQWVHRLAQRAPRNKVIVAIANKLARIAWAVLSSGKDYRHQPLQLAAA

SEQ ID NO: 494967 - protein, 341 aa, unidentified
MAAIGIDTHKATLAACQVDELGTAVSEGTFDNNPAGHRALLDWAAGAGRDTVIGIEGSASFGAPLARFLVATGWIVREVPPQLSRRERTRTRRAGKSDPGDALAIARVTARESDLPPVRSVDASLEVRLLVEARDDVVAEMTRVRNRLHADLRTLLPGYGAAAANLTATRHQRTVGRLLRPLVGVQADLARGRLARLRRMGIEERALYARIGKRVAGHPLLELPGAGLLVTAKLVGEIGDVGRFRSSDAFAALAGVAPIPASSGQTQRMRLNRGGNRQLNRALHTIALAQATHHAPARAYIERKRAEGKTWREALRALKRQLVRTVFRLLELGARSRPAAA

SEQ ID NO: 494968 - protein, 344 aa, unidentified
MSEVSIIGLDIAKHVFHVHGADGRGRAMFSKRISRGKLLDFFAAQPSCKVALEACGGAHHWARQLTQLGHEVRLIPPAYVKPFVKRQKNDAIDAEAICEAAQRPSMRFVAVKSEEQQAAGLLFRTRDLLVRQRTQLINAIRGHLTEYGWIAPKGPSHVARLAELIDEEEMASSLPEAALAMFRLMLDLLAGLNGKIADLDKEIVRGAREDEVSRRLMTIPGIGPISATAIAALAPPAETFAKGRDFAAWLGLTPLQRSTGGKQKLGATSKMGERTLRRLLIIGSSAVVQQASKRGAPKGSWLEQMLTRKPRMLVTIALANKMARIVWALLVKQENYRAPVPARA

SEQ ID NO: 494969 - protein, 339 aa, unidentified
MQVSTLGIDLAKNVFQLHGVDNSGKTVLRKRLTRNAFLPFLAQLPPCLIGMEACASAHHFARRLMQYGHQVRLMPPSYVKPYVKRDKTDARDAEAICEAVARPNMRFVAVKSETQQAILALHTERDLLIRERVASTNSLRAMLAEFGVVMETGLSALYKTLPVILEDGENALTALTRRSAARQLTHLRELEHQIAEVERELSAWFHSQEACRRLEKVPGVGMLTATYMVAAVGDGSQFTSSKQFAAWVGLTPKEHSSGGKQWLGPISKRGDRYFRYLLIHGARALAAVIERHRDKQTWFYSLLKRKPFNVAVVAQAGRTARILWSMLRGGSEYREIVPV

SEQ ID NO: 494970 - protein, 318 aa, unidentified
MTGQASIYVGIDVSKGRLDVAIGEQGEFWNVANDEKGIAKLVERMKEVRPELIVLESTGGLELPVMGELYACKIPVALVNPGRVREFARSIGLLAKTDKLDARLLARFAEAVKPPVTHLPDEQEQHLIALVTRRRQLIEMLVAEKNRLNTVRLSLRENLEEHITWLHKALKGLDQEIQEFIHQSPAWNDKQDLLQSVPGVGPVTASTLLAELPELGKLDRKKIAALVGVAPFNDDSGHRRGKRRVKGGRSSVRNVLYMAALSTSRFNPILRPFYERMLQRGKEKKVALTACMRKLLTFLNAILRDQKRWNPSLKQFTS

SEQ ID NO: 494971 - protein, 596 aa, unidentified
MLAHQAPAPQSPRRFGVGIDTSRYGHYAAFLKDDLQPAAAELQFAESAAGYALLRQRLDHLAQQGGPVHFLVRLDAAGQYAENLIHFLHGLAAPRDTVPPAPAPFTLRLSCGDPQRNKNYRAALFGSHKSDPVEARAAARYALTEQPRSDAPLSLELRTLRQVAGRLQAIVRQRTRLLNQFHHLLALTFPELALRTKDLAAGWVLELIQRYPTAQRLTAATPADLAAIPYLPDAQVAPLLEHAHASVASLAGATVEELVRDHVRQLRDGGARQKRLENLLVSAYRALPHANHLDTIPGIGAVTAAVLTALILNIDRFATPGKLVAYFGVLPSEVASGVDRDGQARTPRRFVRRRRGNDLVRRYLWMAALSASRHNPAVRALYARVVAKHPQHKACAVGHAMRKLLHLAFAIWKSGRPFNPEHYPWHAPAHCDSSDSSLSPGSPESDSVMSQEDQAAGHKPDQRPARPVVTAACTDTVGEAAAVGESSFLDFAHLKGQLPLARVLDHLGLAARLRGQGSQRRCACPLHRGDARGRTFSVNLDTHVWQCFDPKCGQRGDVIDLWAALHGLSLRAAALELVHTFGLEPAPRNGTEKRNG

SEQ ID NO: 494972 - protein, 350 aa, unidentified
MKIVGCDFHPSYQQIAVLDTETGEVLEKKLMHGNGEAERFYRELQGPALIGMEATGNARWFELLVEKLGHELWIGDAAKIRASYVRKQKTDKRDAAHILKLLVEKRFPRLWVPDGQQRDIRQLLTHRHKLVSVRTRLKTELQHLALNQGVQKKRQLWNENGRALLASLPLQGWTQQRRKDLLQLLAVVEPQIVQLDKAVEQAAKTDAQAVLLMSQPGVGPITALAFSVTIGDVSRFERSKQVSSYLGLIPTEHSSGSKRRLGSISKQGNVFLRALLVEAAQSVVRHDPGFRKEYQHRCHHKEKGIAKVAAARKLAVRLYWMLKSNKSYTELVLNGGSPRHPVAAKAKPLS

SEQ ID NO: 494973 - protein, 446 aa, unidentified
MGLIVGIDLGIKSDHDAIIIRRETSQLVGKGLRFANTCAGRDKLFEHVAKWRDGDERVDFVIDSPGRAWMPLSALIKSKGFAVYRPTAVRVSKMRQAGDRNNKTNRIDALALARCLLNFPDETEEVFLATGIQCTLDQLVRQRDRVVDQVRRRKQRIQDLTIAITPTLMKAMGDFALTQGGRAFLRTYLDPNKVVHLGLKRLTRFLEKNYRQALKAEQAEAIFNASKDAAAFYDPIREEGFMPVDEVCLQDEMNWELDRLECDEQRLLNLEKQIEKINQKLDPSDSFISMPGVRHTLASGIRSCIGDIYRFNNVTKHRGFVGFYPNSKGTGENRATGTRMSKMASGRYRKYLYMAAENAYRWDVEMADYYHRRRRGGHTHTQAVCAVANAKLLPRIHHLLKELKLAQTTNQVRPLYVFRDLSGNAISKAEAKAIINATWKGLKYPK

SEQ ID NO: 494974 - protein, 391 aa, unidentified
MEARTVNNLPPAGTHDDAICCVLAIELSKKRWIVAVNTPLSDKISRHTLKPSDGKELLDLCERIRTRVAKETTKRVEMVSCYEAGYDGFWLHRLLQAHDIRNHVIDPASLQVDRRARRAKTDRVDAERLLRSLMAYLRGEPKVWSVVRVPSVAEEDDRRLHRERGRLINERIQHVNRIKGLLAIHGIYDYQPLRRDRIQRLEQLHTADGRTLPPRLEAEILRELQRLEIVIGMIKTIEAERDAIASANTETERGSVKKIQHLAKIKSIGPEFATTLVGEVFYRSFDNRKQLASYVGLTPAHFQSGAMSRDQGISKAGNAKARTVMIELAWLWLRHQPDSDLSVWFRDRVGKLKGRIRRITIVAVARKLLITLWRYLETGLVPKGAALKVCD

SEQ ID NO: 494975 - protein, 323 aa, unidentified
MNKDIKYFGIDISHLVFDVTDSDGNYYQFKNKVSGFNKFKKLLNCNSHCVMEATGYYHYQLAYYLFENDKKVSVENPLAVKRFIQMRLSKIKTDKSDSKLICAYAEQVELKLWKGSSKEVQESLQITRALSVYTKQRTMLKNKLHGESVLGEPSKAVVRSLKRSLRQLDKEVGTLEEKLLLLVKESHKDLFTRIKTIPGIGRKTAIMLIVLTGGFERFSSAGELCSYAGLTPVIRQSGSSVKGRPRISKMGNQKLRNLLFMCSFSACKYNKSCRALYERIVAKGKSKKLALIAVCNKLLKQAFAIAKSGLIFDNEYKSKLAKI

SEQ ID NO: 494976 - protein, 323 aa, unidentified
MACVIGIDIAKHSFDIAKPLERDKYRTKAKLANTPEGFKQFDQWLEKHAEPHCWVLMEATSVYHEALATHLHQQGYQVCVINPARIAKYAQSELRRVKTDKTDAKLIARYAQRHLEQLRPWEPEPESIRQLRGLVRRLADLKELAQMERNRLDVSAESAQASIRIHLEHLEGQIALISTAINDHIDNDPDLREQKRLMKTIDGVSDGTAATLLAELGSPMRFDSARQLAAFCGLNPRLQESGIYRGKSTISRTGSSQLRAALYMPAISAMTYNPAIKAMKVRLAERGKTGRLAVCAAMRKLLHIIYGVLKSGQPFDPIRALAH

SEQ ID NO: 494977 - protein, 427 aa, unidentified
MNYTQNRKIEQVTDQTLVIGMDIAKQKHYASMVDARGRVLKKPFPVIQSRSGFEQFYASIQEAMKEFGKTEVIVGIEPTGHYWLNLAYFLEEKGIPLVMVNPMHVKRSKELDDNLPTKHDAKDALVIAKLVKDGRFSYPRILHEVEAELRAGSTFRESLTKELNAVRNQMIRWLDRYFPEFVQVFPSFGKMALVVLEKTPFPMDIANQTVEGLMERYRQSERLKCPQKPKVQKLLEVARHSIGITEGQQMARIEIATLVRRYRQLEQEIAALTEELTALAQTTAEYEWIQTIPGLGDATIIELLSEIGSFAQYQDSRQLIKLAGLTLKENSSGQHKGQKRISKRGRKRLRALLFRVMMPLIRHNEAFRQLHEYYTTRPINPLRKKQSIVVLCGKLLKVLYAVCVKQQAFDGERMIQDIFSQSQAQAA

SEQ ID NO: 494978 - protein, 453 aa, unidentified
MNRKQKHLQGHRGEVFLSLTRDVPPDQVICTAVDVHKYYHRATLVNGRQEILVPSFNVDIFRSGYEQLCAVIDETVARTQAKVLFIGMEPTGHYFENLARHLLDRYPHVRLVNSYAVSKNRDQKMLRNQKDDDIDLCSIADLILRNNCFPFQPLCQEYLQLQNWVRYHKAKVKARTALMNQIIGHLDRIFPGLVATQEDQPKLFANFWTNQTAQHLIRLCPNPRLLASMRPQELIQTFHAHQYRMGMVTARRIIDFAQRVLLPPADVIDARLPLLTFDLSLMDALEQVISQTQDQIASLLAKTPGQILTEIKGIGVLRAASYIAGIGNPLCYEHAGQTFKRSGLISGRNDSGVHQRKGAGRRVTKVGDPHLRAALMQITHGLCQWQPYFGNYKTRLESRGKHPGVAAVATARKVNGVLFALMHNQSKFEPKDKRGRPMLPRKSVRNSKKQQPT

SEQ ID NO: 494979 - protein, 345 aa, unidentified
MEIHTVGIDLGKTVFNLVGLSVQGEVVVRKKFSRKQLLHFTANLRVGLIGMEACGGAHFLGRALREQGHDVRLMPAQYVRPYVKTNKNDYIDAEAIAEAVRRPRMRFVPIKTDEQLDMQSLHRVREGWVGRRTAVINQLRGLLLERGITVRKGRRHIEDALPGILEDADNKLSAALRLLLFQLCSEMRHLQSQIDEADAVILRMASEDESCQRLDEGPGIGPVIATATISAIGNGAAFKKGRGFAAWLGLVPGEYSTGGKQKLLGISKRGNSYLRRLFVHGAHAVMQQRAKQSSGLRQWLEQLSARVHRNVAVVALANKLARIAWAVLAKGERYRPSLLAEGVCA

SEQ ID NO: 494980 - protein, 343 aa, unidentified
MAYFVGLDVSVKETSVCIVDDAGKIVREARVASEPEALLQVLTNNIDRLARVGLEAGPLSQWLYSALAEAGLPVICVETRHMRAVLKAQVNKTDRNDARGIAQMMRVGLYRPVHVKTLRSQKLRVLLTHRKLLPSKAIAIENDLRASLRNLGLKVGMVGTVKFEARIKELVANLPDLAVLVEPLLIVRRVVREQLGILHHRLLAIVRDDDVCRRLMTIPGVGPVVALTYRVTVDVPTRFRNSKAVGAVLGLTPVKYQSGENDRTGAISRCGDEMMRMMLYEAAKSMLVRSAKWSWLKAWAMKIARHRGMKKAIVALARRLAVIMHRIWVDGTGSRRTREVAAA

SEQ ID NO: 494981 - protein, 344 aa, unidentified
MEHLGIDVHKVESQICILTESGEVVERRIRTQRERFAAVLGERPRAKVLIEASTESEWVARCLEELGHEVVVADPNFAAMYATRSRKVKTDLRDARTLAEACKLGAYRAAHRTSDRQRHVRTQLSVREALVQTRARYISLIGAVLRREGLRVASGSAASFVRRVAKLALPGQLKSEIAPLLAVFVSVDRQLAWIDTRLEHLARTDETVERLCTAPSVGPVTAAAFSSTVDDPRRFKSAHQVEAYLGLTPSEWSSGEKQSKGHITKAGNNRMRKLLVQVAVSILRLRSPRTEALRKWATGIAVRRGKKIAIVALARRMAGVLFAMMRDRTCYLQPALLAPAAQVA

SEQ ID NO: 494982 - protein, 293 aa, unidentified
MIIALRYVGIDISKNHLDIFDEADGVPRRIANATQAITQQVARWQCDALVVFEATGIYDLALREALRQAGIQFARINPARARDFARASGLLAKTDPIDARMLAAFARAMQPAPEQVADPARGALARLAKRRDQLVLMRAQEKNRRSEADDRAMAERIGRLIEVLDSEIAEIEADISALIKAEAQIADDAKLMRSLPGVGPVACMQLIAQMPELGRVGPKQLAALAGLAPSTSTAAPSAASARLRAAESAFVTPFIWRPSTQFAELIRSRPSMHDCDRPENQPNSPSSPSPGSC

SEQ ID NO: 494983 - protein, 411 aa, unidentified
MEVFCGIDWAEDHHDIALVDRDGNLLARRRISDDAAGLAALLELLAGHGDTAEDPIPVAIETPRGLLTACLRATGRKVYPVNPMAVARYRDRHSVAGRKSDHGDAVVLAGVLRTDAHAHRPLPADTELAQAIAVLARAQQDAVWARTGAHNKLRSHLREYYPGFLAAFAAARGGIMRPGARAVLAAAPTPAAAARLALAQLRALLKKAGRSRGIDAGAQRLRDALRTGQMRQLPLVEDAMGRQALALPRQLEAACASADDLEQAATESFSQHPDAGIITSFPGIGTLTGARVLAEIGDDRSRFKDARGLKACAGSAPVTRASGKSRSVTHRRVKNNRLAAAGYTWAFAALTASPGARAHYDRRKDAGDRHGAAQRNLFNRLLGCLHHCLVTGQHYDEATAFPGQAAAKTAA

SEQ ID NO: 494984 - protein, 408 aa, unidentified
MEIAPMYKRVIGLDVHQAKISACAVIEQADGTLAVEHREFGGFKRDRRILAQWARECRPDVVVMESTGIYWKSPYAALEKIGIAAWVVNARHVKNVPGRKTDVGDAHWLATLARAGLLRQSFIPPADIRYLRLVARQRQKLGGMLSSEKNRLHKLLADAGIRLNVLVSDIHGQAGRAMVKALIEGKSIHEVLNLAGRLRASREQLFDALQPEELSGPHLFVLKEVMAHIEELEARMTRFDQALIQGLEVWRPQLILLQTIPGVDLMGAALLLVEIGADMNSFGSAEKLASWVGICPGNNESAGKRKSGKTRKGNAWVRRLLCEFAQAAARSRCALKDKFAALNIRKGHKKSIVALAHKMLRTLFAMLKNNTPYQDKVVDYEALSVQRNAPRWIKMLVKHGFMPAAATA

SEQ ID NO: 494985 - protein, 339 aa, unidentified
MTWTVAIGVDTHKEAHVAVACDRLGRQLDAREVPATASGYARLLEWADGLGRPAFAIEGCGSYGAGLARFLQASGASVFECERPKRRERRRGKSDLIDAALAARRLVAREGLGRPRGGGRHEDLRLLLLERRGLVQARTATLNQLQAVLVSAPERLRVRLGSLQGAPLARAARALRSGSGDARVLVGVLRRLGRRVHQLEAELAELEAELEAIVDELVPELLEECGVGPVSAAQLVASSGDPARMRSEAAFAALAGTSPVDASSGRQRRHRLNRGGDRQLNRTLHVIALARVRHDRETAAYHERLLGSGKTAREARRCVKRALARHFYRRLCANPALTT

SEQ ID NO: 494986 - protein, 412 aa, unidentified
MQVVYARCAGLDVHQKTLSACVLVCEPDGKKRRQVRVFDCFTGDLLLLADWLRGQGVTHVAMEATGVYWRPVWAVLEGQFEQLLVNPQHIKTVPGRKTDTKDCEWIADLLQHGLLKGSFVPPTPIQDLRDLTRYRVELRQSQNRVANRIQKLLEQANLKLSSVASNTLGVSGRQMLEAIVSGQDSPEQLAQLARGKLKSKIPQLVQALEGRVRPHHRFLLAGFLEEWDWFEQRIVRMEEEIDKQIRPFEQAIALWQTMPGVDHVTACSLVAEIGVEMNQFPTAQQLASWAAICPGNHESAGKRKSVKTRDGNKWLRRTLCQAAWAVSRKKNCYLSSQFRRIAARRGPKRALMAVAHSMLVIGYHMLKTGKGYRELGGNYLDQINKDQLQRHFVKRLQKLGFKVTLERSLEAA

SEQ ID NO: 494987 - protein, 339 aa, unidentified
MELYSGMDLHSTNTYSAIMDENRKRVIDRRLPNQPKVILDFLEPYRADLKGIVIESTYNWYWLVDLLQENGYRVHLANPSAIQQYSGLKYVDDRHDAFWLADLLRLGLLREGYIYPKEIRPIRDLLRKRAHLGRLRTSLLLSAQNIVLRNQAIKVNSEDIKKLTTDLLTPHLQESDGLFLTGKISKELIDAFTRQIKAIEAWVMKRLQPLKLFSNLLTIPGVGEILAMTILLETGCIARFPKVGNYVSYCRLVASQRTSNDKIKGKGNDHNGNKYLAWAFSEAAEHARRHYPMCRSFYNRKLSQKNATVAHCALARKLSRAAYYIQKDQVVFDETRLFC

SEQ ID NO: 494988 - protein, 347 aa, unidentified
MRFYNNQHNYYCGIDLHARLLYVCILDSLGNKVLHKKIDVDPDALLELITPYQDNIVIGVECMHCWYWVSDLCLDYAFDFVLGHALYMKAIHGGKTKNDRIDSFKIASLLRGGNFPIAYVYPKAMRATRDLLRRRTKIMRHGADLKAHVANTFSQYNQQSHNVQLRYPCAREQVRNQFDEPSINRSINMDLNVIAFYTKELASVEHFIEKTAKQHSAQDYNLIQTVPGIGRILALTILYEIGNIERFPSVQNFASYSRLVKCKAESAGKQKGTNGNKIGNAYLKWAFSEAVVLYLRGNEPAKKYIQRLQKRMSKAKALSALAHKLGRCVYFMLRDKTVFDEKRFLPQ

SEQ ID NO: 494989 - protein, 408 aa, unidentified
MEVFHERCAGIDVHKEVLYVCVLIGQGRTFQKFKFKFGTFHHQLLEMRKKLVELGVTHILMESTGVYWMPVYDALEGFVEIVVGNAQHIMNVPGRKTDESDAEWLAKLLRYGLVKPSFVPQRQFRELRQLTRYRRAIVQTRASEQNRVEKHLQIAGVKLSSVASNVFGVSGTNMLNSIADGTTDPTRLAELALGRLRKKIPQLREAFTGSISEHTQGLIATQMDQMNRLECTIAQVELKIDHKVEPHAELLARLDQIPGIDLRSGIDILAEIGTDMSAWATHRQIAAMAGLCPGNYISAGKRLKNRSRQGNPYLKSILVQAAASAINTAGSYYQSKFRRLKQRRGHKRALVAIAHAMLITIYHMIKKGEDYRELGANFVTDYEDGRKKNDLVKQLQKLGYAVSLTELA

SEQ ID NO: 494990 - protein, 393 aa, unidentified
MYYLGIDIAKHNHVASLIDNDGKVVIKTIKFSNTGEGYQKLVSLVLSAIPNGDKDRVAVAMEATGHYWLSVFSALIDDGFSVSVYNPFQIKSFRGAFHNRKQKTDVIDAVIIANYIRVFGGDSTSLPNDALLSLKQLTRYRSSLVQDISAAKNQAIALLDKIFPEFAGLLSDTFGETGKAILQVAPTPEMVLALSSKKLLKIVSTASRGRFKQDFVDRLRLAAKTSFGIKLTTKACAFELRQLVNTIIFLEEHVDELDAEIKAIYIELDEFLTTIPGIGDVLAPVILAEIGDVEKFSNPAKLVAFTGIDPSSNQSGQKIASDESISKRGSPYLRYAVHRAAFVAISNDPHLREYYDRKKAEGKHHYVALAGVQRKLLYIIWAVLKEQRPYRPY

SEQ ID NO: 494991 - protein, 476 aa, unidentified
MEAQKQGARRSDERSWHDMNRKQRREIARRMQAEDLRLEVVHPDAAGVDIGNESHYVAVPATRDRQPVRRFGCTTAELKDMATWLKQCGILTVALQSTGVFWIPVYDILEEAGLEVYLVNARDTKNLPGRKSDVQESQWLMKLHTYGLLRNSFRPPQEVRRMRTYWRQRNDLVRSAGRQIQRIQKALTQMNLRLANVLSDVSGVTGQAIIKAILTGERDPRKLAAFRDKRVKASEEEIARGLEGNWQEDLLFMLKQEQEGYEFCQKQIAECDARLEQYLQQTPDRSQGASLPEEKRKGRLQKKAKNPQFNLRTALFRITGTDLTQIDGIDVRTAATVISEAGWDMSKWENENHFVSWLRLCPDNRISGEKVIGKGRLRTNNRLATALRMAASTLRESDTYLGAQFRRLRTRLEAPVAIKAMAAKLARLVYRMLRYGMQFVDRGAMFYDARHRQRQINSLKRKAAKLGFQIVLAPAT

SEQ ID NO: 494992 - protein, 350 aa, unidentified
MQTIYIGVDFHARQQTICYLTTDSGELLFHQLKHEDKALVRAFYAQFRGHVIVGLEASGYSPWFERLLEELGCEVWLGHATEIRRRARWRHKNDRRDAELILDLMVHNEFPRLYLPPLQSREVLRMLRYRQKLIKMRTIGKNSLQALALQSGLAKGPHLFTKTGLQELRSATMSPAMQWQREQWLQLLEPLNERLLETMRWLQQQSQADQRISRLRTHPGVGLLTALCLVHSLEPVRRFANTRKVTAYAGLDPVERSSAERQRFLGISKGGSRVLRFLLVEAAHTALRKEADLKRFYQRLAQRHGRPKAKVAVSRKLLIRAYIMLRDEIDYAEFQRRAVAARPVLPAHGL

SEQ ID NO: 494993 - protein, 344 aa, unidentified
MQIIALDAHKRYSQVCVQNKNGKFLCEKRINHSKGAIKQFLDSWTTGNDVALETVGNWYWIVNEIEQAGMKPRLVHAHKAKLMLGSINKTDKLDARGLNKLQRTGTLPTVWIPPSQIRDQRELPRTRMVFANLRTRLKNRIHSVFDKYGLNMDFAGISDIFGKCGREQMLLTIKLLPSETRYTLRCLLRELDMVKGQIARIEKRMKKVFTKTKMVKKLMTLPGIGFILAVAIANEIGDVSRFATPQRLASYAGTVPRVHSSGGYTRYGKLRNDVNHYLKWAYSEAGNSTAVNYKRFPYRHTSKLYRRIRERKGHAKAVGAVARHLAEASFWVLVKNEDYKEPHS

SEQ ID NO: 494994 - protein, 381 aa, unidentified
MTTLATLHPQDTTTAGTLFVAFELSEKTWKLGFTTGHGQKPRERTVSARQQERMLDEIAQAKRRLGLPDTAPVVSCDEAGREGFWLHRFLQAHGITNHVVDSSSIEVNRRRRRAKSDGLDVRKLLSMLMRYAQGERQVWQVVKIPSVEAEDQRHLHRDLETLKQERASTMTRIEGLLSSQGLRVMSLTKFPEQLEALRLWDGSPVPPGLRRRVLRVYAHYTFLSEQIAAVEAERRTQLQTSTDTHIDKVRQLMQLKGIGINGAWLLVMEFFAWRAFTNRREVGGLAGFTPTPYQSGESAREQGITKAGNRHVRWMTTELAWSWLRFQPDSALSVWFRERFGNGGKRLRRIGIVAVARKLLIALWRFLETGVLPAGAVLKEG

SEQ ID NO: 494995 - protein, 445 aa, unidentified
MHHKRLPALIDSVSSYLSVGFDVGSDFTWMSIALPNGSFIGKPFKIVHSVPGSRDLAVAKIKEAQETYSLKSRCFLESTGIYHIPLLCFLRDKGFDCSVINPIITKNSTNINIRKLHNDKFDSKKAALVGLNVSLKTSILPDDSVVDLRNLVRDYYYFKDLQSAVALKLTAELKVSFPAYAKVFSKVTTLSSLKLLSSYPLAEDMLTASKDDIVEIIRSTARFGEAYALRKYDTIIAAAQDAAVFGRALPSNAVRIRLYINTYQEYQKHLDSLLKALHEMVERLQDTLIYSQICLLRSLRGIGFLSAVVLIAEMGDFKLFSSPKKLYAYFGLDPAVKQSGKLNGDKVHMSKRGSSLARRVLHMVALNNVKVDKGSGMPVNPVVYDYYTRKCSGKKKTVAMGAVMHKICNIIFAMLRDNKPFEVITPEEHCKRFAAEHPDKIQKAA

SEQ ID NO: 494996 - protein, 356 aa, unidentified
MLQKTNTIVLSQTQKEKCFFNAFTIPNNADGFHDLFQKISSLTNDFSNVKVGLEATGHYNYNLLGFLIDKGLPTFVINPLHTNLFRKSLSLRQTKTDKVDAHTIALMMMSGVNLQSYSNTSYHNEELKSLTRYRFDKVQERAKLKTSISRLVNILFPELEKLVPSLHMVSIYALLAEFPSSAQIASCHLTRLTNLLANASKGHYNKEKAIEIRNAAKHSIGSNMPAKSLELKHTIRLIQELTSEIDEIECFIKSIMDEIRSPILSIPGINYRMGAMIIAEIGDFNRFSSPDKILAYAGLSPSTYQSGQLDGCYSHMEKRGSRYLRYALFNATKFVCIWDNQVLCLSCKEAFRRQTL

SEQ ID NO: 494997 - protein, 430 aa, unidentified
MVETVLATEEVTEAMNDPEYEFLVGIDWATQAHEVSVVDRQGAIVAERTVPHTGAAIETFLDWLVAQAGGHPDRIAVAIETPRGALVEMLGDRAIAVYAINPKQLDRFRDRHTVAGCKDDRLDAYVLGDSLRTDRHRFRRVHLEGPHQIELREFSRLDADLQEEGTRLANRLREQLYRFFPQMLPLCPAADERWFWELAEVVPTPAHAQRVRPARIAHLLRKHRIRRLSAEAVLAELRTPPVRVASGTLEAARAHIRLLLPRLRLIDAQRKDNQQRIEALLAALAAPEDEPGQKHEHRDAEIILSMPGIGNHVAATMLGEAAQALAERDYHALRTHSGQAPVTRRSGKRNLVVRRQACNHRLQNALYHAARVHAQHDPAAAALYARHRQRGHSHGRALRSVGDQLLRVLVAMLRTGTLYEPSRRVRPVAP

SEQ ID NO: 494998 - protein, 358 aa, unidentified
MAKNITSEVEVVCGLDLGDKVSRVCGLSKTSGEVLEESRIRMTPAGMRGRFEGVRRMRVAIEVGTHSPWVKELLEELGHEVIVANPRKVRLIGESRNKDDKLDAERLARLARVDPLLLSPVRHRGKEARVDLGVARSRDALVKVRTDLINHVRGSVKPFGGRVKKCDADAFARVAHDTVPDVLRPALEPILETIASLTEKIHQYDKQIKKMVEERYPEAAHVQHIKGVGYLTALVYVLVLEDPERFGKSREVGPYLGMVPARRASGNSDPKLRITKGGDPFLRRLLVNAAHYILGPFGEDCDLRRYGLRLQQRGGAYAKQRAVIAVARKLAVLMHRLWITGEVYEPFYNQNKSELTAA

SEQ ID NO: 494999 - protein, 346 aa, unidentified
MEHYAGIDVSLEWSSICVVDALGKIVKEAKISSEPATLVAFFEALGFAVKRIGLEAGPLSQWLHAGLKRAGFEAVLLETRHVKAALSAMTVKTDRKDARGLAQLIRMGWFRPVHAKSIRSQEVRALLVARKQLLGRLIDVELSIRGILRGFGLKVGPVTRKGFEARIRELVTGQATLERIAGAMLSARVALKAEYEKLHKTVLAIVRDDAVCRRLMTVPSVGPLVAITYKSAMDDPNRITKSKAAGALFGLTPRKYQSGEKDVTSGITRAGDEMVRTALYEAANVLLSRITRFSKLKRWGIDVAKRRGSKRAKVALARKIAVILHRIWVDGSTYRWTETQPIAAQA

SEQ ID NO: 495000 - protein, 400 aa, unidentified
MISIDGVGVFLGLDVGKQTHHGRGLTPAGKTVFDKQMPNSEPKLRAVFDKLKAKFGTVLVVVDQPASIGALPLTVARDAGCQVAYLPGLAMRRIADLYPGEAKTDAKDAVVIADAARTMPHTLRSLELADEITAELTMLVGFDQDLAGEANRTSNRIRGLLTQFHPSLERVLGPRLDHQAVTWLLERYGSPQALRKAGRRRLVEVVRPRAPRMAERLVDDIFTALDEQTVVVPGTGTLDVIVPSLAKSLAAVHEQRRALEAQIEALLEAHPLSPVLTSMPGIGVRTAAVLLTTVGDGSSFPSAAHLASYAGLAPATRQSGTSIHGEHAPRGGNRQLKRAMFLSAFAALHDPASRTYYDRCRARGKTHTQALLRLARHRTSVLFAMLRDGTFYEPRTPQLA

SEQ ID NO: 495001 - protein, 363 aa, unidentified
MKPAMSVLGIDIAKRVFHVVGMDERGKIVLRKRLSRHDLMPCIAKLPPVLIGIEACGGAHYWARRFRAYGHEVKLMAPQFVKPYVKSNKNDSRDAEAIAEAVTRPTMRFVPIKDVAQQDIQALHRVRERLIGERTALVNEVHGLMQEYGIVMPKGVAKFRQAVVGKLEAEKDKLTPLSQEMLWKLVEECATLEAQLAYYQEKLDTLAQTHPACQRLMTIPGIGPFTATALVAAVSDASACKNGRQCAAWLGLVPRQHTTGGKERVLGISKRGDTSLRKLLVHGVRATIRWVGRKTDRRSQWMRHVLERRGTNRTAVAVANKNARMVWALLTSHQDSQPATSSGEQTRVSAAAKGLLVSILAVL

SEQ ID NO: 495002 - protein, 348 aa, unidentified
MMDLQRTVIDEFTFTNNHDGIASLASRLTMDDRVVMESTGSVWTNLYNHLDDAHIPVVLANPLKTKAIASARIKSDEIDARILAHLLRTDLIPESYVPTKEIREVRALIRHRTSIVKIRTMVKNKVHAIVDRNGVEHDELFSDLFGKAGMQWLRTIQLPSLDRLMLDNHLEHLESLKRQIHAVDQEILAKASRDEDVRLLLSMTGVDIFTALLIRSEIGNISRFPEYKKLISWAGLAPSLHQSGSIEYHGSITKQGSKMLRWVMVEAARVAVNHDEKMRAFYARVKYRRGDQKAIVATASKMLKIIWFMLARREPYLSRNQRRYEEKLNRIEKTIHDGWLRAGLGTLA

SEQ ID NO: 495003 - protein, 339 aa, unidentified
MSDVVFDHYIAVDWSVKNMAIARMTKKSNKITAIDVPSDIAELQVYLKNLEGSKILAIEETTTSQWLYTELKDYVNKIIICDPTRNRLLDDGPKTDKIDASKLVQLLRAGLMKEVYHSADKFIYLRRIASAYEDLVKSGVRLKNQRYSLLRVCGLKGTEKEDVKLGSLSEQYVLECLDRQIEAYEKEKKGYEREFKKLARKYPEIRYQISLPGIGAINAVKIVSRIVTPYRFANKGHYLSYCGLIKLDKVSGGRNYGKKNPRYCRQLKSVYKSGALAAIGGNNPINDYYEYLIKEKGYPAYNARHKAARRLAILSLGVFKSGKRYQPYNRKQTINKENN

SEQ ID NO: 495004 - protein, 346 aa, unidentified
MEHYAGIDVSLEWSSICVVDALGKIVKEAKISSEPAILVTFFEALGFAVKRIGLEAGPLSQWLHAGLKRAGFEAVLLETRHVQAALSAMTVKTDRKDARGLAQLIRMGWFRPVHAKSIRSQEVRALLVARKQLLGRLIDVELSIRGILRGFGLKVGPVTRKGFEARIRELVTGQATLERIAGAMLSARVALKAEYEKLHKTVLAIVRDDAVCRRLMTVPSVGPLVAITYKSAMDDPNRITKSKAAGALFGLTPRKYQSGEKDVTSGITRAGDEMVRTALYEAANVLLSRITRFSKLKRWGIDVAKRRGSKRAKVALARKIAVILHRMWVDGSTYRWTETQPIAAQA

SEQ ID NO: 495005 - protein, 339 aa, unidentified
MQEITTIGLDIAKSVFQVHGIDASGAVIVRRQLRRRQVLPFFRKLPVCVIGIEACATSHHWARELEKLGHEVKLMPPRYVKPYVKRNKNDAADAEAICEAVTRPTMRFVPIKSPEQQSVLMLHRTRQLFVRQRTALINAIRAHLAEFGIVAGIGRNGVEKLLDLISKGEDDRIPPAARECLMALAAQLELVKRQILEADRRVLAWHRCSKTSKRLEAIPGVGPLIATALVASIPDPNIFRSGRDLSAWIGLVPKQNSTGGKERLGNISKAGNRYLRSLLVVGALSVIRRAKQLGYTRHPWLVRLMERRSTKIAAVALANKIARIAWAMMARNEKYQTPA

SEQ ID NO: 495006 - protein, 429 aa, unidentified
MENSASSALPLVAWVGLDWADQAHAVCLQADGAAPLERCELQHTPEALQLWMAELRRRFPQGRVALALEPSRGALFYALMTYDFLVLYPIPPQALADYRQALYPSGSKGDPTDAQLLLEFLRKHPERFRPWVADDGPTREIALLVQHRRKLVDDRTALPHRLQALLKGYFPQALAWAGDLTAPLAWDFVSQFQSLEEAQQASRWKVLKVYRAHTRRTPEQLEQLLDQIRTARPLTTDRAVIESSALMVRAQVDQLRALAAGRERLEEKLQELFAAHPDHDIFNSFPGAGQALAPRLLAAWGTDRQRYAAAQDMEGLSGAAPVTAQSGKKRWVHWRLACPKFLRQTFHEFAGQSLLWSPWARAYYQQMRKRGADHHPAVRSLAFKWIRIFYRCWKDHTLYDEARYQQALERHGSPLAAALRQLPNQEARA

SEQ ID NO: 495007 - protein, 375 aa, unidentified
MEGALMMNATTFAGLDVHARSIKAVALDVATGEVRSATFGYDACAVAEWIRSIDPGARCVYESGVTGFDLQKKLSSLGVDCVVGAVSKMIKPAADRRRKNDRNDAEFLARMLSVGNIVEVWVPDDECEAARDLARALDDAREDLRRQKQRLSKFLLRHGLVFDERTPSGQRKGNWTGAYWIWIKGISFGEKADNDTLAFYVDAVRQAEEDKRRLEKLVADEASRPRWKKRVDSLRCLKGIDVMTAADIVFEAGEFSRFKSARSFAAWLGLTPSEHSSGESARQGGITKAGNKHLRRVLVEAAWHYISASPHPKDLAKGQAPDPAARRHAAKGIRRLVKRREEMLGRGVHKNKANVATARELACWCWAVGRMIENG

SEQ ID NO: 495008 - protein, 331 aa, unidentified
MNEKHYQFFIGIDISKRYFDVAILMDQRTTSYVFENSRKGTNAFIRLLKNQKIPLPNTLMCMEHTGVYGQLLITKLVEKQADFCVEMPIQIIRSIGVQRGKSDAVDAKRIAVYASKNSRDLELYQPMEKVLEQVKILLKIRRKLVNTRADLNKYPNELELFSPDLGKLAKKNLKKINKNLNDEIDRLEMEIKKLILSDDKLNKTVGLVTSVTGIGKITALHLTIFTNFFTRYDNPKQLACYCGVVPFEYTSGDSIFRKSRVHPMANRTLKKHLHMCALAAINHDPDIREYFQRKVAEGKNKMLVVNNVRNKLVHRVCAVIKRQEPYVKNVA

SEQ ID NO: 495009 - protein, 316 aa, unidentified
MQTVRDLGADVDSRTFVVVCAARSVAPQRVANERRAILAWLRTVPPASRLGLEATGVHHELLADLAHRAGLQVFVLNARDVRRYAQALGRRGKTDRVDAEVIARYVAHEHSELHAYLPPSKEQRALSRLIKRRAKLVAIKGALTQSLRGVPGVRQELHQVSARLERLIAQVEALMQCALQQLPAAHQAAQRIATVPGYGPLGSTCLGYTFTRVPYLNSDAVIAHTGFDPRPADSGQKRGRRRLSKRGPGELRRVLFNCAMAAAKTTLWRPYYQAQRRKGLSSTAALVILARKMTRVAFAVYQRDQPFDATLLRFSA

SEQ ID NO: 495010 - protein, 352 aa, unidentified
MQAKQKELFKDQKIFIGIDMHKRSWHITIRTKSVELFNGSIAGRWEALRKLLHRYKTQNIYAVYEAGYFGFWLYDHLIKYGVNCVVTPPSLVPQEYGNRVKTDRRDSSKLARLLAKGLLKSVWVPSAEERFHRQVIRRRRQLVGDRVRTQNRIKSELCFYGIDLPRPKTKWSQVYFTNLKRIKFKNHWMQASFNQLLEQYQFLCVQIDKQTKLLRELAQLPLYQQRVRILRTIPGIGLISAMEILLELQDVSRFRRAAQLAAYVGLTPSQYSSADKIRMGRITGIGKNSVRAILVESAWKLISKDNSMRVKYEQIKARAGAKRAIVAISRKLLLRTRRLLLDNQPYAYKPVC

SEQ ID NO: 495011 - protein, 414 aa, unidentified
MELLHERCAALDIGKKDLKACVRAPNPGRKRSRRQEIRTFATTTDALLQLRDWLVAERVSLVVMEATGDYWRGAFYLLEDDLNVILVNAAHAKALPGRKTDVCDAAWLCQMGECGLLRASFVPPEPIRQLRDLTRYRTTLATERTREAQRLEKELEDAGIKLSSVATDILGVSGRAMMTALIAGERDPQVLAEMAKARMRPKIPQLVQALTGNFGEHHAFLCRLHLQRIDQLTAAIGELSARIEEQMRPFARQLEHLATIPGVGQAVAEVIVAETGADMSRFPTAAHLASWAGVCPGQHESAGKRRSGKTRHGDRWLTSALGTAAMAAARTKDTTYLGARYQRLAHRLGKKKALVAVQHSILIAVWHMLANDVDYTDLGADYFARLDPDLAMRRIVRQANALGFTVRFDPIQAA

SEQ ID NO: 495012 - protein, 424 aa, unidentified
MSDDVMIAVDPHKASNTAAVLDPVTRTLIETARFANSDEGYGRLAGFAGRWEHRRWAVEGCHGAGRSLAQRLVADGEHVLDVPAKLAARVRVYSSGHGRKTDRHDAVSIGLAALESAAVLPVARDDVMVSLRLLCDRREELAAQRTQAVCRLHRLLAELTPGGMRRELTAGKAQALLARIRPGDDVAAVRLHIARDHLADIRALDARLKYIAGQIAALVTQSGTTLTSLYGIGPLIAGRILAEVGDIARFATRDKFASYNGTAPIDVSSGDQVRHRLSRAGNRRINHALHMMAVTQIRYPATDGRRYYERKRAEGKTPKEALRCLKRQLSDQVYRQLVRDRQGRIEACGSPTTRPPTPPTSTSPANGSPAAAPASPPPRPTASRRSSSSTGKTTASSASKSSTPAADFTATSSTKRKRSADNSP

SEQ ID NO: 495013 - protein, 470 aa, unidentified
MQLSSPVRLLGIDLGITSDHTAVVVDDAGRVRARRRARSTVASLTALEAAALAGADPGTHLVVVVEPTGPAWLPVAVFYGRRGHTVLRVTSAKAADLRRFLSRHAKSNGIDAETLARLPLVAPSGLVPVELGSAARASLDRRVRAVARLTADIGRRKNRIRALAQAMVPTIGAALSEGLNHTDLAVLERYADPRALLAAGPARLTRLIAKTSRGQLGVAKAEALRTAAAEALGLWDGDSAAAFADLAAEVASEVRLVRAAEAERACHERARNAALSRVDPAGLAASLPGFGPVGTSQLVATTGRPGRFPHASAFKAFTGLTPRANQTGQTDRKHQPMTKAGPRALRSQLLQSADTARKLDPQLAAVYHVQMTERGATHRKALCVVAARLAERAWLTLARGQPYIICDLAGQPVTPEQAKQLIAAQFTIPTEVRRRRRSSTKAGKVPHAALKAQVKSQHEAGHEATFPPQA

SEQ ID NO: 495014 - protein, 457 aa, unidentified
MYGPFIVASSTRIRFAVSLQLLRAIAPSLVRRVEVVGVQVAQDDQEIIARVAALDIGKAEVVCCVRVPGQGPRARRMQEVRTYTTMTRSLLAMSDWLTGLGVTRVVMEATSDYWKPPFYLLENSFETWLVNARDVKHLPGRPKTDRLDAVWLCKVAERQMLRPSFVPPPAFRELRDLTRYRADLITTRTSEKQRVEKLLEDSQIKLSVVASDIFGVSGRAMMAALVAGERDPKVLADLARGSMRGKTARLEEAFTGRFTDHHAFLLRTMLARVDGIDADVDRVQGRIDEQIAPFAAAVTRLDEIPGIGVTTAQVIIAEVGLDMTRFPTPDHLASWARFAPGISESAGRKKGGSATGHGNRYLARALGEAAVGCRSTKTFLGERYRRIAKRRGKKRAIVAVGRSILMIVWELFSDEEKRFVDLGPGYYDSRVNRNRSTRNHVRELQALGYKVTLEPAA

SEQ ID NO: 495015 - protein, 410 aa, unidentified
MEVLYPVCCGLDVHKASVTACLRSPGDGPQRRQEVQTFGTSTRELRRLVAWLTAASCTHVAMESTGVYWRPVYNLLEDRFELLLVNAQHVKMVPGRKTDVRDSEWLAQLLELGLLRGSFVPPAAQRELRDVVRYRKRLIEERAREANRVLKVLETANIKLGSVVTAVLGVSARAMLKALIAGAGPPAELAELAQRSLRRKRPALAEALTGRVTAHHRFLLAQLLRHIEFLDEAIATCDGRIATCTAAEADAVARLDTIPGVARRTAETIVAELGCDMSRFPTAGHAASWAGLCPGNHESAGKRLSGRTRFANRVLRQALVESARGAVCKRDCYLAAQYRRLVKRRGDKKAIVAVAHSILVIAYHVLRDGVSYRELGGDYFDHLHAQRLTRYHTQRLAALGYTVTLTKSAA

SEQ ID NO: 495016 - protein, 408 aa, unidentified
MQDDTNAPTAGIDWATADNELCVVDAAGQVLHRRDADLDAAGIARLVSDCRAHGVAKVAIERGDGPMVEALLAAGLTVVVVPSRQVKHLRARYGAAGNKDDRFDAFVLADALRTDGHRFKPLERDSDQTLALRTAVRARGDLVAARIALANQLRAHLQVVFPGAVGLFAALDSPISLAFLARFPNQRRAGWLSHRRLGPWLAANHYSGRTPTAVLLTRLTDAPAGLDGDAGAAAAATTLAYVEALRGIRAQITALEAAIAEQLALHPDAAIFQSLPRAGMIRAAKLLTEIGDARGRFPDETSLAALAGAAPSTRSSGRHHVVTFRWACDKKLRDALTDFAGDSRRASPWAAAIYNRHRAMGKTHQHTVRILTRAWTRVIWRIWHDHTTYDPTRHGGAQRHLQTTAQAA

SEQ ID NO: 495017 - protein, 370 aa, unidentified
MKKCITFVGLDTHKNSIEAALADDGRNTEVRLYGTIGGDLASLDKMIRKLQTTGVELRFVYEAGPCGYEIYRHLRAHGFHCDVVAPSMVPKRSGDRIKTDRRDARNLARLYRAGELTAIYVPREDDEAMRDLVRGRQDAIHAQRKARQQLGGFLLRHGFRYSGKCAWTLAHRRWLTGIKMPHPSQQIILEDYIHSVEECTQRVHRLTEQILQLMPDWRMHPLVTALQALRGVAPVVAATAVAEIGSMDRFESPRQLMSYLGLVPSENSSGQSIRRGAITKTGNGHARRALIEAAQAYSYPTRISRVILKRQEAVPEPIRQIAWKAQLRLCARFRRLVARGKSRNRVVVAIARELSGFMWAIAKQVPVPQA

SEQ ID NO: 495018 - protein, 446 aa, unidentified
MELDIINPNCAGIDVGSKSHFVAVGQALEDVKEFGVYADDLTAVCLHLKEYGITSVAMESTGNYWQNLYVELERHGMDVTLCNGKFTKNAKGKKTDVKDCRWIQKLHALGLLTGSFLPDEITEQLRTYCRQRTNWIDLAAEASHKMQKYLKLLNFRLDVVVKDICGLTGLAIIADICKGNLDPEKLSAHRHGNCRKSKEEIAKALKGNNRTDFLFGLKQEYESYLFFQKKINACDVQINSFLKTQINIHPDKKKLQTNDKIHKRVNKNSIKGIDLNQASYQYFNGVDLMKIEGLSHSTILTIMSEVGPDGFTKFPSGKQFTSWLRLAPNNKISGGKILSNKIPKGSNRLKIALRHAANAIGNLKDTHLSDFFRRVAYRKGRATAVSATARKLAVILWNMITKAIQYNPPMEYLFLDQKRKLRLVQKIKKNIAKFELKPEDVGFVTV

SEQ ID NO: 495019 - protein, 413 aa, unidentified
MRLFAGDDWAEGHHDVELMDAAGRRLAKARLPEGVAGIARLHAMIGEQLGEDADEDDAGQVAIGIETDRGPWVAALIAAGYTVFAINPLQASRYRERHGVSGAKSDAADAHVLADMVRTDSHQLRPVAGDTAQAAAVKVVTRTHKTLIWERTRCTQRLRHALRDYFPAALEAFEDLDAADTLELLARAPEPASAAKLTTAQISAALKRARRRGVAAKAERIQAVLRAAHLGQPDVVAAAYAASVRALIAVLITLNEQVKTLQGQVEAYFGRHPDAEIIASQPGLGGVLGARVLAESGDDPARYASAKARKNYAGTSPITRASGKKKAVLARYVHNDRLIDALMSQAFTALRVSPGARAYYDRQRARGAGHNPALRQLANRLTGILHGCLKTRTLYDEATAWPQHAAATEKTAA

SEQ ID NO: 495020 - protein, 340 aa, unidentified
MGEVTTIGLDLAKHVFQVHGVDADGTTVLRKQLRRGQVLAFFSRQPSCLVGLEACATAHYWARELGALGHEVRLMPAQYVKAYVKRNKNDAADAAAICEAVRRPTMRFVPAKTADQQAAVLLHRGRERLVRQRTALVNALRAHLAEFGMIAPQGLHNVSKLIAVIRDEGDTRLPVVARQVLEVLAVQIEQLDAGIAALEQQLTAWHKSNPVSQRLATIPGIGPIIATAIAATVVEPTAFRSGREFAAWLGLVPRQNSTGGKTRLGRISKRGNRYLRRLMINGASANLLRSKATNADPWVIGLRRRRPSLVVAVALANKTARIAWAVMHRKENYQRMAAAA

SEQ ID NO: 495021 - protein, 404 aa, unidentified
MTTQMPCLWVGIDASKAHHWWVAIDNTGTTVWSRKVSNDEAVILAGLSEVLALAGEVRWAVDLTGTAPALLLALLADHGQQVIYVPGRTVNRMAGAYRGEAKTDARDAYVIADTARLRRDFAPVEVPTKLVADLALLTTHRSDLIADRVRLLNRLHDVLTGISPALEAAFDYADHKGALVLLTGYQTPAALRRCGQARLTRWLAARGVRHPETVAATALTAAYAQHIELSGQDTAAGITPDLAAQVLALDERLKQLDRQISDAFRTHPQAAVIESMPGIGPILGAEFLVAAGDLASYPDAGHLASAAGLVPVAKDSGRRTGNLRRPRRYSRRLRRVFYLSAQTSIIRDGPNRPYYLKKRAQGHKHIPAVIALARRRVDVLWALLRDNRPFTTSPPASTRTTTAA

SEQ ID NO: 495022 - protein, 346 aa, unidentified
MNQIIRIGMDTSKHIFQLHGVDAAEQPVLRKRLRRKQVLAFFAKLRPTVIGMEACGASHYWARELGRLGHEVRLIAPQHVKPYVTRNKNDGRDAEGTCEAMSRPTMRFVPVKTAEQQAALMLAGIREQLITRRTQLSNTIRGYAAEFGVTAAKGLDKIEPLLAQIAQDEDLPALARELFATEGREYARLQAELKPIEARLMAWHRANACSRRLAQIPGVGPIGATALVMKTPDPRAFASGRHFAAWLGLTPKDHSTAGKTRLGKITRAGDEVLRRLLVAGATAVIQQVRRGRGRPSPWLLAVLKRKPPKLAAVALANKIARIAWKLMTTGESYDGARMPGASAIAA

SEQ ID NO: 495023 - protein, 364 aa, unidentified
MKRKVYVGMDVHKETIQIAYLTGNSKEILKEQQIKHNEVQIKKFIKKLKTEWNEIYCCYEAGVTGYPLYRYLKSLGVNCILVAPGKIPRQNTDKIKTDKRDAIKLARLMRSGELESIHVPSEEDEAVRDYLRSRDSLRLDLGRNRQRLMKFLLRKDIKYSTTKYWTVSHYKWLNNLHFNNEILQETFNDYYSRVRVQEENLKSMDKKIQEIAESEPYREKVGILRCFRGVDYLTAMFLLCEVNDFKRFKTAGSFMSFLGLVPGEYSSGSKRKQTGITKTGSPRLRRILTEAAWQHRFPGTGSKIITARRSGQPALVVALAEKASLRLHKKFRNLQLRGKTPQVMITAVSRELSGFLWAAMNLVA

SEQ ID NO: 495024 - protein, 346 aa, unidentified
MIIIGCDYHPSFQQIAWVDTEIGEVQERKLMHADGEAERFYRQLTGPVRVGLESTGNCHWFVDLLAEMGQEVWIGDAARIAAKQVRQQRTDRRDAVHILDLLIKNDFPRIWMPSKQERDQRQLLIHRYKLVTLRARVKNELQHLALNQGVQKKRKLWSEAGQKLLRELPLQPWASRRREDLLKVLSMLNEQIKPLDEAAKEAAEKHEKARLLMTQPGVGPITSLAFVLTMGDVKRFTRSKQVASYLGLIPREYSSGGRQRLGSISKQGNRFMRILLVEAAQVAVRYDPGFRKEYLRRCHQKAKGVAKVAAARKLAIRLYWMLRTHTAYPEVVRIESSPRVPLVGRS

SEQ ID NO: 495025 - protein, 400 aa, unidentified
MGPPIRVAVDVGRNSHHVGIADPQGRILEEFSIPHSQEGFAEFFTRVERHRKELELPVAVAMEGYNGHGRPLDRMIQKKGYRLYNVNNLKLARFREIFPGPAKTDSLDVHKILELFHLKDHLPMAKDVLQEVPRIPAVNQKLKRLTRRRRQLVNEKVRVLSRLQTDLQAICPELLGLPGSVDNLWFLRFLASCDDLEELAQLTPEEIRGIPGVGKKYAEVIRGWQRRAEFSPEVDYVGPMIVADARRILELLQEIAALEGVIGELCRESELARRLRSIPGFGAISAAELAGEIGTWERFSSEASLALYLGMCPLDKQSGQVHGTRPPRQVNRRAKAAMMVAVAHHIWEVPESRAYYEKKRAEGKRHNQAVRSMARHLVRVMWSMFKQGRDYEVREVSCPS

SEQ ID NO: 495026 - protein, 385 aa, unidentified
MMLIGIDPHKSTHTATAIAPDTNQEAASIRIDATLREYRRMLTWARQWPQRRWAVENAEGLGRHLTSWLLARGEDVVDVPTTATARVRQLSRGGGRKNDRIDAGAAACVAALQGDARPLEAESYVDAMAVLDERRVNLAQSRVRAVNQLHALLRALIAGGAPRDLSATTAAALLRTVRPNGAVEQARKAVAKDLVTEIRTLDTQLKANAQAIARLVAATGSTLTEVVGVGPIMAGRLISRTGRASRFPTASAFANYAGAAPVEIASAERSRHRLSRHGDRQLNSALHTIAITQIRIPSSRGHRYYKSKIAEGKTPREAARCLKRRLADHLWRTMINDERRAVGPGGQLGTALQSSVAGPTPTTNSSDKSLPGPATHDSTTAKPAA

SEQ ID NO: 495027 - protein, 348 aa, unidentified
MTIVPQHFSHVIGVDTHAKTHTLVILDHLGVRHRPPQTFPTSPAGLKRAHAWIQRETTGRILVAMEGTGSYGAQFCDLLTTAGVRVTETKPPKHGVRRAGKSDPIDAEHAARHALTLPIDRLITPRNHAGSHAALTVLLTARAALRKSRSASNNRLTALLRGYGFGLDVRKALTEEQLRLVAGWRAHPTDDLGMATIRAEATREAQDIHRRDGELKANEKGLLQHAKLLAPQLLAELGVGPVVAAQLIVSWSHSGRIRSEAAFARFAGIAPIPASSGNTTRHRYHRGGDRALNNAIWVTAFHRFHHDPRTAAYVAKKSAEGKTQIEIQRLLKRYIIRQLFRVLERTTA

SEQ ID NO: 495028 - protein, 342 aa, unidentified
MVIVVEHQENVLKKISFVGVDVSAKTLAVIIEQEEERGAVLEFANDRVGHRKLIAVITKRGRFARVVLEATGNYSLDLALALHRAKRVEVMVANPRALSQFAGAFLRRSKTDALDAGVILELARRMPFAAWAPPDPECMGLRTISRRIEAMTKNATQEKNRLHAAGAFDETSDIVRNDIEVNIRHLEKRIARLREQALSLIAEHAELSRNFKHITSIKGIADAAGIQILAEIAVLPKDMSMRQWVAHAGLDPRQFQSGTSVNKPARISRRGNRHIRRGLFMPSIVAVQYEPHVKAFYEKLVARRKTKMQANVAVMRKLLHAIYGMMKHDRDFDGEKFYVLGA

SEQ ID NO: 495029 - protein, 291 aa, unidentified
MSEITRVGVDLAKNVIQVHAVDAAGKVVSNRQLKRDKFIEWCMQLPAMCLLAMESCTGAHHWARKLVTLGLDARIIAAHLVTPYRQQGKGGKNDANDAAAICEAASRPSMRFVAIKTTTQQGLLSVHRLREGLKADRTACINRIRGLLAEFGLVFPQSPKELREQLSATIEDASNELVGMARLVIEHAQTQWQEFDDHIAWCDQRIAAHLKEDEQARQATQLMGIGPITASAVVATVGDFKQFKNGAQFGAWLGLTPKQNSSGGKNNLGSITKHGEKYLCVFQPIVDGVSG

SEQ ID NO: 495030 - protein, 441 aa, unidentified
MSERLVLEQALVVGVDPHRESLDVIGICFPEKVVLDEGFDNTRAGHEALWSQAQALAAECGLNLVFGLEDGSNYGYALARYLLRQGCQVKEVNPRMTNRQRDFYGQDKTNRLDALATAAIVMRAHEQLPDLTTVEEATQATQELSRYREQLVRDQTAAVNRLHGYLANQYPGYKSFFHDVRGVTALHFWATYPTAAHLQAIAPQQLAEFLYDKSHHRLTHAACLQKATHVLLSLDDSPIHEPDLLAQAQAAIITDLAERLLQLRHSIEAVEAQLQEILPATGQQLGTLRGIGTVLAAVFVGETGNIARFHCDKDRFASYNGSAPATRGTGKHVRQVQNHWCNRRLKSALDHLAHTAYRQDPLSAEYYQGCLNRGLTPTEAQKRLMRRLSDVIFAMMRDRAPYDLEVHHRKQEERKNRGKSVATAVTSGQALRLPLSPAIPV

SEQ ID NO: 495031 - protein, 330 aa, unidentified
MEKQSEVWAGVDVSKVRLDVGYTGEAETWSVESNAAGIEMIVERFLEIQPRLVVVESTGGLERELVRELYAAGIPLAMVNPHRVREFAKAIGQLAKTDGLDARLLARFGQSTKPDLTRLPNEKEQLLAALILRRRQLIDDRTAEKNRLGTAHPATQRNIKAHLKWLDEQIAELDRQIEQLIQDDPGFKAKDEILQSVPGVGPATAAIMIAALPELGCTDRKKISALVGVAPMNRDSGYYRGKRRIRGGRSDIRTVLYMATITATRFNPVIHEFYHRLLKAGKLKKVAIVACMRKLLTILNAMLRDSLAWQPSQARAAPQNERREHVFAYA

SEQ ID NO: 495032 - protein, 353 aa, unidentified
MKQQKKKKSRDVTVGLDLGDRRHRYCVLDGAGGIVEEESVGNDRASLAGLSSRYPGALMVMEAGCHSPWVSRYLEAQGCRVLVANPRKLRAIYQNQRKSDRRDAQMLARIGRLDPALLYPIRHGSEQAQADLLRIKLRDSLVRARVALINSVRFTLKSLGYTVRNPSSERFHKVAGEGLPEALLQVIAPSVQALAELTMRIKVLEREINTLAQTKYPQTAQLQQIPGVGPITALYFVLKIEDPGRFEKVRDVGAYVGLCPGRDQSGESDPQLRISKCGDAYLRRLLVSAAQYILGPFGPESALRQYGLMLAAEGTARAKKRATVAVARKLAVLLVSLWKHQRPYQPFPLAQAA

SEQ ID NO: 495033 - protein, 391 aa, unidentified
MIFVGIDVAKDKHDCFILNSEGTVLADVFTIANNRIGFETLLSRIQSCSQGESKIKVGLEATGHYSYNLLGFLLDSGLATYVINPLHTNLYRKSLSLRRTKTDRIDARTIAMMLMSDVDLKSYSNTAYHNEELKSLTRYRFDKVKERAKLKSSVARLVNILFPELEKLVSSLHIAVVYALLSNYPGASYIANANTEELAETLCTASKGRYTKSKAAKIQVAAGVSIGSKMPAKSMELKHTIALIRELGKEISEVESAIDKITSQMDSPIFTIPGIGRHMGAMILAEVGDFSNFASADKLLAYAGLSPSTYQSGQLQNCYAHMEKRGSRYLRYALFNAAKYVCLWCPTFSAYLEKKRSEGKHYNVAISHAAKKLVRLIFAMQRSGKAFLADY

SEQ ID NO: 495034 - protein, 400 aa, unidentified
MRTVFGIDVSKASSEVAILVNGERVHGYTMPNDIIGFSRLLEDLKTVSNPEIIFEATGVYSRRLQAFLEENSYDYTRLNPLEAKKQLDGLRVRKTDKIDAEKLASSQFVLNRKPTYVQEEVYQNLHDLSRFYQNLTEDIVRTKNRLHKVLQVAFPEIENLLSTPTGEQYWNLVSIFPTKHWVLELSEVELKEAIRNSTSKRISENRVGNLTEKLVGLAKQSYAGISKTSPMVEEVKYDAQELIRLTNRREQVLQQLIALAEPLPEYKILLSIPGIAETTATSIIGELGDIRHFKSVNQLNAFIGIDLKHYESGDFLGQEHITKRGNPYARKILYKCIHNIASASHTNPCHIADFNEKRKRQSQITSTKPHTIASIHRLIRIMYYLIMHNKLYNYTLFQSH

SEQ ID NO: 495035 - protein, 279 aa, unidentified
MRSVKGVRRSRHAMSALICGLDVHKDSTYATILNPEGKIVNQMRMNNEKVLSYLSHFNVCKVAMESSTQIASLYRQLACKGFDVVVSHPKKTRYIAEAKIKSDRVDSMAIAELVRLDALPLSYVPDEETAKLREKVRRRAFLVRQRVKLKVKIKSVLTYEGIKPPSDHGLFTLKGVEWLRSLNVESIDSYLRIMSVFDEEIRLLSKQLLGLAKEDEDVKLLMTIPGIGYYSALPVKSEIGDVNRFPFGDRLCSYAGLVPSTRASGAVVRHGGITKEGSR

SEQ ID NO: 495036 - protein, 309 aa, unidentified
MKQSVVYIGIDVAKAHLDVAWAQTVRRLPNQRSGHAALIRWIKQSTTPVQLICEASGGYEQALLESLEKSAVKVTLVQAVRVRQYARASGILAKTDKIDAKVLAAFGSAIKPQPMSPRSVEQKRLRQYEAQRRHLSRILVAEENRLAQLSCAQLRTLSRSLMSKIKNQIETLDRRIGELIAQDQTLWEKAQKLTAISGVGARTAALLLAQMPELGQLNRRQAAALAGLAPFNHDSGSIRGKRAIFGGRRALRSGLYMAALSAARFNPILSRFYQRLRAKGKPHKLALTAVMRKLLLALNHSLKPEPIIA

SEQ ID NO: 495037 - protein, 320 aa, unidentified
MMAQNDQIVVGIDVAKQKVDACIRTLSQRNTFPSTAQGHRKMIAWLHKHNVNKAVMEASGGYERDWAKVLRLAGIEVRIVDPKRVRSFALSAGRLAKNDTIDAEMIAWFAETFGEAPSQIHNAAHEELVALVKARKRLIDLKIRLQSQDEHAPSGLVQKAHARVLKSLAAEITRLEAAISAKVKATPEFADRAEIIESVPGLAETTSTLLIAGMPELGAVSKEIAAALLGAAPYDDDSGTRRGERHIKGGRRWVRNAIYMPCLGAVTQNNPVLKAFYQRLIANGKEPKVALVACMRKLIIILNTMIARRQKWDPSRYAVN

SEQ ID NO: 495038 - protein, 446 aa, unidentified
MPVVHPNAAGIDIGSEFHVVAVPADRDSEPVRTFKSFTGELHSMAKWLQSCRITTIAMESTGVYWIPAYEILESYGFEVFLVNARESKNVPGRKTDINDAQWLQKLHQFGLLRASFRPSSEIVAMRAYLRQRERLIDYKSSHIQHMQKAMMQMNVQLGHVVSEITGITGMNIIRAIVAGQHDPKELVKYRDVKCKNSEETMIAALSGNYKPEHLFALKQSLELVDFYSEKIKACDEAIKLIMQQLRQHTEPPEKPLSKSKKRTNQGPNALSFDVRSDLYHVLGLDLTEIDGFGSTLALKMISECGADMSRWPTSKHFTSWLCLAPGSKISGGKVLSSKTRKSSNRAATLLRLAATTVGKTNTALGAFYRRLAFRAGKPKAVTATARKLATIFYNMLRYGMAYNDPGATYYEEKYKARALVNLRKKADAFGFILQEKTGSTVAVGVS

SEQ ID NO: 495039 - protein, 489 aa, unidentified
MVNLYLGIDVSKGYADFALLDQDRKTVEPVFQLDDTATGHRKLGEFLERVFRRWPHATLYCGLESTGGYENRWYDHLLAASAKWDVKVARLNPTVIKAHKKALATQTDTDPVTAKAIASYLATYPESVHYAQGPDYRSLRQLIKLIHQLIQQKTRHVNQLEKMMYQYNPTILLYWTNPLAKWLLRLIQRYPTTAHLRAASAEELCTIPYLTPDKAEKILHQAHQARLVPFDALVEVTIRVLVDQLLLLDKRIEQLKATLVEHVGKQPQLAPLFHLWLTYKGCSQYTAAALAVHFVSVHRFAKAKSTAAYFGVNPVFRQSGDGNWGYHMSQKGNRIVKSLLYMISRSGIQSNPVLRAVYTSALSRGKSKSAALGICMNKTVRILYGMAKNGKPFDPQLALEQMQRHAKLNAQEERAVQRRRRYQDFDEVAPISTRQRKKREQVESQPASTQDQSSINRDHRTCSPCESILPNPKIQSLSTNPTQRTTPFA

SEQ ID NO: 495040 - protein, 342 aa, unidentified
MAIVGGIDIHRAQLTFDYVDLDSGEVFRGRIAPADRAQLRQWLDRFLGRTDVAFALEGCTGWRYVVEELHRAGITAHVAEPAETAARRGPKRRAKTDRSDAQLLRDLLLEGRIPESWIPPQPVLEARALVRLYKDLLDERTGWLQRVHASMFQMGVPDLDVSTMSAAGRDRITAAELSAATRTAVDVAMRQVDRLTAEMTMVREQIHAIGRRQPACRALQAAHYGIGPLTSVVIWAEMGDTRRFRSSDDAVRHAGLDVTVYSSDGRRSAGHLARQGPPMLRWALYEAAVYAGRPSSPDHAYFQQVKARLDGQLALLSMARKLARRCHHTLRNLDDQVLAPAA

SEQ ID NO: 495041 - protein, 388 aa, unidentified
MEPASIHPTAVRTDLGAIFVSLELSRSTWLITSLSPGSGEKMSKHVVAGGNVAELLDRFEQLQHKARLRTGTLFPIVTIQEAGLDGFWIHRALEANGIESHVVDAASIATSRRRRRAKTDKIDGEALTRTLLAFKRGEPRVCAMVKAPDPKDEDRRRICRERKVLIAERVRHVNRVKGLLFAQGVSGYQPLRKDRRRRLEELQTGDGRELPKHLKAQINRELDRLDLLLEQIAAVESERNSLLSTYEQPAVEATSPAAMLLSLKGIGAEFAAVLWTEALSRHFDNRRQIAAYAGLTPTPWMSGTIDHEQGVSKAGNPRLRTTMIQLSWLWLRNQPASALSRWFVDRVQSNGGRLKKAAIVALARKLLIALWKFVTAGVVIEGAVMKTA

SEQ ID NO: 495042 - protein, 408 aa, unidentified
MEVLYPRCAGADVHKDSVVARIRCVSEPRYDEVRTFATTTSALMELGEWLRSHGVTHVAMEATGVYWKPVWHLLEGDFELILANAQHIRNVPGRKTDVSDAAWIADLLAHGLIRASFVPPAPIQELRDLTRTRKQLVREISQHSSRIQKVLEDANLKLGSVLSDVLGKSGRAILQALIDGETDPQKLADLAQGHARKKRAELVEALHGRIRDHHRGLLKVHLDLVTALHHALAELDASVGKALASIQESARLLSTMHGVSDITAHVIVAEIGLDMTRFASDAHLRPWAGFCPRNDESAGKRRSTRVRKGAPWLKTTLITAAWAAVRVKDSYLQAQFHRLRARRGAKKAILAVAASMLTAAYHMLKNGIEYKDLGAAHFARRDRGKMIQRLVRRINDLGCQVQLTPLAA

SEQ ID NO: 495043 - protein, 427 aa, unidentified
MSERKSLEVRVSVDVGSRRHSVAIGLSDGQVLEEFEIAHRPEGFQEFFSRIARHEKVHGCEVAVAMEGYNGWARPLDSLVRQHGYRLYNINNLKLARFKEIFPGAAKQDRIDARKGLELFQLRDHLALAKDVLQEVTGTPKENEILKRVTRRRRRLVNERVRVVNNLQADLHAVCPGLLEMTSDAGNQWFLNFLVSADTVPQLARLRKSTLLKIRAVGRKYAGLIAQWQKQAHFSDQAEWVSEMIQEDARRCLELDEKIKTLEIKIKEIARNSTMATLLSSIPGFGAVCTSELAGEIGTVDRFSKEASLALYLGMSHLDNSSGKYQGTKQAKHVNTRAKAAMMTAIDRHRKYVPQSQKYYEKKRAEGKSHNQAIRALGRHLCRIIFTMLKEQRAYQLRPETGDTQGRVSSVACVKTALQRSKIFVNN

SEQ ID NO: 495044 - protein, 354 aa, unidentified
MSQKLNTAIAVIGIDIGKNSFHVVGLDDRGAIALRQKWSRGQVETRLANIPPCLIGMEACVGAHHLSRRLRMLGHDAKLMPAKYVRPYSKGQKNDFRDAEAIAEAVQRPTMKFVATKTPEQLDLQALHRVRERLVSQRTGIINQIRAFLLERGVAVRQGLRFLRAELPQILATRTDVLSARMLRAIEELASDWRRLDERIEGLSTEIEALARQDMACQRLMTVPGIGPIISSAMVAAIGNGAVFSKGRDFGAWLGLVPRQISTGDRTILGKISRRGNRYLRVLFVQAAWVVLIRPKTWERHGLKPWIEAAKKRLHHNVLAIALANKLARIAWAVLSKEREFEYARTDEMTSPSA

SEQ ID NO: 495045 - protein, 324 aa, unidentified
MSKNKQFYGIDISKDVFDVVDHLEHHHQFLNDASGFKEFGKILTENSHCVMEVTGSYFQGLATWLHVRSIDVSVVNPLSVKRFIQMRLKTSKTDKADAKMIRLYAEAENPGLWQPPSEYIIEANDLHRLITLLLRQRTALKNKLHGLSAKGVKKGVVITSARRQIRNLDHEVSTLEMKLEEVVKAHQANLITRLCSIPGIGKRTAIYLIVITQGFEKFETSRQLISYFGLDPTIHESGSSVRGKSRISKTGDNLIRNLLFMCLFTACKHNKSCREIYQRITAKGKSKKLALIAVANKLLKQSLAIAKSGIYYDENFRSVNLNNV

SEQ ID NO: 495046 - protein, 348 aa, unidentified
MDKITTVGLDLAKQLIAMHAVDARGQVVLRKVLRRDALLRWSATLPPCEIAMEACGGAHHWARELTQQGHSVRIIAAEFVRPFRKSGKNDANDAEAICTAMRQANMRFVTIKSVEQQAALCVHRLRQGLVEERTALINCMRGLLTEFGVVAPLSPDKLRRELRLCLDEEKTHVPLMVRQLVTDELAALDALEQRIADYAAQIAAQVRDNVSAQRLQGIAGVGALTAAAMVATVGQPQEFRNGRQFAAWLGLVPRQHSTGGKSRLGRITRRVDAYLRTLLILGAKSALQAALRKPHCASHRHCAIDCGGGWSTCSPASATTKRWSQLPTNTPASSGRCWSRARTLMCSV

SEQ ID NO: 495047 - protein, 372 aa, unidentified
MNYNTVYVGMDVHKESFTLCSCKYEDEKASHYQRTPASYKNVLRYLAFLRTIYGEDTRFVCGYEAGCLGYSLYHQLENFNVECVILAPTTMLEQRSKRRIKTDKRDAEIIARSLAQHNYSPVHIPTETDNQTKEFIRMRDDHKAELKKIKQQILSFCLRQGYQYDGSGNWTAKHVKWLRSLKPTGLYKEILDEYLLTYTILTDKLNRLDQRIEELASKEEYKESVSKLTCFLGIKTHTALSVIVEVGDFQRFVSARKFAGYLGLVPGQHSSGDDRNGLGITKAGNTHVRRLLVESAQSYTRGKIGYKSRVLRSRQAGNSPQVINYADRANERLRRRYYKMVLKDGKKYNIAKTAIARELACFIWGMMTDNIY

SEQ ID NO: 495048 - protein, 419 aa, unidentified
MTDPPIQVWSRYIAIDIHKHYLMIGGIDAHKRIVLPPRRVELSRWPQWAQANLLPTDAVVIEATTNAWAIYDLLSTLVGRAVVAHPAKVRLIADARVKTDKVDVLTLAHLLRADMLPEVWVPPPHVRDLRALLSHRRRLVSLQTSAKNRLQSVLHRLNVRPPAGKPFAQKQRQWWADLDLSATERLRVDQDVATLDHIAPQIAAIDAELRRLSVSEQWAEHVPYLVQLPGIALLSAMTILGAVGDITRFPSAKQLVGYAGLGAGVHDSGKTHRDKGITKQGRRELRYVLIEAARAAVQSHPYWKRAFAQLEKRIGEPKALVAIARKLLLVVWHVLMAKSADRRADAEQVAFKLMVWAWKLTDEQRGGLSSRQFIRAHLIRLGLGHDLTHITRGGTRRPLATIEEVLALRPDLRGPPATA

SEQ ID NO: 495049 - protein, 419 aa, unidentified
MFKIHRKNCCGLDVHKTWIYACIGITDTNGKTEYKEAHFSAFSRGLRDLAAWLDQYSCTEVCMESSGKYWIPVFNILEDGRFVTLAHPKYTKPQKGNKTDRKDAKWICDLFMCDMIKPSFIPPPNIRQLRDLMRYRGKLTNILTGEKNRAQNCLTVSNLKLDDVFSDVFGKSARSITEHILAHPGEPFDVAPFIDKRCKHPLDEIQAAVDGAISREQAIKLRECLDHIDELEKHRAKIESEILSLTERYSLVLDLLHTVPGFSANPMTAISTIAEIGADMSVFPTAKHLCSWAGCCPRNDQSGGKVKSTRISRAGSYLKPLLVQVANAVIRSKEHPEFGERYRRIKARRGHKKAIIAVCRMLLTAIWNILSKLEHYSPAGFLSSRPVDKGKVLTKSQALELLRLRGYVLTDDPLPLTTA

SEQ ID NO: 495050 - protein, 367 aa, unidentified
MKKISTAAAKQSKNISQQKLTIGLDLGDRNSWYCVVDEAGQIRLEQRVRTTAKALQEVFGTMPCSRIALEIGTHSPWISRMLSDLGHEVIVANARKVRLIGESRKKDDRLDAQTLARLARIDSELLFPVKHRSAQAQADLTVIRARAGLVRARTGLVNSARGLAKSYGERLRGCNVRNMNPEKAESLSPELQSALEPLLNAIDSLSERIVEYNERIENLAQQDYPQVALLKQVKGVGTLIALTFLLTLEDPHRFGKSRDVGCYLGLQPGRRNSGRSEPQLHISKAGDPYLRTLLVQGAQHILGPFGIDCDLRRWGLRLAERGGKSGKKRAIVATARKLAVLLHHLWVSGEAYEPLHNSSRTTVAAAA

SEQ ID NO: 495051 - protein, 343 aa, unidentified
MTQTCYYVGMDVHKRTISFCVKTRDGELVRKGKIQSTKSALKELVERTEQPLTIAMEATLFSGWIYDFLKHLGQDVDVGHPYKLRAIADAKKKNDEIDAETLADLRRTDFFPKCYMAPEEIRDLRSVLRFRNLLVRVMVKMKNSAAGMLMGAGVEYSKEKLHGKRYFNKLIDSLDDVPESLVRMLGMSRSSVEFFQDLERTLKNGLVWHPLLRERIELLMSIPGVGEITALTWALEVGEPDRFKRVRDAVSYCGLCSALHSSAGKTRRGPISKQRNEHLQTILIEAAKLAPRWNPQLREVHDRELGRGDRNRATLAVARKLVAYLMAVDKSRKPFVLREEESD

SEQ ID NO: 495052 - protein, 355 aa, unidentified
MDNLRYIGLDVHRDTISAAVLNREGQLMMQSVVPTRAPAILDFLHGIRGTLHVTFEEGIHSAWLYDLLQRRVARVLVCDPRKNRLLKSGNKGDLIDARKLAELLRNDALSPVYHGELSSLEVQHRTRSYTMLTEDTTRIMSRVKAVFRGQAVPYHGKSIYRPDRRESYLAQLPTEGLRQRVELLYQELDAVHRLRLRAKREMLAECRKHPAMKWLQSVPFLGKVRTAVLIGRVQTPHRFRTKRQFWSYCGLALETHDSAQYHVLHGQVERKPRFVQVRGLNWNHNHDLKDVFKSAATMAAVREGVFRDYYCGLLAKGIRPEMARLTLARKIAAITLKIWKEGGTFNAEQVKPQAA

SEQ ID NO: 495053 - protein, 340 aa, unidentified
MLIIGSDYHPSFQQVCFVNTETGECGERRLTHSDGEAEKFYRSLRGGQVRVGMEATGHSRWFERLLAELNIELWIGDPAKIRAARVRKQKNDREDAEHLLHLLLQDRFPRVWVPSPAERDLRQLVLHRHRLVGIRTRVKNQLQALAMNEGVRSKKKLWSRKGRAQLESFSLAPWATRRREDLLELLDRLDGNIEELSQAIQKEAEQRPPVQRLMTHPGVGVLTALAFVLTIGPWERFRCGKQVASYFGLIPSEHSSGGRQRLGHITKQGNTLMRHLLVEAACAAVRCQPEWRRKFVHLAMRREPAIARVALARKLAVRLYWMLRRGWDYEQMVAFGSHAG

SEQ ID NO: 495054 - protein, 393 aa, unidentified
METIYIGVDFHARQQTICYLKIETGELVTRELKHPDKEGVRAFYAEFKEHVIVGLEASGYSPWFEQMLEELGCEVWVGHATEIRRRARWRQKNDRRDAELILDLMLHDEFPRLHRPTPQSREVLRMLRYRQKLIKMRTMGKNSLQALALQSGLSQRSQLFTKTGQQQLRALRMSPVMEWQREQWLQLLEPINDRLLETMHWLKQQSLDDERIRRLRTHPGIGLLTSLCLVHTLWPVSRFRNQRKVVAYAGLEPMERSSAERKQFLGISKAGSRVLRYLLVEAAHTAVKKDDDLKRFYQHLAQRRGRPKAKTAAARKLLIRSYIMLRDEIDYAEFRQRAVAARLARLRHGPPVSAALIGQPASTEGQEQTPSAISSRRSEDCGKRAPRIVPDLK

SEQ ID NO: 495055 - protein, 460 aa, unidentified
MSQRRKKQKRAGQGGGAVPSLSCIEPNAAGIDVGATEIFVAVPQDRDPSPVRSFETFTEDLQRLKNWLQQCGITTVAMESTGVYWIPLFQILEKAGMEVCLVNAQHVKHVPGRKSDVIDCQWLQYLHSVGLLRASFRPEERICAIRSLLRHRDSLVQMAAAHVQHMQKALTQMNLQLHHVLSDITGQSGLAILDAILAGERNPAVLAQLRHARVQASEEIITKSLVGDYQREHLFTLRQSLQAYRYYPSLITACDQEIEEQLQNLDSRTPPDASPLPPERYPHRPRKNEFRFDMRSELYRIYDTDLTAIPSINALTGYTVLAEVGTDWSKFRNGDAFASWTCLCPQNKKSGGKILSAHTRRSANRVNRALRLAAQTLERSTSYLGAYYRKMRARHGAPAAITAAAHKLARIIFHLVTTREAYDESLFAAEEQRQRKRMENKLKRTAKQLGYQLIPLGQTA

SEQ ID NO: 495056 - protein, 446 aa, unidentified
MMQKVMAMTSIHHSRRTLMNCTQNEKLNQVTPHTLIVGVDIAKFKHVARAQDDRGKILGKPLTFTNTKEGFDAFFTWMEEMQHKHEKADVLVGMEPTGHYWLNLAYTLKERLISFGVVNPLHVKRSKELDDNSPTKNDIKDARVIAQLIKDGRFSYPRLPMDQDAEVKAGITIRNQIVGDLQALQGRIHNWLDKYFPEFLTVFKDWSGKMALATLEHIPLPVQLNQTTPERVAEIWSTYGGVQRPSHKRIQRLQEAAGRSVGLTVGLQMAQREIATNIKRYKMLKEELHALEKQLEDLVLTLPGIAEMLTVPGVGMVTVIELYSELGDIKNFENPRQILKYAGLNLRESSSGKHKGQTRITKRGRAKLRALLFRTVMPLVRHNRAFKALHQYYTTRQENPLRKKQSLIVLCGKLVRVLHTVGQKQCPFDEERMIRDIPHLSLALGA

SEQ ID NO: 495057 - protein, 378 aa, unidentified
MNRIIKIGMDVHTTNYTLCIFEPSFEHDGTVHCITQVKPEIKKIIHVIETFKKKHENEELNIVCGYEAGCLGYSLYHELKEKGVECIILAPTTMKTEKGGRKLKNDYRDAKMIAECLAYGGYSAVHVPTELDNSVKEFIRMRDDIKENLKSIKQQIIAFLTRNGKQFDGKSYWTKKHIDWINTVSFSEPLLQDTLKEYMIEYNHLCDRVETLDKQIEEVSLKEEYVEKVQQLQCLIGIKTHTALSLIVETSDFNRFKKGNMYSAYLGLIPGDDSSGGHEKKLGITKAGNSHLRKLLVEAAQGFTRGKVGFKSKDLKARQEKCSSEVVAYADRANERLRRKYYRMILRGKKYNVAKTAIARELACFVWGIMTNHMDLCS

SEQ ID NO: 495058 - protein, 419 aa, unidentified
MNSSKTKKVKIINEKTMIAALDIGKVAHYAYFRAPNGTDIKPFSFHNVKKGFDTFWMRLCQFKREQGLEETVIGFESTGPYAEPLFHYLRKKPAMLVQINPMHSKRVKELTGNSPHKTDTKDPRVIADVISLGHALTLVVPEGPAAQLRRLTQARERAIKNRTAMGNQLQHLLFVIFPEFIRVFKDISTKTAMYLIQTHPTPESITSMGRESLTGVLKTISRGKVSQQRSNELFDSAQRSIGIKEGKESICMEIAHLASNIEHESYFIDDVEKQMAKHLDHIPYSRCILSIKGVGLITVAGLIGEVGDFKKFHTISEMMKLAGLDLFEVSSGKHRGKRRISKRGRSLMRKLLYFAAINVVKSHGIMHEHYQEMLNRGMVKMKALVAISRKLLTLIFALARDNTVYVENYSTIHHLKVAA

SEQ ID NO: 495059 - protein, 371 aa, unidentified
MTTSRTEAESQRTQGGHRRKDGRGAAWRRELKDASRSKPATLAACAIDELGKPVAEATFANDPGGHVAFIAWARSTAPEATVGIEGSSSFGAALARSAQHAGLSVREVPPHLSRAERQRTRRPGKSDPGDALAIARVTARETNLPPIRLPDRTSELRLLLEAREDLVGEATRVRNRLHAHLLILVPGYGATATNLVAARHRTTVGRLLKSNRAVQAELARALVARLARVDREIASLTLRIDQLVAGHPLLGLPGVGSITAARLIGEVGDVRRFRSADALAALAGVAPIPASSGQIQRMRLNRGGNRQLNRALHVIAVTQARFHPAAKTYVARRIEVDGKTWREAIRALKRQLVRPVFRLLLEGSVAELPIA

SEQ ID NO: 495060 - protein, 329 aa, unidentified
MMEGMVGIDVGKTALTVSVVCSTTRQVLRTTSVANTPEGVAEVLLMTPAATPWVLEPTGRYSTEVVRQARAAQREVLLAPPNEAKAFLRSLRPRAKTDRLDSYGLALYALAVPLRPYPLKPPVLEMLDELLAARRGIVDVLAQLTQQQQALPLAADALTPALEALRAQRDSLDKRIADLTQQEPELEAVARLKVVPGIGPVTATAVTSCLQAHRFATSDAFVAYTGLDTRVRDSGSLHGRRRLSKRGNPELRRLLYLCAQANLRVAGSPFKAQYERERAKGLAHTAALCAVARKLARLCWSLHRHASTYDANRTHHVASDKQEHVGDPS

SEQ ID NO: 495061 - protein, 416 aa, unidentified
MLFIGDDWAEDHHDLEIEDQDGHRLARARLPEGLEGITRLHALVAGHAPAVWADLPPEQVAGQVVVGIETDRGPWVTALRAAGYQVFAINPLSAARYRQRHSTSGAKSDAGDAHVLAEIVRLDRDHHRAVAGDSDLADAIKLLARAHQSAVWERTRQVLRMRSTLLEYFPAAVQAFADLAAPDALALLGRAPDPDRAAKLTRSQLVSALRTARRHHVEVKADMLLAVLRAPALRQPGTLQGAYAAVVTGQVGIIAALNEQLAGLHEVMAEHFGRHPGADIYLSQPGFAVVLAARTLGEFGDDENRFASSRARKNYSGQSPITRASGKKSVVLARYATNRRLGAALHLQAFAALGASPGARAYYDALRARDIAHHAALRQLANRLVGILHGCLKTGTVYDENTAWQHHQITTQTVAA

SEQ ID NO: 495062 - protein, 351 aa, unidentified
MIIIGCDFHTRFQQIAMLDPTTGEIVERRLEHEPGEAERFYASLPTSARVGVEATIRAQWFEKLLAHYGHELWIGDAAAIAAARVRKQKTDSRDARHILDLLLTDRFPRIWVPSPTERDLRQLLRHRHKLVRYRTSVMNQLHGLAISQRLCRKRKLWSRVGRQELEALALDPWACRRRKELLQLLDQLNPWIADLDQAVEKEAERRPEAIQLMKQPGVGPVTALAFVLTIGPVNRFRRSKQVVSYLGLNPTEESSGGKQRLGSISKQGNSMMRYLLVQAAQTASQSDPELRRHYQRLKFRRGHSAVAKVALARKLAVRLYWKLREAAQPVPPARMQGSSSNPMVEETPSIS

SEQ ID NO: 495063 - protein, 400 aa, unidentified
MISVGIDISKGKSTVCLLKPYGEIVCKPFEVQHTEKDLEELANLLQKLDGEIKIVMEATGIYHLPILTFLLEKVFFVSVINPLMMKRFSRDNSLRGAKNDRLDSVMIANYGIEKWYKLKKYEVNDRIYAELRLLGCQYYRFMQTHVKHVQELTHLLDYTAPGLKAMFNSWNEHSNRDKLSDFVERFWHFDLITSLSREEFVEQYLLWAKEKKYHQSRSKAEKVYDLASNGIPTLSSHTPSTQMMIQGAINVLRIVNNSLYYILSRMKELAKSLPEYATVRSMGGVGDSLAPRLIAEIGNVKRLRNGHALVALAGIDPPPYESGQFVGTHRRISKRGSPILRKIGFEVMRVLKSHKEPEDNAVYNYILKKEAEGKNKKLSKIAGLNKFLRIYYVRVMEVYQ

SEQ ID NO: 495064 - protein, 338 aa, unidentified
MTLYAAIDLHSNNGVLSVIDEQDEVVFERRLPNSLEHVLQALGPFLNALKALAVESTYNWYWLVDGLMDAGVDVRLVNTAAIPQYAGLKHGNDHTDARHLAHLLRLNLLPEGYIYPRERRGVRDLLRRRFLLVRQSVTLTNSLQSAWSRRMGHGIRTNDLRQLTGEAIESTFMDVHERLAVLSELKLLQCLHSQVDQMERWVLESIRCTPELQALRSVPGIGVVLGSTILLETGEISRFESVGDYASYCRMVESTRLSNGKKKGSGNAKCGNRYLSWAWIEAANFAIRFSPEIRRWFDRKASKKPRPVAIKSVAHKLARAGYHLIKDGGHFDVKRAFG

SEQ ID NO: 495065 - protein, 344 aa, unidentified
MHQEAIVIAVLNGSGKLVMETILETQASSILQFIHGLRGELHVTWEEGTWAAWLYDLLQPQVEQVLVCNPRRNALLKEGNKSDKVDARKLAELLRTGMLRPVYHGENGLRTLRELGRSYQTISQDLTRVMNRLKAYRGWGIPCAGTQVYAARYRAEWLNKIPQAGVRRRAELLYQQLDGLQALRRNLRPEFLAESRKNKAAKLLRQIPCIGPIRAARLIALMQTPHRFRSKRQLWTYSGLGIETHDSAQFRFVGGQLQRSKKPQQLRGLNRNHNHEMKEIFKSTATRASCGRGPFHDFYAALLAKGMKPEMARLTLARKIAAITLTLWKRGERFDAEQLKTQVA

SEQ ID NO: 495066 - protein, 397 aa, unidentified
MNRLLYIGMDVHKESFTLSTYHVTLDENELTQDFIGDPLKITDATASSVEKYIKNLKKMLNIKATDNVRIQCGYEAGCLGFDLHFQLKAKGIECVILAPSTIQKSANAKKKKNDPLDSKAIAMALANKTYKSVHVPDKDDLNVREYLRMRNAHKDAVKKVKQQILAFLLRQGIKYSATNWTKAHITWLHGLKFDHVLLKETLDEYITSLENYTAKLERLDKRIGEFAQGDKYQEKVAELGCLLGIKTQAAMTMISEISDFSRFRTASEFASFLGLVPGENSSGEKTQRTSITKSGNSQCRKTLIEAAAGICRGKVGHKSKELLRRQALCNNPIAISYADRANERLRSKFYRLNLRNKKPANVAKTAVARELACFIWGIMTDTYDGKVPRSDEYALGK

SEQ ID NO: 495067 - protein, 387 aa, unidentified
MPQSNDLSRSLAALDQDSTLIVVIEMSQSSWLVAGIIPGINRQPLKKLAAAESALLGLLHRWRDEATKAGRTVSRIVVAFEAGRDGFWLARWLRTRGIEAHVIHATSVAVSREHRRAKTDRLDTELLKRAFLGWLRGERGHCSMAAIPTLEEEDAKRPNREREGLVGERTRIVNRIKSTLARLGIRGFKPTLRRAPERLAALLTPEGTPPPPNTLAELRRDMARLRFVIGQIREIEAARLERLEQHPQQGAHAMVRRLAQVIGVGVETADMLVHEILSRNLRDRRAVARYAGLTGAPDESGARRREKGLARAGNSRVRRGMIQLAWRFLMFQKDSALAQWYRARTADARGATRKTMIVALARKLLVALWQLVTTGEVPQGVVLRAAA

SEQ ID NO: 495068 - protein, 457 aa, unidentified
MHIVYEHCCGLDVHKKTVVACLITLNAQGQRQKEIQTFGTMTRDLLALLDWLRAAGCTHIAMESTGVFWKPIFNLLEAEMTVLLVNAHHIKAVPGRKTDVKDAEWIADLLQHGLLRPSFIAPAPQREMRELTRYRSSLVADRARVINRIHKVLEDTNLKLTSVVTDVTGVSARAMLRALLDGQTDPWELANLARGSLRGKQIQLAQALVGRVKEHHRFLLIHQLTLMDVLDEHIAELDREIAQRIGTTEQEPLREPAEEAPQQETSVLGSANSAASHEKSASAQASEPGLEGYAQALARLDMIPGINRRIAEIVLAEIGINMRVFPSAGHLASWAAMCPGSKVSAGKRLSGKTSKGSPWLRAALVEAAHAAARSKDTYLGEQYRRLAKRIGKKKAIIAVAHTILVISYHMLKEERSYQELGSTYFEEREREAVKQRAIRSLERLGYHVRLQEGDDAA

SEQ ID NO: 495069 - protein, 352 aa, unidentified
MNATTVAVDLAKNVFALAVADGHWKIVERARLTRGQFERWFDNRKVDLVVMEACGSAHHWARTLRARGIEVRLLPAKYVRAYVKRNKTDAADAAALLEAARASDIQPVAVKSIEQQALQALHRTRSAWMSTRTQRINTLRGFCREFGLVVPEGAARGLACMARSVADEHSGLPQMLRPAMHLMIEEIRLLEARIGQLERDLAQIAKQSPACQVLQSVPGIGLLTSTAMVAAVSDPKSFASGRRYSSFFGLTPREFSSGNSRYLGRISKRGDRYIRMLLTHGARSVLRAATVARRAGRPLDRLKRWALEVQARTNHNKAACALANKLARIAWAVWVKQQKYQSAQPAMELPST

SEQ ID NO: 495070 - protein, 334 aa, unidentified
MSIQLLAIDLGKRSFHVFGIDGDGVIVSRKVSRPRLAEVVDEIAPTTVVMEACASAHHWARQFAATGRRVRLINPRFVRPFVKGSKNDAADAEAILDAASRPTMRFVPVKGREQQDLQSLHRVRDRLVSQRTSLINHTRGLLAEYGIVLPQGPWRFVAQAPAAIVEADLSDLAREIFADLLDQLGDVDRLIKKLEARIVAICRSRAACRRLAKLPGVGPIIATALVAAVDDGRHFRSGRELAAWIGLVPRQYTTGGKPRLGGIGRRANHYLRRQMIHGARAVVSRLAKHDDRRSEWLKALIARRGFNRTIVALANKTARIAWALLAREQEYAGT

SEQ ID NO: 495071 - protein, 388 aa, unidentified
MNYCGIDVAKRKHSAMVINEQSETIKQNFTFKNDRQGFDKLLHEMEPYAEQMLIALEATGHYWLSLYEVLTTAGYPVVVLNPLQVHAYQRSGIRKRKNDRIDSFWIADFARISNPQATPQQATEHLQLRDLSRFRFRLTENMGNCKRKIISILDRVFPEYENLFSNVFLTSSRQLLAHAVTAQEFADFDLGELTALLSSASRGRFGQEKAEALQTAARHSIGIHFLADSVRVQMRCLLEQLDLLEAQRQEVDLMLEQLMQQIPQYITTIPGIGLVTGAAILGEIRDVNRFESPEKLVAYAGIDATVYQSGEFEAIETHMSKRGSPYLRLALWQAASMAVMYDPQLKNYYQTKKAEGKHHGTVIGAVCRKLVARIYIILKENRPYEVRY

SEQ ID NO: 495072 - protein, 376 aa, unidentified
MEDDSTLYVGLDVHKDSITVAYALGSGEVQLLGKTGTTQTDIDRLCKRLQSKARRIRFVYEAGPCGYGLYRRLVQKGFDCMVCAPSLIPRKPGERVKTDRRDAVKLVRSLRAGDLSAVYVPSVDDEAFRDLSRAWVSAKDDLKRARQRLKAFLLSHGVRYTGRADWGPAHQRWLGAHAFDSAWQQLAFEEHRRTIEDRLAQCARLEAALREAVPNWRFYPAVLGLQTMRGVQFTTAVGMLAELGDLSRFAHPRQLMAWLGVTPSEHSSGEKRRQGSITKNGNSYARKLLVEAAWSYRHTARVSPDIQRRHEGIPKPIVDRAWDAQVRLCRRYRKLIARGKQKNIAVVAVARELAGFIWDVSRLAMSLAVPQEVSLA

SEQ ID NO: 495073 - protein, 420 aa, unidentified
MKVVYSTCCGVDVHKTFLVATIIKTTKGVQPSYQKKRFSTFNSDIRRFKQWLLDNSCFDVCMESTGRYWIPVFNFLEDQINVTIANPKWVKAVKGNKDDAKDSKWIGDLFRLGLVPGSFIPCKEIRILREYTRYRFKLTCCKRSEKNRFQNAFTVCNVALDAVVTDMFGKSASSITDYLITSDEFDPETCKSFLQKSLKKKADAVIESIEGYQMTSSQKERMLMVRSHLEFMQQSIDSLDSKLDELTAPYENAVSLLCTIPGVDRASAITIISEIGTDMTQFNSSKRLCCWAGRTPGNNESAGKKKSVRITRAGVYLKPALVQCAHAAVKSTATPYYKNKCERLAKRRGKKRAIIAIARMILTAVYHMLSTRETWNPCDLYKIDMPKEMQDKQKAKAVKQALKLLISQGVISPESAPTAV

SEQ ID NO: 495074 - protein, 414 aa, unidentified
MQPWSKITHYAGFDWAHDHHEVVIVNPSGKIVADFQIEHTAEGWQRWREQVAVLGPGVAACVETSQGVVVEQLLESGVVVYPVSTTSAKSYCQRKVPSGNKTDHVDAWSLADALRVDGHGWKALAKEDPLVAELRLLCRDEVALIQERTALINQLQSALREYYPAALEAFEDWTLPSAWAFLEAFPTPQALASAGKRKWEKFLHTERLARPQTYEKRMEIFAHATGFVSGQALTRAKSRLALARARMLRVLQSQIDSYRAEIEKLFAQHPDHDLFGSLPGAGPKIAPRLLGEIGSDRSRFEDPTALQCLAGTAPVSYQSGKIHKVYLRRHCNKLLRHAVHLWANLSRQSCPWAAVYYEQLRTRGKNHACALRSLGQRWLKILWKMWQTGTRYDAELHARNQLKHGSWVLKIQHA

SEQ ID NO: 495075 - protein, 340 aa, unidentified
MKLYGAIDLHSTNNVTVVIDEQDRVVYQKRLPNDLALILMELCVYQTELQGIVVESTYNWYWLVDGLMEQGYKVHLANTAAIQQYEGLKYTDDHSDARWLAHLLRLGVLPEGYIYPRADRPVRDLLRKRSQLVRQRTTNLLSIQNLMTRNTGSSLSANQIKGLDVQQVDELLPNGDLALAVKANLSVMCSADEQTKIVERTVTQRVKLRPQFSFLKTVPGIGQILALTIMLETGDIRRFSSVGNFASYCRCVGSQKISNGKKKGKGNTKNGNKYLAWAFVEAANFAIRFNSKIKSFYQRKKAKTKGVVAIKAVAHKLCRACYYIMRDRVPFNITKAFGQK

SEQ ID NO: 495076 - protein, 366 aa, unidentified
MEEEYFVGIDLHRQYFTCYATNGKGDEILKERLSNCQEAVDYLVKHFPFPPKVVIEATRNWMWLVKALKEKGCQVSLAHPLKTKAIASARIKTDLLDAKTLSHLLRSNLVPSSYVASEEEQDNRELARGRIALVHYQTMIKNRIRAILGKENLSYSGSDLFGKGGRAWLKKQQLPETKRKMVKIYLERLDDLISAIRKVDELIQEKSSRLSEVKLLTSIPGVGTTTAFLLAAEIGDIKRFNTAKQFASYFGLVPRLHQSGNHQYYGRITKLGNPYVRWALVQTAHRLARMDRNYKWFVDRISYRGGKKKAIVALARKLATIIFCILKEKREYIIKDYQSNYQRVGRLKVCPAILPERTRKNLVALV

SEQ ID NO: 495077 - protein, 410 aa, unidentified
MEAIVKRSCGLDVHKKIIVGTILLEQEDGSVIEETREFGTTHKECQILSAWLVEHQIELTVMESTGIFWKNIYAALEEKGLRVSVVNARHVKQVPGKKTDVKDSAWLARLARYGLLKGSFIPPKDLRELRLIARYRTKCVRMLASEKNRLHKVLDDAGVRLGNVVSDINGVSAEEIINGLIKGEPIEKLLTYTRGVLKNKKEALRAELEAPLSARHLFLLSRLHSHIEYLKKELQNLDDTLFLAMAPYQEQWQLLQTIPGISDIAAALLIIEMGVDMHAFGSREQFCSWAGMCPGNNESAGKKKSGKTRKGSTQLKYVLCESAHAATKTECQFKQKYKSLLIRRGHKKAIVASGHKMLRVIYSVLTRGKPYNDPEIDYEQLVVNKNSSRWVKMLKKYGYIDPKKPTLTYC

SEQ ID NO: 495078 - protein, 453 aa, unidentified
MEDRPILEANAAGIDIGAREIFVAVPPDRDEHPVRVFSTFTEDLEKMAEWLISCRVTTAAMESTGVYWIPLYDVLERRGVRPCLVDARGMKNVPGRRTDWHECQWLQFLHSVGLLRAAFRPDGDVCGVRSLVRHRGELVAMTNQHIQHMHKALTQMNVQIQHVISDITGVTGLAIVDAILDGKRDAAALAKLRDGRIKASEEVIRKSLVGSWRAEHLFTLKQSRKSYQHYQEQINACDEEIEKLIVAFAPRVDPAERPLPPDRKRKERGRKKKNVNPQSGQAGFDLRTESYKLFGVDLTQIPGLMAMVLTLFSELGRDMSRWPTAGQFVGWLALCPDNDISGGRILWRGTRKVQNRAGQLFRMAAFTLHHEQSPLGDYLRRMKSRIGPAGATTATAHKIAVIFYTMVKNQVEYDASIWAERDAERDKRFEAKLKRQAQQRGYKLVPIEEKPAA

SEQ ID NO: 495079 - protein, 347 aa, unidentified
MQQIRKQVTGIDVAKDELVVCLGRIYEDFSTELFAHKVFPNTGKGFEFLVKWVEQSGPAGRFVMEATGVYFESLAYYLTDNGYEVSVVLPNKISNYFRTLSVKTITDKTASEAIAQFGLERNLDKWEAPKGIYRKLRQITRERGQVVESRTVAKNQLHAEQSEAYPNPGTLTRIKKHIAFLDKQETEIKEELEQLLKEDPEMKQILIILCSVPGIGLLTAATVLAETNGFNLIRNKRQLISYAGLDVREKQSGTSVKGKPRISKKGNKYLRRAMHLPALAAIRHDERFKGIFVRLVSKHGIKMKAAVAVQRKLLEMMFCLFKNQTVYDKDFFQKDTQTQRQTVPIKN

SEQ ID NO: 495080 - protein, 425 aa, unidentified
MNYKQNEKINQVKESTLVVGIDIGSTTQYARAFDWRGIELGKVLPFSNSREGFESFKAWMQHLQDKYKKLDAIVGIEPTGHYWFDLGAYLEDEGILLVMVNPYAVKQTKELDDNSQSKNDRKDPKVIAKLVTEGRYSAPYTPDGVYADLRIMVANRKRLIREMTQIKNRFARWFAIYFPEYTDVFGDYEAQSSMLLLKKVCTPEAIVELGAEKINQIWRDARLRAVGMKRATTLCETAKRSIGLKKGSSAARYEMKLLLEDYEYKKAQLDAVMEEIEKLCRKIPESEQMLAIKGIGVITVAGFLAEVGDVRRFESPRQIQKLAGLSLRENSSGKHKGQTTISKRGRSKLRAVLFNAAIPLIAKNPEFKSLHEYYTTRANNPLKKKQSVIAISCKLIRVFYAILANGVTYDSQKLLSDIHRQPQVE

SEQ ID NO: 495081 - protein, 335 aa, unidentified
MDAGGKLIMECLLETKAATIVEFMEGLHGTLWLTFEEGTSAAWLHDLLKPHISRLVVCDPRKNALLKDGNKSDRIDARKLAELLRTNQVKPVYHGEHGVRTLKELGRSYLTITKDVTRVMNRIKALYRSWAIPCAGATVYAPRHRAEWLAKIVEPGVRVRAERLYQQLDGLQPVRLEARRELLLESHKHSAVKLLRQIPSIGPIRAALLVALLQTPHRFRTKRQLWAYSGFAVETHDSGEYRYVRGKLQRNRERFTVRGLNDNHNNDVKNLFKSAAISASTRPGPLHDFYVARVEKGIRPTMARLTLARKIAAISLTIWKKGVDFDAQQLHRQTA

SEQ ID NO: 495082 - protein, 459 aa, unidentified
MKKVKTKKQKTKNVVELPVVNPYSAGIDIGDTLDVVAVAEGLSTERVRSFGTMTCDLTAIADWLDECEIDTIAMESTGVYWKPLFSLLISRGFEVYLVNAAHAKNITGRKDDENDAMWIQKLHSCGLLSSSYLPEDEQETLRTIVRFRRILTQDSTRCINRIQKSLELMNIKFHTVISDIVGETGQAVLKAIIAGEREAKNFLPLIGYRIKADKDTIVKSLEGNWREEHLYTLRECYSMYLYYRERIEAADKEIEKQLQKIEAKTNEGVIEVKRDGSQENPVIKIKKGKDKNHPKMDVRSYLERIHGTDVLAIYGLSDIGGLELLGETGTDLSKWKTDKKFIGWLNLCPNNKISGGKPISSHVMKKKPNTASQAFKHAANSVQKSDHWLGDYFRRMKAKGGNKYAITATAAKIARIYYKMVTQKEAFKPIELSKYQENYKAKKIAYLERKLALLKQEAA

SEQ ID NO: 495083 - protein, 334 aa, unidentified
MKSDGLHIGVDVSKEKLDVYVPAREEGLRPETKEMDNNTEGFRTLRDLARKAGATVCVEPTGGYELELVAFMHKFGVPVAYADALRVRQFAKAEGNLSKNDAIDAALISRFADKIGVRALEPADIDTVELRRKTKFRQTMMDSRTALICRLETEVDADIRSMMKEQIRHLDKLIDKIERSCMETVARNAEKNALRERFTKVGGVGDLTAISVLAGLPEIGKLSDEKLNRLVGISPEQRQSGTKEWQRRIWGGRKDVRNALYMAATASIQWNSILGGYYRKKRAEGHPHKWAMVPTMRKLLSLLNRIARDPNFTPKPEPATTKKNARAGRKKKSA

SEQ ID NO: 495084 - protein, 316 aa, unidentified
MRANWVGVDVSKAELQAHVRPSGDNFCVANTIEGIEAMIERLKPLSPERIVMEATGKLELLVLMRLTEAGFPVVRIDPRRARDFARSTGRVAKTDRLDAEDLARYAEALRPEARAVRDEDSQKLEELMGRRRQVVRMITAERNRLGRAHALVRSHIEAHIAWLEDQQRQMEREVESAIRDSPMWQERDDILRSVKGVGSVCSHTVAAWLPEIGQMGGKQISALVGVAPMNRDSGRLRGKRSIYGGRAEVRSVLYMATIVAIAHNPTIGAFYARLTAGGKPPKVAITACARKLLTILNAMVRDNTRWNQQLAGIVAC

SEQ ID NO: 495085 - protein, 312 aa, unidentified
MTEHCYCGIDVAKDRLDAQLLPHRQRFSVDNNATGWAELVERLHALPIAAVGIEPSGGYERGIIRILLAAGLSVRRINPSKLRQFARARGILAKNDRLDAQLIAEYVSIMPTRVVQRVATAERLAEVVTMRRQLCDQHVTIENQAAHVEDAILRRLNKRRLARLKADIHLLDKRLAEIVAADVILAQRYELLTSMRGVGPTLAFTLIALLPELGQMSRKQIAALVGLAPYDFDSGKLKGHRCIYGGRMPVRNILYMAALSAARYNPALKVFHNRLAAINKKPKVIIVAVMRKMITILNAMVRDNAAWQPRAA

SEQ ID NO: 495086 - protein, 421 aa, unidentified
MSMPRGPTFSAYVGLDWADAKHDFCLQPGDAGEREFGRFVHKPDQIDAWARGLKERFGGTIAVALELTKGPIVYALQKYDFIVLFPVNPSMLAKYREAFHPSHAKDDPTDAELALDLMLRYPEQCVPLHPQSVAMRTLGHLVEHRRRLVDDRKRTTNRLVDALKQCFPQVLDWFERRDTLVFCDFLTRWPTLTQVKHARTATLEGFFHDHNVRRPHLIAERVDGIRHAMPLTEDIAVIQSYRLLTLALVDQLRVTLQAIARFDQEIAAIAPTLPDYSLFNTLPGSGPILTPRLQTAFGEQRERFQNAGQLQRYSGVAPVTQRSGKKSWVHWRWQCPIFVRQTFVEWAAQTINKSFWAGAFYRQQRAKGSSHQVAVRALAFKWIRIVHRCWQTRTPYDESRYLMALQLRGSPLVARLPAKTT

SEQ ID NO: 495087 - protein, 407 aa, unidentified
MRRYYLGVDWADQEHEVWVCDEVGKKVAAMKVKQTVEGMSEFGRWLHERRGEGSELWAAIEKPEGRIVDFLLDHAVVVYPMNPKAVDRARDRFRTSQSKSDPFDARVLAEFLRTDHAHLKALLPSSKIGQELKMMARDYHRLVRHQTRVLNQLKATLKEYYPRSLEVFADLSAQLALDFLEGYPTPQALSDLSGKRWRVFVRGHHLSETCAAELWERLKKPQLPIPPHVVRAKARLVKVLVAQLRAAATAVEQYREEVESFFASMPAAELTKKLPGGKSGATVPSLWAELGDAGGRWESFQHLQAQAGSVPATKRSGKSQTVRFRYACNKRMRYAVHWLAFISLRQSEWAGAYYRSQRARGHSHHQALRALGAKWLKIIFVMWRDRTPYDENYHLANIARQRLRQAA

SEQ ID NO: 495088 - protein, 414 aa, unidentified
MQDLLACCGGLDIHKESIVACVLKGPVEAGLKPEREIREFGTHLKELLRLRDWLQEQDCHYVAMESTGIYWQPVYAVLETALADEMHLLVVNARHMKNVPGKKTDLRDAEWIATLLRAGLLKGSFVPERDIRDLRQFTRYRKALTRDITSQKNRIEKLLQSNGFRLSSFLSDIFGSSGLAVMQQLVQVGSISWESLDQWLGGRARQNASAILASLNGVLSLPQRSLLKMQLAHLADLQANLQEVEQEIQDDFTQFQGPIELLDSIPGIDQTAAYAILAEIGPELSAFPTAQHLCSWAGLAPGNHESAGKKKKQRVTPGNNYLKTILCEVAWVIASHKKLYLATWYWRLKQHTDGKRAIIALARKLLVIIFAMLKSKSAYDEHKFQERKNASEQKRVKRMVSELSKLGYAVSLAA

SEQ ID NO: 495089 - protein, 349 aa, unidentified
MNKFSKAKSDGNVCTDMFVGMDLHKNYLQVAVLDGKGKVLKNSRIDNDLSKVGRFFDRIGGSGNSSDVKVVMESSCVWYNIYEYLSEERQLDVSLSNPFKTRAIASAKIKTDTLDAVKLADLLRGGYIAKCYVPDRKIMDLRQLVRHRIVLVRMRTKLKNKIHGITLMQGIRITDTSAFSNNYVQKLKQLNDYRIDAYLRLIDSLDSEIKKVSKEIQSRAEKEDMTKLLVTIPGIGYYSALLILSEIGDINRFPDSYHLCSYAGLVPTTHSSGGITYHGAITKTGSKHLRWIMIECVYTHMRISKNSNITRFYTRLANRKGNSKAVVAAASKLLKVVYWVMKEKREYHV

SEQ ID NO: 495090 - protein, 373 aa, unidentified
MPKYSTAFGMDVHLRSTTVCALDADTGEAVTRRFPGNPWGEIAAWMDGFPGPSLAAYESGYLGFAPQRELAGLGVECVVAAVSKIPRSAADSASKNDRNDAARMAKAILAHDISPVWVPSPEVEGIRDLAGAYDGATARLATAKQRLLAFLAKRGFAYGGTTPAGNPRKYWTYDFLRWLDKVRPEDDGGVRTLAALRNEVEAAAEARADLLSEYRAAVDASPIAAEVAALQSIKGCAFALAAAFSAEVGDFTRFRSGRQVTAYFGLAPSQRSSGDSVRLGGISGAGNALVRKLAVEGSWCYAAARHQPKLMPRDTGVPLEIRMHGRKGSERLLRRREEMLARGMPQAKANAATAAELVRWLWALGMMCREGAE

SEQ ID NO: 495091 - protein, 445 aa, unidentified
MIATLDKIYPGVAAIDIGATAFWVAVADRPVEHFGTFTCDVRRVAAYLREHGVQRVAMEATGVYWIPLHDHLDSEGFEVTVFNGAYARNMPGRKTDVQDCQWHAMLHSHGLLSPCFIPPADIRTMRSYYRQREGHVEAKARCNLQMQKALDLMNVRLHYVISQLAGASGLRVVEAILGGERDPKKLVLLCDEQIRKHKTEDVIASLEGTWDVHHLFALRQALEGYRFYERQMESCDGEIDRLLQKMIEGKPPANPKGAARTRSKARHNAPKIDKLHEKMMTLCDGQDTAALPGISPLTMMKLVAEMGTDLSAWKSVKHFTSWLGLAPGSHSSGKMRKRVRRRKTKAGQIFKEAVMSIAGSKNPALGAFYKRVKAKKGAAVANTATARKLAEMYYRAMTQGLEYVEQGVEKYNERCREQRLRWMQKNAIAEGYNLVPFADAAHATT

SEQ ID NO: 495092 - protein, 310 aa, unidentified
MDHLFVGLDVAKDRLDLHVRPGGETFSVSHDEPGLMALVDRLRSLTPTLIALEATGGYEATVAATLASAGLAVAVVNPRQIRDFARATGLLAKTDTLDARVIAHFAEAIRPAARPLPDAQLQHLGELVTRRRQLVEMLGAETNRRHMTRTRAVQRRLDAHITWLERALRELERDLHDTIRSSPIWRETENLLTSVPGVGPITALTLMAELPELGRLDRRQIAALVGLAPFNRDSGTLRGRRMIRGGRASVRRVLYMATVTATRHNPVIAGFYHRLRVTGHPGKVALTAAMRKLLTILNAILRDHRPWQPA

SEQ ID NO: 495093 - protein, 309 aa, unidentified
MSAYAGIDVSKATLQVALFPKADELCVPNTEEGLASIAEYLSAHQVERVLVEATGGYEKLSVKLLANAGFKIQRINPVRSRQFALAMGKRAKTYPIDAQMLAMFASSLEAKGFAKPDEEREVLLELVNLRNNLLQQRDDNRRRIKQAILPSVVDIYLALEASLKVQIKAVDQLVDAQARKVDSELLQRLHAVKGVGPVTIASLFCYLPELGDLSRGQIAALAGVAPYNNDSGSKVGKRQIYGGRTKLRRATYMCALVMVRYNADFKERYARLRAKGKCAKVALVACMRVLLIRLNAMVRDGTPWRDHAV

SEQ ID NO: 495094 - protein, 350 aa, unidentified
MDTTVAPLASIGVDIGKEVFHLVGFGTDGKIAFRRKIKRLALIETFKKLPPCVVGMEACLSAHFVSRSLRKLGHEPRIIPAIYVKPFVKGQKNDYNDAEAIAEAALRPNLRTVREKSQEQLDLQACHRVRSRLVSRRTATINQIRAFLIEQGIAVRTGVAALRNSLFDILKNREDEISPRMSELIVGLYEDWLWLDERIETITKEIEDISQREGNCLRLMSVPGVGPLISTAVVAAIGTGEAFDRGRDFGAWLGLVPRQYSTGGRSILGGISKRGSRYLRTLFIQAAKVLLMRPQNWPKFSFGPWLADAAPRMHRNKLAAALANKLARIAWSVLSTGKAFDTHKLEIEAV

SEQ ID NO: 495095 - protein, 459 aa, unidentified
MGKGSGMTRGDRRRNARRERLRGLLPRDGAVIGIDLGDEKQAVAVVDHDVRVLARKTVRVKAFRLGDALDWAVGQARAKGFAHVTVACEPTGPRWLQVQRLCAERGLPLVSHIARQQQDYTTHKTDEAGCVLIARLACELHCYLPEELDEAQSQLRHLGRRRAQLITAATASVQRLRDFFSVAWPVASEACAHPFDSVTWLAAVQVVTSRCGGQPEKLAAVGPAAFSIAVRGALGGWGGQRVAGQVCRAVFAALTDTEGVIITHRRGLLRRCAGELGDLQRVRAQLRETESDMAAVLGELGLARLGDIPGLTAVGAAAVLAETGDPRRYDSSSSLVKHAGLSPAENASGAFEGQARISRRGRPGLRLAVWRAVWPLLIHNPVMAAKYAAMTAAGDAAQASSAGGSRQASAAAAARTRRAKARVACAASLLRWIYPMVVHGTGWDPAIASGAASCPAEAA

SEQ ID NO: 495096 - protein, 413 aa, unidentified
MDAIVERCAGLDVHLDTVVACVSYGKLDIKPKKEVKTFSTTTKGLLELLDFINQKECTHVAMESTGIYWKPVWNILESGAFDLIVANAKKIKNVPGRKTDVKDAEWIASLLRGGLIEKSFVPPERIRDLRDLTRLRKELLDEVNRNKNRIHKVLQDANIKISSVLSDVFGETGKSILNQIIGNQCITEEFIYSLYEGRGKSKLKSTLMEMYEALNGKIRGHHVILLGMHNSNIVFLEKQINELEKEIDILLQKERDSLELLETIPGISKISASSIIAEIGTSMDVFKTEKHISSWAGLCPKNNESAGKKKRSGIKSWNNWLRSMLCECAWSATKKKDSRFKNKYWSMVPRMGRKKALIAIANMMLRLIYHLLKTKSTYKELEIQYFIDKDKRREDRIIKELKSKGYLVEKDSL

SEQ ID NO: 495097 - protein, 370 aa, unidentified
MSNATTFVGLDVHARSVKACAFVPETGETIRKSFGYEPGEIASWVSSLPQPARCVYESGVTGFHLCRELNAMGAACVIGAVSKMHKPAADRGRKTDRRDAQFLAVQLALGVVTEVHVPDAECEGARDLARALADARDDAVRAKQRLSKFLLRHGLVYDERNAAGQRRNRWTGDFWAWVGRIDLGDGAAMATLDHYCERVREADAAKAALEAKVKTLAQQPRWKPTCDALKCLKGIDAVTAVSIACEADGFARFAAASGFAAWVGLVPSEHSSGESRFRGGITKAGNKHLRKLLVEAAWHYKGASRSPKDLAKGQIVDEATRRHANAGVRRLVDRRRAMDDAGKQSSVANVAVARELACWCWAVGRMAEGA

SEQ ID NO: 495098 - protein, 332 aa, unidentified
MAVFTNTIGIDVSKDKIDVHDYKLNKHQLFKNNPEGHKNFLDWVKEKHGDELSGVLFCFENTGVYSLGLSCFMEENKLAYSVVAGLEIKRSMGISRGKNDQIDASKIAQYAYLRRETIKLSQMASKTLLQLKELLTIREKMVKHRVAYQNHLKSLGNFYQRETSALLFDSQEKLIQELNKQIKAIEKEMEKLILEEPAIKQNYDLATSVKGVGLVLGLTMLVYSNNFSGFKTWRQFASYVGIAPFEYESGSSIKRGKKVSSLSNKRIKGLLSSAVATSIQHNPEMRVYYQKRVQEGKNKNLVKNIISNKVVSRVFAVVKRGTPYVNLTNYAA

SEQ ID NO: 495099 - protein, 320 aa, unidentified
MATNHNASAMDKTIEFAQVVDRCCGLDVHKKVIVATVEGTGIARQTREFESTTRSLTELKEWLLELGVTHVAMESTGVYWKPVINILEPAGFTLLVVNAQHIKYVPGHKTDKKDSAWICKLLRAGLLKGSFIPDRAQRDLRDLTRYRRKKVQEVTAEKNRMLKVFEDANLKLSSVFSNVNGVTCTRIIDEILKGNTDPDYLASLCTHGRLQSSKEQIRDAVEGVFTEHHKFMLKAIRRSIASLEEEITELETEIDRRCEPVQEEIERLCTIPGIDKTGAKELIAEIGVNMEVFPTAANLASWSGVSPGNNESAGKKKART

SEQ ID NO: 495100 - protein, 340 aa, unidentified
MGDITTIGLDLAKNVFQVHAVDVAGSVVLRKQLRRGQVLAFFAELPPCLIGLEACATAHHWARELIALGHETRLMPPSYVKAYVKRNKHDVADAEAICEAVRRPSMRFVPLKTAEQQSALMMHRARDLLIRQRTMLVNALRGHLAEFGLVEAQGLHKVARLIAIVMDEMDARVPDIARQVLKVIVSQIEDIQTRIAGLETQVLAWHKSNPVSQRLATIPGIGPIIATAIAATVADPSTFRSGREFAAWLGLVPRQNSTGGKARLGGISKRGDSYLRRLLVNSAHTVLLCSKVAKTDPWLTSLLSRKPRLVVAVALANKTARMAWAIMSRPDLYRHAAVTA

SEQ ID NO: 495101 - protein, 457 aa, unidentified
MPQAKRPRKSRDMVTIHPAAAAIDIGATIHVAAVGPERDNEPVRTFRTFTDDLHRLADWFAGCGIKTVVMESTGVYWIPIFEILEQRGFEVMVVNARDAKHVPGRKTDVSDAQWLQRLHEYGLLRASFRPQAEIAGLRAYLRQRERLLDYAAAHIQHMQKALTQMNLQLHHVVSDITGVTGMSIIRAIVEGERDPNVLASHRERGCHSSVETMCQALVGNYREEHVFALTQALELYDVYQTKVTACDKQIQAILMRLKQTAPSPANKLLPVRRRSRQPNAPAFDARAALHAILGVDLTRIDGLGPYLALKLVGECGTTLTAWPSAKHFTSWLALAPHNKISGGKVLSSKTRRTSNRAASLLRLAAGTVGRTDTALGAFYRRLSARVGKAKAITATARKIAVLFYNTLRHGMSYADPGASYYEDRYKQRVLNNLQRRAKSLGFVLREVDQDAAQVGVS

SEQ ID NO: 495102 - protein, 344 aa, unidentified
MENYAGIDVSLELSSVCVVDAQGKILKEAKVASEPDALVEFFEALGFEVKRIGLEAGPLSQWLHAGLKGAGFETVLLETRHVKAALSAMTVKTDRKDARGIAQLIRMGWFRPVHAKSVDAQEIRALLIARKQLLGRLIDVELSIRGILRGFGLKVGLVTRKTFEARIRELVAGQATLERIAAAMLSARSALKAEYGRLHKAVLAIVRDDAVCRRLMTVPGVGPLVAITYKSAIDDPHRIVKSKAAGALFGLTPKKYQSGEKDVTGGITLAGDETVRTVLYEAANVLLSRITRFSKLKRWGMDVAKRRGSKRAKVALARKLAVILHRIWVDGTSYRWTDAGPIAA

SEQ ID NO: 495103 - protein, 310 aa, unidentified
MNNLTETTSSVYTGLDIAKATLQLHLQGQQLSLPNTAAGHRQLIKRLRSVPGAHVLCEATGGYERAVVAALHAAQIPVSVLNPAQVRYFALAQGQRAKNDPIDASVLSAYGAALRPDPTPLPDACLRQLRALVQWRLHLLEQLQAARNHAEHATEAFVRKQLTQLIGQLSRRIEAAEIELAAALARSPQWQAQINKLTALDGIGTLTAVSVLCQMPELGQLNRGQTAALGGLAPWTRQSGPWQGQRHIGGGRAAVRRALYMAAVSVARMAQSRLGRFYRRLREAGKPAKVALAAVMRKLLIQMNHALKPA

SEQ ID NO: 495104 - protein, 408 aa, unidentified
MSASSPPVARYIGLDVHKHYLVAYGVDRDQNPVYGPRRVEYDELESWIARSLNAGDAIALEMTTNTWQMVDLLEPCVHSVTVVHPPEVKAIVKARVMTDKKAARILAQLLAAGLLPPVWVPPQPVREIRSLVAGRRRTVALSTEAKNTLHAILHAHHLLPPPEVKDIFHAKNREWWRSLPLSPVEMTRVEVALETLDFAVRQRERYEAVLAQLAAGDERVPLLAQLPGIGLVAAMTLLGAIGDIARFPTATQLVGYAGLGAQVHDSGQAHWSGRITKAGRRDIRRVMVDAAAHAVQMKGHWREVYERLKPRLGRPKALVAVARKLLIAVWHVLTGATADRFATPEQVAAAFYALAYKMGVRNLPEGVGARQFVRDQLDRLGLGDEITHIPWGSKRFRLPPSRVGEADS

SEQ ID NO: 495105 - protein, 366 aa, unidentified
MKKSITPIGTPVGVDVHKRRCKVVEFDQGEIKVRKPMANTREEWLEMLTELPPDAEIGLEVSTAGYFAMSVLEEAGWRDRAHWVHTAGIDSNRRQKNDRLDAERLARKLAAHHLDPRPEAWFPPPEIRALRLRARARCWLASLRTQGKNHLQSLLQMQGLLLPGSDPLGAAGQKWLEEQKLPLPLSESIPQIQRLLKLLEEEIEISEKYLLAVQGQFPQLALLRTIPGIGAILAAVIWSEIGTIERFRSAKALANDTGLVASFYDSGEVKVSGPITRQGSRWLRWAFVTAANVAIQYRNPFARRYHRLRRGKKPNVAKAAIAHSLVRCVYGVVKHGCPYREDRWGRKVGALEQEARGSARSTKTVL

SEQ ID NO: 495106 - protein, 355 aa, unidentified
MESVKYLGFDVHQSTISVAVVNADGKLVMQSVIATHAATILDFIHGLRGTLHLTFEEGTHSAWLYDLLARGVARVVVCNPRQNALLKAGNKSDTSDARKLAELLRAGLLAPVYHGEGSTRTLQELVRSYAALTEDTTRVMGRVKALYRSQAIACAGKKPYGRRHRPEWLSKLSQAGLHRRAERLYEELDALQGLRRAAKRELVLESRKHAAAKLLRTVPLLGAIRAAWLIGRVQTPHRFRTKRQFWAYCGLALETRSSADYRFEDGQLVRAKKPVFIRGLNRNHNHDLKNLFKSAATTASVIHGPFREFYEGLLAKGMQPAMARLTLARKIAAITLSVWKKGESFDAEQLKPQAA

SEQ ID NO: 495107 - protein, 313 aa, unidentified
MYYIGVDVSKKALSVFDGKSDLEFENQPGLKALKRYLKKRYRTFDNLSMIFEATGIYSEHLKAFCAGNKIKAFILNPKQSYNFARSLGKRSKTDKIDARTIYAYQKLIAKEKMQVPVINQEANLLSSYLTSYQFAQKQRVALSNHLESIQDKALLKLLQQELKRTQRLEDTLLSDIKTYILDHPKLKEDFKRLLTISGIGEKTAFGLLALFNTYQGTNRAQITALVGLDPIQRESGTSVKGRPRISKNGNRHIRKMLYMPTLCAIKNNQKIAVFYQRLLAHHKPKKVAVIAAMRKLLLVAHAIYRNKTEYVAI

SEQ ID NO: 495108 - protein, 349 aa, unidentified
MRIIGGLDVHRSQITYDWIDTDTGQHQRGQLAPAHREHLRVWLEQFRDRPAAFALEGCTGWRYVVEELQRAGIAAHLAEPADTSTLRGPKRHAKTDRTDARHLRGLLAAGRLPESWIPPARVLEARTQVRCYKALLDEHTAWLQRVHATLFHHGVPAQRNLLAADRRGRLERGSGLSPAARQLVAVALRTLDHLDAELDRLRAELTWFARRQPGCQALDGLYGIGPVTAVAIWAELGDPARFTSSRHAVRHTGLDITVYSSDGKRTPGHLARQGPPVLRWALFEAAKCAARPSSPDHAYYLQVKGRLGGNRATLAVARKLARRCYHTLGTLGDLAYAPPSDTPDLGRVA

SEQ ID NO: 495109 - protein, 428 aa, unidentified
MGATLMQVCISVEDREHGSNRSFGTDTQSLRDIVNWLLGHGITHVAMEATGVYWIPLFNMLVKNGIEAVLLNAADVKNYTARKTDVNDAAWLMTLMSYDLVKPSFQIDELSRALRNCTRHRMSLVSTCSDCIRRMQKTMELMNIKLTEVISDIAGPTGIRIIEAILAGNTSPRDLAALASDRCKSSKEDIAGALEGTWEDELIFILGQHYRQYLLYREQTMQLDSVIEGKLKLLVERILKMNDGEVRTVIRSKKGTPHMKNRISFDIEALSVQIWGVNLMRIEGVSGITMLSLMGELGCNFVSSFKDAAHFCSWCNLSPCHKITGGKIISSKMKKRVNPVGLTLRNCAQTLVNSKSPLGDYYRRMRSKGGGKYAVCATAHKIAAIIYTMVRNQQEYDPSKVSVNDRQWLEKRIKHHEKLLKKLKSMAS

SEQ ID NO: 495110 - protein, 412 aa, unidentified
MEVLYACCCGIDVHAKMLVACLLKGRKKDIRTFSTMTEDLLRLLDWLRQEGCTHVAIESTGVYWRPVFNILEGALDVMLTNARDAKGYKARKTDVIDAEWLADLLRHGLLKPSFIPPLPIREIRELTRYRESLVREQTALANRIQKLIESANIKLGQVASDALGVSGKAMLRALAAGETDAEKMSHLARRTLKRKQPQLQQALEGRMTPAQRWILGQLLDQYDQVEAALQSAGARIKQEVESSADPFVPEAIKLLDTIPGVGETVAQIIVAEIAVDMARFPTANHLASWAGMCPGNNESAGKRKSGKTTKGSRYLRAALVQAAWAASHQKGTYLAAQYKRLVKRMGKKKALVAVGHSILVMVYHVLQNRTSYQDLGGDYLDRRNVDKQRKRLIRQLESLGVKVTVEEIKEAA

SEQ ID NO: 495111 - protein, 418 aa, unidentified
MSAEYAVLVGLDWADQKHDLCWRETATGQTGRCVLEQRAERINEWVVALIAKYPGRRIAVCLEQSRGPVVYALMGYAEVDLYPVNPVTLADYRNAFRPSGAKDDPSDAALLLELLERHREALQVWRPDTESTRLLRSLCEDRRKAVDARSALCNSLRARLKEYFPQALLLVGDELYSEMSCAFLMKWPRFEAVAAARADTLRRFYYAQHSRSETQIQQRLALIAASRPLTTDGAVVEAGIRWVQTLVAQLRAFNRSIQDYDQRIAAVFKAYPDRFIFASFPGAGQQLAPRLAAVFGTDRDRYAAAANIATYAGVAPVIERSGQQVWIHWRWHCPKFLRQSLVEFACKSVGFSTWANVYYREQIKRGKSHHAAVRALAFKWLRILFRCWQERTPYDEAKYLAALQRHGSWIAVAIKDAA

SEQ ID NO: 495112 - protein, 354 aa, unidentified
MFPNIFPPFQPKGGALNKLYGGIDLHANNSVVVVLDEADQVQYRKRLPNELEQILQPLAPFRAHLEGLVVESTYNWYWLVDGLQSEGYCVHLANPAAMQQYAGLKYTNDDTDARWLAHLLRLGLLPTGYIYPKEERAIRDLLRKRSQLVRQKTANLLSIQNLLTRNTGQALNGTQIKQLTPSTVRALVDLPEHALALEVTVAVMQHLAEQITQVERAVHARVKLRPTFQSLLTVPGIGQTLALTIMLETGEIDRFPTVGQFASYCRCVGSTKLSNGKRKGQGNPKNGNKYLAWAFVEAAHVAIRYEPQIAQFYQRKRAKTKVMVALKAVAHKLARACYYLMRDTVPFDVTRAFA

SEQ ID NO: 495113 - protein, 401 aa, unidentified
MDIVCGLDISRDTQAATILCGKIKVKKSFGVNDEELSNLKGWLRENNCSRIVMESTGIYWVPIYSALEEAGFQIVLANPRQVKAIPGRKTDQSDSEWLAYLLRAELVRPSYVPERKLRVLRSLTRLRTQLTQDQSSYKNRAHKILQLCNIRLASKLTDIFGKSGRNILNALMTGGSLDEALSRCPKRIQAKSEEVKATIMGTLDQTDLLQLKVCLEMIDTIQEKMYKLDGEIAKLVDEETIRRISTVPGVKEVSAASMIAEIGDPSRFPGEKQVGAYAGLVPSVRQSAKRRWYGGITKHGSRWLRRTLTQCALAAIKVRDSKLRMYYLKIKSRRGHNIAIVALARKLLIIIHHLLLTGEEYVEKTVRRKRLRMIKASDLKVPLEDAVSLLNRAGFMISDYG

SEQ ID NO: 495114 - protein, 343 aa, unidentified
MQYHTGCDAHKKTCTFHHMSDDSAHGLHMKVDTNKQSIYNFLELLDAPTTMTLEAGNSWWHLYHLFNDHPLVSEVNIVDPRRSRKICEELSVQSGYGRASNDHIDSEMLAEIRRRNLAPVIQIPTPEQMEIRTINRFRLDSVVGGTMAKNKIHALLIFHGARARINDLLEKFDTYEKIKKQLPEYVIFLIDQLLERIIALAQQVELCESKLDRLLPESDPNMSIILSHPGIGIVFARTIHSEIWNIAYFKEPKNLISYSGLAPVECESAGRKKGKIQLNRHCNYYLKYAFVSAANSSRNHPKYRRKYQSDVKKHGKMIAKLNLARRIVKNIYWMLTRQQFYQA

SEQ ID NO: 495115 - protein, 463 aa, unidentified
MPLRLGIDVACRAAHQVSLADEQGLFVWTGRRFRTTSQDLVRLWSMLPDGTDPTEVLVVMEPTRNAWVPLAAWFRRRGARVVLVPPERSADLRRYYAKHTKSDRLDSQLLARLPMLHPDGLYAEQGLGPGDALKRAAKLHSTLTHRRSQSLARLDALLEILGPGWHAAFGADLANRTPLKFLAAGYADPYVVKRLGRARLARFCYRHSRGAWGESHADALLKAASETLELWAEGELDYPDLAEDIAIEARLALQLTEEIKDLDERTAVLLRAADPDGILTSAPGVAAITAAAILGRLGDPNRFTSLAGARAFTGLVPSLDASGLNGRHGSPTKRGDAVLRQALFMAAGQARRIDPTLAAKYHRLMTEAGKHHNSALCHIATTLLSRIIACWRAGQPYQLRDTDGTPVTIEQARAIIADRYVIPKDVRARRRTTTATRTDRRSKESPSAPSTGPSTHHATTTAA

SEQ ID NO: 495116 - protein, 300 aa, unidentified
MCRHDKGVCMNSEVYVGVDVHEGESQIAVLNKDGELLEEKRLPTCSLTKYLSSINGNKHVAVEAVGFVYPIYDKLKMLNDCTVSVASPSRLQLIAKSKLKNDRVDAIALGELLRTNYLPVSHMIDEQAREKKLLAMARYARRKARVIVEIKWLLKRRGIKVKGHDDLKELHLPEIDRRLREMELLNSIIDELESAIRETAANDERVKLLDTIPGIAPYSALYLSTMLDDVGRFHDSKQAAAYLGLVPSLYQSGDVCYTGHITKAGDPVLRSILIQCARASIKSDKRLKEFYLRIKHKRRQ

SEQ ID NO: 495117 - protein, 408 aa, unidentified
MKPLFVGIDVSSRNNVAYLMKPDGSEYSSFSVQNNLGGAKLLSEKIVSALRSMQLERVVIGLEATSIYGDSLVYALREDGSLGRFQRKIHVLNPKQVRKFKEAYPDLPKNDWVDAFVIADHLRFGRIAKEVYMDDYRYQALRTLTRARFDVIQNLTREKQRFANYLFLKCSGIAQDKAIPNTSATTIALMEHFETVDDLANAILEELTAFIIEAGRGKFVDPDATAKAVRAAAKGSYRLPKTVNDTVNQAMSVSIASMRALKEQIKVLDKAIEQQFEIIPNTLTSIPGIGKVYSAGIIAEIGDIHRFDSQASVAKFAGLVWHKDQSGEFKAEHSRMIKSGNRYLRYYLLEAANSVRRCDSEFRRYYNLKYHEVNKFQHKRALALTARKLVRLVFRLLKDNRLYIPPEG

SEQ ID NO: 495118 - protein, 333 aa, unidentified
MHKASYAVAILDEEGQRQEFSTPAEPRKLLLQLLGMGMTIKALAYESGPTGYGLAWACQKLGIPVLVAAPSRIPRPVSKTGKTDRLDSMKLAEFLARDMIKSIAIPTEVETHLRSLERCRQQLVERRRTVRQHIKSMLLFHGLAEPAGLSSWSVASVQSLQAMVLPDVLRITLDSYLKEHAFLLEELSHLRKLLSAALQAEGKIQTVKHLCTIPGVGETIATTFMTEIFRPERFKRAEELCAYVGLAPVTSHSGSGKATARLGQVGQNYLRSILVQGAWRFISAEPQYHGMFIKIRTKTGLFAKGLVALARKLLVLLWRVAVENRPYRSASVQ

SEQ ID NO: 495119 - protein, 316 aa, unidentified
MYLGIDVSKKTIDCCLISDGIFFERRFENGQSGFKKLQDWLIKHGATDKLHCCCEATGKYYEALADCLAESYTMSVENPRKIKGFATAVLLRSKTDKQDAKLIAQYCKAVSPEPWQKPTPEQTRLKELTQYLSRLKRQKASEQTKKQTAPDYLVPYLQSTIDHLAGQIKSVQKLIQDFYRQNPQYRQQKERLQTIDGVGDNAANSLLAVLSRNQRFQSAAQFVAYLGLDPKIRQSGTSVNSKAGISKVGNTQLRTALFIPAMHAYRSETFKTFTARLKANGKRPKQIIVALMRKLAVIAYHLIKTGKDFEPERYTG

SEQ ID NO: 495120 - protein, 343 aa, unidentified
MQTITTIGLDIAKSVFQVHGVDAAGAVVIRRQLKRRSVLAFFQKLPPCLVGIEACASSHSWSRELQALGHTVRLMPPAYVKPYVKRQKNDMADAEAICEAVTRANMRFVPTKTPEQQSCLMLHRTRHLFVRQQTAVINSIRAHLAEFGIVAPVGRKGVTELLHIVADPSDKRVSEVARACLAALGTQLLSLKQQIVEFDRMIMAWHRSNQTSKRLHYIPGVGPMLATALVASVADPRNFRSGRNFSAWIGLVPKQHSSGGKDRLGSISKQGDRYLRSLFVAGALAVIRYAKIHGTKHRPWLTALLGRRPTKVAAIALANKIARMAWAMMAKGERYKQPVALAA

SEQ ID NO: 495121 - protein, 334 aa, unidentified
MKITTIGIDLAKIVFQIHGVDERGKVSVRKQLKRAEMSTYFANLEPCLIGMEACGSAHHWARKLEGYGHTVRLMAPQFVKPYVKTNKNDMADAEAICEAVSRPNMRFVAMKTVEQQAILSVHRARQGFVKARTAQANQIRGLLSEFGIVMPQGILTITKQVPEILEDWENGLPGTMRNLIERLTENLKEMDRQAKELEAQIQLWHRANAASRKLAEIPGLGPITASAIVATVGDAREFKNGRQLAAWMGLVPRQHSSGGKQTLLGISKRGDLPAHVDDSRCASGDSFCREQSRARELVAKGDGKAQQERGGGRIGEQECQNRMGALGQGQNVPP

SEQ ID NO: 495122 - protein, 339 aa, unidentified
MKLYSGIDLHSTNSYLAIIDGSGKHVYQEKLPNDTSAIAEKLTLYSGSLIGVVVESTYNWYWLVDGLMAEGFTVHLANPSAIQKYKGLKHVDDKHDAFWLAEMLRLNILPEGYIYPKEERPIRDLLRKRSHLVKLRSSLIISLQNIITRNCGSKMRTNDIKRLREDLVQPLLASNEDLALAGQVSKDTIDFLTRQIRTIETSVEGKLDLKNPFKYVDTLPGVGKILGLTIMLETGPIERFKKVGNYSSYCRTVSSKWTSNEKSKGQGNKKNGNKYLAWAFSEAAEFARRYDDCARAYYNRKLQQSNFMVAHAALAHKISRAAYYVIRDQVPFEKNKLFS

SEQ ID NO: 495123 - protein, 409 aa, unidentified
MLWGERRENGIIVAATEPTGCPMPQPNDLSRSLVALDENSTLIAVIEMSQSSWLIAGIVPGVERHPAKKLNPDEAGLLQLLHRWRGEAKKAGRNINRIAVAFEAGRDGFWLARWLRAHAIEAYVIHPNSIAVSREHRRAKTDRLDTALLKRAFLGWLRGEREHCSMAAIPSLEEEDAKRPSRERENLVGERTRIGNRIKSTLARLGIRGFKPTLRTAAQQLERLRTPEGESIPPHTLAELRREMSRLRLLAEQIREIETARLDRLERQPNRGAHPMIRLLARVRGLGIETADMLAHEAFSRSLRDRRAVARYGGLTGAPEESGARRREKGLAKAGNTRVRRGMIQLAWRFLMFQKDSALAQWYRTRTTHARSATRKTLIIALARKLLVALWRLVTTGEVPHGVVFRPAS

SEQ ID NO: 495124 - protein, 499 aa, unidentified
MPSTNVAAAPILGAMKRKSIFRNESQKLDAAFIEAGLPERVLLVPLDFAKVTHYACFCDGRGTYIRKAFTVKNNQEGIDYLVDQIERTRVARSIKSKRHVIIGGEDSASYTRNFMDRLFELGYLTVRLDSKEVHRQAESVDSSTDKTAVRAIAKTMLNRDARQVGGSDPYAQLRGLTRQRRRLVHLSTAVKNRIHTHADCLFPGFLSKDSAVAAFSMASLELMANKFSAATLARKSEKTITRTLSRQGVRSAPEVAAKLKEQARNAICADDASVQLSSQLIESELRLFQTLQSSLSQLDRESARILLQLPEAFAVSIKGIGITLASSIFAETGSLSQIQRCDQINAYAGIAPRVKQTGGPESPARIGGKRRNFNRILKDYTLQAGNHLYLHGPEELLHDAARRKLAGKAVDTAMARRFLRIARALAKSHSIYLPSHLRTAQAGTDVEAQTRAQYIVKTWPDFLLKWKRLGLHEEAFAPETPLGDWRIIVQEIYEIDLPI

SEQ ID NO: 495125 - protein, 326 aa, unidentified
MQGKEASEQETNAKSSVGIDVSKDWLDAHVLPSGEALRVANTREGIRKLKRWVQRFEIALVVVEATGKWHRALRRSLDASAIQVAVVDPFRVRMFAKAQGIFAKTDRLDARVLALFAALMAPPLRPPAPQALEELNELVVARTSAVEQRTALKNQLSAAEGTFLKRLLARRIASSAKDIAALDREILKRIRADEGLARRYVILTSIPSFGPVVAASLVAGLAELGTCTAKQIGMLAGLAPIADQSGKREGVRVIWGGRAAVRRILYLAAVTAARANADMRAFYQRKIADGKPAKVAIIAVARKLVVLANTLITQDRTWELHAPKHA

SEQ ID NO: 495126 - protein, 337 aa, unidentified
MTIIRIGLDTSKHVFQVHGVDAAEQPVLRRQVRRSEIEKFFAKQPPTRIGIEACGASHHWARVLRALGHEVVLMPPQYIKPYVKRGKNDAIDAAAICEAMSRPGMRFVPVKSAESQAGLMVLRVRELLVKQRTALINAIRGHAAEFGVTAAKGPAKVSELLQRAHAEAAGVPPLALEMLSLLADQLAAVEARLKTLEGQLMAVHKANPVSQCLATIPGVGPIGAVSFALRVPDPEAFRSGRHFAAWLGLTPRENSTGGRHRPGRISRQGDEALRQLLVLGATAVIRFAKPGQASPWLLQLLARRPKKLAAVALANKMARMIWAMMVSGEVYRRPQQA

SEQ ID NO: 495127 - protein, 325 aa, unidentified
MQNQIIIGIDVSSATLDICVTGQGQKTLVIKNEITAICKFFNTYKKECLLIGMENTGRYNWALYEVLKDLHHQVYVISPLHLKKSMGLVRGKSDKVDAIRIAAFIGKNHLDIPQWKPSSSAIQKLKILLTERNSRVRSRSQLLKQQYDYAKMKHLSLDKPLQKLNTQQLILIDKQLILIEKEIELLIKADEQMDQQAKLIRSVPGVGKVLCWMMLAKTESFTTITEPRKMACYSGVVPFTNQSGTSIRGKSKVSSYADKAIKTVLHLAAMSAIRLKNDLREYYSRKVAEGKNKMSALNAVRNKIIHRIFAVIKNQTPYRSNLLLS

SEQ ID NO: 495128 - protein, 344 aa, unidentified
MTTRHARIWVGIDVGKGHHWAVAIDGDGETVFSTKVINDEPQILALIETARERADDVRWAVDISGRASTLLLALLFAHSQQVVYVPGRTVNRMSGAYKGEGKTDAKDARVIADQARMRRDFAPLDTPPELVTTLRVLTHHRADLIADRVRLINRLRDLLVGICPALERAFDYSSAKGPVVMLTEYQTPAALRRIGVKRLTTWLERRKVRGAGDVAGKAVEAAQSQQIALPGEKSAAKLVCDLAHQLLTLDERIKDNDREIREVFRADDRAEIIESMPGMGPILGAEFVAIVGDLSGYLDAGRLASHAGLAPVPRDSGRRTGNHHRPKRYNRLCAGCSTCPPRPR

SEQ ID NO: 495129 - protein, 452 aa, unidentified
MPRARKTKVQRVQPVINPHAAGADIGAREIYVAIPVELDEHPVRRFDTFTEDLQKLVAWLKERGITTLAMEATSVYWIPLAELLEAAGIEVCLVNPRHVKNVPGRKTDVVDCQWLQYLHAVGLLRAAFRPPAHVRAVRALWRHRDALVRHSAWHIQHMHKALDQMNLQIHHVIADITGKSGTAIIESILDGRRDPATLAELGDKRLRATKVTLRAALTGDYREEHLFCLRQAYAGYQFVVNQIAEVDTQLEAKLAAMAAAPQPATTASAPKPRPSASNRGQPAYDAGKLIARTLGVDLTTIPGINVITAQTLWAELGSDLSAFKSGKHFASWLSLCPDNRVSGGKVLSAHTKPSANRAARALRLAAQGLHHAKNELGDFYRRMRAKLGGAAALVATAHKLARIVYAVISSHQPYKPELHAKAEQRRLARSLQQLRSKAKILGFELTSIQQTA

SEQ ID NO: 495130 - protein, 341 aa, unidentified
MNEVITIGVDLAKNVFQVHGVDAEGTVIVCRQLRRAQVLPFFKKQPPCLVGMEACATSHHWARQLIELGHEVKLMPPHYVKAYVKRNKNDAADAAAICEAVTRPTMRFVSVKNMEQQSVLMLHRTRNLLVRQRTMLVNAIRAHMAEFGIVAPVGVPQVKKLLSVIADRDDARLPPVARTCLESLVKQFVSLHGEIYATEKHIHAWHKSNEASRRLETIPGIGPIIASALTASITDPEVFKNGRELAAWIGLVPRQNSTGGKQRLGKISKQGDQYLRWLLVAGAMSVILHAKRRGTTNLPWLADIIARKPTKVAAVALANKNARIVWALLSHGGTYQQPVVA

SEQ ID NO: 495131 - protein, 423 aa, unidentified
MMKLKYSICCGLDVHKNVIVATIVTTNKDGISEYLQKSFSTINSDIQRFHNWLIENNCYHVCMESTGKYWIPIFNYLENDIDVCLTHPKYVKAIKGKKTDKKDSKWIADLYKFDPVRCSFIPPKDFRQLRELSRYRFKLVCMKSSEKNRIQNCMTVSNVGIASVLSDPFGKTATEIISYLLEHTADSMDEKAVRKLIKKGAKSKSDEIIEAIKGYTIETDQAKKLELARGHLEYLDDMITQTEVELYVRIKPYYEFVEFVSTMPGMTELSSTIVLAETGVDMDIFDDAKHLCSWCGLSPANNESAGKKKSVRIAKAGDYLKPMMVQCALAAIKSKKQPYFAIKYGRIKKRRGHKKAIIAIARMMMVCIYHMVSEKKPFTPTDYEELMNPQNHVERVVLNENNVFAYLESLGYDSSKLVKRNDN

SEQ ID NO: 495132 - protein, 327 aa, unidentified
MKQFYLGIDVSKQAFAVALLGGQQPHRGHFINDLEGFERLGRWLKKQQVKRVHACMEATNRYWEPLALFLHKQGLEVSVVNPKLIKRHSQSIMQRNKTDPQDALTIADYCLKQRPKRWQPPSLAYRELREMVRHVSALKSDRTRALNRKQSGLGNVTVLTAIEAQIEFLNQQIADLEQRIVNHIDQDPDLKQDKELLLSIPGIGDTTAAVFLAEVQDVSRFSQAKQLDAYAGLTPGQRQSGSSVHGRPHLVKWGNAQLRTAFYMPALSAYRWNPIIAGLHQRMLGRGMSKMTIIVACMRKLLHLCYGVLKTRKPFDPNHSASFQFSA

SEQ ID NO: 495133 - protein, 312 aa, unidentified
MMDAVYVGIDVSKDRLDVHALPQGAAFMVARNGEGVAQLVERLKGLSPALIALEATGGFETVVAAALAAASLPIVVVNPAQVRHFAQALGQRAKTDPIDAAVIARFAQATQPAARPLPDEMTQLLADLVARRRQIVEMMAAEGQRERRADIRLKKSIARLRKALEKELAELDGEIDDYMRGTPAWAEKQDLLASVPGVGPVIARTLIAELPELGALDRRRIAALAGLAPYTRQSGQWRGKSFIGGGRKTVRSMLFLGAMVAARHNPVLKAFRDKLVNSGKPKIVALIAVARKLLTILNAIIRDAKPWRTQNA

SEQ ID NO: 495134 - protein, 308 aa, unidentified
MEYFCGLDVAVDETAVCVVDEHGEVHLTVKVETDPGALFVVLKPFVARLRRVGHEAGSLSPWLHPELLKRGLPVICLETQHVRAAMSAQRNKTYAADALGIAHMMRTGFFRQAHIKTQDFYRMRLLLTHRRNLKRKFLDLENAIRHSLKAFGIKLGGTSRGAFDQAVRTAVTDDPLSAELMDAMMSARAALWREYCRMHPLVVKIVAKSELCRRFMAIPGVGLVTALSFMTAIDDPSRFRRSRDVAAYFGLTSRRWQSGTSIDVQGRISKAGDADVRRALHEAASALMTRFRGRDKVKSWGQQLAKRS

SEQ ID NO: 495135 - protein, 384 aa, unidentified
MTAVEISKFSPRAYDIFIGLDVDKKKLAITCTDHGSLQRSLSMPHNAKQLLNYTRKHFAGQRVAFVYEAGPTGFGLYDELTAAQQLCLIVSPSSVPSAPRNKVKTNRLDSKKLSAGLRGGQLQGIHVPPPIYRELRHLVQLRDTQVAQMTASKLRIKSLLLYEGIPFPAANGKWSARVLRQLQQVPCNASVRFKLEQLIDTLGFHYLAAAKVQKQIRQLCENDPELHNCISYLVSLPGVGTITATHALARLGDWRQISNVRQIAGFLGLVSSEDSTGDKENRGSITRSGDSRLRNKLIQCAWTAIRKDPELRAFYRSIYQRQPKKLAARKAIVAVARKLTTRMYAVLKEQRPYIIRPDSSIAPLTAEETAGLRDRLDGAQNEQP

SEQ ID NO: 495136 - protein, 476 aa, unidentified
MKKHKKAKTKSKAASPLHQPEPNAAGIDVGANEIWVAVPPDRLEESVRRFGAFTGELKALVQWLQDGGITTVAMESTGMYWIPLYQLLADSGIKVCLVNARHVKNVPGRKSDVRDCQWLQYLHSVGLLRASYRPDQAVCAARSLYRYRQKLLVQSAQHVQHMQAALDQMNIKLHHVIDDLTGMTGMAIIESILSGERDPQQLAKHRDRRIKASQATILKALEGDWRSEHLFVLRLGWENWRQAQGQIQKCDSQLLEYTRQLEACTTIAKPVKIMRLSPQLATRSAGLSRPSKTRNKTSKNQPEGPWREELLRCFGVDLTAIPGVSVLTGITLLTELGNELSAFKTAHHFSSWLCLCPDNETSASKVLRRATRRSQSRVRQALRMAASTLYRDKSSLGDKFRRLRAKLGAPKAITAMAHQLARIIWHLLVHRVPFDLALFALYEQAHQIRRLKSLASAARHMGFQLTPLATSDQSAS

SEQ ID NO: 495137 - protein, 432 aa, unidentified
MDRVMIGVDPHKLSVTFEARDSREVLRAKGQFGTDARSYRQLLAYARQWPERIWAVEGANGIGRPLAQRLLASGERVLDVPAKLAARARVFDTGQGRKTDPADAHAIVMVALRDKRLRELGTDPGLTVLRLLCDRRDELSRSRAQALNRLHRLFLELIPGGAPVKKSTAQYQALLARVRPRDLAGKTRRRMAAEELADLGRLDAKLKAMKAELKAAVLASGSHLMDIHGIGPAAAARILADVGDIARFPNRAHFASWTGTAPIDASSGQHTHHRLSRAGNRRLNHVLYMAGIVQLRNDTPGRAYYRRRVAEGKTSMEAMRCLRRRLSDVVYRQLAADARPPRQTGPGGHSGATLLSSAAGLPPDTGTSDQPLPGPVSATLPPPPVAKAAPAARTGAPPRRRARGVNVERPAGRTTLTPTSAGTHSKSPGPPS

SEQ ID NO: 495138 - protein, 339 aa, unidentified
MFYSGIDQHKRDSFITTYGPDGEVVKQMRVPNSAVLIQRYFSQLPGPHKAVVESTGSWYWLADLLEAQGVELTLAHTTRLKAISAAKVKTNRVDSDTLATLLRADVIPEAHRISPEMRGPRDLMRTRLRLVEKCASCKNSIERLLEKFNVQSVTELDELYRLQAACHEAQIELLRAQIRTLETELHPYLIPNEDIQRLLWVPGIGKIAAFTIYTEIDGIERFPSAKQFFSYCRLVPGAANSGGRARHRSGSKQGNRYLKLAFSHVAVRAAQYYPEIRALYRAKARKKPIRIARTLVALEIARIVYHILSKQEDFNGLFKGKPLSRRKQLQWPRLASPSA

SEQ ID NO: 495139 - protein, 347 aa, unidentified
MNFYTQQHKHYCGIDLHAKAMYVCILDQKGTKLVHKNLPTTPDAFLRLIAPYREDLVVAVECIFTWYWLADLCQKEGIVFVLGHALYMKAIHGGKAKNDKIDAHKIAVLLRGGMIPQAYVYPAEMRATRDLLRRRCHLVRKRAELLAHIQNTNSQYNLPEIGKKLAYKANREGVEEHFPDPSVRKTIEMDVSLIDHYDQLLGEVELYLTRSAKAHDSQTYARLQSVPGIGTILALVILYEIQDIARFPRVQDFVSYCRLVKCAKESNGKRLGTSGKKIGNVHLRWAFAEAAILFLRQNHPGKEYFTKLEHKHGKAKALTVLGHKLARAVYYMLTREQPFDLQRFVSA

SEQ ID NO: 495140 - protein, 460 aa, unidentified
MKLFLGIDVSKGYADFLLLNEQHQKLEDIFQLDDNQQGHDLLKEQMKRWVKLYKPSIIYSGVESTGGFETNWYHTLLQCRKILPLQTIRLNPRGVKHSSKAELKRNVTDALSAQYIAEYLIRYHSTLRFNELANQDRDGYSALYNHIELLKKQQTQRINQFRQLIYNVFPEILMYCRNQLPHWVLYLLHKYPSADLVGKATVAKLSKIKYISQSKAEIIIKKARQSVVNDTHAGHEFLVAQSAEAIIKLDQEIEKYKKHLIKNCNNSSVTLLESISGVGTYTAIALLQEIGDINRFENTDQLAAYAGIHPVLKESGDKKYSFRMSKHGRAAIRALLYMPAMAAIRVDEHIKSIYHRHRAKGKTHKAAIGVVMHKLLRIVFGVLKNKTSYNKEIDKANAAKTQEANTKEKIEKAEIENKRRLQPLSKKAPISNIQYKKRKAYLEPQSAKTETYEVTPNTPV

SEQ ID NO: 495141 - protein, 385 aa, unidentified
MDDSTNLPGAETDIRGDCATLFVSLELSRSTWIATSLAPGSKKMSKHTLAGGNGRELLDLLARLKARAEQRIAAPVKVVAIHEVGLDGFWIHRLLEANGIESHVVDPASIAVPRRHRRAKTDAIDGETLLRTLMAWQRGEPRVCAMTVPPSPIEEDRRRISRERATLLRERIRHTNRIRGLLFGQGVTHYNPLHKKRREYLKELRTGDGRSLPAHLKAEILREIDRLELVLRQISDVETERDEMLRPAKASSPVALLMRLKGIGAEFATVLYLEGLFRHFENRRQLAAYAGLAPSPWKSGSIDHEQGISKTGNPRLRTTMVELAWMWVRYQPDSALSCWFRQRVGSERGRTRRISIVALARKLLIALSRYVIHGEIPTGAVMKPV

SEQ ID NO: 495142 - protein, 347 aa, unidentified
MQFTATLPVIGMDIAKHVFQLHVVDAQTGEVTRHKLRRDRVTAFFANRQKSLVAMEACGGAHHWARTLQTLGHEVKLLPAKHVRAFVLRDKTDARDAQAIWVAAQQPHIKAVPVKSEQQQACLTLHRMRAQLMKVRIMQTNALRGLLYEFGIVLPEGHRALLKLVQDALAKAQEQRLPEVVVVSIQDQLRRIDSLQCDIDQLDKRLASMVKQNQHMLALQAIPGIGPLTATALVSTATDLSSFESGRQFAAWLGLTPRQTGTGGKTRQLGISKRGDPYVRTMLMHGARAVIARSQRSGWIERLLLRRPYSVVVAALANKLARTVWAVLVKGKAFDQVRWNPVDLAAA

SEQ ID NO: 495143 - protein, 313 aa, unidentified
MKTLGRAIGLDVHLEFCEVAIAEDGVVRSAGRIETTPEQLQLFAQSLGRDDRVALEVTGSAWEIARILEAHVARVVVVSPNDTGIRQARAKTDRLDARTLARLLWAGELDAVWTPDEQTRVLRRRLARRGQLVRARSRAKNEIHAVLMRRLKGKPPFSDLFGVKAREWLAGLELPVEEQETVAGCLRHVEFLDREIAAVDALVARQALESEEARRLMTVPGVNVICAQTFLAAVGDIRRFPSSRELVGYLGLDPRVYQSGSSPAKGGRISKQGSPQARWALVEAAWSVVQQPGPLHALDLSDLLCEVGVIDLA

SEQ ID NO: 495144 - protein, 344 aa, unidentified
MLIIGCDFHSGFQQLAIFDNRTGEFQERKLLHPGEACEFYRVLAEPVLVGMEAGVPCQWFRRLLSECGHELWVGDAAKIRAAETRKQKTDRRDAELIMTLMREERFPRIWMPTEPERDVRQLLMDRHHRMRRQSKAKNQLQSLALNQGLQKGRRLWSAAGLQQLRELPMMEHAARRRDELLRVVAELDVQIAELDVLVRQQAECRADAKRLMTHPGVGPQTALGMVLTLGEVGRFENARKVASYLGLVPGEYSSGNKQRLGHISKQGSSLMRFLLVQAGQTAVKGDAQLRRAYARLSAKKNRATAKVMVARRLAVRLYWMLRNDWTYAELARHAGEPGSFCGER

SEQ ID NO: 495145 - protein, 426 aa, unidentified
MKICIFQDDSLPLLSKGGTGQLERETGFRDYRPLPRVNEPSWSFQLSCKVQIECHWHNSLFRVRDNTTIGQFLHKDECKGMKKIFIGIDFSKEKFDATLIKAEGLKEYAPSAHEVFDNKASGYRRLARWVKSQSDGLTAESWLFCGENTGGYSTALSNYLYSCGYDMWLECAYRIKHSSGIQRVKNDRADSRAIAEYAMRNHDKMVAYKPQSPSLARLREVFLYRHSLVKQKVALTVRRSEKRLTQDKSDVKTFMSQTSRHLITEVNKAIGKCDKKIEEIIAADDELREVFEIATSMPGVGVQNATCLMVYTDNFAKFGFDARKIGCYYGIAPFGKDSGTSVHTRPQVSPFANRMIKSLLSQAALAAIRFDPKMYDYYQRLIKRGKHPLLAQNNVKNKILHTLTAMVRNKQKYNPDYMYKTKEKAA

SEQ ID NO: 495146 - protein, 351 aa, unidentified
MLIIGCDFHTRYQQIAMADETTGELLLERRLDHESGEAHAFYRNFHVPVRVGIEATGPMHWFERLLAELGHQLWIGDSAKIRASEVRKQKTDERDARLILDLMLAKRFPKIWVPTPAERDLRQLLWHRHKLVCLRTMLGNQLHALAMSQGLCRKKKLFTKKGRAELADLALGPWARRRREELLKLLDQVDAPIAELDRAVLEEAKRRDDAVLLMTHPGIGPVTSLAFVLAIGPITRFPRSKKIASYLGLNPSEESSGGRRRLGAISKQGNTMVRWLLIEAVYPAVRKDLALRQDYQRLKFRRGHAVAKVAIARKLAVRMYWILRSGAAYAQLVRRQGSPGATLVDASPSLG

SEQ ID NO: 495147 - protein, 357 aa, unidentified
MTTQEKQKCMFVGIDVHKDTHTAVGVSPYGEKLFEITVGNYKNDFKMLEEKVKEHTGILSPYIGLEDVRGYGERLAEYLYEKYPVYHVPSILVDRQRQNATHPEKSDSLDAFGVAKVMMNSIDSLLAYTISQESEKAKQLKEISIDREDLVLERTRLKNQVHMLLYRIYNTEYQTKYKNPFTLKALKYWSASKPKCDTFLLKTLKRKVRRMIDIHFEVSELEKDMETLLTEGGYTIQTASGCGLVVASTIIGEIGDINRFTSPGSLSKYAGCSPRECSSGKKNRHRKNRGGNRRLNCAFHRMALSQISRMGNDKAREYFKRKVSEGKSKSQALVCLRRQMVNIVWMMLKHKTVYRNA

SEQ ID NO: 495148 - protein, 318 aa, unidentified
MTHTSDPVEASPTVLGIDVAKATCTIHDLASRATFTCANTKTALRKALRPFRNHTLAVCETTGGYERCVLDVLYALGVPACRADASRIKAFIKSHGGRAKTDPIDARWIARYGAERSESLPRWTPQPKAVEALAAAAQLRADFVDQRAAAKNRLKAPTAKPVRAFIALQIRQLDRLIAALDRRIDALFAAAPDLNQRRQRLQAITAFGPVVATTLIALAPELGSLSRRGSASLTGLAPHPRDSGQTRKPGRISGGRARIKPLMFMAAMVAARRHSRLSAFYQRLIQAGKPKRLALAAVARKLVVIANAALKPPIQELN

SEQ ID NO: 495149 - protein, 405 aa, unidentified
MFKVAAIDVHKKLLVVVAADVSQAEWKFECRRSGTGADELHNLTLWLCDHQVTEAVMESTAQYWKPVWLELEAHLKVHLAQAQSNRAPQGRKSDFGDAKRLLRRFVAGELFLSFVPNAEQRAWRTVTRARLQLVCERVQLQAQIESLLEECRIKLSSVISDLLGVSGRRILRALAQGQTDAGALAALGDERLRCGRAILRDALDGSLSRVHQRFLGQHLDRIELIDRQIHELSRLSAEQMQPYQEVILWLIEVPGIGVEAAHQILAEVGPNAAAFSSARRLASWVGVCPGTKESAAENHSGRCAKGNRFLRRLLCQAAQAGVRKKGSHLQSQFRRPIVRLGFSKAIWAIAHRLCRIIWNVLHEGARFTEYGHAVNPKAVQRAIQHHLTALCRLGYPIPQDLRTGQ

SEQ ID NO: 495150 - protein, 402 aa, unidentified
MNAVGIDVSKGKSMVAIMRPFGEIVSAPFEIKHTASDIHSLVELINSVEGESRIVMEHTGRYYEVLAHQLSEANLFVSAINPKLIKDFDNDSLRKVKSDKADAVKIARYALDKWQNLKQYNVMDELRNQLKTMNRQFGFYMKHKTAMKNNLIGILDQTYPGVNTYFDSPARSDGSQKWVDFASTYWHVDCVRKMSLNAFIDHYQNWCKRKKYNFSQSKAEEIYGKAKELVPVLSKDAITKLIIKQAVDQLNSASTTVESLRTLMNETASKLPEYPVVMAMKGVGTSLGPQLIAEIGDVSRFTHKSAITAFAGVDPGVNESGSYEQKSVPTSKRGSSDLRKTLFQVMDVLIKTHPQDDPVYQFLDKKRAQGKPYYVYMTAGANKFLRIYYGRVKEYLSSLPES

SEQ ID NO: 495151 - protein, 413 aa, unidentified
MSVSCGIDWAEDHHDVGLVDADGRIVGKHRISDDVAGFALLLQLLTDAGDSAEDPIPVAIETSRGLLVACLRATGRPVYSINPKAVDRYRDRHSVARKKSDAGDALVLAHILRTDRAAHRPLPADSELAQAIAVLARAQQDAVWERTCAHNKLRSLLREYYPAILAAFADKRGGILRPEARAVLAAAPTPAAAAKLTTAQLRKLLTAAGRQRGIAPEAQRLQTVLRGEYLRHPPLVEDALGAQALALLRQLNTACTNADELAAEAVAHFDKHPDAEIITSLPGLGSLTGARVLAEIGDDRSRFADARSLKAYAGAAPVTRASGKSRTVMHRRVKNQRLAGVGYVWAFAALTASPGARAHYDRRRTTGDRHTAAQRNLFNRLLGCLHHCLNAHQIYDENTAFPPTTITTREVAA

SEQ ID NO: 495152 - protein, 401 aa, unidentified
MNEFNPAMHQLEATSALATVLAAERQDKHAAYIGLDVHKETIAVAVAEPGRGEPIYRGEIANTPKKVERLIAKLSEAYDGGVLLFCYEAGPCGYGLYRQLIASGHDCQVVAPSQIPKKAAERIKTDRRDALKLARLLRSGDLTAVWVPDQEQERMRDLSRARDDLKAQERKARQQLNAFLLRHGHHWPKGKSRWTPAHENWLASLKMEDPWQQITLQTYIDAERAAGERVAQLTDQLMRALPEWSLAPVVDSLVALRGIDKLAAIVLLAELGDISRFDSPRQLMAFLGLVPSEHSSGGRRRQGAITLTGNSHARRMLVESAWSYRFPARQTKHLKAKAVSASPEAKRIAWKAQVRLCGRYRTLTRAGKNTKLVCVAIARELAGFLWDIVRQEMPRLNAPAA

SEQ ID NO: 495153 - protein, 452 aa, unidentified
MEKSRRHRADRGFSSTHPDAAAIDIGSRMHVAAVPPDRDPEPVRTFGTCTGDLQRLADWFERCGVRTIAMESTGVYWIPAYEILEQRGFEVVLVNARDAKHVPGRKTDVSDAQWLQRLHEYGLLRASFHPKGELAALRAYLRQRERLLDYAASHVQHLQKALMQMNVQLHHVVTDVTGTTGMRIIRAIVEGERNPMKLANHRDPRCHSSVDEIGAALSGNWREEHIFALRQALELYDTYHSKITECDARVETMLGRLRNAASPSAHQPLPPARHRDATANAPTFDARAALHAVLGVDLTQIHGLGASLALKLVGECGTDLSAWPDAKHFTSWLCLAPGNKISGGKVLSTRTRRSGSRAAALLRLAAVTVGRTQTALGAFYRRLAARIGKAKAVTATARKIAALFYNTLRHGMAYADPGASYYEEKYRVRVLTNLKRRAKSLGYVLQQETSPT

SEQ ID NO: 495154 - protein, 365 aa, unidentified
MKKGSRTTTRMEKPEITIGLDLGDRFSHYCMLNSDGDAIETGRIPTTEAALRRHFEGEPAMRIALECGTHSPWISRLLEQLGHPVIVANARKIRAITASESKNDRNDAEKLARFAFCDPRLLSPIQHRSPERQQDLNLIQARGTLVRARTMIVNALRGLVKSAGGRLPACSTQGFQTRVESSVPPAMVECARPLLEQIAALTTNIQQMDRSIEQLGKRYPEIGVLRTAPGVGAFIAAAYVLTLDRPDAVKHSRQAGAFLGLRPRQSQSGDSDPQHRISKTGNIYLRSLLVQAAHYVLGHFGPDSELRRWGLKLAASGGKRGKKRAIVAVARKLAVVLHRMWQTGNAWQAFPQQAREAANKAACMA

SEQ ID NO: 495155 - protein, 412 aa, unidentified
MKDLLEISCGLDVHKEKIVACILIGPLGKPTCSEIREFSTLIPDMIALRHWIVSKNCHHVAMESTGIYWMPIYEILEDAFSGDITLLVVNARHMKNVPGKKTDMRDSEWISTLLRAGLLNGSFIPEKRIREFRDLNRYRKSVIRDITSQKNRIEKFLQSSGFRLSSFISDIFGASGRNIILHLVEHGQIDKTALDSCLKTKTRNRIDEILMSVNGTLSEHQKAFLRILMTHYDSLKKHLAEIETSLEEDMAPFALQVEQLNSIYGISTTASCAIIAEIGIDMKPFKTAEHICSWAGLCPGNNESAGKRKSTSVTKGNPYIKSMLCEIAWVIAGKRNTYLSAWYWRIKQKKGAKKAIVALARKLLVIIYTMLKQGTLFDESCFETRRKHCEQKQLSRYIRELEKHGYHVEAQS

SEQ ID NO: 495156 - protein, 397 aa, unidentified
MYIVGIDIAKRKHEAAVIDGEGAVIIKPFSFTNNCSGYNRLLAMLTKAKLPLDEVSFAMEATGHYWLALFTRLQKEGFRVQVINPVQTNSIRSFYIRQAKTDPRDALLIAEVIRFGHFSESTLHPENIYELRELCRGRHAIVSMQADVKRKVVALLDQVFPEYETAFTNMFGDTSMAILQTCPTPKELSEMPLEELCHLIEVSSRKRFRMAKAQELQELARNSFGFAMAGDVFSTMIRLYAKHLDFLKQQVREMDRKIAEIMETLDTPITTITGIGPTLGAYILSEIGDISRFSSAAKLAAYAGIDPTMRQSGEYNGVRNRMSKRGSPYLRHAIWLAASSAVLHDPALKLYFQKKRDEGKPYMASVGHACRKMVSIIYAVMRDNKAYTPYIPNEISA

SEQ ID NO: 495157 - protein, 351 aa, unidentified
MKVTTIGIDLAKDVFGLHGVDGEGRVTFKRRLVRSRLLEFLSQLPRCLVGLEACSSAHYWAREIERLGHRVRLMSPRFVKPYRKSDKNDANDAEAICEAVTRASMRFVPIKSEAQHEVQALHRVREQLLKSRTALVNQVRGLLAEHGVVAPHGIARARRLLLGILADPERHGLSGLFGETLQEMAERLRFFDERVGAYDDRIERVFKEDERCRRLAKVEGVGPLVATAVVAAVGNASEFKSGRELSAWLGLVPRQHSSGNRSQLLGISKRGDRYLRTILIHGARAALRRADHKRDQRSRWAMRIKLARGYNKAAVALANKNARIIWALLTRGENYRPAAISVASAGSVESV

SEQ ID NO: 495158 - protein, 448 aa, unidentified
MSKKMSLEIVHPNAAGIDVGSRTHHVAIGQALEDVKEFGVYDQDLKAIAKWLLDNNVTTVAMESTGSYWQNLFATLQEAKLEVILVNAMFSKNPSNKKTDVKDCRWLQKLHSIGLLSGSFLPDTDTEQLRTYCRHRNNLLDCSADTVRKMQKYLRLLNLRLDVVVNDIVGQTGLAIIDAICKGETDPAVLATLRNGRCKKSEEEISKALCGNGRKDYLFALKQEYEIYLNLQAKIKGCDTEIEKLLQEQINSDEQKKQLSIDKKKHKRINKNTPKNMDMNLLAYQYFGGVDLLAIEGVSHATVMSIMSEVGNCIHDFPSAKQFTSWLRLAPNNKISGGKVLSSKIPKGSNRLKIALRNAANVIGNLKDTALSNFFKKIAFRKGRKAAISATARKLAVIIWNMLVKKTAWQTTSPEEFVVQQRKKKVTEVKKLIHKFGIKTDELGLNFT

SEQ ID NO: 495159 - protein, 338 aa, unidentified
MTFYCGIDLHANNSVVAVLDSDDRVHYEKRLANDLDVIVSALSPYANEMAGVVVESTYNWYWLVDGLEDVDLEVHLANPSAICQYEGLKHSDDATDARHLARLLRMGLLPEGHIYPREVRAIRDLLRRRMLLARQRTTQLLSLQSTIARHTGQRLSGSKIKRLDDEGIEALLGTGPVALSAKVARGTMQVLDEAARALESAAAAELKDDEFPRLLRTIPGVGQTLGLTIALETGDIGRFPDAGHYASYARCVKSEKLSNGKVKGRGNRKNGNKYLAWAFIEAAHFAIRFEPKVSAYYQRKQARTHPMVALKATAHKLARASYHMLKKHRPFELKRAFG

SEQ ID NO: 495160 - protein, 380 aa, unidentified
MTRISVGVDVSKNRSTVCIMDQDGKVIMRPFLVWHSTEELDFLADTLKRLNGEVRVIMESTSVYQYPIALQLKERGLFISIVNAYEMKQFANIDFRGGKTDKKDSRTIASYGISYWDKLVEWQIPKDTYFNLDLLNRTYMNAKKHRQIILQELQHYIDCAMPGMDKELHSLNLNTKKDFMLDFVEKFWHRDEIVNMTEAEFTEVFTAWAKEKGYRPGKGKAAKIYAISKSCIPYYPANPTVKTILQCIVDKLSGVNRTLVTIVTQMIEEAKKLPEYQIVREMPGVGDPLAARFFGSAGDIRRFKNSKALVAYAGIDSPPDESGDFSSTHRHITKKGSKVFRDTGYEIMMALRAQKRTWEKVRKNAEVYDYMLRKEAEGKP

SEQ ID NO: 495161 - protein, 451 aa, unidentified
MSGSKKPRRKRDISPTHPNAAAIDIGATMHVAAVGPDKDPEPVRSFGTFTGDLHKLADWFEQCGVRTVAMESTGVYWIPVFEILDQRGFEVILVNARDAKHVPGRKTDISDAQWLQRLHEYGLLRASFRLKGEVAIMRAYLRQRERLLDYAASHIQHMQKALTQMNLQLHHVVTDITGATGMAIIRAIVAGERDPAVLAAHRDPRCHASVETISQALVGNDREEHIFALTQALELYDIYQAKVALCDVRIEAVLKRLRKASSVPVGKLPPVRTTKKQTNDLAFDVRTALHGLLGCDVTQIHGLGPYLALKLVGECGTNLSAWPNAKHFTSWLCLSPSNKISGGKVLSSRTRRSGSRAAALLRLAAVTVGRTETALGAFYRRLSARVGKAKAVTATARKLAVLFYNTLRYGMAYMDPGASYYEERYRRRVLANLERRAKSFGYVLQEAPAPA

SEQ ID NO: 495162 - protein, 390 aa, unidentified
MPQSRDDLGRSLVALDQNSTVICAVELSSATWLVGGIVPGIARDPLKKLVPDQDALLKLLHRWRDEAIRAGRQIKRIVVAFEAGRDGFWLARWLRARGIEAYVIHPSSIPVSREQRRAKTDRLDIGLLKRAVLGWLRGEKKHCTMAAIPTVEEEDAKRPHREREQLVGKRTAIINRMKAAFVRLGIRGFNPKLRRAPQQLATLRTPEGRPIPPNTLAELQREMAHLGFVNEQIKQIEDARLKQLKEAPRRSSNAKVLQLERIYGLGIETADMLANEVFSRELRDSRAVARYVGLTGSPDESGQRRREKGLAKAGNARARRGMIQFAWRFLNHQKDSDLAQWYQARVIAGKKRKTMIVALARKLLVALWRFVTTGEVPQAIVLRPASCLAE

SEQ ID NO: 495163 - protein, 323 aa, unidentified
MTHYHTFLGIDIGKFSFVVNVFGQKTVTEYATTPEGFIAFFDEHKELLPNALCVLETTGGYETELLYALCSQGFSVHRADTCKVKNFIRSWGTSAKTDALDAKALARYGQERHATLEPFKPQNDQSILLFQLVQRRNDLKRMLVAEKNRVQAPGSSRVRSSCEAVIEALTKALKEVTETIQETLKLDPDLFKKYNVLRTIKGVGEIVAMELLVLLPELGTLNRKQIAALAGVAPRANDSGRYSGYRSVGRGRQGVKPVLFMAAMSAGYSKSPLGEFYKRLLENGKKKKVALVALMRKIIVMANAKLRDLAREELAAAAGAAKG

SEQ ID NO: 495164 - protein, 353 aa, unidentified
MKRPKDKLIAGLDLHSNNVMIGVVNQDGKRVAHRKLECDLKQVTGFLAPLKPQLQSMAVESTFNWYWLVDGLRGQGYSIDLANPAKIEQYSGIKHVDDKDDAFHLADLQRLNILPKAHVYDPELRPVRDLLRRRSSLVHQRTALLLSFKSLYVRTTGQALDLSDAKKMEPKEAPKLYKHPANQLIAQVQAEHIQGLDKSIRRIEQAVLGCAREIPMYEKLLTIPGIGRILGMTITMEVGDIKRFRTDGDFASYCRMVDARRLSNGKCKAANNQKCGNKYLSWAFVEASNFARRYDEHCRRWYDRKAARTSKVLATKALGCKLAKAAWHLMAKQCHYDEKRMFPELAAKPMNKS

SEQ ID NO: 495165 - protein, 320 aa, unidentified
MIVGIDVSKLKLDITVLLEKNKEKHKVFANNLKGFGEITQWLDQLGIKTAHICLEATGSYSEAVSLFLHQQGHTVSLVNPARIKAYGKSEGSRAKTDKVDSGVIARFCQAQPPLAWNPPAPEEQALKDLYRCRQSLIEDQIRLSNRMEALDNTKASFKIWKTLLEELKKTIKDLEVQLNALLKSHTNLSNQVALLKTIPGISDKTAVAILSELPPPNTLKTAREAAAFAGLTPTVRQSGTSVRERGSLSKTGNAQLRKALYMPALVAKKSNPLVREFCNRLAEKAKTKMVVIGAAMRKLLHLIFGVLKHQTPFGLTQQNP

SEQ ID NO: 495166 - protein, 356 aa, unidentified
MSIVAHTHPFVIGVDAHARSHALAILACPTGEVVDEAQFPATAAGLQRAIAWVARRTGADLDTLWVIEGVGTYGARLARAAADAGYSVAEAARMNARANRGVGKSDPLDARRIAQAVLPLEVSELRWPRADDGVRAAVKILIASRDHMSGERTSSINALTALVRVADLGIDARGSLTARQIATIAAWRTREEELAVGVARAEAIRLAKRVLAADQELAANTKQMTTLITSSPARGLLDHPGIGPVTAAVALAAWSHPGRVRSEAAFASLAGVNPIPASSGNTVRHRINRGGDRRLNRALHMAVVTRMRMDPDTRAYVEKRTAEGRTPREIRRCLKRYLARQIYRHLNAATATQSAA

SEQ ID NO: 495167 - protein, 342 aa, unidentified
MDHFAGLDVSVKDTSVCIVDDSGKIVREVKVESEPEALLAVLRSPTYRFKRIGLEAGPLSQWLFSALAEAELPMVCVETRHMQALLKAQINKTDRNDARGIAQMMRVGIYRPVHVKTLRSQKLRMQLTHRKLLQSKAIAIENDLRGTLRNFGLKVGMVGKVKFEARIKELVESLPDLAELVEPLLIVLRALRQQIVVLHRRLLAIVRDDEVCRRLMTTPGVGPVVALTYRATVDVPARFRKSKAVGAVFGLTCSKYQSGEIDRSGRISRCGDEMMRVMLYEAAQSMLRSKKWSWLKAWAMQIARRRGMKKAIVALARRLAVIMHRIWVDGTEFRWTRETAVA

SEQ ID NO: 495168 - protein, 379 aa, unidentified
MWLIPVLSNLPASATTTVTTTREDQTMTSSTDFVIRVTAGADTHRDTHMVAALDQRGAELGVREFTTDPAGLDDILNWLETFGTIERIGIEGTGTYGAGLCRFMQRHDIDVVEVTRGDRQERRSHGKSDPVDAVAAARAAQSGRAVAQPKSRTGSVEAIRALRLVRRSATRDRTGALNQMRALVVTAPDEIRAEFRGLTIRKLVAGAGRLRPGDPTTAAGATKFALRELARRIKTLDAQLASVNAILGPLVAITAPDLVARHGIGTDTAATLLVTAGDNPERLRSEASFAHLCGSAPIDASSGLIKRKRLNPRGDRIANEALWRIVMVRMSTDPRTRAYVARRTLEGKSKREIMRCLKRYVAREVFQDLNNLVQPLDKQ

SEQ ID NO: 495169 - protein, 525 aa, unidentified
MNFKGTKKKNQVVTTNIFEQQEVLKKAEVIRKNLTASTWHELETNGKFDKNAKLSFISDDMLILGCDVGSETHYLRAIDTRGRELSKSAYSFNNDSEGFQSAKEWAVELAAKYDKKQIVLGLEPTGHYWFCLAAWMVANGISVVQVNPYAVKQTKEVEDNSQLKDDTKDPKLVANLVKDGNFGMPYLPEKVYAELRRLSMFRDQLNEDRVRTINRMHREMKIYFPEYKDALGKVDGAFSLELLKEAPFPGDLLTLGEEGIRKIWHDAKLRGRGYSRAGEILQYAKVSVGIKDGAAAGKTAVQWFVQKIMEIDTELAVIEEQINQKCQEIPHAGNILEISGIGENTLSGILAEMGDISRFDDVKEIQKLSGLGLVACSSGKHKGETKISHRGRKRLRYWLFQAAKSAVAHAEEFKELHIYYTTRADNPLKKMQSLIVIACKLLRIIYTILKNGTVYDPKKMLMDIRRSGKEGSGLQRKTLSTAFFIPEPCRVPDDSEIGQGSGRKPDNDGVLQVLHDHKDQLNEAG

SEQ ID NO: 495170 - protein, 354 aa, unidentified
MTILGGLDLHRRQITFDYVDTASGGVSTGRVVPASREAFSGFLAGLGTRDCEFVVEGCTGWWFVADELSRAGMVAHVADPAEAAALRGSKKRAKTDRADARHLRRLLVDERVPESWIPPAHLVETRALGRLYLDLLQARNAWAQRIHATVFHHGAAPLGSDLATVSRQQEALAAAEQLPEANRHAVNVAVGLIGCFSDELEIVHRQLCWVGRHQPAANALQRLFGVGELTSAIIWAEVGDARRFSSSRQLIRYGGLDVTVHESDQHRTRGHLSHQGSGTLRWAVYECGQAGARRTSPDYRYYQQVKTRCGHIEASLSVARKILRRSHHILVACGDDVLTEPTSRLPRPAMTAAA

SEQ ID NO: 495171 - protein, 348 aa, unidentified
MKKVYVGMDLGSKQSAVVAVDSRGKMVDSEVFRTGERNMISFFERLKGSAQVMIEEGELASWVARTIRPRVEKVVVSDPRRNAWVAKAGNKNDPLDAAKLAELLRLGSYSEVWHPEDEGIADFKLVVQRYDECSKKLARTKCQIKALFRRQGVIANGKEVYGAKGRQVALSKIGSGPVRQLMEGEYEMLDFLVRAKAKALRILKQESRKYPVIRRLKKIPGVGPVLAARFVAYVGDPNRFNKRTLASYSCLGIVKRSSDGSSLGRERLSKAGNFALKDLSRTAFERAKVTKRSNGITEFYLKSLARTNSRTNARLNTQRKILAIMLAMWRDGTEYCDEMVTGVAFTGN

SEQ ID NO: 495172 - protein, 393 aa, unidentified
MVCVGIDVAKDKHDCFILSSEGEVLADVFTIQNNAEGFNTLLQTISCCTNPKDKIKVGLEATGHYSYNILGFLLDKGLPTYVINPLHTNLYRKSLSLRKTKTDRVDARTIAAMLLSDVDLKSYTDTAYHNEELKSLTRYRFDKVRERAKLKQSVSRLVTILFPELEKLVPTLHMASVYALLSEFPGAKQVAEAHLTHLKAVLHDASKGRYGRDMAVTLRDAARCSVGSVMPAKSLELRHTIRLIRELDSEIQDIEAAIQTMIEEIASPITTIPGIGVRMGAMILAEIGDFSRFDSPDKILAYAGMSPSTYQSGQMSLTGAYSHMEKRGSRYLRYALYNATKYVCHWDPIFSAYLAKKRAEGKHYNVALSHAAKKLVRLIYALEKSRLPYSSAA

SEQ ID NO: 495173 - protein, 432 aa, unidentified
MKYKLKQKQNQRITRITESTLVVGADIAKKVHVARAVDFRGIELGKDCVFHNDQEGLSKLTAWMKELGQTHGKTDIVFGIEPTGHYWFPLATYLQEQHIQVVIVNPHHVNKTKEIEDNSQTKSDYKDAKVIADLIRNGKYSEPKLPTKEYAELRILMNLREKVSASLTQVKGRISNWFDRFFPEYASVFKKWDGKASLMTMRAFPLPSDIVNKGARDVLAHWKTDVKRGVGIKRAEKLVVAATASIGLTEGSMAARFELSTLLSQYDLFSNQLEEIMDKVLEILEHIPGTTQMLSVPGVGAITVAGFLAEVGDLNNYDHGQQIIRLAGLNLKENSSGKRKGKTGISKRGRSRLRALLFRAVMPMVAKNEEFKALHKHYTSRSQNPLKKKQSIIALCGKLIRVLHTLGTKQREYNAIDVMGPIRQFQIQQEAA

SEQ ID NO: 495174 - protein, 375 aa, unidentified
MTNSIDYVGKVVYMGIDVHKATYVCVSICESAVVKRDTLSADSQSLLHYMNKHFHGAKINSAYEAGFSGFHLHRFLIQNGVNNIIVNPSSIEISSRDRVKTDKRDALKIATQLSVQRLRGIYVPSIEQESKRHVTRLRSNIWKLNHQIGGRIKSLLFTQGPIKSDDKTRLTKKWLTEKLLEIKEKEYPDDLYYVVNQYVEEWLNLTEKIKKIEEQLKIQAKSESDLHAIYTSGPGIGLIHGRELANELGDMSRFSNEKQLFSYAGLTPSEYSSGEHTRQGHISRQGRPVIRKIMVEASWVAIEKDPNLREVFDRIAARKGKKRAIVAVARRYLGRLRSCAMNGTLYEIKTTKKEDKDQTIRKLNTYSIIQERALV

SEQ ID NO: 495175 - protein, 430 aa, unidentified
MKSNTQNAKIEAITEKTLVLGIDVGSETHYARAFDHRGIEYSKKPFKFSNTEAGFVIFKEWILDLKEKHEKDKVVPGMEPTGHYWFNLGKFLQDNEMKPVLVNPHHVKKSKELDDNNPTKNDRKDPKVIAGLVREGRYMIPYLPDGVYADLRTASNIRFQLQAELTRIQNRISRWFNIYFPEYKTVYGKPDAKSGMLILKQAPLPEDILTLGIDGVNQIWRDAKMRAVGKARAKTLIEAAEHSVGSKEGAISARMEIRMLLEDYESRNIRLQEIMTLIEELVNQIPMAEKLLEIKGVGIKTVSGFLAEVGDISRFNNPKELQKLAGLALVENSSGKHKGRTTISRRGRKRLRYLLFEVAMSLVAKNPEFRELHTYYTTKRLNPLKKMQSLIAIAAKLIRVFYAMLTKVVDYDPKKMVSDIKRPAVYLQAA

SEQ ID NO: 495176 - protein, 364 aa, unidentified
MGRLVPSLDTSQAEGMTVTIVDAPRPVTGGVDTHLDLNVAAALDPVGGLLAVQEFPADSGGYQRLLSWLAGFGPVARVGVEGTGSYGAGLARYLRAEGVQVVEVDRPNRQARRRAGKSDPLDAIEAARAALSGRASGAAKTRDGDVEAIRALVVAKRSCRSARIKTLNQIRHLGFTAPEQLRERLRGVPRQQLAATAAALRPGPLDGDSVMAATKTALRILGRRVLALDEEKTQIDALLTTLVTRAAPQLLTLHGVGVDTAATLLVTAGDNPGRLRSEAAWAHLCGTAPIPASSGKVTRWRLNRGGDRQANCALWVIVICRLGNDPRTRAYMTRRLAEGRSKPEVIRILKRYVAREVYRHLPRP

SEQ ID NO: 495177 - protein, 376 aa, unidentified
MEKDIRHAGFDVDSEGIAVAVAEADGEVRSVGMIPYTEESVRRLVKKLGPASRLRICYEAGPHGYGLYWQLTGLGVHCDVVAPTLVPVKAGDRVKTNRRDAEKLARCYRSGDLTPVWVPDAAHEALRDLVRAREAAKKDQLRARHRLGKFLLRRGLRAAGGVKNWTLQHLLWVRTLRFEQPAQEATFLDYLHEVEHAAERVVRLEKAIDQAVEGLPEEMRAIVAGLQALRGIRQVSAASIVAEVGPLSRFGRPKQLMGYSGMVSREDSTGNSVRRFGITKAGNAHLRRVVGEAAWAYQYRPAMSGVLKKRQEGLSEEVKEIAWKAQHRLCTRYRRLLAKGKLKQQVITAVGRELLGFIWAIGVQVEKEQQRRRRAA

SEQ ID NO: 495178 - protein, 452 aa, unidentified
MKVIEYDAKRIHQLTQLKTDIRGSESHLIVGIDVAKDTHYSFFGTANGKVIFKKFVFQNNAEGFGNFIAKAETLRKKHGFKRLVFGMEATATYHKPLGEFLIREGYETVLVSNIAVKRNRELLDGRWDKNDLKDASNVTDLISQGKCLFYDFPAPDILALREMISLRKKLKKQEHSLKMRIRNHWVAQYFPELDAYFEAIEEECLSMIKHQLGPEKISKMECHDFITATTTRHKSQKQQSKLIEVWRKAEDSIGCKPNPATYFEGEVLVDLLEQTRFQKDNTEKKIKAICESIPEYRVLLSIPGIGPNISAILLAAIGDPHRFQNNRQVLKLVGLDLSASRSGKYSQNAVGSISKKGKVDARYALYQAAMIASSRTPVFRAYFNEKIRDRQHEKGIKTKIRVKLSAKILVIAWTLMKKKELFNPDIIYSELETPRKEKDLKQNADSPNCNKG

SEQ ID NO: 495179 - protein, 387 aa, unidentified
MKRDDLSRSLVAFDQNSTLVAVVELGIKSWLVGGLVPGVNRQPLKKQKPDPDNLLALLARWRGEAIKAGHTINRVVVAFEAGYDGFWLARWLRARGIEVYVIHPTSIPVSREQRRAKTDRLDTALLMRAVLGWLRGEPKHCSMVAIPTLAEEDARRPHRERETLVKEQTRVVNRMKATLVRYGIRNFKVKLRKAASHLEKLRGPEGELLPPNTLAELLRHIARLRMIREQIRAIETARLQHLKGAPHQGTHPMMQMLARIMGIGIETADMLVHEVLSRKLRDQRAVGRYSGLTGSPDESGTKRREKGLARAGNARVRCGMIQLAWRWLMFQESSELTQWYRARTAGAKSAVRKTMIVALARKLLIALWRYVTTGEAPRGAILRPATA

SEQ ID NO: 495180 - protein, 342 aa, unidentified
MQTITTIGLDIAKSVFQVHGVDAAGQVVRRQLKRRYVLAFFQKLPPCLIGIEACASSHHWSRELQALGHTVRLMPPAYVKPYVKRQNNDATDAEAICEAVTRANMRFVPTKTPEQQSCLMLHRTRHLFIRQQTAVINAIRAHLAEFGIVAPVGRKGVTELLHVVADPSDGRVPEVARACLAALGTQLLGLKEQIVEFDRLIMAWHRSNETSKRLHYIPGVGPLLATALAASVADPQTFRSGRNFSAWIGLVPKQHSSGGKDRLGSISKQGDRYLRSLFVAGALSVIRYAKIHGTKHRPWLTALLARRPTKVAAIALANKLARMAWAMMARGERYRQPVALAA

SEQ ID NO: 495181 - protein, 367 aa, unidentified
MDEHITAYVGLDVHKESTAISVADPGRGAPRFVGTVGSELRQILKALRPLGAAGGVMVAYEAGPCGFGLARQLRSEGYHCDVIAVAKTPRRPGDRVKTDRRDSLALARYLRAGELTPVTIPDSRDEAIRDLSRTREDAVRARLKARQQLKAMLLRLGKRYDGKTSWTAAHERHLSTISFSHAAQDIAFSEYRMAVREANDRVERITTALRDQAASWRFAPVVAALSTLRGIDFITAVTLVAELGDLGRFAHPKDLMSYLGLVPSEYTSGESRRQGAITKTGNGHARRVLIESAWNYRFPPRLSRALEVRTEGQSAVVREIAWRAQLRLCSRYRKLTGRGMHKNKICVAIARELSAFVWDVARHSAVH

SEQ ID NO: 495182 - protein, 376 aa, unidentified
MLEEFLIKKTNRGFYELLKRASCYHEIEFAIETYRSPLVDFLLSQGYQVYWLNPNRLSSFRGRYKTSRVKDDRFDAYVLAQVLRSDKNSLPLIKPLPKKVERLKLLWNDLEVLLKEQTRLKNRLSSVLKEYYPAFLNCFEDPFSSAALAFLEKYPNPQEAQELSLSDLTAFFKTLHVYSDSYVLKVRENLHSSFQVRPILVEVRSYLAQAIAQQLLQIGRLIKDYEKRLEKTSQEVEELRALEGIKGIGLKSRIGILIYFYHREWKDFREAQAAAGMSPATYQSGKYHFVHFRKGCIKWARDLFTELAYSTLLYQPWARLYYDRKRKEGKKHYHALRCLGNIWIKILFKLWKEGKTFKHEKHYIAMIESLISRLAA

SEQ ID NO: 495183 - protein, 353 aa, unidentified
MSHSSEAITGFPSLTIGVDLGDRQSQLCVVDAAGTTVEERAIATTPQALQRYFAERGAVRVVLEVGTHSPWVSRQLAGYGHEVYVADPSAMYGARRRRRRNDRMDAAYLARLGRVDVQLLHAIQHRSEATQAHLAQLRARDQLVKSRTQLINHVRGAVKSVGQRLPSGGADAFATQAAAHLPLALTEALTPLLTMIATLTTQIHAYDRRLERLGATHYPVTQRLRQIPGVGPLTALAFVLLVEDPARFATSRQLGAYFGLVPRLDESSQSSPQLRITKRGDPMARRYLVSAAQYLLGPFGPPCDLRRFGEALMVRGGPNAKKRAVVAVARKLAVLLHALWRTGTDYQPVRHAA

SEQ ID NO: 495184 - protein, 407 aa, unidentified
MNAVGIDVSKGKSMAAALRPMGEVAMLPKEYPHTAVGLERLTCDILCLGEDTRVVMEATGRYHEPVAAALYESGIYVSALNPLYIKQSGGGSIRKVKTDKADAMKIAKYGLDNWVELREYTPMEAVRQQLKLCSRQYNLYMKTIVGLQNNLISLTDKTFPGVNKLFKSPERADGHQKWVDFVLTFWHCDCINMVSEKAFAERYQKWCKRRGYNFSQEKALDLYVSSCGHFTTLPKNANTKLLITTAAQQLIAAKATLVAMRMEMLRLARQLPEYDTVLAMYGVGEITAAQLMAEIGDVRRFPRRSALVGFAGVDPAVNQSGKHEAQSNPTTKRGSPHLRKTLYQIVCTYLKKSPADEPVYQFLDKKRSEGKPYFVYMTAAQNKFLRIYYARVKDCLEALEAADPDEK

SEQ ID NO: 495185 - protein, 402 aa, unidentified
MGCYTTIEIDVSDRTSKICLMAKSGAKRHILEEATVPTTRAGFTEYLKDKDPGSVLVTFETGTHSRWMNSLIGDGLGFKVHVANPAKLPTVTKSAAKNDRNDARELARLALADPELLHPVRLRREVCQAMLRVEYVRQDLIACRTKLTNTLRGFAKAMGGRIESCSPEKIVSLNRADWPEELRKLISLVEETLESINADVKKSDDEIKRRTCLSPFKEHMPRAQEVYGVGLHTAATFLAVIDCDVSRFKKARDVGPVVGFTPRQDQSGEMEKQLHATKAGNPLLRKLLVEAANVTMRTLSPDTDLKLKGERICAHGGKIAKGKARVAVARGIAVTMLALLKHPEREYVPLTENGAEELARLREQVARQGLARANHARKAEAAERPEPRPDRQGAKRKDFSNH

SEQ ID NO: 495186 - protein, 382 aa, unidentified
METATARGENYTTISTVLYLAFELSNNKWKLGFTIGLGQKPRERVVDARDLPRVFEEISAAKQRFKLPEATKVVSCYEAGRDGFWLHRALVAAGVENQVVDSSSIEVNRRARRAKTDRLDLGKLVTMLIRYHSGETKVWSVVQVPEVKDEDQRQLHRELADLKTGRTRETNRIKGLLISQGISLTTRGQAKIDLDAVRLWDKSLLPEGIRDRIQRAQERVEFFSRQIQELETQRAEELENLTCVGIKRVRQLMELKGIGPATAWVLVMEFFGWRKFRNRRQVGALSGLAPSPYQSGDSAREQGISKSGNRRVRARAIEMAWLWVRYQPASALSRWFQKRFGAGGSRLRRIGIVALARKLLVGLWRYVETGAVPDGAKQKVPC

SEQ ID NO: 495187 - protein, 342 aa, unidentified
MKFYCGIDLSARDSQVCVIDEQLKVMVQQKLRNELPRICRLLAPYQANLKIVVESTFNWYWLIDGLQAAGFEVVLAHTLGLYLITGAKVKTDRRDAYSLAKLLLVGAVPAAYIYPVETRPVRDLLRRRARLVQVRAGEYGSLRRLLLRQGILSSKQQEIKTASETELEQWFEHPLVRLHASQELRRIELYSQQIAELEKTILELAKPERSYQLLLQLPGVGQTIALTILYEVGELTRFANVKVFSSYCRVVPGIAQSGNVTRRGRASKQGNHYLKAAFSQAAVHAVRCYPKVRRYYERQLKRHQGRGRQMICYNIIAHKLAQAAFHVLKEQTEYREELLFGR

SEQ ID NO: 495188 - protein, 408 aa, unidentified
MLITSTEAYVPEIWAGTDAGKAHHHCVVIDAGGHRLLSRRVVNDENELLTLIADVLELSEDVTWAIDLNAGGAALLIALLVNHDQRLLYIPGRTVHHASGSYRGDGKTDAKDAFVIADQARMRNDLHPVNTGDEIAIDLRILTARRYDLIADRTRAINRLRAQMLEYFPALERAFDYSASKAALVLLTGYQTPAALRRTGKNRLTTWLKNRKVRSAEGVATTAIEAAEAQHTAVPGERLAAAMVAKLAREVMALNEEIAETDKLIEGRFREHRHAEVITSLPGIGPLLGADFIALTGGDMAAFGSPDRLAGVAGLAPVPKDSGRISGNLHRPRRYSRRLLRVFYLSAQVAARCCLASKTFYDRKRAEGKGHKQAVLALARRRLNVLWALIRDNRTFAASPPTPEAAAA

SEQ ID NO: 495189 - protein, 409 aa, unidentified
MRCYLGVDWADQTHAVWVVDERGTKVAMRTVPHTAEGLSEWGRELDEWRAQGIELWAAIERPEGRVVDFLLDHGVVVYPVNPKALDRARDRFRQSEAKSDPFDARVLADFLRTDHLHLRALQPSSEAAQELKLLTDDYQRQIRQQTRLVNQLTTTLKAYYPRGLEVAELTTALAREFLQAYPTPAALTALTERQWQRWARAHRLSEARTQELWAVLQRPQLPVPAHVVRAKGHLMQSLVAQLTLVVEVVGAYREAIEDFFARIPAAQWIRTLPIGDHGITAPTLWARLGDAPGRWESFRHLQAQAGTVPVTIRSGKQQVVRFRFACDKSLRYVIDHVAFLSLRWSEWARAYYAEQRARGHSYRQALRALSAKWLKIIFVMWERQVPYDEQYHLAMMTRQQLRQRQKKVA

SEQ ID NO: 495190 - protein, 432 aa, unidentified
MAEIIFARVAGLDVHKKSVVACRRILDVRANEVMAETKTFGTMTSDLLELSDWLAEWAITHVAMESTGEYWKPIYNILEGNFTVFLVNAQHVKHVPARKTDVKDAEWLAELMQMGLLKPSFIPEKPQRDLRDLTRERSALVRERTRVANRIQKVLEQGNIKLASVASDVLGVSGRAMLQALANGETDVVKMANLAKGRLRTKIPELQKALTGRMDAHHRFLLSQHLAHIDFLDAQIAALDEEIIRRIDAMSDIPEDDHDDESQDRLTWRQSVDLLDTIPGVDRRAAEMILAEIGVDMDRFPSARHLAAWAGVAPGNHQSGGKRYSGRSKKGNQTLRTVLTQVAWAAVRTKDTYLSALYRRIAARRGKKRAIMAVAHSILVSIYYMLIRQQPYQDLGAAYLDNRRKEAKVNYLTRQLRKLGYQVRLDPLPLAA

SEQ ID NO: 495191 - protein, 415 aa, unidentified
MKKHSNSVKKSEFPMKRRNPRAEERRDSSEVMAELVSQLRQQLEVKGVPAAESAGDESDGVRPNLDRLTVGVDLGDQWSNYCILGLGGETLGEGQFRTRRQEVGEFFQGLAISRVVIEVGTHSAWVREVIAELGHEVLVANAQRMEGRKRRRRKNDRIDAAKLARLGRVDPKSLYPIQHRSTEVREDLLVIRVRDSLVESRTKLISTVRGMVKTMGARVQGCSSVSFSGKAGEQIPAEVRETLEPLLRLIQTLSEEIKSYEKRIEKLGSEKYMDTKLLRQVNGVGPVTSLAYVLTLETPQRFKRSRDVGPYLGLVPQQEDSGDSQPQLGISKAGDRMLRKLLVGSAHYILGPFGPDTDLRRFGMKLCERGGKNAKKRASVAVARKLAVLLHRLWSSGEVYEPLGYGKITTESAAA

SEQ ID NO: 495192 - protein, 334 aa, unidentified
MSGEKYIGLDVHQATISVAVRDSQGNIIMESILETKASTILDFFAGLRGTLSVTFEEGTSAAWLYDLLKPHVAQVLVCNPRKNAALKQGSKNDKMDARKLAERLRLNDLKPVYHGESGVRMLRELARSYLTIVKDLTRIMSRVKALYRSWAIPCAGRDVYYTRHRSQWLDKIPEPGVRYRAEQLYQQLDMLQHLRQQARRALLAESRKHPITTKLRQIPSLGPIRSALAVALIQTPNRFRTKRQLWTYSGLGLETRDSGEYHFVQGQPRRRKKQVFVRGLNKDYNHDLKGLFKGAATQASVKPGPFQQFYQRSLGMCGNCCGIDIAWCRPERGS

SEQ ID NO: 495193 - protein, 385 aa, unidentified
MGSQTFIPRDYDVFSGLDVDKRSISVTFTDHDRFLKSLRMPYSAEHLLNHVRKHFPNKKVAFVYEAGPTGYGLYDGIVAQGYPCLIAAPSMIPKAPGQRVKTNRLDSKALSENLRGGQLKSIHVPSPTYRELRHLTQLRDVLVSELVGMKQRIKSLLLFEGIEFPPAPAGSQWSFLVKDKLRKLACSGTVRFKLDQLLDSLEFNEKQVLKAIREIRRYCQNDPELSQCMKYLMTLPGIGWITASQLLARIGDWRELNNIRQLGGFLGLVPTEHSTGERTDRGSITRTGDERLRSKVIQASWSAIRQDNELREFFRTVYRKHPREIASRVAIVAVARKLSVRITVVLMKQRPYEVREKVHSAPLTQEETSPQGTTRREPEPGEKNS

SEQ ID NO: 495194 - protein, 367 aa, unidentified
MEKSSKVFVGMDVHKESIDITLAEAGGEVRRLGQIGGDRGSLLKMVRKQQSKGGERVFVYEAGPCGFWIYRELAALGERCMVVSPALVPKRAGDHVKTDRRDSERLASLARAGELKAIHVPDIRDEAIRDLVRGRDDAVIAQRRVRQQLKALLLRNDIRYVGKTSWTGAHRRWLSELKLPEPAQQIAFEEYVDAIAVATGRIERLTRAIETEVLTWRFAPVVGSLQAMRGIQFVHAVTLVAELGDLTRFGSARALMGYLGLVPREDSSGEHRRQGSITKAGNSYARRALIEAAWAYRHPARVTRIIATRQAGIPKAVCDIAWRAQLRLSTKYRRLAARHLHHNKIVVALARELSGFVWAIGHSVKPQ

SEQ ID NO: 495195 - protein, 319 aa, unidentified
MYFLGIDVAKAKLDCTLRLPNGKSRAKVVPNFPEGFSQLTAWLDSKDARDTHVCMEATGVYWEGIAQFLSTQGFTVSVVNPAQIKAYGASRLARTKTDAVDARLIADFCAERNPPAWQPFSDDELALRALVLRLDALQTMRTQESNRLEVSRGAVRQGIQDHLNWLDGQIKSVTKAINDHIDANPGMKDKKALLDSIPGLGERTIAILLAFIGDPSRFGNSRQAAAFAGLDPRQHESGSSVKGKPRLSKVGHAFLRKALYMPAMVALYKTDWGKRFKDRLAASGKPAKLIIGAMMRKLLHVAFGVLKSEKKFDPALHNA

SEQ ID NO: 495196 - protein, 353 aa, unidentified
MEHFIGCDAHKKFSIFASIDEKGEYGPTFRVRHDLEVFRKFLKELPAGSKIVLETSGCYYWMVDEMERAEHIPLLAHALTAKRRMEGRHKTNERDARGLAMLLRNGTLPVVWIPPAELRDQREMLRWRMCLSRMRTRVKNRIHGVLQRYNVDIAVSDLFGDAGRVELLARLHELPPYSRHSLLDQLQMVDTVETQISECEQVLEEMLYPSADRDLLDSLPCVGKILSAVMALEIGDVQRFGGPDRLVSYAGLVPVARESADWKRKDRCPRDCNMYLKWAYVEAANLISIHRGHWPERHVAQLYERVKQSTKMHGKATMAVARHLAEASYWMLRKQEVYQEPNSKRKVLSSTHG

SEQ ID NO: 495197 - protein, 387 aa, unidentified
MIYNVGIDISKYKHDFCIISNTGDVIVENLSFENNKKGFQIFLDSLKSYDKNLIHIAFEATGHYSLNLEHFLIDNGFSFMKINPLLIKNFLSSQNLRRTKTDKADALSIVSYLNSIDYIPNSNLLYHIYSLKSLCRSREFFVKERTKLLTLLTIELDKSFPEFKPFFNNIFSTTMLYILEKYKNSSRISLMKDFDSLRRISRGKFTYAKFAKLKELAKNTIGFHDKNTDLLISSYIASIKHFNEQIESLESKISTIIKDLNPPILTIPGIGEISAASIIAEYGEVSNFSSPAQMLAFAGLEPSIIQSGTSEAIGKMVKHGSGHLRYVLMNCSLTLLKYHPVFYDFYLKKRSEGKCHRVALSHVCKKFVRLIYCLETKHISFDPSLLK

SEQ ID NO: 495198 - protein, 382 aa, unidentified
MENSKAKQCESITESRNVTGTDFASFIGVDLHKTTVTLRAVDSNESIISSLTIDTKCVNKIEDWLNTLPKPRWMAVETVSFVEWFIDRYRNCVERIDIADATELANRRGKRRKNDRNDSLDIAVRLVQGNCPLGYIADEPLMQLRKLGRHWKQLSKTLSRAKHCMQSIFQAANIRGPKLEGATAQKWLLAHGDLLKDVQREAFSNFIDIISLIERQRESLRRKIIQANRSKEFSAVTTVLKSIPGIADIWACMIAAEVGPFDRFPNADALEFWAGITPDNQESAGRTQSGNITKAGSATLRWALCKAAVTLCQSDAGQEAVRQRLIKRIGNAKANVAMGRRLLRIIYAMMRDGCLYECAEPTNHLKNANKARAKKRKQQEAA

SEQ ID NO: 495199 - protein, 351 aa, unidentified
MVVVGVDVHKKTHTFVAVDAVGKQVGQRTVEATTKGHLRALAWARKEFGVEVTWAIEDCRHLSARLERDLLSAGQKVVRVPPKMMAEQRRVARTRGKSDPIDALAVARAFLREPSLPVASHDEVSREAKLLVDRRETLVNTRTRTINSLLWRVHELDPQRAPKPRSLDLVKHQNALKAWLETLTGVVAEMALDELEDIIALTARIKEFDKRLSVLTRREVPALLALVGCGELTAAKLLGESAGITRFHSEAAFARHAGIAPIPVWSGNTAGRVRMTRSGNRQLNCAIHRIAVTQARIPGTLGHAYYEKKLAEGKSKAEALRCLKRRLIRVVFRLLTTDHNNRQTPAAPAAA

SEQ ID NO: 495200 - protein, 422 aa, unidentified
MKLAAEQPFTALVGIDWSDKKHDFCLQGAGSQQREFGVMAHRPEAIDHWARALYQRFGGPVAVCLEIAKGPLVHALQRYAFIVLFPVNPATVAKYREAFVPSRAKDDPTDAEIALELLLRHREKLQALKPQSVAMRALTTLVEQRRHLVGDKTRITNRLCSTLKEYFPQALDWFEDRDTVLFCDFLQRWPSLKQVKRARQATLRSFFWAHNMRRSELIEERIRGIRSAHALTDDLAVIGPHQLLVQALVSQLRVTLQAIEGFDAEITHVAKRLPDYALFAALPGAGAILAPRLLVAFGEHRERYANAAQLQQYAGVAPVLERSGNKRWVHWRMACPTFLRQTFVEWAGSTIPRSFWASAYYQRQRDKGCSHQAALRALAYKWIRIVYRCWQTRTAYDESAYLLALKRRGSPLIAALSAPQSA

SEQ ID NO: 495201 - protein, 391 aa, unidentified
MVCVGIDVAKDKHDCCILDSDGTIRADCITIPNNMDGFKQLLQTIRDCTKRSDKIKVGLEATGHYSYNILGFLLDNDLAVYVMNPLHTNLYRKSLSLRKTKTDRVDARTIATMLLSDVDLKSYTDTAYHNEELKSLTRYRFDKVRERAKLKQSVSRLVTILFPELEKLVPSLHIASVYALLSEYPGAKQISEIHLTKLTNLLATASKGRYGKDKAIQIRDAARTSIGSVMPAKFLELKHTIKLIRELTSEIDEIEVSIQKIMDELNPPILSIPGVGIQSAAMILAEIGDFSNFESPDKILAYAGCSPSTYQSGKLTNCYAHMEKRGSRYLRYALYNATKYVCHWNPVFAEYLAKKRAEGKHYNVALSHATKKLVRLIYALQKSGKAYLVAA

SEQ ID NO: 495202 - protein, 401 aa, unidentified
MVSDFMKGRYNLMKIFVGIDIAKLNHFAAAISSDDEILIEPFKFTNDADGFQLLVSKLESFDKNSIIIGLESTAHYGDNLVRYLVAEFYQVCVLNPIKTCQMRKNNVRKTKTDKVDTFVIAKTLMMQDDLRFITFFDLDMMDLKALGRFRQKTIKQRTRLKIQLTTYVDQVFPEIQYFFKSGLHQNAVYALLKEAPSPKEIASMHMTHLANLLKVNSHGHFTKEQAKELRVLAQKSVGANDSAISIQITQTIQQIELLDSQLEKIEAEMTDIMKFNDSVIMTIPSIGYINGGMILGEIGDIHRFSNPNKLLAFAGLDPSVYQSGNFQAKTTRMSKRGSRVLRYALVNAAWNVVRNNATFKAYYDAKRSEGRSHYNALEHCAGKLVRVIWKMLTDEVEFNLE

SEQ ID NO: 495203 - protein, 386 aa, unidentified
MFKTERAAIAIHTNLGAIFVSLELSRSTWLITSLSPGNGERMSKHSLRAGDVTGLFGLLSTLRERCRARTRDDYPIVTIQEAGLDGFWIHRVLEREGIESHVVDAASIATSRRHRRVKTDRIDGEALLRVLMAYKRGEPRVCSMARAPSADEEDRRRIGRERKALTAERVAHVNRIKGLLFSQGITNYEPMKKDRRQQLEDLQTGDGRVLPTHMRAQIRRELDRLELLLEQIRTVEEERDALIAAQTVETRPSPVTMLLEIKGIGTEFANILWAEGLFRHFDNRRQVAAYAGLAPTPWQSGSIDREQGVSKAGNPRLRVTLIQLSWLWLRHQPNSALSQWFNARVHRNGGRMKKSTIVALARKLLVAIWKYVASGVVIEGAIMKRA

SEQ ID NO: 495204 - protein, 304 aa, unidentified
MALDGSSEELQVKNTAEGHQELVEWLKRHKVKRVGIEASGGYEQAAVAELRRQRFVVIVFQPIQVRAYATFHLQRAKNDKMDAALIAACTAAVKKIHPAPDPRLQPFAVHLTMIDQIKEDIAKLKNRLESCPDERVQKFWKEQIALLAKHRRAEFKALVAAIRKHRDLAARLDLIYSVGGSGLPTAVAILIRMPEIGQITREQAAALTGLAPYDDDSGKHVGARRIDGGRQRLRQALYTAALPASFRWNPQLMALYSRLIAAGKGHKRALVACARKLIVIINAVVARGTPWVAEPPRTASVSVT

SEQ ID NO: 495205 - protein, 359 aa, unidentified
MQSNKKSFKGQKIFIGIDVHKKTWAVAILTESGFLKRHPQEASAKVLFDFLRKHYPDGEYHAVYETGFSGFSTYYALEEYGIKCQVVHAADVPATQYESIMKTDRVDAERLARALKKGEIERPVYIRERDNIDDRAVIRIRRTIQRQLAGYKARVKHMLHSNGVELPERFSKPSSHWSRAFITWLMQDVKLLSSTRTSLDLLIRQVEVIRGTLLEATRELRKLSQTDRYKHAFGLLMTIPGIGPNIAMCILTEVWDVKRFSNENKFAHYLGLIPTSHDSGEHKTDGVKTFRGNKHLGPMIIEACWIAIYKDMGLGACYADYKKVMKPQKAIVKVARKMSNIIFSVLKNDKAYEPYKWDK

SEQ ID NO: 495206 - protein, 415 aa, unidentified
MSRYCGIDWAEGHHDIAIVDQNGTLVSKRRITDDPAGFTALTQLLTDAGDTAEDPIPVAIETPRGLMVAAIRATGRAVYAINPMAVARYRERHTMARAKSDHADAMTLANILRVDAHMHRPIPADSELAQAIAVLARAQQDAVWRRTKASNELRSLLREYHPMFLATFADKSATNLAKPEVRAILAIAPTPAAAAKLTRVRVAAALRRAGRQRGIDALTDEIVAKLRRPGLRQPDLVEQAMGRQVLALLATLDAACTGADDLEQAVAEKFRTHPDHAIITSFPGLADLTGARVLAEVGDDRNRFADARALKAYAGTAPVTRASGRSISITFRRIKNDRLAAVGWVWGFAAGSNPGPAREHYLNRRAHGDRHSAALRHLVNKMLGQLYYCLQNRREFDPLKAFGQPGTHAPQPAAA

SEQ ID NO: 495207 - protein, 454 aa, unidentified
MSKKQGRTKGRGSPGSGLQADAAGVDVGATEIYIAVPEDRDAEPVRRFATFTEDLQSAADWLHGCGIKTVAMESTGVYWIPFFQMLESRGLQVWLVNARHVKNVPGRKTDVSDCQWLQYLHSVGLLRGSFRPEQQVCAVRSLARHRESLVEMAAVHLQHMQKALDQMNLQLHHVISDLSGTTGMAIVDAILAGERNPQRLAKLRDPHIKCDGRTIARSLVGDYRGEHLFTLRQSVTAYRHYQQLLAACDVEMERLLEEFSDRNGPATPALQEPAKRRKPRRNEMRFDLRGHLYRILGVDLTAVPGISALTAHVLLTEVGPDLSAFRNEAAFSSWMGLCPDNRVSGGKLLSSRTRKVNSRAAKALRMAANALHRSQSWLGNYFRTMRAKLGAPKAITATAHKLARIVFHLLTTREPYDESIFAKEELHHQRRIQRKLQKQAKLLGFQLVPIALAE

SEQ ID NO: 495208 - protein, 355 aa, unidentified
MIVAIESHQGALHMQISTIGLDIAKNVFQVHGIDAAEKVVVRKRLRRRQVLEFFKALPPCLIGMEACATAHYWARELTKLGHRVRLMPAKDVKAYVKRNKNDAADAEAICEAVRRPTMRFVRIKSAEQQGQLMQHRTRDVLIRQRTQIINALRAHLAELGLVAAQGDKGVKELLAIVADKEDTRLPIDARASVIVLAAQLEAVQTLIGSIEKRIKMQHRSNEASQRVETIPGIGVLGASAITATAVDPTVFRSGRDFAAWIGLVPRQDSTGGKQKLGPISKQGDRYLRRILIVGAISVLRRARENPGKFPWLTQLLARRPFKVVAVALANKMARMAWALLAHGGTYRAPELAETA

SEQ ID NO: 495209 - protein, 468 aa, unidentified
MEEVTFKFSVDWTKTAFYCGLDVHKHELAVAIYGKDDSLSEIVKTTIVPVTGKGLHEFWNFVKKYQPGGFAMEATGIYHHVVYKFLLNKRSKVHWPFVIVVVNPADAAGLPGRQKNDRIDAELLARYLAKGLLRSGKPVIEVLEDLKAIFRMALRLERDRTALKNRIKKTLDRAGIRPKYFDLNNQWSITFLTCFIEQENSLGCFIERELSDETSPLQGIRKHLVRNLKHLIPFFGFSLTSPQRALIRQDLVELAFKTGRKALLALEVDQVLLSRPGLRARAHDLATIPGISPFSAVWLLTEIGSIKRFRTFRQFKAYCGCCPRIVSSAGKIYSAHTQRHSNAHLRTIFYNAAVVVCNLVKKESALKEYADRVNRTKSSRNKKLVYCIVAGKIAKIVYTILKKGVPFSREIGRGFSPNRLEAPFCLADRKLIRRARNNLQKVKLIPNIGCLGERSEELAKELDKLLTS

SEQ ID NO: 495210 - protein, 345 aa, unidentified
MELHTIGIDLGKTVFHLVGLDLHGEVVVRKKFSRTQLLRFTANVHVGLIGMEACGGSHFLGRALREQRHEVRLIPAQYVKPYVKTNKSDYIDAEAIAEAVARPTMRFVPVKTDEQLDMQSLHRVRERWVMRRTAVINQIRGLLLERGITLRKGRHHVHAALPLILEDADANLSGAVRLLLTQLKLDLDQLSVRIDEADAVIQKTAHENEACRRLVAIPGIGPVTATALIAAIGNGGAFHKGREFAAWMGVVPREHSTGGQQKLLGISKRGNSYLRRLFVQGARAVLLQRTKQSSGLSAWLAQLTSRTHRNVAAVALANKLARIAWAVLAKNEQYRPSVVADVAAA

SEQ ID NO: 495211 - protein, 339 aa, unidentified
MTNYIGMDAHPSICVFSVVDDSGAEIGKFQSPTNGAALVEYIRSIPAPRQLVFEECELSAWLFEILEREVDKLIVCNPSRNAQFKRAKTDKLDAKNLAMLLRGGFLTPIYHDGSKTEHLRALMSGYQDVVDTGVSLKNRYKSLFRKSGLPARGDRIYGDESLLKDLPRPDQRFIGHGLYRLIEATEAERVKYCAAIKAAGRKFKDIRLLQDIPGIGEIQSAKIVAQVITAERFTDKHKFWSYCGLVRYKQESAGKIRGNKRGWGNRMLKCVFKMAAKSALSGENEFRKLYDELRAKGTNDRAARNAVSRKIAAITLSILKHKTRYDKTRVVEEDEPAAV

SEQ ID NO: 495212 - protein, 377 aa, unidentified
MSSITPVQAEIEVIGGVDTHQGTHTAAVIDLVGRVLGTEQCRATASGYAALLAWMHGHGRLSRVEVEGTGAYGSGLVRLLRDEQVQVIEVDPPDRKARRFQGKSDPIDAVQAARAALAGERTGTPKQRNGQVEALRNLRVARRSAVNQRAETQRQMKALIVTAPDELRGQLRGLNITKLIATCANLQADRADAAIPAVAVALCSLARRHQHLSTEIANLDELLEPLVAGINPALLAANGVGPDVAGQLLVSSGENHDRLTSEAAFAMLCGAAPIPASSGKTTRHRLNRGGDRQANAALYRVVLVRLRWTHTPVTTCSDAPRKACPRRRSSAVSSATSPASSTNSSQQTIFNSRLDIYRSIFAGALAPRAGRQARPAD

SEQ ID NO: 495213 - protein, 406 aa, unidentified
MRVYIGIDWSENKHDIVFMNEAGVAIARLTITHTVEGFLELETACAALDVAPADCLVVLETAHNLLIDFLWSRQYSQVYVIPPSVVKANRGRQGQSGARTDADDAFLLADILRTDRGRLQPWHPDRLLTRQIGAQVSLIAHLTRDVVRSSNRLRAVLLRYYPAALHVFSSVQTQIALAFIQAYPTPQAAAALTFADFQHFTAEQGYSRPARVRANFARLQGSYPQAAPDTVTVFQREAVQLSRLLLHLVRDKGEAQRHLTTLFLQHPDAPIFDSLPGAGELLAPALLAKFGDDRQRFPSPASVQALAGTCPVTAASGKSRSVRFRRACDRAFRDMAQKWARASLSESVWANAYWQQVRPRCASNSHAYRCLANRWLSIAWTLWQKHELYDETYHLQQRALHSKNRG

SEQ ID NO: 495214 - protein, 338 aa, unidentified
MKLYGAIDLHSNNNVTVLIDEKDKVVYQKRLANDLPSIVEQLSPYSSSIEGIVVESTYNWYWLVDGLMDKAYRVHLANTAAIQQYEGLKYTDDDSDARWLAHLFRLGVLPEGYIYPKEERPVRDLLRKRSQLVHHKTAHLLSIQNLYCRNTGQSISANRIKQLSSEKIDALFTNCDLVLAVKANFTVMQSLETEIAILERSVKERVKLKPAYRYLLTVSGIGQILALTIMLETGDIRRFSKVGNFASYCRCVKSEKLSNGKRKGSGNTKNGNKYLSWAFVEAANFAIRFEPLIARFYQRKKAKTHRVVAIKAVAHKLARACYYIMRDEVPFDVDRAFA

SEQ ID NO: 495215 - protein, 348 aa, unidentified
MALTIVETRAITGGVDTHADVHVAAALDPIGGLLGVAEFPATPAGYARLLGWLGGFGTVCLVGIEGTGSDGAGLSRHVTAAGVRVVEVDRSDRQDRRRAGKSDPLDAVSAARAAQSGRARGAPKGRDGTVEAVRALMVAKRSARSERTQTINQARALVLTGPADLRTRFARHTVVALVAETAALRPRPGDVVGYATRVALRELGRRAEFPDSQLDRLDELIIPLVTVHAPGLLALYGIGPDTAALLLIAAGDHPERLRSEAAWAHLCAAAPIPASSGKVTRHRLNPGGDREANHALWRIVITRMSSHPPTRRYVERRSTQGLTKKEIIRCLKRYVAREVYPRLRAAAD

SEQ ID NO: 495216 - protein, 349 aa, unidentified
MRFYNQTHRFYCGVDLHARTISLCVLDASGAVVREATIDAAPAAVLDALAPFRDGLVVGCECMFAWYWLADLCAAEGIAFVLGHALYLKLIHGGKAKNDTIDAHKLATLLRGGAFPQAYVYPKGMRETRDLLRRRTFLVRKRSHFLAHLVNTNSQYNLPPLSQKLCYARNRAELDLPSRFEDSSVRKNVETDLALVDAIDAQVRDLELYLTRSAKVDDPQAYQRLRSVPGVGPVLALVFLYEIHDVKRFAEVGQFLSYARLVRCQHESAGKIKGSGGRRIGNAHLRWAFGEAACLLLRESAAAKKWLARKERKSGKGRALGALAAKLGRAVYHLLRKSEAFDAKRFFAS

SEQ ID NO: 495217 - protein, 411 aa, unidentified
MELLHPRCAGLDVAKDEVVACVRVPDGHGGRDQEVRTFPTFTSGLEALAGWLAAEGVTQVVMEATGQYWKPVWYVLEEWGFELLLVNARHVKILPGRKTDVCDAAWLAELLEHGLLRGSFVPPAPIRELRDLTRYRKRLIQAHTAEVQRVQKTLEDAGIKLDSVAADVLGVSGRAMLAALVGGERDPQVLAELAKGRLRAKLPQLRQALRGRFGDHHALLVRLALEHLEHLEGAIAALDRRVDEVIAPFARARDRLATITGVGKRAAETIIAEIGVDMTVFPTAGHLASWAGRCPGNNLTGGKRRSGKTTKGNRWLGEVLIECAWAAARSRDTYLSAQYWRLARRIGKKKAAIAVGHSILVIAWHLLTSDCDYADLGGDYFVRRDTDRQRQRAVAQLQALGYRVTLEPLAA

SEQ ID NO: 495218 - protein, 348 aa, unidentified
MSQIIRVGMDTSKHVFQLHGVNAAEEVVLRKKLRRNEMIAFFEKLPPALIAIEACGASHHWARVLSAFGHEVKLIAPQLAKPYVKRGKNDAADAEALCEAASRPTMRFVPAKTAEQQAALMLVGVRDRLVRNQTQLANSIRGFAAEFGLTATAGMDQLAPLLDRLVADENLPTLARELFASQAKEYAQLRAKIEEIDGKLVAWQKAEPRCGRLVKVPGVGPIGSALLTMKTPAPEMFKSGRQFAAWIGLTPKDHSTGGKVRLGVITRAGDEALRSVLVAGATAVVNQVRRGNSKNAFAPWVASLLLRKPPKLVAVALANKMARVAWKLMVTGQGYIDKPAPAVLVSAA

SEQ ID NO: 495219 - protein, 404 aa, unidentified
MKTYILRPSQPVEPQKASRVTCPKTAAPAPIPGPILFLGLDVHNDSIAVSLAPSETTEVRRYGIIGGEHDDVLKLIKKLQATHPGTAMKVCYEAGPRGFALCRCLRGHGVDCILVCPSKVPRKPGERVKTDRRDADDLARLYRAGELTGIYVPEPEDEAMRDLLRARFQVGRQQHRARQQLKMYLLRHNLRYSGTTSWSPAHLRYLAKIKMPFPVQQIVFQEMLDVISEATARLERYDREIERTVPGWRWAPAVRALMSLRGMALLHAATLVAELGDFNRFEHPGQLMGYLGLVPSEHTTGKDRQQGGITKMGNAPARRALVEAAWQYRAPARLSPHLKKRQEGLPKAVTEIAWEAQRRLHHRYTHLTRVGKKKSQVAVTAVARELTGFVWAIGRQVQPVAANP

SEQ ID NO: 495220 - protein, 412 aa, unidentified
MDLVYARCAGLDVHKATVVGCVRVPRAPRGDRQAETRTFATTLRGLEELRAWLTAHGITHVAMESTGVYWRPVYAGLEGAVQVLLVNARHVQMVPGRKTDVRDCEWLAQLLECGLLRGSFVPPPAVRDLRDLTRLRKALIRERGHHVNRIEKTLELANIKLGTVVTDIMGKTGRAILEALSAGRDAPEPLVALAQGSIRTKKQAALREAVVGRLTPHYAFLLRQHLSLIEALDLHIVTLDARIEAAMAPFAEAAALVQTMPGVATRAAQAILAETGVDMGVFPTAGHFASWARLCPGTHESAGKRRPTTTGQGAVWLRATLQEAAWAAARTKRSYYRALYHRLKGRRGAKKAIVAVQHAMLVALWHMLKRRVPHHDLGADYFDRRNTARLRHHHVRRLQQLGYQVVLVEEAA

SEQ ID NO: 495221 - protein, 385 aa, unidentified
MLKYSLGLDISAKEIHCCLSTIDRNQKVVVKASRKVANNIKGFRDLQEWVTRHRKKQEIPLVTCMEATGVYYEHCAVYLYNAGFSVSVLLPNYAKKYLQASGQKSKNDKIDAQGLAQMGAEKSLELWEPISEFYYSLRLLTREIESLQEQKTMVINQMHALQYGIYQNNLVNKTLRSRLRLIEKQLDELEKAIKKHFDSDKEVSEKVEKICTIKGVGLKTVATVLAETIGFKLFKNSRQLISYAGYDIVERQSGNYSGKTRISKKGNSHIRRILHLPAFGVVRWRVEAFENLYERTYAKHGIKMKSYVAVQKKLLMVIYALWKKNETYDNNYGQYYTEQEQQLPLGATAVAVQPDPKKIVPTISPALNKVSITREQSQYASSRVE

SEQ ID NO: 495222 - protein, 406 aa, unidentified
MEVVHPRCAGLDVHKKTVVACVMVPGHKEVRTFGTMTDDLLRLADWLQQEQVSHVAMESSGVYWKPIYNVLESSGLELLVVNAQHIKAVPGRKTDVKDAEWIADLLKHGLVRASFIPSRPQRELRELVRYRRGLVEQRGHVVQRIQKLLEGANIKLSDVASDVVGVSGLAMLRALASGEQDTERLAEMGKSQLRNKREELKRALRGSFGEHQRFMLNNQLGLLEFLDGQIAELNQEVERRLRPFEALLERLQAIPGIGPRNSEQIVVEVGTDMSRFPTHAHFASWARLCPGNDESAGKRRPGRTGQGSRWLRATMVEAAWSAAQVKNSYFAAQYHRLVPRRGKRRAAVAVAHSMLIVIYHLIKDGTVYQDLGPTHFDELDRRRVTRRAVHRLESLGFEVSLREVGA

SEQ ID NO: 495223 - protein, 407 aa, unidentified
MNQDNQSFAAFIGLDKSDKKINVTLQRCSTARSQRSIIQGSAEALHAWVAALCARFLHQPVAICVEQPAAGLIHALMGYDFVVLFPINPVTLARYREAFTPSRAKDDPTDADLLCELVAQHRDQLKVWQPDDMRTRLSNQLKALLKGYFPQALELCGEDLTTPLTCAFLQKWSSLQQLKKARPETIRRFYYAQNARRGDVIEKRLALIAQAIALTNDPALIESSIITVQALTLGLRAAHTAIARFDREIARTFTQHPDASLFAALPGSGTVYSARLLAAFGSRRERFESAEALLNFSGIAPVLKRSGQTTIVHRRYARPIFLHQSFIEYANESIRHSLWARAFYQMHKAAQQSHWVIIRALAYKWIRILFRCWQERTPYDELRYLKSLQKHGSPLLQYLAQPNTQTV

SEQ ID NO: 495224 - protein, 336 aa, unidentified
MCKRIWIGVDLAKASFHAAVAPVDAHVTDWARLSNRDFEHSLKGVAALCAWVEKLGYDSEHIVGLCVEATGRLSWGFAELLNDRLGPVSIVNPARPVQFARSVGLRGKTDRSDACVLALFGVALRPMPRPLPSERQHQLRELAGLYATTRRDLTAVMNQLKEPTRSPFVRRRLGLRRRRLERDLADIEHEMDSVLAQDPQAAEDIRRMQTIPGVGPKTARMLLAHLGDLRQYTRAELTARAGLYPRQHQSGASVHKRPRMVKGGGQAIRTALYMAALNARRFCPHLNAFAQGLKQKGLSNMAILGAVMRKLLLLIRTLITLQVDYNPNHPQNQNDA

SEQ ID NO: 495225 - protein, 419 aa, unidentified
MNQPTAKPGLFIGMDWADQKHDIHVLDRQGKGFHQQLEHSAESIDTGVGEMLKLAGGQPIAIMLEQSRGALIYALMFRENVLLYPVNPKQLARYRESYPGGGKNDPTDAMYLARMLRERITTLTAWQPDDENTRLIANLSQQRRKLVDGQTKLRLQLAALLKSYFPMVLELFGKQHQLSLLLSVLSRWPDPRQLRRADRRLIRRVLSEHSLRNEQQLKKVIERIRAAQLLTRDNAQITPSAMAVKLLTHQIQQALKTIEEFDAGIDAAMKQHPDAHLFTNLRGAGSALAPRLLCAFGSQRDRWEDADSLASFSGIAPVTKKSGKQRHVHRRFACPKYLRQTFHEFADCARRFCPWSKARYRMLRDRGMKHHAALRKLARSWIRILFRVWKTRVPFDCDRYIANLKQRCPEIIPYLNQEK

SEQ ID NO: 495226 - protein, 363 aa, unidentified
MDNITHIGLDVHKETIAVATLRPGAPTCEERVIPNTPEAIRKLISGLGDPSRLLACYEAGPTGYDTQRLLSSFGVGCDVIAPALIPRRAGVRTKTDRADARNLARLHRAGELTRIRIPAPAEEALRDLIRTREDLKSDRRIARQRIKSFLLRHGRHYPHTRAARWSGAFEEWARAETFSEAATQAAFSHLMAANSTRSAQLAAMDAEIMRAAEEPELAPGVARLRCFRGIDTLSAVTLLAEVGDFRRFGSAPAFMAFTGLVPSEHSSGLSVRHGSITKTGNAHLRRVLVEAAWAYRHYPAVGETLAKRLQGQSPEVTSYAWAAQCRLCRRFRVLAPRTGHNKAVVAVARELAGFVWGMMTDRI

SEQ ID NO: 495227 - protein, 402 aa, unidentified
MNAVGIDVSKGKSMVAIMRPFGEIVSAPFEIKHTASDIHSLVELINSVKGESRIVMEHTGRYYEVLAHQLSEANLFVSAINPKLIKDFDNDSLRKVKSDKADAVKIARYALDKWQNLKQYSVMDKLRNQLKTINRQFGFYMKHKTAMKNNLIGILDQTYPGVNTYFDSPARSDGSQKWVDFASTYWHVDCVRKMSLNAFIDHYQNWCKRKKYNFSQSKAEEIYGKAKELVPVLPKDAITKLIIKQAVDQLNSASTTVESLRTLMNETASKLPEYPVVMAMKGVGTSLGPQLMAEIGDVSRFTHKSAITAFAGVDPGVNESGTYEQKSVPTSKRGSADLRKTLFQVMDVLIKTHPQDDPVYQFLDKKRTQGKPYYVYMTAGANKFLRIYYGRVKEYLSSLPES

SEQ ID NO: 495228 - protein, 342 aa, unidentified
MDHFAGLDVSVKETSVCIVNDTGRIVREVKVASEPEALLAVLKNPAYHFERIGLEAGPLSQWLFSALAEAELPVVCVETRHMQAVLKAQINKTDRNDARGIAQMIRVGLYRPVHVKTLRSQKLRMLLTHRKLLQSKAIAIENDLRGTLRNFGLKVGMVGKVRFEARIQELVENLPDLAELVEPLLIVRRALREQIVILHRRLLAIVRDDEVSRRLMTTPGVGPVVALTYRATVDVPARFRKSKSVGAVFGLTCSKYQSGEIDRSGSISRCGDEMMRVMLYEAAQSMLRSKKWSWLKAWAMQIARRRGMKKAIVALARRLAVIMHRIWVDGTEFRWTREAAAA

SEQ ID NO: 495229 - protein, 338 aa, unidentified
MEAYAGIDLHASNNYTAVIDGHDKRLYGKRQPNRLDVILDALDPFKTDLKGVVVESTFNWYWLVDGLMENGYKVHLANPSAIKQYEGLKHTDDKWDAFWLAHMLRLNILPEGYIYPKEERPVRDLMRRRLLFVHHRTSHILSLQSMITRNLGVRMTGRGITKLMEEDAESMFDSPYLVLAAQNNIATIRFLATRIKIIEGEIRPLINIREEFKYLLTIPGIGDILGFTIMLEVGQLGRFPEVGDYSSYCRCVKSEKLSNGKKKDKNNQKNGNKYLSWAYVEASNFIRRHCPKADRFYQRKKAKTNGIVATKALSNKVARASYYVMRDQVPFDEDKLFS

SEQ ID NO: 495230 - protein, 495 aa, unidentified
MAKKKTSVSERLRSGKLNRKQRKELVRRVYADDPGLEVVHRNVAGIDVGNESHYVAVPPGRDPQPVQEFGCWTADLVRMAEWLKSCGIQTVVMQSTGVYWIGVYDVLEKAGLKVWLTNARETKNLPGRKSDVQESQWLMKLHTYGLLRNSFRPPEQIRAVRTIWRLRDRNVRDAGREVQHMQKAMTTMNVQLANVLSDVVGVSGQAIIRAILGGQRDPQELAKLRDYRVKASAEEVARSLEGNWQEDILFELQQAVDRYDFCQEQIAKCDQRLEQYLEALPSREKAPVKAPVAQAEAAADTQGAGPHPPKTKAKKKKKKHSKPRGNEPHFDLEAELNRICGVNLTTLDGVYVMTALTFISELGTDMSRWRTEDHLVSWLKLAPSRQISGGKVIKQERNRTRNRVANALRMAASGLKESDSYLGARFRQLRARLGPGKAIKAMAAHLARLIYRMLTNGQEWVDRGTQEHEKRRVEREKQALLHKAAALGYRLEPAA

SEQ ID NO: 495231 - protein, 360 aa, unidentified
MKKISKQSQVVKAAKPERSVGLDLGDRFIHYCLLDQEGEVVEEGRMANSETALRKHFADEAVMRVAMEAGTHSPWVSRLLKRLGHQVLVANPRKIRAITGSESKNDRNDAEQLARFAAFDPKLLSPIEHRSEQRQQDLNLIHARATLVRARTMIVNVVRGLVKSAGDRLPDCSTESFAERTKAAIPASLREVSMPLLKQIGLLTAQIDLMDKQIDKLGKKYPEISILRSTPGVGPLVAACYVLTLDNPNVLGDNRQAGAFLGLRPRQSQSGDSDPQKRIARTGNTYLRSLLVQSAQYVLGRFGPDSALRRWGLKLAGSGGKRGKKRAIVAVARKLAVILHSMWRSRIVFQAFPQSATGVA

SEQ ID NO: 495232 - protein, 343 aa, unidentified
MEYYVGLDVSLKQTSICVVDQSGSVVREGVVDSDPEAISVYVRSKAPGAVRIGLETGPTSTWLWIELKRLGLPVICIDARHAKAVLKMQINKSDRNDAIGIARIMQTGWFKEVHVKDIDSHMVRALLASRALLVKIKRDLENHVRGLLKNLGLVIGRAKFNVFAVRVEELIEGRPELIAAIRPLLEARNAVEQQVSELDRKVMKLARHDAQVRRFMTVPGVGPITGLAFKATIDDPARFARSRSVGAYVGLTCRRHASGEVDWSGRISKCGDAMLRSYLFEAAGVLLTRVPKWSAVKAWGVKLVKRNGLRKAKVAVARKLAVILHRMWVDGTEFNWSKKEIAT

SEQ ID NO: 495233 - protein, 341 aa, unidentified
MKNKSFIGIDISKNVIDASIFCEGTPIKDFPHAVFNNSRKGFGEMCTWLKKNHVVLLNCLFGMEFTGSYSMELEKFLYARNYQFCMLSTHVVKHYPMGSKDKSDKIDSAKIADFLYRYNGTECVKPYKMPDKTMQRLKTLMNERKFLVEQRTCFMNRRQLCSTKEDAQLYDGYIRKLGHDIENIELEEQKLLATDDSLLTTYKNLLTIPGIGFVNAINAIVITRNFTAFETARQYASYVGVAPHSHTSGTSVRWRPRPSARCDGQAKADLSMAATVAVQYDAELQSFYNRKLGGKQDSDTKRKALNAVKFKLVLRMFAIGKQNRKWEPLDSKSSNEKLAIS

SEQ ID NO: 495234 - protein, 381 aa, unidentified
MKNALEVQKRRPAMKKNTSKTKKRTTTAEAREKFASFVGIDLGDKHCEVCVFNGAGEVQERLRLPMKGKDLEGYFGKLGRSRVALEAGGQSRWVAEVIERCGHEVYVSNVRKVAYISASDDKDDPGDAYKLAELVHFKPQLLHPIQHRSREAQADLSWIRAREALVESRTQLVNTVRGMSKAFGERLGKCSVEAFPAKRAEQVPEEIRGAVAPLLEMIDQLNEKIAYYDQMEEHIARQRYEKHGLLRQVDGVGVHTALSFMLTIGEAERFEKSRMVGPFLGLRPRKQDSGESRPQLGITKAGDEYLRKTLTNCAHHILGPLGKDSDLRRAGQRICERGGKNAKKRAVIAVARKLAVLLHRLWITGEVYEPLRNSKKKAVAA

SEQ ID NO: 495235 - protein, 376 aa, unidentified
MEVTSMTNVIHIGIDVHKDSYSLCSYSFATKQSFGQTKIASKDSLVIKYVQRLQNEQPDCEVLCGYEAGPTGFGLYRELEKTGIACVLMAPTSLPKAPGNRVKTDRLDAQELAHHLAWGTYSAVHIPTSEDEAVKDYTRMRNARVLAMKKAKQNLLSFLLHTGRTFTEGKSYWTVMHFSWLRKQEFVDTLTQETFNEYLQEVLDQKDKVDRYESQIEEIAKREEYREKVSKLRCFRGIETHTALSLVAEIGDFSRFVTPQQFSAFLGLVPSEESSGQRERRGGITKAGNTRLRLLLIEGANSTLRSNVYGQKSKRLLARQRGNDPAVIAYADRANKRLHQVYSRLTSHGVHSNKATVAVARELSCFIWGMMNDRIE

SEQ ID NO: 495236 - protein, 352 aa, unidentified
MNTQTTASVPKLFIGMDVHKKSWTCHFKTDLFDYKTVTMPADTSCLQQYVQQHFAAHEVTCCYEAGCCGYWIARTLQQNNWKVLVVNPADVPRTNKQDWQKTDKIDCRNLCEQLQKSNVHGIHIPDEQQEQLRSLFRRRIHLARQLRTIKNHIKSQLLYYGIKLPEQFDNPNWSHEMKEWLAAIEWKFTSASITMKSRLKQLDFLWYEELHISTALRAYCRKHYKKDYYLLKSVPGIGGITAAGMLAELGDLRRFNRLDELTALVGLVPGIYQSSDNKVCLGLTKRTNRYIRSLLVEASWVAVRTDMALQAYYRKHSAKEPNKAIIKVAHKLLSRIRAVIISGVPYQSGVVQ

SEQ ID NO: 495237 - protein, 397 aa, unidentified
MARYMPAVGASADWLSNDLLAVGDLAGVWLERGLCMTDLKSGVPTPVPNDDTKETVVKVMIGADPHKGSHTAVAIDRDEAELAKSKVRASRRQVDELLAWATPFGQRTWAIESAGGLGLLLSEQLVAAGEHVVDVPATLAARVRLLGTGRSSNNDPNDARSVAIAALRAPQLAAVNRVEVVGVLRLLAKRNHDLGRARNRTACRLHTLLAELVAGGIANEINASSAERVLSDIEPTGPVQTTRHAVAVEHLEELRRLDTQMRDSKRRIADAVTAAGTTLTELFGVGPVVACMLIGYSGDVHRFGSRDRYATYNGTAPIEMSSGGRVVHRLSRRGNRQLNHAIHIAAITQIRFPHTDGRKLFDRKVGEGKTKKEALRVLKRRISDAVYRQLLIDAANR

SEQ ID NO: 495238 - protein, 302 aa, unidentified
MKKGSTAATMQSRNFSAQQKLTIGLDLGDRNSWYCVLDEAGQIQLEQRVRTNAKALQAVFGAMPRSRIALETGTHSPWISRLLSELGHEVIVANARKVRLIGESRKKDDRLDAQTLARLARIDPELLCPVKHRSAQAQADLMMIRARAGLVRARTGLVNTVRGLAKSYGERLRGCNVRNMNPDKAEGLSPELQRALEPLLSGIEELSERICEYNDRIEALAQESYPQVALLKQIKGVGTLIALTFLLTLEDPHRFHKSRDVGCYLGLQPGRRKSGQSEPQLHISKEGDPYLRTLLVQGAQHI

SEQ ID NO: 495239 - protein, 441 aa, unidentified
MKLQNLKMKRHFVSDKFVVGIDPAKQKHQAMILDPKGIPVGKSFSFKSSYNGFHFMLWQKLNALPVALNPENTAFAVEISINYWQKICHYLADKGYTVLMVRPITTKHERPRLNNFSRTDPKDALCIASSARQGYFNFYEKYDDEILGLHRLGITYDKLKKQIVIAKQRLRSEVEMLFPEFPSVLRLDTDTARYLLSKYLTAKDFSEINVLYEAIELVAVSRNHHGTATLKALKEAACKSIGLPLVSISYMAHRMSVNMWIEQIRMLKTQQYTLLREMSALAQKTPFFNILTSIKGVSEITATRFIAEIPQLGKNLHFKQVEAFAGLNLRLSDSGQYSGHRRISHCGNNRLRAILYKMTEETKNHIPEVRIRFLKRQIKKANYTKNITACTSNLLKIIIAMIRDNRCYHFNPEKVKEMETLDKKYQELKQKRKSKAFIKVA

SEQ ID NO: 495240 - protein, 377 aa, unidentified
MGDYSEAFIGIDTSKLRNAVAIADAGRGGEVRFLGEIENTSAATAKLVRKLAAKYERLTFCYEAGPTGYGLHRQIKGLGFECAVVAPSLIPKRRGDKVKTNRRDALSLAKLLRADELTAVWVPDGGHEAMRDLTRARETAMLDLRTKRQHASAFLLRLGKPYPESKKTWSKTHVSWIASQKLDHPQQRLVLEEMMLAIRQAQDRLARLEQAIAAAVPEWSLAPLVTALMAMRGIDLISATTLLAEIGDLSRFRTPTELMAYLGLVPSENSTGDTVKRGPITKAGNRRARRMLVECSWSYQHPPRVGQAKQPKVDAAPPAVREIAWKAQCRLYRRYRTLIRKGKLKTVAIVAIARELAGFIWAVARAATTAPVAAAPA

SEQ ID NO: 495241 - protein, 387 aa, unidentified
MQDETPRPAQAAIRTDLGAIFVSMELSRSNWLITSLSPGAGEKMSKHSVVASDVAGLLKRFGQLKLKARARTGQDFPIIIIQEAGLDGFWIHRVLESEGIESHVVDPASILISRRRRRAKTDKIDGETLVRTLLAYKRGEPRVCSMVKAPTPEEEDRRRICRERKTLVAERIEHVNRIKGLLFAQGIFDYEPLRRNRRKRLEDLKTGDGRPLPPHLKAQISRELDRLESVLTQLGAVEAERDALIEQASQDVSAPAAMLTQLKGIGPEFTAVLWSEGLFRSFDNRRQVAAYAGLAPTPWQSGSVDREQGVSRAGNPRLRTAMIQLAWLWLRHQPSSALSRWFHERVKLNGGRLRKTTIVALARKLLIALWKYATTGVVIEGAVVKAT

SEQ ID NO: 495242 - protein, 344 aa, unidentified
MENYAGIDVSLELSSVCVVDSQGKILKEAKVASEPDALVEFFETLGFAVNRIGLEAGPLSQWLHAGLQRAGFETVLLETRHVKAALSAMTVKTDRKDARGIAQLIRMGWFRAVHAKSIGAQEIRALLVARKQLLGRLIDVELSIRGILRGFGLKVGPVTRRNFEARIRELVAGQATLERIAIAMLSARSALKAEYGRLHKAVLATVRDDAVCRRLMTVPGVGPLVAITYKSAIDDPHRIVKSKAAGALFGLTPKKYQSGEKDVTGGITLAGDEIVRTVLYEAANVLLSRITRFSKLKRWGMDVAKRRGSKRAKVALARKLAVILHRIWVDGTTYRWTDAAPIAA

SEQ ID NO: 495243 - protein, 412 aa, unidentified
MSSAYRVTAAIDVHKKWLYVVVGQPDTAEREFSRCRSGSTSQELAVLAKWPHDLGVSTVVMESTAQYWKPVWAALEGEFTLLLAQARSNPAPHGRKSDYADAIRLMKRLWADDLRLSYVPEAEQRSWRLLTRTRVQHTREITRLRNRIEGLLEECRIKISGLLSDLLGASGRRMLRALIAGKTTDPQQLARLADKRLRAAPEELEQALNGQVGPVHRLLLGQLLDEIELLEEHLAQLDQCLLDRLEGQRDAIRRLCGVPGIGIEAAQLIVAELGPRAATFPTASHAASWVGVCPGRNESAGHSTSDASPKGNRQMRRILNQCAWAAVRSKDTYWQQLFRRLTPKLGVNKALWAVAHRLLRVIWLVLHEGTEYRERGPCAPDPERLRRRIERMLYELRKRGVHFQLTALAPST

SEQ ID NO: 495244 - protein, 342 aa, unidentified
MQITTIGLDIAKNVFQVHGIDAAERVVVRKQLRRGQMLAFFKALPSCLVGMEACATSHYWARELAKLGHQVRLMPAKDVKAYVKRNKNDAADAEAICEAVRRPTMRFVQVKSAEQQSQLMLHRTRDLLMRQRTQVINALRAHLGELGITAAQGQAGLRELLAIIAGSADERLPAEAHASLIVLAAELQAMRTLIASIEKRIIAHHRLDEASKRLRSIPGIGLVGATAIAATITDPKAFRSGRDLAAWIGLVPRQDSTGGKPKLGPISKQGDRYLRRILVVGAHAVLKLARQKPEKYPWLTRLLARRPFRVVAVALANKMARIAWALLAKGGTYRMPVLAAAA

SEQ ID NO: 495245 - protein, 428 aa, unidentified
MDFEVKHLICAGLDVHKKTIVAAVCMTDPVTLEAAYKVKSFSTNNSQIAAMRDWLLSYNCHDVCMESTGKYWIPVFNILETHMHVVLTHPKYVKAIKGKKTDKRDAKWIANLFRFDIVKASFIPPADIRALRELSRYRLKLSYMRSAEKNRFQNSMTISRIRIDCVLTDPFWKTASSIMDYLLSDVPFDETECAKLIHGRVKASNEEIFDSIRGFEILSEQRFKMSHAKQHMELLSSYMDDIETELFRLSRSYDKVIKRISGIVGFTERSALFVISETGADMGVFESAKHLCSWAGLTPANNESANKKKSTRCSKAGQYLKPLLIQCALAAVKSKKNPYYAIKYKRLAKRRGRKKAVIAIARMMLTSIYHMILNNEEWKPDDYEAIIHPSKPVKVALTLDNVIQFLGEQGANPETLKLLQQQCAVTPG

SEQ ID NO: 495246 - protein, 350 aa, unidentified
MGIDLGDKKSRVCIVDEQGQVVSQEWVVTTPEALLKRFHGDPAMRIAMEVGTHSRWASELLGKCGHDVRVADARQLALITNSNAKSDKRDARTLAQLLRADPRLLSPIEHRAENLQMDLTVIRMRDNLIETRTRLVSSIRGVVKATGARLPKCETASFPQQVGGVIPEPLRPALAPVLEVIDRLNEELYEYDCLLEHWARTRYQESSRLTQVKGVGTLTALTFMLTVGDKERFSRTRDIGSFLGLRPRLDQSGDSHPQLRITKAGDGLLRKTLVECGQYMLGPFGQDSDLRRWGLKMIEDGNGSKRARQRAVVGVARRLAVLLMSLWKSGQTYDPLRHSRAQESSQEAVA

SEQ ID NO: 495247 - protein, 418 aa, unidentified
MKNDDYAALVALDWGDQTHAFARQIGGADRLECGAIEATAEALHAWLEQLRETCGGRPVALAVEAGRNALLHALLEHPWLTVYPVHPATSARFRRAFTPSGAKDDGPDAVVLLTLLRRHRDQLEPLSLDTPATRELAALVAARRHAVDQRTGASNQLGSVLKSYFPQALTLAGDDLTKPLALAFLRRFPELAAVQRARPATLSAFYRDHNVRSAERIAERLALAARARALVQDRALIAPAVREVAWLVDLLEVHARHIAGLETRIAEVFAAHPRAALFAALPGAGPALAPRLLVAFGDQLARYPNAQSLQKYAGVAPVREKSGARSWTHWRWAAPKFVRQSFVEWAGQTVVHCDWAHAYYDQQRRAGKAHHAILRALAFKWIRILWRCWHDQTPYDEQYYLAALRRQRSTLAVALPKT

SEQ ID NO: 495248 - protein, 298 aa, unidentified
MESLSDANTEVGIRAIVKRLKKLAPTLIVLEATAGMEANVAAAIAAAGMAVAVVNPRQVRSFARAIGTLAKTDSIDAAVLSHFAEAVKPSVRTLPTAEARELNDFVSRRRQVVDMIVAEKSRLAGVCGVARADIQAHITWLEKRQKRLDADLQSAVKKSPIWLAKDDLLQSAPGVGPVTSLTFLAALPELGTLNSKQIANLVGVAPINRDSGTMRGKRRISGGRAQVRAVLYMATLVAVRHNPVLRTFYERLLAAGKTDKVALTACMRKLLVILNAMVKSQKPWSPQTAPPLAAAATA

SEQ ID NO: 495249 - protein, 349 aa, unidentified
MDIVGGFDVHRKQITFDYVEIETGEIHRGKIRPAERESLREWLAEFTESFSGKQIAIAVEATTGWRYVVEELERAAIEPHLAEPAETKSLQGPKKRAKTDRLDAGHLRDLMVIDRLPESWIPPDHIQEIRTLMRLRHSMIEGRTTHKQRIHAQLFHNGYPKQKNLDSIEGRAHLEEMELPAAARKVVDLSLAMIEHINEELEPIEAELVAYARAQAGCKVLMEHYGVGELTRVALLSELGDTRRFSSSKKAVRYAGLDITVSSSDDKRAAGKLSRQGPPVLRWAAFEVAKRAWRKRSLDHDYYLQSKERIGANRATLPIARKLIWRAHHTLRELGEQAISDPVYAGSSV

SEQ ID NO: 495250 - protein, 421 aa, unidentified
MPRKPQSLESSFAVLHSHCAALDVHKDSIMACLLTPGEGDEPRSEVRQFGTTTGELQALARWLLESGITHAAMESTGVYWKPVFNILEPVCELILVNARDVKQVPGRKTDVADCVWLAKLLRYGLLKASFVPELEVRELRDLCRMRTTQVREIVQVGNRIRKVLEDANIKLDSVASDLLGLSGRTMIQAIIGGEQDPAVLAGLARARMRSKIPELTLALEGRVRPHHRFLLKEWMWILDRLEEQILRLEQEIEKRMPPFEWAAALLADKPGFDRVSARNLIAEIGADMSRFPSARHLASWAGVCPGNNESAGKKRSGKSHRGNRWVKGTLTQIAWAASRTKDSYEAAFYKRLVPHRGKKRALVALANSTLQAVWHMLSKHQTYIDLGADYFETRHKEKLTRSLVKRLEKLGHKVTIEQAAA

SEQ ID NO: 495251 - protein, 432 aa, unidentified
MTERGELCRILYMEGKTMEKVYDKCCGIDVHKKLIVACLLCGKESEIREYGATTDELLKLSDWLVSAGCEMVAMESTASYWKPLYNVLEYSGLNAMVVNAQHMKAVPGRKTDVKDAEWIADLLQHGLLKASYIPSKDQRELRELVRYRKSLIEDKGRELNRLQKMLEGANIKLSGTVSEIDGKSARRILDFIVNGETFTEEKYDEMYAKKEISHNLKASKEQILADLKGFLSPLQRRMMKELLAHLDELNEHIKNLNDEIDNFMKEDEVEASKAIQQIPGIGNSSAQAIISVIGTDMSRFPTDKHISKWAGLCPGDNESARKRKSGRTTKGNKVLKTTLITCAHAAVKNKNSYFSAQYARISAHRGKKRAIIAVAHSMLIAIYHMLLEKVGFHDLGSGYYNQFNKERKANSMIKKLKELGYEVTVATPVLTA

SEQ ID NO: 495252 - protein, 331 aa, unidentified
MADVSELTMQEPIFVGIDVSKDTLEVALGESAKTQTVGNNEAGMAELVAQLKPLSRRIAVVLLEATGGLEQLAASALCAHGFAVMVVNPRQAHDFAKALGYLSKTDSIDAKALAQFARTLHSSDKRERLLYKLPTPEQEVLLALVTRRAQLVGMRVAESNRLASAHVSQRKSIERHIKMLDKEIGQIDDDAQQHLRGHFRDKLALLKGLKGVGAGTQTMLMAALPELGTLKHREISKLVGIAPLNCDSGKFKGKRITWGGRANVRAALYMAALSASRYDPTIKAFYERLVLAGKPKKVALVACMHKLLTIMNAIIKSGKPWQASYPQPNIA

SEQ ID NO: 495253 - protein, 481 aa, unidentified
MAKRGMSTFERLRSGGQLSRQQRRELQQRLSAADPGLEIVHRDAAGIDVGSKSHFAAVPAGRDEQPVREFGSWTADLHRMAAWLKACGIRTVAMQSTGVYWIAVQEVLEQAGIEVYLVNARGTKNLPGRKSDVQECQWLMKLHTYGLLRNSFRPPEEIRAVRTIWRQRDRLVQEAGRAIQQMQKALTTMNIQLANAISDVSGVTGLAIIRAIVQGERDRWKLAELRDRRIRASQEEVAHSLEGNWREEVLFELGQVLEGYDFYQKQMAACDQQLRKYLAELPDRKGSGAAEGEGAAAQGPGKKRRKSKPRRKNQPSFNLEAELHRILGVDLTRIDGIDIITSQVILSELGADLSAFPSEDDFSSWLELVPRRNITGGKVIQQKSRESKNRVANALRMAAESLSNSDSYLGARYRKYRGRMEGKKTVKTMAHYLACLVYRLLTKGQEYVDRGAAYFEKKRTEREMVSLKRKAAELGMQLVPA

SEQ ID NO: 495254 - protein, 360 aa, unidentified
MGTYYIGADVHSNSTELAIEKRGKIVAQYSVPTSIQAITNVLDSIQGKKYLAVEEGPMSGWLYRNLNKKVDSFISSDPRRNKLIASDGDKDDKIDAAKLAALLRGGFLRAVYQSDDDDRAQLKHWVSLYHDRVRDAVRNINKIRARCRMHGVKITRAALRNPDSRPKWLAETNHKALAAQLTMLWIGYDATVQQVKFARRQLNILSKKYEMIQFFSQLPGIGLIRAATIFAYLDTPWRFKKKNKLWKYCGVGLQRTTSGTDKKGRPRPARLKLPWAVNRALKNAVLGAAQSAINHKDNAFRDYYERMVQDGMITSNARHTVARKMLTVMWAMWKTNSRFNEKIVTADAVSNKSAVSALSR

SEQ ID NO: 495255 - protein, 418 aa, unidentified
MEEYAALIAIDWADKQHAISLYDCTTGRREQAVVKHTPATLRQWVFSLRQRFEGRRVAVCLEQARGPLVYALMEYDFIVLYPVNPVTLAKYRQAFSPALGKDDPTDADYLLDLLQYHRDRLRAWHPEDAAIRTLRLLVEQRRRLVHDATRTSNRLTEALKAYFPLVLSWFSDLNTTLVCDFLERWPSLERLQRARPATVLKFLRTHHSVRQATNERRLAELKAAVPLTSDVAILQTGPLQVKALVTQLRPTLAAIADYEKQIATLATSLEDYELFASLPGAGPLHTARMMAGFGTDRTRWVRVGELLCYSGVAPIVERSGKHYLTRWRYFCPKFLRQSFVEYAAESVKHSSWARAYYDLQLSRGKEHHAAIRALAYKWIRIIWKCWQTHRKYDETIYLNNLRKRGSFLLSFMAATSQS

SEQ ID NO: 495256 - protein, 389 aa, unidentified
MKIFVGIDIAKLNHFAAAISSDGEILIEPFKFTNDADGFQLLVSKLESFDKNSIIIGLESTAHYGDNLVRYLVTELYQVCVLNPIKTCQMRKNNVRKTKTDKVDTFVIAKTLMMQDDLRFITFFDLDMMDLKALGRFRQKTIKQRTRLKIQLTTYVDQVFPEIQYFFKSGLHQNAVYALLKEAPSPKEIASMHMTHLANLLKVNSHGHFTKEQAKELRILAQKSVGANDSAISIQITQTIQQIELLDSQLEKIEAEMTDIMKFNDSVIMTIPGIGYINGGMILGEIGDIHRFSNPNKLLAFAGLDPSVYQSGNFQAKTTRMSKRGSRVLRYALVNAAWNVVRNNATFKAYYDAKRAEGRSHYNALGHCSGKLVRVIWKMLTDEVEFNLE

SEQ ID NO: 495257 - protein, 349 aa, unidentified
MNYYAGLDVSLEETAICVVDGSGLIVKEVRAASEPEALIAALKAIDVPLERIGLEACSLTAWLHDGLRGAGLPAICIETRQANAAMKTMPNKTDRNDARALAQIMRTGWFRAVHVKSRQSRLWRSLLVARRTLLNERRAIENVVRAVLREAGFKLGRPSCAAFAGRVRELAGDDPTVRPIVEPLLAVLATMLEQLARLTKQALAITRREEVCRRLMSVPGVGPITALAFRATIDRPERFRRSRDVGAHLGLTPRRYQSGETDIVGRISRCGDELTRTALYEAAHSLLVRSRKWSALRAWGMKIAKARGMARARVAVARKLAVILHRMWSDRTAFRFGREPAAVAVLAVA

SEQ ID NO: 495258 - protein, 337 aa, unidentified
MGEVITIGIDLAKNVFQVHGIDKKGDVIFSRQLRRSQVLPFFKKQQPCLIGMEACATAHHWARQLIELGHEVNLMPPHYVKPYVKRNKNDAADAAAICEAVTRPTMRFVSVKSMEQQSVLMLHRTRELLVRQRTMLINAIRGHMAEFGIVAPGGVPQVKKLLSIIADRDDVRLPPIARTCLESLARQFLSLHGEIYAAEKHIHVWHRSNEVSRRLETIPGIGPIIASALTASITDPEVFKNGRELAAWIGLVPRQNSTGGKQRLGKISKQGDQYLRWLLVAGAMSVILHAKRKGATNLPWLADIIARKPTKVAAVALANKNARIVWALLRQGETYQS

SEQ ID NO: 495259 - protein, 287 aa, unidentified
MSITIGIDVSKLKFDVCILKSDGTKTHIEFDNKKTGFEKLYKCLKSQSDKHFALEATGIYGENLCAYLYMKKQSVFLLNPVQTARYFQCMMRRTKTDKCDAINIAMFLNHHKDELTPWKPRSKTFNTIKNLHHCLQDLNCDRKRVLGRIEACTYTDQDGRAQALKHYKKQKKFYDAQKEFVLKQLRLLVNDDLEVKAQYDLLISIPGIGEITVFGLIANLPDLTRFKCAKQLAAYAGLNPGVHESGSSVRGRGSISKTGSKTLETFYICQHWLAKSVVNLCLNLPIG

SEQ ID NO: 495260 - protein, 345 aa, unidentified
MNKISVIGLDLAKNVFQVHGIDLHGEVIVRKQLKRSQLRQFFAKLEPCLIGMEACGGAHYWSRELSGLGHTVRMMAPVFVKPYLKTNKNDRNDAEAICEAVQRPSMRFVQPKTPEQQAVLHLHHGRRLLVRQRIALSNHMRGVLSEYGIVMPQGAKAISQRLPALLEDADNDLPMLVRHLLAELKEEYDQLIERIERLEGQIKAWHANNSVSQRLASIPGIGVLTATALAATVGEGQDFSNGRQLAAYLGLVPRQASSGGKARLLGISKRGDGYLRGLLIHGARSVIYHIQRRLKTSQPGGNPWVEQLLLRCHPNEVAVALANKMARIAWVLLSKNETWCPARPV

SEQ ID NO: 495261 - protein, 340 aa, unidentified
MSLYGGIDLHANNSVIVFINEQDEVIYQKRLPNDLSTILEQLAPYHTEVKGLVVESTYNWYWLVDGLMEADYRVHLANPAAIQQYSGLKYTDDHSDARWLAHLLRLAVLPEGYIDPKAERAVRDLLRKRAHVVRQHTANVLSVQNIMARNTGARFSVKRIQELTKQELTTLLAEEPQVLAVTSSLVVLDCLRQQIKMLEKTVHKRLNHTPSYEQLLTVDGIGTILAQTIALETGTISRFPTVGNYASYCRGVDSKKISNGKRKGTGNVKNGNAYLAWASMEAAQFAMRFQPAAQRFYQRKLAKSRNNTVLARKAVAHKLARACYYIMRDLVPFEATKAFG

SEQ ID NO: 495262 - protein, 443 aa, unidentified
MNTPHPYDLVIGLDRSDRKADLHLIDTRTGQHRSATIDTAPEALWEWLLALRQQHPQARVALCLEQPAVHLIAFLEAYEWIGLYPINPLSLQKFREAFVTSRAKDDAKDARYLAELLLTHHDKLKPWAPQDSQTRAVQQLVFHRRAVVDERTGLTNRLQALLKQYFPQALVLCGEDLWRPLATRCLLKWPSLQAVQKAKPATLKQFYYLNGSRSTQLLEQRLALIEKAVPVTDQTALIQSFVLRVQLIGRQLQLVQQTVGHYDQQIAQTFTQHPDHPIFASFPGAGPVLAPRLLSSLGSQRERFEAAANLQQYTGIAPVTKQSGGKCHVHRRYLCPKFHRQSFHEYAQISVLWSRWAAAYYLQQRTKGSHHHTAVRALAFKWQRIIWRCWQDHKPYQEKIYETALRKANSPLVGLLDKIQLGKSPCKPPAKKIEKPLAGSPQR

SEQ ID NO: 495263 - protein, 358 aa, unidentified
MPESIPYLSVGLDVGADFSWMSIMLPNGSLAGKPFKILHSDPDSRNLAAAKIKEAQETYSLESRCFLESTGIYHIPLLCFLRDKGFDCSVINPIITKNTTNMNVRKLHNVIFDSKKAAKVGLDVSLKTSIIPEDAIVDLRNLVRDYYYFKDLQSSIVLKLNAELKVSFPAYLGVFSKITTQTSLKLLEDYPLASDMLNAPKDELVKIIRTTALFGEKYAMAKYNALCSAARDAAVFGRALPSNAVRIRLYIDSYREYQKHLDTILEALHESVDKLLGTAVYNRIRLLQSLRGAGFLSAVVLIAEMGSFDLFPSPKKLYAYFGLDPAVKQSGKFKGGQSAYVQERFQPRQAHPSHDSAQ

SEQ ID NO: 495264 - protein, 350 aa, unidentified
MLIIGCDYHPGFQQIAYVDSETGELQERRLEHPEEAEKFYRELATQGMKVRVGMEASGHARWFERLLAELNFEVWIGDAAEIHRKRERKQKTDRQDAQHILRLLLKDDFPRIWVPSWENRDVRQLLWHRHRMVQARTRLMNQLQAVALNEGLRCKKRLWREAGRQQLEAFWLAPWASRRRQDLLELLDRLNPTIAELTQAIEREAEKCPEARRLQTHPGVGPLTALAFVLIIGKADRFQCGKQIASYLGLVPLEDSSGSRRRLGHITKQGNSLLRFLLVEAAQVTVRSDPGWRSKYHHLMMRRGRKIAKVAMARRLAVRMYWMMRKGWNYEQLKKFGSHAGQLVPGDGVK

SEQ ID NO: 495265 - protein, 342 aa, unidentified
MKKISIIGLDLAKRIFQVHGVDEQHRVVVQKSLQRLELLDWFGQLEPCLVGLEACATSHYWSREIRKLGHDVRLIPPAYVKPYVRRQKNDRADAAAICEAVSRPSMRFAGIKTIGQQTVQVLHRTRELLIKQRVQLSNALRAHLAEFGWIFPQGNSGLDQAISFVKETHDAELPTALWDILLCQVEQLARVRAAIATLGKQMACWHRADGDSKRLATIPGVGVVTASAILASIGNGKQFKSGREFAAWVGLVPRQNSSGGKEKLGRISKQGNRYLRQLFVAGATAYLRGKRCEKAAGGSIWFSQLLQRKPGRVASVALANKMARIVWAVLTTGEYYRASTAV

SEQ ID NO: 495266 - protein, 408 aa, unidentified
MNPLFVGIDVSSKNNVVYLMKPDGSKHSSFSVQNNLGGAKLLSERIVSALGSMQLERVVIGLEATSIYGDSLVYALREDGHLGRFQRKIHVLNPKQVRKFKEAYPDLPKNDWVDAFVIADHLRFGRIAREVYMDDYRYKALQTLTRARFDVIQNLTREKQRFANYLFLKCSGMAQDKGIQNTSSTTIALMERFETVDDLANVDLDELTAFVAKAGHGRFVDPESTAKAVRAAARGSYRLPKTVNDTVNQAMSVSIASMRALKEQIKVLEKAIEQQFEIIPNTLTSVPGIGKVYSAGIIAEIGDIHRFESQASVAKFAGLVWNRNQSGDFEAEHSRMIKSGNRYLRYYLLEAANSVRRCDSEFRRYYDLKFKEVNKYQHKRALALTARKLVRLVFRLLKDNRLYIPPEG

SEQ ID NO: 495267 - protein, 346 aa, unidentified
MTIVEDRRAITGGVDTHAGTHVAAALDSIGGLLGVREFPATAAGYAGLLGWLAGFGTVALVGIEGTGSYGAGLARHLATAGIRVVEVDRPDRQDRRRDGKSDPLDAISAARAALSGRAAGAPKGRDGQVEAIRALMVARRSARAGRTQAINQARALIVTGPEDLRARFARHTAAQLVAGLAALRPRPGDVPGCATRAALRELGRRARFLDAQITRLDDLIIPLVTGRAAGLLALPGVGPHTAALLLIAAGDHPGRLRSEAAWAHLCGAAPIPASSGKVTRRRLNPGGDRQANHALWRIVITRMSSHPATRAYVARRSQEGLSKPEIIRCLKRYVARQVYPHLRGTG

SEQ ID NO: 495268 - protein, 344 aa, unidentified
MIWVGLDVHKRFSRMGIFDPATGDLQDLGEVSNDREALRVRLEQVASPRTVVLEAGRSSYHMAGLLESLADEVWIIDAAELRRLQHRVAKTDRRDAAALAWWAAKGALKPLWRPDRQVLELRELTRGRTALTRLATQLRNLIRSLLARHGYECPHRDLLSARGRAWLDTVTLEGYAGELFAAFRELLSLIQEKADGFEQKVEVAATDFPAAQRLRTIPGIGPVLGLSLAVEIGDVSRFPSPGHLRGYSGLTPAVSQSGEKEARGPITKHGNKWLRHTAVLAAQRMSQMHQADPGIKRTFLSVAFRHGRNPGKVAAARRLLDLSYHLLKKEADYQAPRARTAPTV

SEQ ID NO: 495269 - protein, 419 aa, unidentified
MTRKDDSKIIRIVHPICCGLDVHKQSVSACIIFPGGNGEEQCEVKVFGTFTDDLMRLREWLLEHDCPVVAMESTGVYWRPVHNVLEDTVQVVLVNARDIRNVPGRKTDIGDSKWIAGLLRHGLLKGSFIPPQTVRQWRDLTRLRKKYVQSAGDYRKRTHKLFESANIKIDSVVSDLFGVTGRNLMQLLVADRKLTLAEIQTCVRGKLRGKEAELFRSLQGFFTDHHRFVLKTILETINMLEAQIETLDQEIRRAIKGHEPLLARMKDAPGISDVSSCDILAEIGPTPESFPTDRALVSWSGLCPGNNESAGKRKSGKSPVRKHHLKTIMLEVAWAAVKKKGSYFKDKYYRLKARRGAKKAIVAIAHRILLGIYHVIKDGTKFRDLGEDYLTCRNKSQKIFHLRKQALAMGFDLVPQAAQ

SEQ ID NO: 495270 - protein, 354 aa, unidentified
MRKMQNYIVRNKQIFIGLEDSKRTWKICVRADKRIVHETSMPAKYKVLYSYLTRHFPECPISIIYEAGFKGFGLYDRLNNDGLQCFVTPPNKVTQEKDNRVKTDRVDARRLAVILENGDYKTCFIPDAEQREDRQVSRTMIQVQKQLTSTKNRIRKFLEFHSLDENFKPGKWSQRDYDNLKELQLSDSLQFCLNIYLKQLDDLLSLKKQLMKKLKEISKKERYSVIFQLFMSAPGIGWLTSIRLVLEWGDDLSRFKTSKHFASYLGLTASEYSTGITIRKGRITKQSHAFVRAWLIQCAWAACRKDPVLLNKFDTVWRHSGNKKIAIVAVARKLAVRLRSISLSGIPYSVGLVE

SEQ ID NO: 495271 - protein, 320 aa, unidentified
MSNLSDEIWVGVDVCKAQLDVAVGEGGETWSSDNDEQGIARTVARCKLLQPRLVVVESTGGLESSLVSALYLAGVPVALVNPRRVREFAKAAGLLAKTDKLDARLLVRFAQAVKPAPTHLPTQEEQLLSAMITRRRQLIDMRTAETNRLPTAHVSMRPNIEALLSWLSEQIKELDRKIDEFIQNQPDFKAKDDLLRSTPGIGPVAAAIIIADLPELGKLGRKKIAALVGVAPFNDDSGFRKGKRRVKGGRPDVRSVVFMSTVSASRFNPIIAAFYNQLLKRGKFKKVALVACMRKLLTILNAMLRDNKPWRYSSLSPNAS

SEQ ID NO: 495272 - protein, 450 aa, unidentified
MRIFIGIDIGKEYNYASFLNNEGMEIDKRFKFKNNHLGFISFKDNIDKLTYDCNFNYDDVLIGFESTGHYWINTDWFLTEKLNIKTVMVRNDAVRHTRALNSQGKGKNDSLDSRTIAECLKNGYYFDVQGRKEDYIVLRRLTRERTELEKEIARYKNRYRAWLDVNNQIFLENFSNVFSTGAFSLLKVYPSPLDIIQDSYLEVREKLKEVGYNRTNNTFKIYYEEAKTYKNIINGITYADRLEINEYIEALEMYMKKKESLDEKIEALMNFLEGKVYTSLSEVKGMPKAQVASLLAEIGNVNNFKSARHLISYAGLNVQGEGSGKNKGYSWISKTGNRRIRKEIYVITFTLVKHNDYFRGLYCYYKSYKRPNEKSNKEMLIALACKILRVIYGMLKYNVEFDLNEMLKNYDFRNINKEKFIDEFLGSSEKKQKIISQEIEDIFLNNRKSN

SEQ ID NO: 495273 - protein, 429 aa, unidentified
MRTESTPGARGPVFCGVDTHADSHWLCVLDWRGRRVLSRRFPADAAGYEALAGAIAAAGEPACVAMEGTSSYGAGLTRHLASLGMPVREALSPARTQRRRPGQGKCDESDAERAARAAMSGSKLGTPKSQDGWVDGVRCMLAARSGAVKARTSAINTARSLLTTAPEGLRSRFRGMGGPRLMEELPSVRAEGALGAALGALADLWAAARDAALDMELAIEASLEENCPALLAMYGCGPVSAAKLAVAAGDNPGRLRSEASFAAICGACPIPASSGKTVRHRLNRGGDRQANSALHEIARQRVMRDPETAEYAERARARGKSDREVMRCLKRYVAREAYRALMRPHEIRRPEDASELVAARRAAKVSQVRAASILGTSEKYISMLERGQRELKPIRRAYEAWVEAGLPLDWDRQAFEAERKMDSKKHLAK

SEQ ID NO: 495274 - protein, 344 aa, unidentified
MKHIAIDLGGMESQVCVRDSDGAIQLERKHKTRDLDLFLGGREKSRVIVETSAEAFKVADAALAAGHEVRVVPATLVKSLGVGSRKTKTDVRDAQILSEVSCRIDLPSVHIPSQLSRERRSLCTLRESLVSARTQLVNSVRGYLRTQLIRIPTGRTETFPDRIRKLLEPRPEGLPTMVDRLLASIATLNQQIVLADRELESIAEADPTCRRLMTVPGVGPVTAVRFVAAVDRIDRFQNAHKVEAYLGLTPGEDSSSTRERRTGITKAGPPRLRWTLTQAAWCLWRTRPQDPNVLWAQNIERKRGPSIAIVALTRKLAGILFAMWRDDSNYNPSHRAPPEAAVKP

SEQ ID NO: 495275 - protein, 321 aa, unidentified
MGKEPDMSETKIFVGVDVSKARLDVAVRPSGDMLTVRHDESGIAGLITRLQAWQPTAVVLEATGDLECTVVSALAAAGLPVHVVNPRQVREFARATGRLAKTDALDAQILAQFGEVLRPAPRALPDEATQALSAALARRRQLLEMLIAEKQRHSQAAARLKPGIATHIAWLTAELQRVDADLTLAIRQSPVWREQDDLLQSMPGVGPGLSRTMLAELPELGTLSSKQLAALVGIAPLNRDSGTLRGKRTIWGGRAVVRTALYMAALAATKWNPVIKAFYHQLLARGKAKKVALVACMHKLLIILNAMVKQRTPWRATAQQA

SEQ ID NO: 495276 - protein, 368 aa, unidentified
MEKDTTTYVGLDDSKRRLVVAILRPGEREPEQREMPKEPHLIQRLFRRLTREGTVAACYEAGVSGYDLHRQITACGVACQVIAPALTPRRPGQRIKTDRRDAVKLVRLFRAGELTAIHVPDEAEEAVRDLLRCREAVRRDVLRWRHRLLKFLDRHGRLYVSGKNWSQRHWDWVRAQTFAVAPLQRTFEATLFALEQALAHQAELEKEIEALAQQPPYAEPVGWLRCFRGIDTLSAMILVAEIVDFQRFRRPRELMAYVGLVPSEYSSGDTERRGAITKTGNAHARRALVEAAWHYRHRPTLGRALAHRSQGQPPDCLAHAWRAQQRLHRRYRHLVGHGKRPPVAVAAIARELVAFIWAAMTRRPTVAA

SEQ ID NO: 495277 - protein, 392 aa, unidentified
MEAVTSQPHTPTAIRTDLAAIFVSLELSRSTWLITSLSPGNGEKMSKHSVAGGDVAALLHRFAQLQEKVRSRTGNQVPIVSIQEAGLDGFWIDRVLKANGIESYVVDPASIATSRRRRRAKTDKLDGEALVRALLAFKRGEPRVCAMVNAPSPEEEDRRRLCRERKVLIAERVKHVNRIKGLLFGQGISGYEPLRKNRRKQLDELHTGDGRPLPTHLKTQISRELDRLELLLEQITAVENERDTLLAAQKDSVAATLIPAGAMLCDIKGIGLEFAAVLWTEGLFRHFDNRRQVAAYAGLAPTPWQSGTIDHEQGVSKAGNPRLRATMIQLSWLWLRHQPQSALSQWFTARVQSSGGRMKKSTIVALARKLLVALWKYVTAGVVIEGAALKTA

SEQ ID NO: 495278 - protein, 447 aa, unidentified
MIKIGISLLLIVLQLPMKGGDNMKNKILSTLFVGIDVSSKTNVLCALDFQGNKLLNLKASNNNPGAESMSKSIVECLISNKLNYAVIALESTSIYSVHVANFLSSHEELASFEPKVYCLNPKTIVNYRKSFVDMDKTDPLDAYVIADFARCGRITSSPWRGSQFLALQRLTRHRLHLVECITREKTYMVSNIYLKFSQLAVLDKDDKPFSNTYGATSAAVLTEFLSLDDITYSSIDDLVDFVKEKGKNRFINPDETAKLLQKAARDSYRLDKVLYEPLNVSIASSFNLIKAFETEVKTIDKAIEKNIKGINTTEYQSLKSIPGIGPVLASGILAEIGSISVFDSHNALAKYAGLTWRVNQSGDHTSDNTSMTKTGNKYLRYYLIEAANSVKNNSPEYKEYYNKKFGEVTTHQHKRALALTSRKLVRLIFGLLTKNQIYSNDKVGETQ

SEQ ID NO: 495279 - protein, 317 aa, unidentified
MSNNELFVGIDVSKAELQVATRPESKPVTFANTEDGIAFLIDYLKPLHPHIVVLEATGGLEIPLVNALAVKQVPVVVVNARQIRDFAKAIGRLAKTDRIDAEVIVQFAEAIRPPLRPLKDEQTQRLHALNTRRRQLVAMISSEQNRLGSAPTWTQKEIQTHLTWLKKALEKMDKEISDLIKGSPIWREKEAILRSFKGIGPVTSATLLAALPELGTIGSKPLSALIGVAPLNRDSGKFRGKRVVWGGRDKVRSVLYMATMAAIRFNPVINAFYTRLRDAGKPHKVAITACMHKIIITLNSMIKNRTQWRSPVIEKCL

SEQ ID NO: 495280 - protein, 373 aa, unidentified
MNEFSKYVGLDVHKDTIAVSIADAGRTKARFYGVVENTCESVSSLLKKINRDGELLELCYEAGPCGYGLYHQLISSGHECLVVAPTLIPQRASDKVKTDRRDSLRLAELLRAGELTPVWVPDAEQEAIRDLVRTRDDFKTSQRQVRQQLLAFLVRHSLRWSGGKKNWTKGFWYWLEAIQMPNPHQQYALKEYIDAVRRCGDQIQGIEKQMLAAKNGWSLEPIVDGLMAMRGINLVTAMGIVAELGDLSRFSKPTQLMAYLGLVPSEHSSGNARRQGGITKSGNGHVRRLLIESAWCYRFAARKSREIEQRAQKTSTEVQAIAWKAQKRLCARYRALSERGISSCKVVTAVARELSGFIWALVQQVRLQQAATR

SEQ ID NO: 495281 - protein, 392 aa, unidentified
MYIIGIDIGKNHHEASIVSPKGKQIGHSLCFATTHKGADSLMNFIFKNIGDSPCVFGMEATGHYWYPIYSFLKAKGYTIYVINPIQSDSLRKMYIRQTKNDSIDSFLIAEVIRFGQFSTTSMADENILAMRQLCRYRDSVISSRTEIKLRISTIMEQIFPEYEKQFSSLWLSTSMGILEKYLTPENIQNAPLDELYGIIKDKSHNRLTMDKALSIKEAAADTFGIKIAQEAFSFQLKQLIDRMHFLDQQIEALDCQILGYYEKYDCYLHTIPGIGMIGAATILAEIGDTKRFKSSSALVAFAGIDPTVRQSGEFNSIHNHMSKRGSPYLRHAIFLAATTCSFHNSPLNAYYKKKRDQGKHHLTATGAVARKLTTVIYAVLRDGKPYEPKKFC

SEQ ID NO: 495282 - protein, 335 aa, unidentified
MQVNHFIGIDVSKNTLDISVVTDGKTVYYQQIANTVKEIKTSICHIVEQLQTSFNEVVFCMEHTGIYNLPMVKWLQTKEAKIWLESGLHISRTLGLVRGKNDKIDSNRIAMYAFANRHQIKLWKAPRPVIEKITALLSQRSRFVKVKKQLSTAAAEQALFMHKDITKSIQKYTDKTVQVIDKQIEAVEKEIMTLIKEDENLNRLYQLITSVEGIGFVTACHMLSTTNEFINIKEAKKYACYAGVVPFEHRSGTSVRGKSRVSKMANKGIKTLLHLAATSAIRMEGDLKQYYHRKVAEGKSKMSVLNAVRNKLILRVFACVNQNRKFEKNYVHNFG

SEQ ID NO: 495283 - protein, 294 aa, unidentified
MHPSGATRQVTNDKAGHKALLRWFSRLRVERIVFEATGPYHRLFERALTAAGLTFAKINPRQARRFAEATGRLAKTDRVDAAMLARLGALLQPEASVPKSDVLDELTELVAARRALVKDRTACLNRAKVLRIQLLKSQTSQRLRQIEAQMAAVDRLCLELVTSDQTLAERLVILPSIAGLGEARAVAILADMPELGEIEPKQAASLAGLAPMARESGQWRGKSFIRGGRAHVRQALYMPALLAMRFNEPLKTRYEALIQAGKPPKIAITAIMRKLIVLANALLRDARPWTPAAP

SEQ ID NO: 495284 - protein, 316 aa, unidentified
MSSPQLFVGIDVSARRLDVAVLPGGTHFTLANTDSGIASLAGRLSDLNPQIVVLEATGGYELPVAYALFEANLPVVIMNPKVLRHFAKATGRLAKTDKLDAQVLAHYAQAIQPPVRPLKDREQAELAMLMSRRRQLRDMIVMEENRRRTTTPRVQGNIDQHLAYLRQLLKDLDQDIHDAIRRTPLWHDKAEILQSFGGVGPKVSAALIADMPELGSLPSTKASALAGLAPMNRDSGLYRGKRKTQGGRPAVRQALYMAALTAARHNPVIRPFYQRLRQAGKPPKVALTACMRKILVILNAMLKNRTYWNPQLPQAA

SEQ ID NO: 495285 - protein, 411 aa, unidentified
MQVIYERCCGLDVHKRTITACLLKWLGSGWQKELRQFGTMTKELLALLDWLVSEGCTHVAMESTGVYWKPVYNILEGQFELLVVNAQHLKAVPGRKTDVRDAEWIAELLAHGLLRGSFVPPPSVRELRELTRYRTSLVRDRARTLNRLQKVLEAANIKLASVVSDIDGVSARLMLEGLVAGQRDTEELAGLAKGRLKEKHAQLVEALSCRLQPHQSFLIAEHLAQIDYLEGAVERLSGQIEEKLRPFEQQISWLDTIPGINRRTAEVLWAETGGDMSRFASARHLASWAGMCPGNNESAGKRRSGRTRKGSPWLRHCLVEAAHGAAHTKNRYLSSQYHRIAARRGKKKALLAVGHSILVIAYHLLTRKQAYCDLGANYFDERDRQAVTKRCVNRLQKLGYQITLEKLQMAA

SEQ ID NO: 495286 - protein, 411 aa, unidentified
MEVLFTHCAGLDVHKKTVVGCVLVPDPTGGVRKVTRTFATTLAGLEELARWLLGFDVTHVVLESTGVYWKPVFNVLAPQCEVWLVNAQHVKQVPGRKTDVGDAEWLAQLMRCGLLGRSFIPDVEQRDLRDLTRYRTRLTEERTAAANRLHKILEDANIKLTSVVSDIQGVSAQAMLQALIGGESDPAVLADLAQGRLRAKLPALEAALTGCVREHHRFLLGELLQHLEHLSQCITTVNARIREVTAPYEAIIQRLDAITGVDRYTAEVILAEVGPNVTPFPTAKHLASWACLCPGNDVSANKRRSGKTRHGQKWLRAALVEAAWAASRSKDTYLAAQFQRLRVRRGDKRAAVAVAHSILTIVYHLLADPNVTFSELGGDYFVKKNPEQERRRAVKRLEALGFQVALTPISG

SEQ ID NO: 495287 - protein, 355 aa, unidentified
MGYLTIVALDLGKFKSVLCVMDVTTRTHRFSTVESTPAGIRDAVRPLVSSDPAQTLVVFETCDTCGWVHDEVAPLGVKIVIVNANDERWRWQRVKRKTDQDDALKLARLALLDQLPMVHLPDPQQRQRRRLMIHRRSIVSRRTQCRNAIRSIFSQQGIALARGQKQWTIAGIEQLQGHARPIEACSIDELWKGRLNSELLLMASINTQLKALDNKLDELADPRMKLLQTLKGVGPRTAEAVVLYVDDPKRFKSGEELASYAGLVPKQLQSGEMNRLGHITHRGPGLLRSMLVEAAWTIYRHNAWAQVFVNKISHGSKARRKLAIVALAKKVLIILWGMLKSNQPFRSPLTAAGVD

SEQ ID NO: 495288 - protein, 360 aa, unidentified
MQLITIKKGGIIMNYIGVDLHKNNSYFYILNKNGNKVLNKRLSNNINQLKQFFDKVEKPFKLAVETTYNWYFFVDLAQEYSDEIYLANSYELKAFAKRNKKNDKIDAKLIAELLYQGYLPVVYIPDKATRKVRELLRYRMRTVRDRSRVIVRFKSLLDRLGYDSNGNYTTYKKLEEINPSTFDKPYDTIMTNYLDRIYYLNKHIKQLEKNLEEIIIKDKRIEYLLSIPGLGHFGSALILYEIIDINRFKTFNRLCSYAGLAPRVSSSDKKIYYGKLSKNRAKNLQWILLETVYHFIRMVPGKKDRYEQIKKRKNANIAKVALAREMLKIIYKVLKENRYFYYKKENKIQSVSGRIFRSAA

SEQ ID NO: 495289 - protein, 372 aa, unidentified
MQQNTTYVAFDTSKETIAVALAEGGRRGEVRFFGTIANRPEAVRKLVDRLTGRHSQLAFCYEAGPTGYGLYRQIQALGHPCQVVAPSMVPVRPGGHIKTDRRDATTLAALFRAGELTAIWVPDAAHEAMRDLVRARHSAMEGVRRARQQLLSFLLRHGRIYPTKRHWTRAHRRWLAEQRFEHPAQQIVFEELIQAVEQVMARRDRLEQQMIALVPNWSLQPVVAALQALRGVAMVAAIILAAEIGDFRRFANPRQLMAWLGLVPREHSSGASTSRGAITKAGNSRARRLLIESAWTYRLPARIASQLLARSAALPEAVKAVAWKAQVRLCARYRRLRCSGKPTNVVTVAIARELAAFAWAIAIIVMPAPQTT

SEQ ID NO: 495290 - protein, 465 aa, unidentified
MRTDKKLWRSRKAKKELARRLQAENPGLEVVHAHAAGIDVGNGAHYAAVRPDRDSQPVRRFECFTADLYRLADWFESCGVQTVALQSTGVYWIPLYDILEERGFQVYLVNARHTKNLPGRKSDVQESQWLLKLHTYGLLNNSFQPPSKIRILRTYWRQRLQHVTGAATCVQRMQKALTQMNIQLANVISDLSGVTGQLIVRAIVGGERDPRKLAELSHPRIQASRGEIAKSLEGNWRQELIFVLQQEIQMYDTYQRRVAECDQELQKHLSAFADTVSPPGKEELPPKKKKKQNKNNPHFHLAAELQRVTGVDLTRIDGVDVMVAQTLVSEVGLDMSRWKTEAHFASWLGLCPDNRISGDKVLGRGTRHVLNRAATALRLGASTLLRSQTYLGAQYRRLRTRLGAPKAITAMAHRLARLVYRMLKYGQHYVDKGAEYYEQRNRQQQIEFVRKKAAQLGLQVTPACT

SEQ ID NO: 495291 - protein, 345 aa, unidentified
MKIKTMGIDLAKSVFQVCAMDKRGRVLFNKKIQRNKLLGFVEKQEWEENALVAMESCGGAHHIGRQLGQKGYRVKLISAKFVKPFVKSNKNDAKDAEAISEAASRPNMRFVGLKTVEQQDIQSVHRVREGYIKRRTVVANEIRGLLLEYGVTIPKGITKIKSMIHGILEDPDNGLTIDMRDLIGLLYEELDNCFKKVEELEKKLKVFLGKNEDCKRLEKIDGVGLILATAIVAGVGDPKAFTNGRQFAAWLGLTPRQFSTGGKTKLGKISKRGDRYVRKNLIHGSRAVVNHAGTKEDRMSRWVTGKLPEKGFNKTAVAVANKTARIIWNVLAKKEEYDRDYKRAA

SEQ ID NO: 495292 - protein, 349 aa, unidentified
MGEVSTIGVDIAKSVFQIHGVDTEGTVVIRRRISRSKVLEFFAELPSCLVGMEACATAHQWARELKKFGHDTRLMPPTYVKAYVKRGKNDAADAAAICEAVTRPSMRFVPIKSVEQQSALMLHRTRDLLIRQRTQLINALRAHLAELGLVAAKGHEGLQQIVMAVTESSDERLPSHARFACQSIVAQLHAAQTQINGLDKRITQVHRANADSKRLEAIPGFGLILSTAVVATMIDPKAFRTGREFAAWIGLVPRQNSTGGKERLGSISKQGDRYLRRLFVLGAISIVGTARIRPDKYPWVTELLGRRPAKVVAVALANKMARTAWAVLARGETYRASTRSSNTAIAAAA

SEQ ID NO: 495293 - protein, 476 aa, unidentified
MIRSVGIDLHQGHHRARCLDERAQPCDSFSFQTTPEGLATLEERVFRDGSNPTIVLEPAGLPWLMVAVYLRSRHPDCRLVKAKTQKVAALRRYLRGPVKSDRLDALTLAKMPFIDPEQMDEIYLPPAEIHALQRLTRQRKRIEQDISGRKIRISAIVDGYLPGVRRSFNDAWSSPVRAFLKSRLNPFTVIRDEEDALHVFLSKNSYHSKWSKAQTRLVFLSCQSVAAVCKLSEPAGTVNEDFFTDLQDEIARELRMLEADEVESEALARRIAELYQKLHSSDNLRTIPGVGEHTAPIFLATVGNPARFHSQSAFANWEGVVPGAKQSSNAEAKGLRMTKAGSSIMRMALYQAGDIGRRWDPQLAAVYYREMVYHGKNHRQAMGAVMSHLGARVLRVLKEDRPYELKGPDGKEISWIEGRKLILSEYHVPEDIRRERRRRNIKNRGSSRIREPGDSDLQGTRGSEAPQPVQVEPVSR

SEQ ID NO: 495294 - protein, 352 aa, unidentified
MKYALEQESILGVDTHLDVHVAAVINQSGQLLGTQSVSTNTAGYLQLFQWASAFGALKRAGVEGTGTYGAGLCRFLCDKGIMVLEVNRPNRASRRLNGKSDSLDAENAARSVLSGVSKAIPKQQSGACEAMRIVSVARRSAVKAKTQSINQLRAMLVSAPQSVREELWKAKASDCAKACAMIASLGDTVVLKALSKTLKSLAKRWLALSEEPKDYDQQLETLTQEHAQQLRSRFGVGPQTAATLLTVAGDNPNRLKNEAALASLCGVNPLPASSGKTTRHRLNRGGSRTANNALWTIAMVRMRSDPRTKIYVERRTHEGLSTKEIHRCLKRYIVRELFPLIMGDLGALAGVP

SEQ ID NO: 495295 - protein, 373 aa, unidentified
MNYNTVYVGMDVHKESFSLCSFTIEEDKASHAQKVESDYKQVLKYLEFLRTIYGKDAYFICGYEAGCLGFTLYHQLTEHHVNCVILAPTTMLQQRGKKKIKTDKRDAALIGRCLAQHNYSPVHIPTEQDEETKEYLRMRTDHKLALKKIKQQILAFCLRHNYRYERGGSRGTQTHIKWLRALTSAGLYKEILDAYLLTFDHLSNKLERLEPRIEELGSREEYGEDVKKLTCLLGVKTQTALSVIVEVGDFKRFATADRFASYLGLVPGEDSSGDGRQRLGITKAGNTHVRRLLVEAAQSYSRGQIGYKYRELKARQRGNTQQLIAYADKANERLRRRYYKMVLGQNKRSNVAKTAIARELACFMWGMMTNHIA

SEQ ID NO: 495296 - protein, 354 aa, unidentified
MVQNLSGAVAVIGIDIGKNAFHVVGLDGRGAIVLRQKWSRGQVEARLANMSPCLIGMEACVGAHHLSRKLKALGHDARLMPAKYVRPYSKGQKNDFRDAEAIAEAVQRPTMKFVATKTADQLDLQALHRVRERLVSQRTGIINQIRAFLLERGIAVRQGLRFLRAELPRILATSLDVLSPRMVCVIEGLAEDWRRLDQRIDHLSEEIAALARQDAGCERLMSVPGIGPIISSAMVAAIGTGDAFSKGRDFAAWLGLVPKQISTGDRTILGKISKRGNRYLRVLFVQAAWVVLIKPKSWQRHGLKPWIEAAKKRLHRNVLAIALANKLARIAWSVLAHGRNFETRKIDEAAAQPV

SEQ ID NO: 495297 - protein, 417 aa, unidentified
MDTIYSSVAGLDVHLKSIQCTVRCRQETGKLIREVRSFGTVTRDLRALADYLESLGVTHVAMEATGVLWKPVWNILEGRFTLLLVNPHHLKKVPGRKSDVSDAEWIAQLLQCGLLRGSFVPPRNLRNLRDLTRHRAQLAGEHTRVANRIHKLLEDANIKLGVVASDLLGVSGRAMLRALLEGQQDAAQMADLALGQLRKKLPQLRLALEGHFTEHHRFMLRRLLSHLNYLEQQSKQFSERIARKLDELLSPEDQKRLHAIDGVNRTTTENVIAEIGVDMAVFPDEHHLCSWTGICPGNEESAGKRLRSRTRKGNRWLRRALAEAAWAASHTKDSYLAAQYRRLAARRGKKRALLAVGHSILVIIYHVLRNHVDYHDLGADFFDRLEPERLRRYLVRRLQHLGFDVALTPKELDDRAA

SEQ ID NO: 495298 - protein, 483 aa, unidentified
MRSKPQEKNKNATNNLSQRHWHEMNRKQRRETMRKIQSEDLSLEVIHPDAAGIDIGNESHYAAVPPSRDSQPVRRFGCTTAELKAMADWLKQCGMRTVAMQSTGVYWVAVYDILEQAGLEVYLVNARDTKNLPGRKSDVQESQWLMKLHTYGLLRNSFRPSQEIRTMRTYWRQRNDLVRSAGRHIQRMQKALTQMNIQLANVLSDLSGVTGQAIIKAILTGERNAYKLAEFRDPRVKASKEQIALSLEGNWQPDLLFVLKQEQDGYEFCQKQMAECDRQLHQYLEQREDRSHGASLPKEKRKGRLTKKKGNKPQFDLRQGLFRMTGTDLTRIDCIDVMTATTVISEAGWDMSKWQTENHFVSWLRLCPDNRISGDKVIGKGRLPTNNPVSIALKMAASTLRLSKTYLGAQFRRFRTRLGAPIAIKAMAAKLARLVYRMLRYGMKYVDQGAAAYEAQHRQFQIKQLKYKAASLGYQVTPIPAAA

SEQ ID NO: 495299 - protein, 348 aa, unidentified
MTIVPQHFSHVIGVDTHAKTHTLVILDHLGVRHRPAETFPTSPAGLKRAHAWIQRETTGPVLVAMEGTGSYGAQFCDLLTKAGVRVTETKPPKHGARRAGKSDPIDAEHAARHALTLPVDRLITPRNHAGSHAALTVLLTARTALKKSRSASNNRLTALLRGYGFGLDVRKALTDEQLKLVGSWRAHPTDDLGLATIRAEATREAQDTIRRDDELKANEKGLLQHSKLLAPQLLAELGVGPVVAAQLIVSWSHPGRIRSEAAFARFAGIAPIPASSGNTTRHRYHRGGDRALNNAIWVTAFYRFHHDPETAAYVAKKSAEGMTQSEIQRLLKRYISRRLFRVLERTAA

SEQ ID NO: 495300 - protein, 362 aa, unidentified
MNNVVAGVDLGDSESMATVISPYGDVADCFSFTMNDEGYSVFSSRVPKDARIAFEALGMAYPFSRRLRELGYADITVAHSKELAWIVKSKKKNDRIDSLKIAKLHMADMLPESHLLDREEQTVRDLLIQRVTLGVDIGRMKNRIIGYLKREGVHHSLPKTYDNFSATRRLAISSLKFNDQRDLVLKIMMERLEFLEGQCIPLESEIWKVASGSDDVKLLMSIPGVDFYLASLISSYIRDVNRFPTFDHLASYLGIIPESRDSANVKRRGRMTKDGPPIARWALGVMVDTVMQRNKHIKSYYVTQKERTKNGKYAHVLTMKKLARMIYHMLKTRQHWKWENESLTQRKLSRLEHEEMILSGSS

SEQ ID NO: 495301 - protein, 403 aa, unidentified
MIKYHVGVDVGKDRHHVSVRDLSRDAYCKTFSITNDRNGFTELIAAVEKLSPEKSDFLIGVEACSYALNLNYFLMGVGYNLVEVNPFRVGQFRKAQGKKAKTDKIDARTIAAIISLGDHKTLSIPDPILDNLKDLTRFRTNLVDERAAMIIHLREALSVLFPEFDKVFRQLDSAGSLAVLGTFPGPEHIIAAGEETVGKTLSLASPHRMGRGMARRIIEAAQNTVGVIQKQPALGIKISILAKRIASLQSTIRELDRQITALFNGLPCKLQGFPLGRAPTLAAIVSEIGDIHRFPTLKKFLSHLGWCPQTFQTGNFRLEHPRMSHAGNKYIRRLVWMLSVLAVRMVPLYREYFQRRVMEGKAKMHILVAVGRKLLSALYAMLKRGVPYDRNWEDNSRIAVAGR

SEQ ID NO: 495302 - protein, 372 aa, unidentified
MNYNTVYVGMDVHKESFTLCSCKYEDEKASHYQRTPASYKNVLRYLAFLRTIYGEDTRFVCGYEAGCLGYSLYHQLENFNVECVILAPTTMLEQRSKRRIKTDKRDAEIIAKSLAQHNYSPVHIPTETDNQTKEFIRMRDDHKAELKKIKQQILAFCLRQGYQYDGSGNWTAKHVKWLRSLKTEGLYKEILDEYLLTYTILTDKLNRLDQRIEELASEEEYKEPVSKLTCFLGIKTHTALSVIVEVGDFQRFASARKFAGYLGLVPGQHSSGDDRNGLGITKAGNTHVRRLLVESAQSYTRGKIGYKSRVLRSRQAGNSPQVINYADRANERLRRRYYKMVLKDGKKYNIAKTAIARELACFIWGMMTDNIY

SEQ ID NO: 495303 - protein, 410 aa, unidentified
MEVLYQRCCGLDVHKETVVACLRIVSGGEAVREVRTFETTTASLMALSEWLAENGCTHVAMEATGVYWKPVWHILDDGDFKLILANASHVKNVPGRKTDVNDATWLADLLAHGLIRASFVPDTQTQELRTLLRTRKQLVREKSSHILRVQKTLEDANIKLDSVITDVMGMSGRAMIEALIAGESNPAKLACLANYRLRASQEKLREALRGRVTKHHRFLLRLHLNQIDALDAAIATIDQQVQAGIAPFRFAVELVTSIPGVSDIGSQVIVSEIGTDMSRFPSESHLISWAGMCPRNDESASKRRSNRVRKGAPWLKTTLVQCAWAAVRKKDSYLKAQFLRIKARRGPKKAIVAVAASILTAIYHMLKDGTLYQDLGSKHFQTRSKGQQTKRLVKRLADLGYDVALTPLAS

SEQ ID NO: 495304 - protein, 422 aa, unidentified
MSKRRNRVCGADVHRDLIVATIQDDTQSLFQEEFGTTQSELKRFRDWLLANKCKQVAFEATGVYWLPIYDFLSPSIDTIVANPWKIKNIPKDKTDAKDSQWIASLCLNGQIKRSRILSKDDRDLRTLTRARSGYVKTRTQFRNRIHKYLASNGIRLSSCISDIFGKSGRYILHGLIEGRSIDSILDGIPSGQVRKKRDLIEAALGNGLDEISRMLIKDIMDLLNPLETKIEAASQEAINRLQAKSKDLAIVMSIPGIGFVSGSVILAEIGNYHDFKTPEQLAKWCGLSPGENESAGKKRPCGITKQGSKYLRTVLVQIAHVVAGKTNTKLSRFFQRLSKRKEYNVAITALARKLICLVYHLLINQELYREEICQKRGSKPVEKSLAASYSPEDQLEDKVAAIVEAFYHLKAKGQKRSLDRGG

SEQ ID NO: 495305 - protein, 350 aa, unidentified
MTTVTANDVVVTGGVDTHQDLHVAAALDQLGRVLGTHAFPTTAAGYRRLLAWLRGHGRLERVGVEGTGSYGAALARHLTDAGVQVIEVARPNRQVRRRYGKTDVVDAIAAARAVLSGEATGTPKSHDGPVEALRTLQAVQRSGNKARTQALNQIHQLLVTAPQQLRARLRPLNRTDLLATCAGFRIAAVDDSLQAMTRLALRELAQRVLHLDEQLALVTKRLHRITADVAPKLVATTGVGPAVASALLITAGDNPHRMRSEAAFAALCGSNPIPASSGKTNRHRLNRGGDRNANAALWRIVIVRLACDERTRAYLARRQAQGKTKTEAIRCLKRYLAREIYNAMPPTAAS

SEQ ID NO: 495306 - protein, 321 aa, unidentified
MTYIGIDVSKDAFVVAYSSEKNSKTKVFKNTTKGIHEFITTISKDEHHCVMEATGNYSALLVYLLSEAGITTSLENPLKVKNFARAMLSTVKTDEIDARLIALYGEKMQPAPYRLRSDAILTLKQKRTVIRQLKKQLIATRNLKGSMEVLPFFDAKCKKSIEKTIAFLEKQVKDLEENLTTLARSEYKKQMDLLTSIKGIGVTLAAALIMATGCFTYFDNAKQLTRYLGLSPTYQQSGTSVNFKGHINRNGDSSLRGQLYVAAFASLRCNTECKSCYDRLRSNGKPGKVAIIAVANKLIRQAFAVVTQEKPYVDGYVSSKK

SEQ ID NO: 495307 - protein, 400 aa, unidentified
MRAVFGIDVSKASSEVVILVNGEKVHGYTMSNDAIGFSRLLGDLKTVHKPEIIFEATGVYSRRLQAFLDEHSYAYTRLNPLEAKKQLDSLRVRKTDQIDAEKLAQSQFVLNRKPTYVQEEVYQNLRDLSRFYQNLTEDIVRAKNRLHKVLQVTFPELENILSTPTGEQYWNLVITFPCKDFVLKLSKDELSKSIRLSTSKRISDKRVAYLAEKLTALANQSYCAVKKTSPIMEEVRYYAKELLRLSEQRQAVLDEMVELAQPLPEYDILLSIPGIAETTATSIIGELGDIRRFQSANQINAFIGIDLRHYESGNFIAKEHITKRGNPYARKILFKCIHNIASASHTNPCHIADFYEKRKRQSQTTSTKPHTIASIHRLIRTMYYLIIHNKLYDYTSTQNR

SEQ ID NO: 495308 - protein, 407 aa, unidentified
MMRTIIGIDVSKNKANVAVATDLVVAKELTIPLDALGFNELKHVVLQFGGKAEIVFEATGVYSRRLEYFLQQEGLNYHILNPLAAKNRIATGSRLRKNDERDARRLAITEFTEQLEPYLLAYKQDPIYRELTDMNRYYDQLNEDKKRVRNRAHRVLQLVFASFGASKGGFNFDTKLAWKLLTLFPHAQIVREIGDLNVLEARISAAHFKGMGAKRIHDTARKLWKLAAQNGDAVPVTSDNTRQMKALAEQVLALEAAQDQQVVRMMALGKSLSEFTLLQTIPGIGGSTAIRLISELGDIRRFNTRQQLNSYVGLDTTEVDSGDHQSARHITKHGNPHARRILYWTVVLMLNPKMGDNHIRDAYEKRREASSSKKKLIVRQMDRLIKTILYLIKTNQHYSYELSPQSK

SEQ ID NO: 495309 - protein, 323 aa, unidentified
MTRIICGVDISSASLAARIGRDGATGSFPNTAEGIVALASFCHAHVVELVAMEATGGYEQQPFALLSEQGLPVTILNPRAVRRFAEGMGLLEKTDSLDAGVIAWFAEVKRSQPQSLSSASRQQLRALVTRLCQLTAIRTAQRNQSRLVTAPAVLASFTELLALVARQIRELEIAIAALISEDPLWHQLDRVFRSIKGVADRTVARLMAEIPEIGTLSNKAISKLAGVAPLARDSGKQQGKRAVRGGRPQVREILFVVAGVAGRYEPDFIAFQQRLRAAGKPGKVIRIALAHKLLVRLNAKAREVRQHMATEMPDLRAPIAVTN

SEQ ID NO: 495310 - protein, 387 aa, unidentified
MPQPNDLSRSLVALDQNSTIIAVVELSQSSWLVGGVVPGIERQPCKKLEPSPERLLAVLHRWRDEAVRAGRTITRIALAFEAGRDGFWLARWLDVRGVEAHVIHPSSVAVSREHRRAKTDRLDTELLKRGFLGWLRGERGHCSMARVPTIAEEDAKRPNRERECLVGERTRIVNRIKSTLARLGIRNFKPTLRKAAERLATVHTPEGMPLPPNTLAELQRDMARLGFVVSQIRQIEDARQKRLEQEPETGSHAMVRRLARIVGVGVETADMLVHEVLSRPMRDRRAVARYAGLTGSPDESGAQRREQGLARAGNARVRRSMVQLAWRFLRFQKESALALWYRVRTADRRMGTRKTMIVALARKLVIALWRFVTTGEPLEGVVLRPAS

SEQ ID NO: 495311 - protein, 320 aa, unidentified
MTAFTPVGIDIASKKFDAAIWIEGKKYKNKVFANTPTGFHAFLLWLAPYGPCHICMEATGAYSLPLATYLYDAGYPVSVENAARIHAFGQSELIRNKTDKGDAKMIARYCHLHKPPEWKPVPVNERKLQVLINRLNALKEMKRMEENRALTSEAIVQDSIQKVIAALDEEIKEIEQAIKKHIDNDPDLKKNQALLESIPGVGEILSTTLLGYVGDMSRFSSNKALVAYAGLNPMLKESGCWKGSTKLSKKGNALLRKALYMPAITALKYNPVVAALCNRLKKKGKRGKCLVCAAMKKLLQLAYGVLKSGKPFAAEIPLAR

SEQ ID NO: 495312 - protein, 342 aa, unidentified
MQVTTYGLDLAKRVMQLHWVNLETGEIHRKQLKRRALLEFFANRQPGIVAMEACGSAHYWGRELRKLGHEVRLIAAQFVRPFVKTNKNDAADAAAIWEAVQRPDMRFVAVKSEEQQSVLSLHRMREQLIKMRTMQVNQIRGLLYEFGADLPQGRQRGLKEVPDALADLEKSISPMLRDTVRQQLKRLEEMDKDIADIEKRLTLWKKGQEAVTRLMAIPGVGLLTATAIIATVGDMKSFRSGREFAAFLGLVPRQSGTGGKVRLLGISKRGDTYLQTLLTHGARAVVNFQIKNRNPWIDKLLSRRPHNVVVVAQANKMARTIWALLVKNTEYVANHARNAAAL

SEQ ID NO: 495313 - protein, 348 aa, unidentified
MALTIVETRAVTGGVDTHADTHVAAALDPVGGLLGVQEFPVTAAGYARLLGWLGGFGTVCLVGIEGTGSYGAGLSRHVTGAGVRVVEVDRSDRQDRRRQGKSDPLDAVSAARAAQSGRARGAPKGRDGAVEAIRALMVTKRSARSERTQAVNQARALILTGPDDLRARFTRHTPASLVSGLASLRPRPGGTVGYATQIALRELGRRVQFLDSQLKRLDDLIVPLVTARAPGLLALHGAGPDTAAILLAAAGDHPERLRSEAAWAHLCATAPIPASSGKVTRHRLNPGGDRQANHALWRIVITRMSSHPPTRAYVERRTTEGLSKKEIIRCLKRYTAREVYRHLRPGPG

SEQ ID NO: 495314 - protein, 338 aa, unidentified
MKTHIGVDLHQRFCYLTAVNASGKLCKQGQVANEGEALRSWLRQLPGPRQVVVEASGFWPAFARSVSPEYERLVMVHPQRVKAIASAKLKNDRVDSETLAHLSRCDLLPEAWMADEGTQQLRLLVRLRITLGRQRARAKNQLQAVLHQEGFKKPVTDVFGKGGRVWLKGLALSVAGRLVVDTWLREVDHLDAELAVQTRELERLARADARARFLQTVPGIGPYAAMVILAELGDVKRFENKRALASYAGLTPVVRESAGKRKRGGITHQGSNTLRWIMLQVAQVAARCSPGARSYYQGLRQRKPAQVAKIALARKLLTVVWALLRHGVCFDEELFTRS

SEQ ID NO: 495315 - protein, 405 aa, unidentified
MPYILALDVSMGHSYSVLYKDDTCLFEDEIEHTQRGFHALLEEIQHLPERPLIVFEATGIYSRPVEKFFQDHHFSYCLLNPLEAKKQMEENTLRSWKTDKSDAHRLAQTHLKNQRQPKEVQSNFYLEMRDLARFYQEIEKKITRLRMDLHNCLQLTCAELEQFFSNRLTPYALTLIRLFPHPDFVLASTRTKIKNKLINETRKKISANRAEQKADQIIHYAQCAYPAVEKDSIHCQKTIYYAELLQDLLEQKEALATQMIKKAEGSPCFLLYQTFPGIGALTAALLLGELGDITRFKTHKQLNAFVGIDIRRYHSGKYTGQDRINKRGNPKARKIIFFTIRNMIRQQRAAPNHIVDYYYKLKKQPIPKKDKVATVACMNKLLKCMHAMVRAHTEYDYAYAVSVDH

SEQ ID NO: 495316 - protein, 368 aa, unidentified
MKKVLYIGLDVHKETIVIATASEGREPAKEFKTIPSDYARTLKAVRLLTPKGGSVVVCYEAGPTGYGLYRRFREAGIDCRVVAPSLVPTKAGNRVKTDRRDAVRLAHYLRSGDLTDVYVPDEADEALRDLERARDAAKRAERTARHQLGKFLLRHDRRFGETKNWTVRHMAWVRRQKFEHAAQQRVLTDHIKTVEDASERVERLTDSIEELVESSALAPLIKALQAFRGIALVSATTIACEVGDLRRFATAGQFMSYVGLVPSESSSGERRRQGSITRAGNGHLRRILVEAAWHYRRLPAMSKEIRRRNQPVADGVRRIAWEAQKRLHKRMYHLIHNGKNNKTAVIAVARELAGFIWSVAQEPKLLAS

SEQ ID NO: 495317 - protein, 338 aa, unidentified
MKLYGGIDLHSNNSVVALLDEEERLVYRKRLANDAPGILEALAPYREAIVGLVVESTDNWYWLVDALMEAGYAVHLANTAALVQYSGLKYSDDDSDARWLAQRLRRDELPEGYIYPKAERAVRDLLRRRSRLMQQHTANLLAIQNLFARDRGRSLNANEVKRLTPEMVSQLLSDPNQALAVQATLLAMRGQEGAIDLLEREALAQVRPHPAYRHLQTASGIGQVLGSTIVLETGPIARFANAGHYASYCRCVGSQRLSNGKCKGRGNTKNGNKYLAWAYLEAANFAVRYNPVINRYYQRKRAKSNGVVAIKTVAHKLARACYHMLREGTDFDVNRAFA

SEQ ID NO: 495318 - protein, 344 aa, unidentified
MLMVRNVVGGVDTHADAHVAAVVDSNGGLLGVESFPADAAGFAELFGWLVGFGPVLRVGVEGTGSWGVGLARFLHGEGIEVVEVDRPNRQARRKVGKSDPTDAVSAARAALSGAAAGVPKTRNGPVEQMRVLLVARRSARTQRIQTLNQLRHLVFCAPEPIRVRFKDRYKTGLVTEAAGMRPRKGSDPVEFTTNTVIRSLARRIQGLNAEMRAIDQALVVLINQTAPTLLELYGAGPDSAATLLVAAGDNPDRLRSERSWAHLCGVTPIPASSGKVIRYRLNRGGNRNANSALYRIVLTRMSSHQETRTYVARRRAEGLTTPEVMRCLKRYVARQVFKQLPRAA

SEQ ID NO: 495319 - protein, 354 aa, unidentified
MSQTQNAAIAVVGIDIGKNSFHIVGHDERGAIVLRQKWSRGQVEARFANMPPCLVGMEACVGAHHLSRKLNSLGHNARLMPAKYVRPYSRGQKNDFRDAEAIAEAVQRPTMKFVATKTAEQLDLQALHRVRERLVSQRTGIINQIRAFLLERGIAVRQGQRFLRAELPRILAMPPDVLSPRMVRIIEDLAGDWRRLDERVESLSNEIETIARQDAGCERLMSVPGIGPIISSAMVAAIGAGDVFTKGRDFAAWLGLVPKQISTGDRTILGKLSRRGNRYLRVLFVQAAWVVLIKPKIWERHGLKPWIEAARKRLHHNVLAIALANKLARIAWSVLARGRAFEARKIDQAANQSA

SEQ ID NO: 495320 - protein, 392 aa, unidentified
MQISVGIDIAKEVHWVTAIDPAAVVLIDRKLENIPTAIAKLIDELAALGGSVRIGFDVVGGIAGLAEAMLAEAGFALVHVPGLAVNRARQGSVGGENKSDPRDARIIADQVRIRDDLRPIAPARELDLEIRLLVGRRSDLVAAQTQRLGRMHDLLVGIFPGLERRLDLTGKGALVLLTKFVTPSELRGAGKARLVRHLKAAGGLPHVEALAERALEAAAEQRIAMPAEAMTARLIRELAAEALAARARLIALDRELEALLDRHPEAALIRSLPGMGVVLTAELIAEAGDLSRFRSADALAAAAGIAPILRQSGKTRFLRRPSGGNKGLKRVFYQSAFCSLAHPDSRAFYDRKRREGKRHHQAVIALARRRINVLWAMLQNRQPFRPNFKLAA

SEQ ID NO: 495321 - protein, 392 aa, unidentified
MDSPPPRHHSATVAFEEANGSEGETMKKHSSKHDSLSSTDVELCTTICVDLAKQVFQLAGEDATGRVIYEDRIKSRQAFHDFLTRLPTTVAVLMECGPGAQAWARLLQTKGNPVRILPAQRVAEHRSGAKNDRNDAHAILRAGRDTSIASVPIKSTTALAIQALHRIRRGNIKRHTALGNQIRGLLLEHGVSMPQGDAAISQQVPRALEDASLPLPDLLRELLDELLTDWLSLGERIAALSGRLEVTAQQDKVAQRLITIRGVGPIIATAIVAKQTEPSRFASGRMYSAFFGIVPDQHSSGNKIRLGRMSKRGDGYIRSLMIQGAHAVLSQLRPDSDQPDDRRLLRWLSRLGRKEAAIRLANRNLRIIWALLQSNQVYQRKPNSNPEAAMSL

SEQ ID NO: 495322 - protein, 422 aa, unidentified
MKVVYPTCCGVDVHKTFLVATIITSQGITPHYTKKRFSTFNNSLLQFKQWLIDNNCYDVCMESTGKYWVPVYNLLEDIIRITVANPKWVKAVKGNKDDTKDSKWIGDLFRLGLVPGSYIPEKPIRILREYTRYRFKLVSCKSSEKNRFQNAFTVCNVALDAVVSDMFGKSASSITDYLISSDSFDPEHCSSLLKKSLKKKADTVIESIEGYQMNKEQKERIVMVRSHLEFIEQSIRELNGKLDKMVAPYESQITRLYTIPGVDRASAITIISEIGTDMSQFASSKRLCCWAGLTPGNNESAGKKKSVRITRAGVYLKPALVQVAHAAVKSNKSPYYKTKYERISKRRGKKRAIIAIARMILTAIYHMFITGEDFNPCDLYKIDMPQEMVEKQKDKAIKQALKLLIAQGVIKANDISVAKVIT

SEQ ID NO: 495323 - protein, 340 aa, unidentified
MSYYAGIDVSLEASHVCVIDGSGKILREARVASEPEALIAWLGSVALELTRIGLEAGPLSQWLYAAMRDAGLAVELLETRHVRNAFKIMPVKTDRKDAQGIAELMRLGWFRPVHCKSMEAQETRAMLTARKLVQKALHEVEMSLRGVLRGFGLKIGKVAPTQFEARIRELVEGHPSLEVIGTAMLSVRATLRREFNGFEKRLRVMARSDGRARLLMSVPGVGTIVALTYAAAIDDPARFTSSKTVGAHFGLTPTRYQSGETDRMGRISKIGDASVRAMLYESAHIIITKPVKGCTALKSWAMRIAKRAGTKKATVALARKLAVIMHRMLVDGTTFTTQPA

SEQ ID NO: 495324 - protein, 470 aa, unidentified
MAAVMIGVDPHKASHTAVAISAAEEPLGELRVRACAAQAERLLEWAAAWPQRTWAIEGAGGLGHLLAQQLLAAGERVLDVPPKLGARVRLLAAGNTNKNDPNDARSVAIAALRSAGVREVRPDDHAAVLKLWSKRHRDLGRTRTQVACRLHAVLCELIPGGVSKHITAAAAARLLEPVTPARAVEAARCELAAAFLEDLRGIDARIRETRKKLTVAVQAAGTSLTGLFGVGPVVAAAVIGAVRDVSRFGGRDHFAAYNGTAPIEVSSGQRKIYRLSRRGNRRLNHAIHMAAVTQIGHRHSEGRAYYDKKLAEGKTPKEALRSLKRQISNAMFACLQADARRAAARAEGPGGQPGNDSVASAAGLHPGHRLFGQATPGPGHHITTAAGNPAPGPVSARGGAGHSPVAANLPPAKPQVQVERPQRSEDERPGGAARRRPHSAARKARGQGSLVKPQRPKGTSQAAKKTDGTP

SEQ ID NO: 495325 - protein, 360 aa, unidentified
MDTKHDTSLSFKDQDFFIGIDVHKKQWTLSIISMNMLLKKYLSIDPQPSALLKYMHKHYPDGNYYATYEAGFSGFWAARKLNNLGVNCMVVHPADIPSSQKERLNKNDRVDSRKMARSLNNGDLIPIYIPEKIAEEYRYLNRHRLKTVKDQTRLKNRIKSVLHQFGITIPLQFQERRWSGAFIKWLFSINFDTQYAQFAYEDLIDQLIQTRARITKHLKKMREMTKEQKPFNIIIPLLLSIPGIGFITAMTLATEIIDMSRFKTLEKLAAYVGLVPSIQSSDETEINLGISPRRNKYLRTMMIEAAWKAVKIDPALTMKFNQLSRRMNRNKAIVRIAKILLNRIRYVWKNQKPYVLSVVN

SEQ ID NO: 495326 - protein, 425 aa, unidentified
MTTEKRYFVGIDWGSQTHEVCVVDETGTVAARWSVQHTGEDIRKFVEKLMELAGGKAERVAAGMETPHGAILEVLLERGVAIHAINPKQLDRFRDRHSVAGAKDDRRDAYVLADALRTDTAKFRRIQAAAPDMLKLRELGRAYENLTTDFHVQANRLRQLVIRFFPQVLEVAKADEPLCWSLLDLVPTPAQVRGVKTKEVDEILRKHRIRRISAEEVLVQLRKEPLPVAPGVAEAAKEHVELIIPQLRVAHAQMQSCHRRIEELVERLGSTPPDDKNSDGGGNAQHSDVKVVDSMKGAGALFVAALFGEAYALVQARDLATVRAQAGIAPVTQQSGKTRMVQMRKACNRRLRTALFHLAAVNIQYDARSRALYDDARSRGQTRGRALRAVGDRLLRILFSMLRNNTTYILEPLTAGVLEPEGSGQ

SEQ ID NO: 495327 - protein, 399 aa, unidentified
MFYRPPLDIRVSIDVGCKSHQVAVGLSTGEVIAEFSISHQPDGFRTFFAKLELLEQQYQCPVRVAMEGYNGYARPLDSMVLARGWQLNNINNLKLARFKEIFPGAAKTDVIDARRGLELFQLMDHLPTAKDVLQVVAEPPRENQMLKRLSRRRRRLVNERVRVLNNLQADLQAVCPSLLALTGDAGNIWFLQLLTHTDDLRKLPRLHLKTLRKIPGIGAAYASRIRQWQKQAQFSAEAEWVGEMIQQDAARILELHGQIKALEAKMAAAAEQSFIASTLATLPGFGPICTAELAGELGHEARFIKEASLALYLGMATLDNSSGQYRGTKIPRHVNSRAKAAMMVAVDRHRKQVPASQRYYEKKRAEGKGHNQAVRALGRHICRIIFKMLKERRAYLPPN

SEQ ID NO: 495328 - protein, 386 aa, unidentified
MKRIAEVVRMFVGLDVHAETIAVAVAEADGGEVRSLGVNPNRPGSVSKLIRKLGKPEAMKVCYEAGPCGYGLYWQLVGLGVHCDVVAPTLIPVKAGDRVKTDRRDATKLARLYRSGELTAAWVPDKAHEALRDVVRAREAAKKDQLRARHRLSKFLLRKGLRPPENFKAWSDKYMQWVKALSMSLAAEEAVRRDYVNEVDHAAARIERLERAIEEAVDAAPKDIQAVIQALQAFRGLQRLSAATIAAEAGSISRFARAKQLMGYGGIVSSEDSSGERTRRGAITKAGNAHLRRIVVEAAWSYRHKPSLSKGLRERQKDLPPEICEIAWKAQHRLHKRYMTLLLKGKNKQQVVVAVGRELMGFIWDVGRRVEAAYQKATPETTRAAA

SEQ ID NO: 495329 - protein, 452 aa, unidentified
MPDSKEIEGLPVIRRNVAGIDLGSTLHWVCAPTVDGTGREVTSFGGTTPELIRMAKWLQERNVKSVAMESTGVYWIAPHEVLEAEGLDVLLVNTRQLARVPGHNKKTDPTDCEWIQRLHSCGLLAGSFRPKEEVCMLRTLVRDKASLVAESGDWVRRMQKSLDQMNVRVHRAVSDLNGITGMNIVRAIVDGERDPQKLAQLRDHRCSKNKQEIAEQLSGHWREDHLFSLRQSLKMHDAIQERIAAYNQEILRKLAEMEQDPGPGGAVPPVKNQQKAKAIKKRGEEAMRQALYRMSGVDLTQIDAIGVETIQVVLSEYGPDLSRFPTENQFVSHITLAPHVPKSGGKPLKKKKRNSASTRVAAALRMAALSLRRSPTALGAYYRNIARRIGGDVAVFSTARKLATLIYRLLRWGQPYVDEGEAAFEKRYQQSRIKSLQTRAKALGYELTPTAA

SEQ ID NO: 495330 - protein, 352 aa, unidentified
MEKNNKLDFGGQHIYVGMDVHKKSWSVSIHTEQFEHKTFTQAPEVEKLTHYLQRTFPGATYHTVYEAGFSGFWLHDQLKEKGIDCMVVNPADVPTKDKERAGKRDRVDCRKLARGLRNGEINGIYVPPRVKVEDRTLVRTRQSMVRKQTRCKNQITSILFFYGIVIPEEGRWSRRFINWIESIRMERASGDLALKAHLEELKHLRQIIANLNKAILSLSRTEEYRSDVLLLKSVPGISTLTAMILLTELTDLSRFSSLDKLASYAGLVPDIRSSGETEYDTGITFRRNAALRALLIESSWIAVRKDPALIMAFNKLSARMKKTKAIVHIARKLLNRIRFVFKNRQEYVPAVV

SEQ ID NO: 495331 - protein, 394 aa, unidentified
MNFLKYAIGIDMGMEKLDACISLMTVQQQVVVKAQCNFNNDYKGFALFHAWVIKNIKMDIPIIFLMEATGVYYEQLAWFLYNKGCTVSVVLPNKAKKYKEALGLKSKNDHIDAKGLAQMACEQKATQWKPFSKDIYLLRLITRQIQNISKQCNIISNQLHALQHAMFRDKAIEKMYNKQLTSLQKNKKDLQKRVELIVYSDKALKQKFQNICKIKGLGLQNLAVIVAETNGFAAFENIAQLVSYAGYDVIENQSGKRTGKTKISKKGNAHIRKCLHFPAFNTVRLKVGPFKNLYERIYERSKIKMKAYTAVQKKLLVMVFVLWKNDQSFNPDYQDKVSRDAEPESFSASASKKQLISGINPIVKKVALANTKATQDKHPSKHRRMPSLPYLKIT

SEQ ID NO: 495332 - protein, 360 aa, unidentified
MFTERTSVGLDVHARSVAAAAIDGVTGELFQSRLTPSYDHIRSWLADLPGPVAVAYEAGPTGFGLHRSLTAAGIRCEVAAPSKLQKPAGDRVKTDAKDAVHLARLLRLDEVTSVAIPTVEQEAARDLVRAREDCRNDMMRARHRLSKLLLRHGIVYSGGTAWTSRHDVWLRHQRFENPTTQVTFESDYDAVLATTARRDRLDTQIETMAANSEFTPIVRRLWCLRGISTLTAFALAVEIGDWHRFTGSTIGSFVGLVPSEHSSGSSRAQGSITKTGNGHARRLLVEAAWHHRPRYQPGKTIRTRWDLASPAARARGDLGNRRLHARWVKYIDRKKKATVANTAIARELAGWCWSLALLEQ

SEQ ID NO: 495333 - protein, 421 aa, unidentified
MSKRRYNTVDCKRVDWLALAEAMVGQRGVLAVDVAKVKFVAALQVEAGQTLIRVSWAHPFETAELLAGLEVLARAGTLEVVMESSGVYGDALRWQLQRRGIGVYRVAAKRVHDSAEVYDGVPSLHDAKAAELIAKLHWEGCSARWQILPAARRDQLAQLRRLRQAKARAQAERNRLEALLARHWPEVAHLLGLGSAALLRLVATYGGPAPLALLTRQAQQLLRDVGGRLLAQEKIDAVLASARTTLGLPCTTGESAQLRWQAEQVIAAQREQRQAEHQLAHTVASAGDLAPMAERLGKVTSAVLLATQGDPKGYPSAASYCKSIGLNLKEHSSGQHQGQLAITKRGPSLARFYLYFAALRLIRRDPVIKRWYALKTARPGACKLKQVIELMRKLAKAFWHQANGHAFDVNRLVNLKAVAGA

SEQ ID NO: 495334 - protein, 370 aa, unidentified
MKEYSEAFIGFDTAKKKHAVAIADVGREGEIRYLGEIDSSPLTIERMIRKLAGRYEKLHFCYEAGPTGYGLYRQVRDLGHDCTVVAPSLIPKKSGERVKTNRRDAVSLARLFRAGELTSVWVPDTVHEAVRDLVRARETASQDLRRKRQQLLSFLLRHGRIFSGRQHWSRAHLRWLAQQKFDHPAQQIVFQDAVDAIDDAAARLRRLDEQVAAIVPSWSMAPVVEAYQAMRGVSFVVAVTFVAEIGDLRRFDNPRQLMAFLGLVPSERSTGERVRRAGLTLAGNKRARRVLIEGAWSYRYPARVSQTLQARLEGLPKAVREIAWKAQIRLCARYRRLTAAGKKLPVVIAAIAREMAAFLWAIARHVAPAA

SEQ ID NO: 495335 - protein, 354 aa, unidentified
MNYVGVDIHKRYSVLVAVDERGRELARGRISGNSVHAFAQFFEALQGPGKVVLEACWNWGRIYDVLSEIEQVEEVVLAHPLKTRLIAEAQIKTDSLDALALATLLRDNLIARAHVPSKATRARKELLRQRLYWARLRTRVRNRVHAVLDRQRELEMPQCSDLFGRKGLNALSKLRLAEPDATLLGEELDLLKLIDSQIKAQEGRIVAFNANEQATQYLQSLPGMGKILAAVAAAEIDAIERFDGAAKLCAYAGLVPTTYGSGGKVHQGHLLKSRNKWLQWAFIEAAWVAVGCSSYFGGIYRYHRARGKKANIAITIVARRMCRIAFTLLKERRNFQEQHRTFPGRSAVRLTAAA

SEQ ID NO: 495336 - protein, 341 aa, unidentified
MPDWTCRSKKRPYAIVDEVGRICREMKVVSHPEDLLAFLCDPAWRLERVGLEAGPLSQWLFSGLAEAGVPAICIETRHAKAFLKAQVNKSDRNDARGIAQMMRVGLFRPVHVKTLASQKRRALLAARKILQEKALAIENDIRGLLRNFGLKVGIVGVVGFEQRIHDLVEGVPELADIMEPLLAARRVLREKFAKLHRKVLLLARDNEVCQRLMTIPGVGPVVSLAFISTVDVPARFRNSKAVGPSLGLTPVLNQSGESHRVGRISLCGDEAMRALLYEAAQVMLTRGQKWSWLKAWAMNIAKRRGQKKAIVALARRLAVIMHRMWSDGTEFRWTREMAPTI

SEQ ID NO: 495337 - protein, 342 aa, unidentified
MDDIIRIGLDTSKHFFQVHGVNASEQVVLRRQLNRRQMEAFFTKLPGCEIGLEACGSSHHWGRWLEALGHKVKMMPAQLVKPYVQRNKNDAADAEALCEAMSRPKMRFVPVKTEAQQADLMLMTHRERLLIERTRLSNAMRGHAAEFGYHVARGLAHLDDLLAELQVDTTLPERARMLFARMDKDYQRLNQEVEEIEAELLAWHKEDECSQRLDAIPGVGPVCSALLVMKVVDALAFKSGRDFAAWIGLTPKDHSTGGKLRLGSITRAGDETLRSKLVAGATAVIQHARRSGKGSPWLIGLLKRKPPKLVAIALANKTARIAWKLMKTGESYIDKSAQVETA

SEQ ID NO: 495338 - protein, 384 aa, unidentified
MTKQSTATVFEHDSTLVLALELSGKGWEVGAVTPGVARRPRRSLAARDMAGLLRQIERWKAEAGRAGRTVRRTVLTYEAGRDGFWIARYLRAHGIEVQIMHPASIPVERRGRRAKTDRIDLDMLLRTLLAWLRGEPRVCSMVRIPSEAEEDMRRPERERERLVSERIALENRIENLLCLHGITGFKPRLKQAVQRLDALRSFAGLPLPPMLMEELKRLMARHRVLSEQLRDIETVREQVAMTTEPEDHAVQQIQMLTRLFGLGLATATGLTREVFCRSFADRRAIAGFVGLTGTPFNSGSSEREQGISKNGNPRVRRILLQLAWRWLRFQPDSALSCWFAERTGGVKGRIRKIMVVALARKLLVALWRYVETGELPHGARLTGA

SEQ ID NO: 495339 - protein, 385 aa, unidentified
MDNVCGLDIHKDSVFACILKTNGEKIQTQFGVTTPELDRLRDLLVEAGVSRVAMESTSVYWKPLWRILSMDFHMVLVNPYLIKQLPGRKTDVRDAEWIATLLAKELVRESFVPDETQSALRQYERRLHRLNRQIVHAESQMDNQMQACNIRLSNHVSDIGGKSYRKVVQALIEGETRPEELLKLIHGRTVNRCGSDTLIAALTGFVTGVDRDMLRFYMEECLLYERQREECLKSMEDICQEHYKEQKELLETIPGVSAQSAMCVLSEAGHDMATFPSASALVGWAGLRPRNQMSAGKIKGRKITHGNRFLRIVLVQCAWAAARCQGTRFALKYEGLKRRMPAQKALVAIARKLLVVIWNVLAKREKYRRNLYETASEDERKGKCH

SEQ ID NO: 495340 - protein, 435 aa, unidentified
MANARKKTTNVGFYDGLPQIRANAAGIDIGASEIWVDVGNKDSEPVRRFETFTEDLNRTADWLKQCGIETVAMESTGVYWIPVCHILESRGIEVVLVNARHAKNVSGRKTDMLDCQWIRILHSYGLLAASFRPAADIGVLRSYMRHRQMLVEYAAAHIQHMQKAMTQMNLQLHHVISDITGTTGMRIIRAIVAGERDRDRLAAMRDNRTKADQNTIAKALEGDYRAEHLFALKQSLELFDTYQKQIDACHQQIAAYLQSLESKADVIEAPPRSKKPKKNRRNQLPFPIQHEAFRMTGVDLTQIDGISEMAALELIAEIGRDMSLWKTEKHFASWLALCPNNKISGGKVLRRATRISSSRARDVLRLCAQSLLGSKSALGAYCRRMCGRLGPAKGIVATAHKLALVLYRMLGLAVNTSTLDKTSMNNSIRSALSNT

SEQ ID NO: 495341 - protein, 408 aa, unidentified
MDVQIDRCAGLDVHQATVVATVRYPGERGRASVTETFGTMAADLAALRDWLQASGVTHVALESTGVYWKPVYYMLEDSVTLLLINMQMLKHVPGRKTDVKDSEWLAQLLECGLLKASFVPPPPIRELRDLTRYRLQQVRERAREVNRLCKVLEDSNLKLTSVLTDVMGVSGRSMLLALVQGTTDPVVLAELARGRLRTKLPELRRALAGRFRRHHAFLVEQILAKIDYLDEAVARLNAEIDERLVPFEPMLARLDTIPGVHRTVAISILAETGGDMSRFATAGHLCSWAALCPGQNESAGKRRSGKTRDGNQYLRGQLIQGALGAIHSKGTALQARYHRVKRHRGHKKAVVAVAHQILEIAYYVMHDAVTYQELGADYFDRRHAERATRRHVRQLEALGYRVTIEKAA

SEQ ID NO: 495342 - protein, 315 aa, unidentified
MAMPVSLDRPIVGIDVAKKELVIYHRDSERLEAIPNDKPSIKKWLKTVPHGTMIAIEATNTFHVLFADLAYEKGCVIYMVDGYRLSRYREGVNVRAKTDAKDAWLLARYLHNEFKELKPWVPACPLYRDLQSLFRRRAALVQAYTALKQSWSNEPHLKSAFKAHIKSMERLVALVEAQIKKALHEAGLTHQLKRCMKIEGIGFLNAARLVTAFMRGDFKGADAFIAFLGMDLRVSKSGQKDGRRSLTKRGDPEVRRLLYVAAMAARKTSAWKPFYEAQCKRGFSSTEALVMLARKLARVAFALLKNQSEYQTKMV

SEQ ID NO: 495343 - protein, 427 aa, unidentified
MGNENATKYREFCQFRRQIRGSSEYLIVGIDVAKSPHHAFFGTARGQSLLRKLLFENSRAGFEKLMERVDQLKVGQGLGKVVFALEPTGNYHKPLSRWLQDQGQLLVLVSNHAISENRQTLDGRWDKNDTKDSANIADLVSQGKCLFFEEPGEDLVELRSLLSLRKRLKKQSHSLRMQIRNGLVAKHFPELDRCWGNCMTENLAIVRWCLDPRMIASLSFDAFVRQVTTKDRGLRQVKRLRTIHELAATSIGLPVDAAAVHEAKTLVERFNDLCERIEQTESKIEVVCRRFKAYRRLRSIPGFGPYVSSQVLARIGDPNRFAGRRQVIRLAGFDLNAKRSGKRSLSAVPVISKRGNSDLRYALYQAATIASYHHAAFRALFTRYQEGRQKERGIKTKMRVKLAAKMLVIAWTLMRADTDFDPNKLGV

SEQ ID NO: 495344 - protein, 328 aa, unidentified
MDLFIGIDVSKATLDVAGCTADGPLAELCSTIANTEAGLATLVPLLVGRAPALVVLEATGGYERLAAATLALAGLPVVVVNPRQVREFAKAVGQLAKTDQLDAALLALFAERIRPAVRERPQLETGPLSEQILRRRQLVDMITAENNRRALVSPTVRRRVDRHITWLERELEHVERDLQHLIEASPLWRARDDLLQSAPGIGPRVAHSLIALLPELGTLNRQHISALVGVAPFNDDSGGRRGVRHIKGGRAAVRTALYMGALVGVRYNPVLKAFYQRLRAAGKPAKVALVACMRKLLTILNTMVRTNTRWRTDAPLSSRPAALVASPT

SEQ ID NO: 495345 - protein, 424 aa, unidentified
MKVTYKTCCGVDVHKSFLVATIITTTGGIQPSYQKKRFSTFNNSILEFKQWLLDNDCHDVCMESTGKYWVPVFNLLEDDINVVIANPKWVKAVKGNKDDTKDSKWIGDLFRLGLVKGSYIPCKKIRILKEYTRYRYKLVSCRSSEKNRYQNALTVCNVALDSVVSDIFGKSSTSIIDYLLEQSGSSINHEEIASKLLRSLKSKEDAVIESVEGYQMTDAPKYRMRLVRAHMDYITAEINDVDREIEKLISSDPDFENAIQFLMTIPGVKRDSAITIISEIGTDMSQFSSSRRLCCWAGLTPGSNESAGKRKSVRFTRAGVYLKPALVQCAHAAVKSDKSPYYKKKYESLVKRRGKKRAIIAIARMILTAIYQMLSTGEQWNPSDLYKIDMPVALVEKQKAKAIKQARKLLQREGLLPPDEPFAS

SEQ ID NO: 495346 - protein, 394 aa, unidentified
MMFYLGIDIGKRTHAASIMSNTGEILLKGFSFKNNKEGGEQLLRHLNRFSTDPADFSIGMEATGHYWLTLFSFLDANQYIVHVINPIQTDGWRKGTEIRKRKNDIIDSVLIADLIRYGSFGESALSDEPILELKQLARYRAYLKGTASDFKRKIIAIIDQLFPEYETVFPKSGIFGKASKQVLYELSSPEVIDALSTEELMQFLSKNSRGRLRLDKADKLKQAASNSFGITFAQDAYIFQLRSMLEQLMFLEKQVEAVDQQVKQRMEQLDSVILTVPGIGDVNGATILGEIGDIHRFSTSKKLVAYAGLDASVTQSGEFEASHNVMSKRGSPYLRKALFSAALVASNHDPVLKAFYQKKRSEGKHHLTAIGAVSRKLCYIIHAVLKKNEVYKIQ

SEQ ID NO: 495347 - protein, 434 aa, unidentified
MDGPIITVDVSKGNCHYQPWLTAGHSLRKPKVLNDTKDGFEALSETIEMVKEKSEADTVPVVFEATGVYHRCLQKYLDDIGNPYIVVPPLLSAAYRKTNLHGNKTDNADCAHIAKVYYQEEHLQCHQNESDTYARLRAKNRMYESELKILRQRKCTFRAMLDVIYPRMDKCFKGHASLYDSVPMEVLKKYPHPSLLLRHREETIVEAIQKPAGHKKGFTENIVHKMYQCAEECYSGVDADSVEVQQFPQMINELMEQMELCNTYLEELIEDASKLPSFAILLSIPGIGRNIAARIIAEIGDVTRFRNARGIVAYAGLNPKINQSGEKDGTHLAISKKGNRHLRCLVYLAVTCNYRLKKGDSIYQFNQKKRQQAVSPLKQFSKPGRLSPLFVVADQKNSEAYEFIEEISEKGLDLSYQIFVLCTGHAFFFPEQMR

SEQ ID NO: 495348 - protein, 404 aa, unidentified
MIIVGLDWSRCKHDFVIMDMHGQIIERGAIAHNANALEQLAAGIDRHVKCAAQVHVGLELNDGALLAWLVVKGYTVFGIQPKSAQRARDIYRPSGSKDDGIDAFVLAEFVRINPGRLKPWRPPSEMTLQLRELLRWREELVQQRTAAYQRLRALLAEWSPQLAELCDNLDCIWQLDLLSQFPTEVSLCQAHGNRIRSFIHKHRMHSKKSKQIEDIRRSVPMPVPGARAVVVEKQTSFLVEQVRMLSTEIDHIEQDLQQLTAQHPDVNIFESLPVRGIVAIAGLLAIFGDDHEKALSPDELAAVCGVAPVTIASGKTKNVRQRRACDHTFRQALVHFAFNTAFRDRCWAVQFYQRKRSEGATHYTALRCLAKRWLKIIHRLWKDRVTYDEALHQANQRNSQNRAA

SEQ ID NO: 495349 - protein, 353 aa, unidentified
MIVIGIDPHKSSHTATAVDPATNTDLGSIRIDATRTGYKTLIDWAKTWPTRKWAVENAEGLGHHLAQWLLVLGELVLDVPTTSTARIRQLSRGGRRKNDRIDAAAAACVAVLQGDARPVDPEGPTDILALLDERRTNMSNSRTRLVNQLHALLRQLLAGGAPTSLTAASATTLLRGFRARSGVDRTRVGLCRDLIADIRRLDDQLAANEKQMAHTLDEHGTRLREVDGIGAVTAARLIGRTGRASRFPTAAAYANYNGSAPVQIASADTDRHRLSRYGDRQLNSALYTVAMVQTRMPASAGRAYYDKKIDEGKPPAAARRALKRHLSDHVWRIMLADEKRRYRRNEADTASAA

SEQ ID NO: 495350 - protein, 392 aa, unidentified
MIYVGIDIAKDKHDCFITNSDGEVLFKSFTISNNREGFETLFQRIKSVSDDLTKVKVGLEATGHYSYNLLGFLLDKGLTTCVINPLHTNLYRKSLSLRKTKTDKVDSHTIAAMLMSDLNLKSYSDISYHNEELKSLTRYRFDKVKERAKLKSSISRLVNILFPELEKLVPTLHMASIYAMLSEFPGASHVASAHLTKLANLFSQSSKGHYGKDTAILFREAARNSIGSVMPAKSLELKHTIKLIQELTTEIDEIETAIKQIMDEEIKSPILTIPGISYRMGAMILAEIGDFSRFDSADKILAYAGMSPSTYQSGQLDNCYSHMEKRGSRYLRYALYNATKYVCHWDESFGAYLEKKRSEGKHYNVALSHATKKLVRTIFAMEKSGQAYRVTV

SEQ ID NO: 495351 - protein, 313 aa, unidentified
MKARPSEVFIGVDVSKERLDVAVAPSGETIGFANSEDGIALLADFLKPRNPELVLFEATGGWEMNAVNHLAAQRLPLVVLNPRHVRDFAKATGQLAKTDAIDARILARFGQAVRPEVRPLKPLELRKLDALNTRRRQIVEMLSAEQNRLVSAPEWVRPDIEELIAILKKRLAAINRDLNKLIRKSPLWREKDKILQSFPGVGPVTASTIIAALPELGSLNRRQIATLVGVAPLNCDSGTHKGKRKIWGGRADIRSVLYMCAMTAARCNPVIRPFYQKLLRAGKPNKVARTACMRRVLVILNAMMRSHTCWQPT

SEQ ID NO: 495352 - protein, 339 aa, unidentified
MSKLLKNFIGIDISKTWFDVAVIKANQSIENVHNQFSQTPDGFKKLVTWLHKQDIILNDETLFCMEYTGIYNSGLVNFFVEQKAQLWVEMPLRIKRSTGFERGSDDKTCAIKIAGYAFRYQDKMQLWRPVDSSIEKIKNLISQRDRVINAITQLTVPIKELSECGCKSEAKELEKVQRSSLKALKKTKDSIEQLIVKTVQVDEVITKKVQQVQSIKGIGKVTAVALLVYTKGFTTFSNAKELACYCGIVPFTKKSGTSIRSKPTVSPHANKKLKKLLHLCALTSIKNDAEMQSYFNRKVQEGKNKMSVINAIRNKLIHRVFAVIRDDRFYEENYKRKCA

SEQ ID NO: 495353 - protein, 366 aa, unidentified
MQKLSTRRVMENRILKGHQLTIGLDLGDRWSFYCVLNEQGEVLREEKLPTTPEAMKRTFEKLPRSRMVLETGTHSPWISRLLTELKHEVIVAHAQKVQLITKSSRKDDRHDARTLARLARIDPQLLGPVRHRSAKAQIHLTVIRARAELVSARTALINAARGLAKSHGERLPKRGTQQVGRELATTLSIALREVLEPLLQEVESLNERIREYDQRIEQTAKQVYPEVALLKQVKGVGTQIALTYRLTIDDPHRFTKSRDVGCFLGLRPGRRNSGQSEPQKNISKEGDRYLRTMLVQGAHYILGPFGEDSDLRRWGLKLAERGGKNAKKRAVVAVARKLAVLLHRLWVGGEVYEPLRNTHRAMGAAA

SEQ ID NO: 495354 - protein, 361 aa, unidentified
MIGNRTSVGLDVHARSVVACGLDGQTGELFERRLTPDHGEVAAWVRSLPGPVGVTYEAGPTGFGLARFLAAEGIGCLVAAPSKLQRPVGDRVKTDVRDARHLARLLHLGEIVAVAVPSVEQEAARDLVRAREDVRGDLMSARHRLSKLLLRQGIVYYQGQPWTGVHDRWLRSQSFTLPGLQLAFDIAYDTMLTTVARRDRLDAAITTMAGDSEFTPVVTRLGCLRGVSTLTSFGLAVEIGDWMRLTGRSIAAYLGLVPTESSSGGSRSQGSITKTGNGHARRLLIEAAWHHRQPYRRPGVDLRRRQQRATPAARDRGEQANRRLAARWAAFDARHKRAVVANTAIARELAGWCWSLAVLGG

SEQ ID NO: 495355 - protein, 427 aa, unidentified
MAYRIAGIDVHKRMLTVVVCDVEGASECEFERGQYGSTPGQLRLLAAWLVEQQVEEVVMESTAQYWKPVWATLEQYWKPLRQGREGAGPMSGTLHLAQAQSNRGPRGRKNDFADPERLVKRLVAGELILSFVPSAEQRLWRTLMRSKYQLRCNQVQLQNRLEALLEEAHLKLSSLVSDLLGLSGRRMLTAIAEGETDPAAVAARADYRLRATPQELCDALGACGELYPVYRRLLKTALEDWQRTEAQITQLGQEMATLLVAHQEKVQRLAEVPGLGVDSGQQIIAEVGASAATFPSAKALSSWVGVCPGEEESAGVNHNRRSPKGNRHLRRILSQSANAAVKLKGSVFAVLYRRYVVRFGHNQTIAVIAHRLCRLIWKILHQGVRYEERGPAVSQKSKQKRTARMVRQLRSLGYRVELLNAPVGVPA

SEQ ID NO: 495356 - protein, 313 aa, unidentified
MAACWVGIDVAKAELVVAIAPQGEVFSIGNTPEGVTNLVMRLRKARPQCIVLEATGGYETLAATTLAAVPLPVAVVNPRQVRDFARSTGQLAKTDKIDAGILAAFAQAVQVEVRPLPDAAARALHAVVSRRRQVVEMLAAERQRLHQANAVVTPSIGEVIRVLERQVQDLDDDLHQRLHNSPVWREAQDLLKTIPGVGDVLATTLLAMLPELGQLNRKAIAKLVGVAPLNRDSGQWRGKRKVWGGRANVRAVLYMAALVGTRFNPVLKGFYARLLAEGKPKKLALTACMHKLLLILNAVLRTHQPWTPECHNA

SEQ ID NO: 495357 - protein, 409 aa, unidentified
MALSVLMVGIDVSLRSHHVHFMDEQGSSLRSFSVSNDLPGAQCILDAILTTAKRHSCSKVRIGMEATSNLGWHLAHFLKRELSALSPDVFVLNARRVARFKRGYDTLPKTDSLDAWVIADQLRFGRLPHAMQESVQFQALQRLTRTRFHIMQTIARDKTYFVNQVFLKFSGLRQDNPFSKMFGSTCLALLQELEPEQIAAMPLEKLVDFLQENGKNRFAEPEKLAQLLHKLARSSYRLDKSLADPVNVSLASILNVIRAMEAEVARLDKEIERLLKGIPQTLTSVKGIGPVFAAGILAEIGDIKRFPKHSALAKFAGLVWSRYQSGEFESQETRLMFTGNRYLRYYLIQAANLVRQHDPEYAAFYQKKYHEVPKHQHKRALVMTARKLVRLVFMLLKTNRLYIPPERRG

SEQ ID NO: 495358 - protein, 317 aa, unidentified
MNVLGIDVSKADFHAWLLQSDGHVDKRFANNAGGFGDLRKWLQTQGSPKPHVCMESTGNYFRPLATALFEADIVVSVVNPRRTLHFAKSLLQRTKTDKADAQMIARFCLTQRPAAWAPARPEILEIRGLLSYRHQLVGETTRLKQIVATVEVNKQLRRLHEAHLTSAQRAIAVVEKQLRQIVAANRSLSAQVAAVEEAKGFGFLTAITLVAHLPIDRLRSPKAAAAFVGLSPREHQSGTSINGKPRICKAGNAQVRAALFMPAQSAKRFNPILAAFAARLEGRNKPSKVVTVAVMRKMVVLAYSRLKALEAKPVPAA

SEQ ID NO: 495359 - protein, 312 aa, unidentified
MSDSTIGIDISKAHLDACRWPGAETRRFANDARGHRALLTWIGPDIGRVVFEPTGRYHRPLERAVQRAGLPFARLHPTRARRFAEATGILAKTDRVDAAMLARMGALLAPEPQAPTPEVQAELNELHRARIAMQADQLAAENRARAAELPLLRRQATRAARAAERAVAEIDAAMAALVAAEPDLARKAAILVSIPGLGRVTAAAILAEMPEIGTLDPGQAGSLSGTAPITRESGRWKGQARIRGGRAALRRAVYMPALSAVRCNPDLKATYDRLRAKGKPFKLALTAVMRKLLILANALIRDDRTWAPAKPA

SEQ ID NO: 495360 - protein, 345 aa, unidentified
MSERYDGHEIVGLDLHRHRTVMVRMTPAGEQLEVTRFANDEAVLRDQVAKAGPAPEVVLEATYGWYWAVDALQSAGAAVHLAHPLGVKGFGYRRVKNDVRDAADLADLLRMGRLPEAWIAPAEVRARRELVRHRHKLVQAATSLKAQVHAVLAKCGLQVPVSDLFGVAGSRQLRELPLAEPFRARVDSQLRLLEAFDAEIARFDRLIREAFDGDQRYRVIQRVDGVGPVLAAVFSAELGDVSRFTGAPAVCSWAGLTPKHRESDLRVHRYAITKQGSRLVRWAAIEAVQRARTTSPMRRTYDRIVDRRGGTGKNLAKVAAARKLLTLVYYGLRDGEIRCLTAATA

SEQ ID NO: 495361 - protein, 345 aa, unidentified
MKYFAGLDVSLEETSICIVDETGRIVKEARALSDPQALCDALKGTGLPLERIGLEACSLTAWLHDGLHAEGLPAICIETRQANAAMKTMPNKTDRNDARALAQIMRTGWYQQVHVKSRQCRLWRSLLVARRTVLNEMRSIENVVRAMLREAGVKLGLPSRSAFAGRVRELAGADAQMMAMVEPLLAILAVMLGEFARLTKQVLDIVRKEEVCRRLMSAPGVGPITALAFRATIDRPERFGSSRAVGAHLGLTPARYQSGETDIQGRVSRCGDELARTALYEAAHSLLVRSKKWSSLRAWGMTIARRRGMARARVAVARKLAVILHRMWAEATEFRFGKEPAAAAA

SEQ ID NO: 495362 - protein, 353 aa, unidentified
MEYVGVDYHTRYAIATRMNKDGDILSKDRIANIKDDIRSYFSALPTQSQVVLEATNNWAAFVEWTGDLPIEIKLANPSKTRAIASAKIKTDTLDSRILADLLRTDFIAESYLAPKEVRDIRELVRYRMTLVRLRSQLKTRIRSVLFKVGERILTANILGPLSKRTISKFSLRDIYREEINSCMTLAESFTKQIAVFEEKIEKQATLDEDTKLLMTVPGISFFSALLITAEIGDYKRFASGRKLCCFAGLVPSIHASGGKIQHGRIIKQGSANLRFALLQAIPHLVRKHQGLARHYQRISRKNQRKTARIAISRKLLAIMLTMLKTRQPFRVDTGAKRESIAHLPASARALNQL

SEQ ID NO: 495363 - protein, 350 aa, unidentified
MVVVGADVHKRTHTFVAVDEAGVKLGEITVKAETKGHDKAIRWALRNFGDELKWGIEDCRHLSARLEIDLLDAAQAVVRVPPKMMAEQRRTARTRGKSDPIDALAVARAVLREPGLPEASHDEASRELKLLVNHRDDLVKQRTQVINRFRWHLHRIDPTVDPPARSLDRAKTRAGLTEFLVGKDGIDARLARELLEDIGALTTRINALEKELTALVAEQAPALLELSGCGALTAAKIVGETAGINRFADDAKYAMHAGVAPIPVWSGRTKGRVRVNKSGNRQLNAALHRIALTQIQRDGLGRAYYDKRIATGDSKTEALRCLKRRLARVVFNTLKNNPSTATASDLAAAA

SEQ ID NO: 495364 - protein, 428 aa, unidentified
MADTTNATPALNLVAIDIARYWNYVLLETAAGKLHRFKMGNTAVDYDRLIGFLQSLSGPCRVGIEPTGDYHRPIAYRLLMAGFEVVGINSVAVARYRDAMFNSWDKNDPKDAAVILEMLRRQAYQRYVDPMVAGTHDLQEIAKTYYQVSRARTKAQNSLINHGLPLYFPEMHRYWATTRNEWFIRFLIGFPTPAHVRSLSQEAFVLAAWDLVGRKVNKQAKLEEIWEIAGSSAALPHAPDSLAVEMFRVTLKRYQELNQLRASIEERAEQVLAGNEAFEHLKTLPGVGPVIALTILAEAGDVKRFAHHRQFLKYCGFDLAKQQSGNQRGREQLSKRGNARLRLAFWLAGAGAVRMRENSFRDKYERYIKADPKNADLRRKALTAVAAKMARVAYSIVKTNQPYRQFFEQALPSGSIPHSVAVGAHATP

SEQ ID NO: 495365 - protein, 339 aa, unidentified
MQVTTIGLDLAKNVFQVHGVTEAGEIAFNRSLRRAQVLTFFEGVPPCLVGIEACGTSHYWAREIARLGHEVRLIPPAYVKPYVKRGKSDAIDAAAICEAVTRPTMRFVAIKTPEQQALLALHRVRDLIVRQRTQIVNMLRGILAEFGIVVRQGAGHAIAFAKQCLEGVEQGLPDLMRDIVTNLCHQLVALHRRVLWYGRQLNRAASLDARVARLRTIPGVGPITASAIVASIGDGHQFSNGRSFAAWLGLTPLNRSSGGKERLGRISKMGDRYIRRLLVLGMTSRIKQIQQRPDQFDPWFSAVLERKPAKLAAVAMANKTARIIWAVLTREQDYQIRAA

SEQ ID NO: 495366 - protein, 350 aa, unidentified
METAYDGRQVVGMDLHRRRSVLVRMSEDGRRLGTARITNGAAELRKAIAVAGKNPRVVLEATYGWYWAADVLVAAGAEVHLAHPLGVKAFAYRRVKNDEKDAADLADLLRMGRLPEAWIAPAEIRELRELTRYRIKLVQRRASYKDQVHAVLAKLGIAVTCSDIFGVAGNIWLDELPLPQPYAGKVASLRTLIADLGTEIALLDAVIADLLEHHDGYRALQALPGIGPVLAAAIVAEIGDIHRFASPAKLCCWAGLTPRHRESDTKVTRGHITKQGSPVLRWAVAGAIQRQPAGSPVRGVKDRIIARRGNQAKNIAKTAAARHLLTAVFYTMRDGQARSLATRTAAQAAA

SEQ ID NO: 495367 - protein, 347 aa, unidentified
MRLYTTQPPLYCGIDLHARTMYVCILDQNSEVLVHRHMKTAPEAFLQAMAPYRPGIVVAVECLFTWYWLADLCADEGISFVLGHALSMKALHGGKAKNDKIDAQKIAALLRGGMLPQASVYPAQMRATRDLLRRRMHLAHKRAELLAHVHNTHSQYNLPAIGKKIAYKANREGVAERFAEPAVQKSIEVDRALSTYYDELLRDVALTIVKTAKHHDANTLYLLQTVPGIGKILSLVLLYDIHQIDRFPRAQDFLSYCRLVKWSKESAGKRLGTSGAKIGNAHLQWAFSEAAVLFLRDHPAAQSYRARLEKKHDKGQALTILAQKLARAVYYMLKRQVAFDTETFFQR

SEQ ID NO: 495368 - protein, 391 aa, unidentified
MVCVGIDVAKDKHDCCILDSDGTIRADCITIPNNMDGFKQLLQTIRDCTKKSDKIKVGLEATGHYSYNILGFLLDNGLPTYVINPLHTNLYRKSLSLRKTKTDRVDARTIATMLLSDVDLKSYTDTAYHNEELKSLTRYRFDKVRERAKLKQSVSRLVTILFPELEKLVPSLHIASVYALLSEYPGAKQISEIHLTKLTNLLAKASKGRYGKDKAIQIRDAARTSIGSVMPAKFLELKHTIKLIRELTSEIDEIEVSIQKIMDELNPPILSIPGVGIQSAAMILAEIGDFSNFESPDKILAYAGCSPSTYQSGKLTNCYAHMEKRGSRYLRYALYNATKYVCHWNPVFAEYLAKKRAEGKHYNVALSHATKKLVRLIYALQKSGKAYLVAA

SEQ ID NO: 495369 - protein, 343 aa, unidentified
MGQHIGLDVSLKDTAIAIREDGHRIWRGKCRSDPASIAQTVRKHAPEPQSVVFETGPLATWFFHVLKGEGLPAICIEARHAQKILGETLNKTDANDAEGLARLAETGFYKAVRVKSFESMLIRSLVAARTQLLSMTTQLTNQIRGLMKTFGLVVPKSKGSVFEANVERLLEGYVELAQIILPLLETWRAIRKRVSALNRQLRHAARHSPSTRLLMTIPGIGAITAISYVAAIENPKNFPRSRSVGAWLGLTTRRYQSGEVDFDGHISRRGDHRLRGLLYEAATSLLTRTRADTVSDLKTWGLQLRERIGFKRAAVAVARKLAVIMHSMLRTGQEFIPTREVVA

SEQ ID NO: 495370 - protein, 430 aa, unidentified
MPTESLPTALANLPSWMRYERFFGLDIHKQYITVVAINREGEVILQVRRVPTIEWPQWAAKNLGHTDAVVLESTTNAWTVFGQTVDHVGRCVVAHPDRKRRVKTDIQDAKGWAERLLVNDIKEVWVPPQHVRDLRGLISYRIRQITVRVRLKNRLQSIAHSNQLIPPEGALFAAKNRVWWKNLALSQIERFRVQQDLASLDLIELQIKEIDHKLAGFSQDEQWREEFPYLMQLPGVGLIVGMTVLGAIGDISRFESPQQLVGYSGLGASIEQSGDKHRNGGITKTGRKDLRFVMVEAARVAVRQNGRWKKQYERLEPRIGSNKAVVAVARKMLVVIWHLLTKKVVDQFANPDLVAGKIMKLAWQLTEEQRGGMKLKEFIRYYLTILGLGKHVKKLFRGGRNRPIATLEELIARFPELTDLPEFEAALAEP

SEQ ID NO: 495371 - protein, 356 aa, unidentified
MDNVNKLDFTGQRIYTSLDTHKKSWKVSIFTEHFEHKTFSQPPDTEVLVNYLRRNFPGAEHRVVYEAGFCGFWIHDRLQEKGIHCMVVNPADVPTTDKEKKTKSDPVDSRKMARSLRSGELKGIYVPHREKLEDRSLVRTRHAMVKKQTRCKNQIKSSLYFYGVEIPEELSKAHWSRKFINWLTEIQMTRASGNTALKTLLSELLYLRQTISDLTKEIRRLAHTQEYAENHRFMKSVIGISTLTAMTFLTELADINRFKNLDKLASYIGLIPDVHGSGEKEINSGITSRCNPHLRGILIESAWIAVRKDPAMMMAYNQLLPKVSKKVAIVKIARKLLNRIRYVLKNKQEYVPAVVQ

SEQ ID NO: 495372 - protein, 405 aa, unidentified
MNMNAVGIDVSKRKSMVAILRPGGEVVAKPFEISHLSGDLQSLIDRIHSLDGESRIVMECTGRYYEPIARELVAAGLFVCAVNPQIIHDYQDEDNSLRKVKSDKADSLKIARYTLDRWARLKQYGLMDEVRNQSKTMNRQFDFYMKHKTAMKNNLIGLLDQTYPGVNSYFDSPAREDGSQKWVDFAATYWHVDCVRKMSRNAFVEHYQKWCRRKKYNFSRTKAEEIHGTAKELVPVLPKDDFTKQILKQATEQLHVASQTVEQLRTLMNETAATLPEYPVVMAMKGVGPSLGPQLMAEIGDVARFTHRNAITAFAGVDPGVNESGDYSQKSVHASKHGSPVLRKTLFQIMDVLIKTKPQDDPVYLFMDKKRAQGKPYYVYMTAGANKFLRIYYGRVKEYLASLPQ

SEQ ID NO: 495373 - protein, 391 aa, unidentified
MVCVGIDVAKDKHDCCILDSDGMVRADCFTISNNMDGFKQLLQTIRNCTKKSDKIKVGLEATGHYSYNILGFLLDNGLPTYVINPLHTNLYRKSLSLRKTKTDRVDARTIATMLLSDVDLKSYTDIAYHNEELKSLTRYRFDKVQECAKLKQSVSRLATILFPELEGLVSSIHGTSIYALLSEYPGAKQISEVHLTKLTNLLTTASKGRYGKEKAIQIREAARASIGSVMPAKSLELKHTIKLIQELASEIDEIEDSIQKIIDELNPPILSIPGMGVNSAAVILAEIGDFSNFSSPDKILAYAGCSPSTYQSGKLTNCYAHMEKRGSRYLRHALYNATKYVCYWNPVFAEYLAKKRAEGKHYNVALSHAMKKLVRLIYALQKSGKAYLAAA

SEQ ID NO: 495374 - protein, 415 aa, unidentified
MLKVVYPICCGLDVHRDFVYACIATTVNGVTTYKSHRFSTFTKGLRELLSWLLASNCKDVCMESTGKYWIPVYNILETDCKIVLAHPKYVKAIRGKKTDKKDAKWIADIFKHDLVSGSFIPPADIRQLRDLVRYHAKLTNFTTGEKNRAQNCLTVSNLKLDSVFSDVFGKASSKIISHILANPSEKLSDVSAFRTKGMKATDEEILEAVDGEIYPEQAEKLRIIRDHMSSLDLCKANLQSLILSTAEKYIPEIDLVCTVPGIATFSAISVIGEIGVDMSVFPTSKHLCSWAGLTPQNDQSAGKKKTTRISRAGAYIKPLLVQCALAAVKSKNKHPEVYNRYSALKKRRGHKKATIAIARMLLTAIYNILKKHEPYNAEIYRKSDAPPEHRNVSVEEAIFILQRQGYLISSPVSIE

SEQ ID NO: 495375 - protein, 411 aa, unidentified
MDTIVERPGALDVHKAQVTACVRTPGAGRVREAHFAEFQTTVAGLLTLRDWLAAHGVTQVTMEATGVYWKPVWAILEDDFELLLVNARHVKQVPGRKTDMSDAAWLCQLAEAGLLRASFVPPKPIRALRNLTRYRKTQIQERAREANRLHKALEDTGIKLDCVASDILGVSGRAMLDALVSGTTDPQVLADLARGRLRAKLPALREALQGRFDRMHALWIGSILAHIDFLDEQITGLTEMIAEQIAPFEKAVELLCTIPGVQRRTAETIIAEIGIDMTIFPTAKELASWAGQCPGNHQSAGKRRSGKTRNGSKWLDWGLEEAALAATRSKDTYLAAQYARLRPRRGHKKALGAVKHSIIVACWHMLSTGEIYNDLGGDYFQRRDPTKTTKRLVAQLERLGHTVTLQDAKAA

SEQ ID NO: 495376 - protein, 377 aa, unidentified
MQEMYGLLPLAGVLRYKVKSIHSNQLLPGAHTMEQCNVIAIDLAKDIFQVCIMTKHGKIIFNKAMKRDKLKAWLAKQNLSLVAVESCGGAHYWARFARSLGHKVMVIPPKQVKPFRTGQKTDANDAVAIAVASRAPNIKPARVLSIEEQGLQSIEKMRSLIDKQKLQLSNQVRGLLLEFGIVINQSIKSFKERIPEILEDAENDLSFPMRKAVLQMWALYSRLDDDFEVINNELIQLTAQDFDCQRLMKLEGVGPITAVRLKIQLGSGEHFNSGRQVAACIGLTPKQHSSGGKVKLGSVGKGSCDKPLRSCIFLGARAVVSKLKSRPAKTEKERWLKALIERRGVNCASMALANKTARTAYALLKNNTDYKPVLIAA

SEQ ID NO: 495377 - protein, 331 aa, unidentified
MKNRLIIGIDVSKLVLDVFILSCNFHFTVENSPKGFAALLEISCTKLKTSKQQLYFCFENTGRYSRMLAVFFHQAEITFFRIPALDIKASKGISRGKTDKADARDIALYARRKGAEMEPTKISSAETSELRQLVSLRDKLIKHRTAYKNSLNDLTDCYYEGETDFIRQTQLRMVKQLDNEIKNVEKRMDTIICSMPDWEENYKLIRTVRGVGPVISRYLIIYTENFTRFTKYKKFACYAGIAPFEYASGTSVKGRTRVHPCANKQLKSLLNMAAMNAIKINGEYKQYYLRRQQEGKNNMSTLNIIRNKILARIFAVVRRQSPYVDLHKFAA

SEQ ID NO: 495378 - protein, 366 aa, unidentified
MEMYVGLDAHSKRSVFVIEAEDGRVVARGDIPTTPAGFRQLRQEHELPAETPVALETGTVAFYAARELARVGLRPVVIDAHEVRVKAHRPRQKSDRRDAFELCEGLRRGQYRAIVHVPPAPIGALRETLSRRRHFVAVRVAEVNAVKRLLRAAGLGLLSKSLGTEAAWEKLLAALATEPALRTYVAQHHALWRCAREQIVALEETLAAQPTTIATAAARLQTVPGVGPLVSLTAVAVFSDVHRFPSAKHAASYAGLVPSTDQSGDRDRHGHITKRGSAALRTMLCEAAHHAQRPTHPLHPYFARVCASRGYTMAVVAVAHRVCRILFALLRDGAEFDLAKLAVEKGPFRRTTVQRYRLKRGAARRA

SEQ ID NO: 495379 - protein, 358 aa, unidentified
MVNEKLYHGEKTTKSYQGGALMEVYAGLDLHSTNTYVAMIDGENKVLYKQRRRNDVPAILSALDPFKKDIQGVVVESTYNWYWLVDALMEAGYLVHLANVSAIKQYEGLKQVDDRRSSLWLANLLRLNILPTGYIYPKEERPTRDLLRKRLQLVRNRTSHVVSVKNILARNLGVRMKSNDIKKLRASEVRALFPDKEMRLMIMSSVGLIQHCQEEIDAIEKLIAKKVKIRKEFAKLLTVPGVGEILGLTIMLEVGHIDRFPTVRDYSSYCRCIRSIRTSNGKVTGYGNSKNGNKYLAWAYVEAANSARRWHEAIRNFYERKRAKTNKIVAIKTVSHKLARASYYVMRDAVDYDQTRFA

SEQ ID NO: 495380 - protein, 428 aa, unidentified
MAEDTTLTSQTWLVAIDIGKSFHAVLVEGGDGTRQQFRMANHVEDYDRLVAFLRGLPGPARIALEPTGDFHRTLAHRLLREGFSVVSVSSVAGARYREALFNSWDKNDPKDAHVILQLLKHGLVQHYHDPLLAGDHDLQELAKTYHQIVLARKRLADSLLNHYLLLYFPEMGRYWESTRVEWFVAFLEQFPTPAAVQALPKEAFVRAAWSVVGRKVNKQAKLEELYELAQRSIALPVAVDSVAIETFRLQLAQLRRLAELRQTLEARAHALLKDRADFQRLCSLPGVAAILALVILAEGGDLRRFPHHRQFLKYCGLDLAKCQSGQFRGRARLSKRGNARLRMAFWMAAQRAVRMNENSFRDKYERYTRHDSGNPDVRRKALTAVAAKMARVAYAVVKHDQPYHGYHEHALPSGSIPLKRAVGARATP

SEQ ID NO: 495381 - protein, 336 aa, unidentified
MDHPTLPYTHIIGIDAASQKFDVSWLKDRNKHTYRSKVLENNPAGCLKLLEWIRKNITTNLTTVHIIMEATGVYHELLAYFLHDQGVAVSIVNPAYIHSYAQSLGAVHKTDKGDSQIIARFGAERNPAIWQPEPKSVRELKAKLNRLDALKADLQREDNRLHVAQISGVPDEVMLSIHQIRQALTQSIADLEHDMDDHINRHPDLKNDVALLQTIACVGRETSMRMAVLYRSKQFTKASQMAAFLGLVPRKRESGQYKGKVTLSKRGNNAMRALLYFPAINACRFNPDIKLLRERMLARGKVKMQTVGAAMRKLVHICFGVLKHQSVYEARVAEPV

SEQ ID NO: 495382 - protein, 522 aa, unidentified
MPRPQNARPRRSRRKTFVLQKPNGQLVPRVQQVGPEHFGIVAIDCAKARSRYFLADFYGRTLLEPMTLSHSRGDFQAAIDRLRQAALQHDLKDVVIAIERTGEYHRPVQRAFRQAGYETRLVHPFTTKQYRQPADPGNKTDDTDLAAIFRAATQGFGLAEPAWPDDYLTIQLLRRHRRDLVDKNAILQCQIRELLHAAMPGYAECFCHFWDDCPAPMIFARHTTSPEAVRQAGLAGLQQIAAQAQLRCRRQTLPKILAWAEQAPPGHAHALDLRRILGTLDDDRLAKTQQILGLERSLAPLVVRTPYVLLLAIPGVNIVTVADLAGELGPIHLYVNANAITGRAALMPSRYQSDRVDCANGPLCRRGNRRLRAVLMQTANNLIQSNHYFAARAERWSRAGKDPRWIRVKVAKSFSRLAFAMVAGRQLFPHPCRQPHHYVLGKLLEFHSEHGTDPETMRRDLEAVVEQLPGRSRAAEARPLQEQLDQLAHRRGPQPLAQILPLVLARLAGRMVQSTPNESAGP

SEQ ID NO: 495383 - protein, 490 aa, unidentified
MARLLEHSPRPESTYRPTWAVVFGKAEKMQDSDQRKDNADSSKQIAGLPVVRHKVAGIDLGSERHWVCAATVEGSGREVADFGATTCELIRMAKWLNARKVESVAMESTGVYWIAPHEVLEAEGLEVMLVDTRQLARVPGRDKKSDPFDCEWIQRLHSCGLLMGSFRPKEAVCMLRTLVRDKGNLVAEAGDWLRRMQKSLDQMNVRVHRAVSDIDGVTGMAILRAIVDGERDARQLAKLRNPRCHKSEEEIAEQLSGHWREDHLFSLRQGLKMYDAIQERITDYEKEILQKLAKMEREECRGQEVPKSKKPQKGRAIQSRGAEPMRQALYRMSGVDLTGIDAIGVETVQVVLSEYGPDLSRFPTEKQFVSHVTLAPHKPTSAGKPVKKKKRNSASTRVAAALRMAASSLRHSETALGAYYRHIARRIGGDVAVFATARKLATIIYRLLRWGQPYVDEGAQTYEQRYRENRIKSLTARAKELGYQLTPTTA

SEQ ID NO: 495384 - protein, 350 aa, unidentified
MITIGCDFHTRIQQIAMLDPTTGEIIERCLEHENDDVERFYAALPGPARVGIEATINARWFEKILDRYHHELWVGDAAEIRAAMVRKQKTDSRDAAHILDLLLTNRFPRIWMPSPADRDLRQLLRHRHKLVGYRTSVMNQLHGLAMSQRLCRKRKLWSQVGRRELEALVLDPWASRRRQELLQLLDQLNPWIADLDREVQKQAEGSPEATHLMKQPGVGPVTALCFVLTMGPISRFQRSKQVVSYLGLNPSEESSGGKQRLGSISKQGNSLMRYLVQAAQTASQSDPELRRFYQRLKFRRGHSAVAKVALARKLAVRLYWKLREAAQPIPPARMQGSSRNPMVDPSPSRS

SEQ ID NO: 495385 - protein, 373 aa, unidentified
MPRYSTAFGMDVHLRSTTVCALDAETGEAVTRRFRGNPWGEVAEWMSGFPGPSLAAYESGYLGFAPQRELSGLGVDCVVAAVSRVPRSAADFSSKNDRNDAARMAKAILSHDVTPVWVPSPEIEGLRDLAGAHDAATARLAAAKQRLLAFLARRGYAYGGTTPAGNPRRYWTYDFLRWLDKVRPADDGGIRALAALRNEVEAAAETRDDLLAEYRAAVAAGPLSAEVEALQSIKGCGFALAAAFASEVGDFSRFRSGRQVTSYFGLAPKQRSSADSVRLGGISGAGNALVRRLAVEGSWSYVQASHQPKLMPKGSGVPLEVRMHGRKGSERLLRRREEMLARGMPQAKANAATAAELVRWLWALGAMCREGAE

SEQ ID NO: 495386 - protein, 417 aa, unidentified
MNAELSQFTAVIGIDWADAKHDICVQSSDSDARELSRISHNVEKIDKWAQSMYERHGGQMAVALELSKGPIVSALQKYDFFVIYPINPATLAKYRQAFNPSGAKDDPTDAELALDILLNHCNHFQPLNPQSVEMRTLMTLVEHRRQLVNDKIRTTNRLRNALKQYYPQVLDWFDRIDTPLFCAFIKRWPTLAQAKGARHNTLEKFFQQHNMYRKQLLERRAESIKSAQPLTRDEAVIRPYRLQVLTLVDQLEVALNSLRTYDDEIATLAPQHPDYELFSVLPGAGASYAPRLLVAFGEQRERFANAAEVQKCSGIAPVIERSGQKTWIHWRWQCSTFLRQTFVEWAAQTINKSYWAGLYYYQQRAKGCSHQAAVRALAFKWIRILYRCWVMRTPYDESTYLKALKDRGSPLLEGKTT

SEQ ID NO: 495387 - protein, 465 aa, unidentified
MSTDKRLQANRRERKELARRLRSEDPGLEVMHPDAAGIDVGNGAHYVAVRPDRDADPVRRFECFTADLYRMANWLRSCGVKTVAMQSTGVYWIPLYDILEERGLAVFLVNARHTKNLPGRKSDVQESQWLLKLHTYGLLNNSFQPTSDIRVLRTYWRQRAEHAVGMATCIQRMQKALTQMNIQLANVISDLSGRTGQAIVRAILAGERDPKKLAELSDCRIRATREEVAKSLEGNWRPELLFVVEQQLEMYDIDQHRIAECDQKLQQHLSSFIDTAFPVAKERLSQANKSKPSRYMPQFALSGELLRITGVDLTQIDGINVMTAQTLLSEVGLDMSRWKTEAHFASWLGLCPDNRISGDKVLSRGTRRVVNRAATALRIAATTLLKSRTYLGAQYRRLRTKLGAPKAITAMAHRLARLVYRMLKYGQQYIDKGAEYYEQRNRQQQIDFVKKRAAQLGLMVTAACP

SEQ ID NO: 495388 - protein, 391 aa, unidentified
MPEDAPRPAQAAIRTDLGAIFVSLELSRRAWLITSLSPGGGEKMSKHSVPASDVSGLLRRFAELRRKATARTGRDFPIIVIQEAGLDGFWIHRVLQSEGIESHVVDAASILTSRRRRRVKTDRIDGETLVRTLMAFKRGEPRVCSMARAPTPQEEDRRRVCRERRTLVGERVKHVNRIKGLLFAQGVFGYEPLRKGRRERLEDLRTGDGRPLPVHLKAQIIRELDRLEVLLEQLKTVEAERDALLKPATEEAVSPAAMLARLKGIGPETAAVLWSEGLFRPFDNRRQVAAYAGLAPTPWQSGSIDHEQGVSKAGNPRLRTTMVELAWLWLQNQPTSALSLWFHERVRRLGGRMRKTTIVALARKLLIALWRYTTAGVVIEGAVMKAAPATI

SEQ ID NO: 495389 - protein, 405 aa, unidentified
MVTVGVDWAEAHHDVAIHDPQGRSLRTGRIDTGPAGFSQLLAMIADCGAAPETTAVAVETDKNLLVVALQGAGFEVFAINPRAVARYRERVGQAGAKSDARDAAILADILRTDRHLHRVLPHPSEQARAVKALARQHQEAIWALHQTLSRLRSLLLEFYPAAVTTFPQLKHHTALAVLAAAPTPAQGRRLTRRQVVTILHRVGRRNDAGLAEQITTGLRGPALAQPQPVEDALGVSVAALVTVAQTMTAGIDALEAQLAIVFAAHPWAPVLRSAPGLGPVLAARVLAEIGDDPTRFATTANLRSFAGTAPVTRASGKARWVQARRVRNKRLADACHWWAFAALTRSPGARAHYDRRRAAGDHHNAALRHLANTLLSKIWHCLQHQQAWNEHHAWLTPANPPAVAA

SEQ ID NO: 495390 - protein, 411 aa, unidentified
MDIVHERSVGMDISKRDAKVCIRVPGKRRGQFTSTVTTWGSTTNQILELRRFLEEQNVTVVVMEATSDYWKPFYYLLEESLPVMLVNARHARNLPGRKTDVSDAAWLAQLGAHGLLRASFVPPGPVRELRDLTRARAVTVQDRTRELHRLEKFLESTGIKLSGMVSELTGVSSRAMLEALILGERDPQVLAQFARASMRSKIPALTEALTGMFGEHHAFMVRLHLDRIDQLARTITVLTEQIDKVMEPFRAAREALSTIPGVSTLVADVIISETGADMSVFPTAAHLASWAGVCPGSNESAGRVKSTRIMPGNKYLKGALGIAAMSASRGKNTYLSVKYKRIALRRGRVKAIVAIEHVILTATWHMLANGEVYTDPGADFYLKREPEQTKTRAIRQLKTLGYDVSLTPAGA

SEQ ID NO: 495391 - protein, 363 aa, unidentified
MAKRSTFVGLDVHKESIAVALAEGGRCGEVRTYGTVGGDLDALDQVRRTLARPARTLHFVYEAGPCGFTIFRHLTAQGEDCAVVSPSMIPKRPGDRVKTDRRDAVTLARLHRAGELRPIYVPNDSDEALRDLVRAREDAVEIAREAKQRLKAFVLRHGLRYRGRAGWTIPYRRWLAGLTMPDPAPQVALQEYLATVEEAEHRVDRLTEQLRQLVPLWRWAPVVDALQALRGVSFITATGLVAEIGDIRRVTRARELMAYLGLVPSERSSGPLTRRGRITKAGNAHARRLLAEAAWAYRSVPRIGRQMQLPATIRALAWKAQLRLCGRFRRLNARGKPRSVIATAIARELTGFVWAVAKEVPAP

SEQ ID NO: 495392 - protein, 351 aa, unidentified
MSEKLNSVIAVIGIDIGKNSFHVVGLDGRGAIALRQKWSRGQVEGRLANMPACLIGMEACVGAHHLSRRLQLLGHDARLMPAKYVRPYSRGQKNDFRDAEAIAEAVQRPTMKFVATKSADQLDLQALHRVRERLVSQRTGIINQIRAFLLERGVAVRQGLRFLRAELPSILATHCDVLSARMVRLIGDLAGDWRRLDERIEGLSGEIEALAHQDAGCERLMSVPGIGPIISSAMVAAIGTGDAFGKGRDFAAWLGLVPKQFSTGDRTVLGKISKRGNRYLRVLFVQAAWVVLIRPKNWARYGLKPWIEAAIRRLHRNVLAIALANKLARIAWSVLAHGRGFEARSIAAQTA

SEQ ID NO: 495393 - protein, 343 aa, unidentified
MQAVTTIGLDIAKSVFQVHGIDAEGRVIIRRQLKRRYVLGFFQKLPPCLVGIEACATSHHWSRELRALGHTVRLMPPAYVKPYVKRQKNDAADAEAICEAVTRANMRFVETKTPEQQSCLMLHRTRQLFIRQQTSVINAIRAHMAEFGIVAAVGRKGVEQLLAIVTDAGDERVPEVARTCLAALGVQLRMLKAQILEFDRRIMAWHRSNETSRRLDAIPGVGPALATALVASVADPKAFRSGRNFSAWIGLVPKQHSSGGKDKLGSITKQGDRYLRSLFTAGALAVIRYAKINGTQHRPWLAALLARRPTKVAAIALANKIARMAWAMMARGERYKEPVALAA

SEQ ID NO: 495394 - protein, 400 aa, unidentified
MNPVVGLDVAKGESQVQAFLDQSKPYGKSFSMKHTKEELDQFLDFLKEVEEVAGQMPMVILESTGHYHSPVIQYLEEQGILYILLNPIISYQAKKSSLRKVKTDAIDAYQLCVLYYKEDFEPHKIRGIQLLDLRNLSRQQEIVTNMYVEAKLQFHTILDQVFPEYRKVFGDLYSKVSLLMLKEYPTSEAVLIAGESELAESVIEFCSSRSGEWAWAKAKKIMDSASRNPFQKSVYESHVINLRMYIELLFHYQGHLSDLEDRIVALANELEEYKIIQSIPGIGEKIAATIISEIGEIDRFNHPKKLVAFAGVDPSVHSSGKFTATINRITKRGSSRLRHSLYLAVLCGIRSSRNKKLKAFFDKKKSEGKPAKVAIVACMNKLLHWVYALLKRKEAFLDLS

SEQ ID NO: 495395 - protein, 387 aa, unidentified
MDDREIIRLEQFRQLKKEIRGSEEHLIVGIDVAKQKHNAFLGTATGKTLLKRLVFENNREGFEKLLMHVESISASNGHKRVAFGIEPTANYHKPLAEFLINREHDLVLVSGVAVKRNRELLDGRWDKNDMKDSANVADLISQGKCLFYEYPAHVLRDLRSLLSLKKKFKKIEHGFRVRIRNHLLAQYFPDLDRYYGHSESENLAIVQWCLSPSKIAEMKYEDFFRLVTTRDRGLIQHRRLKAIWDHAHCSIGCSTGIAAEFEAEVLVEALKRVRKTIGSINEKVIKICVLFPEYKYLLSIPGFGPVVSAIVLAAIGDPFRFESGNQVLKTAGWDLSANRSGKRSDSVIPVISKRGKSDLRYALYQAALIASTRNLRAVKRKKASRPR

SEQ ID NO: 495396 - protein, 371 aa, unidentified
MYIVGIDIGKNHHEASIVSPEGKQIGRSLRFATTHKGADSLMSFIFKNIGNSPCVFGMEATGHYWYPIYSFLKAKGYTIYVINPIQSDSLRKMYIRQTKNDSIDSFLIAEVIRFGQFGTTSMADENILAMRQLCRYRDSVISSRTEIKLRIGTIMEQIFPEYEKQFSSLWVSTSMGILEKYLTPENIENAPIDELFEIIKDKSHNRLTKAKAISIKEAAADTFGIKIAQDAFSFQLKQLIDRMNFLDKQIEALDCQILEYYEKFDCYLHTIPGIGIIGAATILAEIGDISRFKNSSALVAFAGIDPTVRQSGEFNSTHNHMSKRGSPYLRHAIFLAATTCSFHNSPLNAYYKKKRDQGKHHLTATGAVARL

SEQ ID NO: 495397 - protein, 389 aa, unidentified
MLRQDLEKSNGGRTVVGIDPSSEFLQLAILTPKKEVQLKKLPLSPSITAQIAKSTEPSTTQIAIESYGSYGKLFVYDLLKKGYDIREVNPFISKKMADIDGEEHSDTKDAERLARTLLLMPNLPKISITQKKQWLAKLIRTRGKLVKDLNGYVNRLHIALTESYGAVYKRLFRSLSSGKALQFFERYPTINDTCSRTKKVRELLGEEKWTLLREAGRWEADFYLETLRIEIRGLIGIIRSVNSTKLAIEEVIHDVTDQVEEMKILKTFPGIGGIAGATLLSEIGDIDRFGKESRLSAYSGVSPVIWQSGKGKIRTKQRKRYNRQLKGILYFISLCQIRINPESKTYYQKKRKEGKTHWQAMNALSRQLLKIIYYMLKHKMPYQRTTLVN

SEQ ID NO: 495398 - protein, 437 aa, unidentified
METTFEVVNPHSAGVDMGAGDIFVSTDGKAVKIYETFTSDYHQCIAYLKEQKIERVAMEATGVYWIAFYELLEQNGFEVCLVNPKETKQVKGRKSDVSDCQWIQKLFAAGLLRQSYIPSGRLKELRMLMREREDIIDMGSAYVNKMQKALELMNIKLTNVISQIHGVSGIKMIEAILAGERDAEVLLELCDKRIIKNKSDEIKKALEGNYNPSWLFLLAQNLKMWKIHETQVLCIDKKIDEVLKDLNRGRDKIKHSGKEKPIRHHKPEIEDLQQKLVNLYGTDVSSISGLTNYSLLKLVGETGIDLKQFPTAKHFVSWCQLSPRNSKSGKMNRKVRTKNKSKAGQIFREAAQSLMQSKNIAIGAFMRKVRSKKGGIVAVKAGARKIAVAYFNMITKGIEYVEEGVRNYEARIKQRELKLLTLLANKHQFKLVDYQAV

SEQ ID NO: 495399 - protein, 377 aa, unidentified
MEQATRFVGMDVHKETIVVAVTSAGEVGKATHHGTMPNTPAALENLVRRLRTAGSGALKFCYEAGPCGYGVHRTLTRLGEDCMVVAPSMIPRRSGDRQKNDKRDAAALAVLHRGGLLTAVWVPDTAHEAMRDLVRARQAAVRAVRAARQQLSAFLLRHERIFPSDGRPWTKTHRSWLADQRFDQPAQQIVLEESIEAVRLAEQRRDRVDGYLRAQIPSWSLFTLVRNLCALRGLDVIVGAGLAAAIGDPSRFATAPDFMAYLGLVPSEHSSGQRRRVGAITKAGDIHARTMLIEAAHSYRLPARIARRKLKAVDAVPDAVREIAWKAQTRLCQRYRQMMARDKLKQVVVTAVARELAGFVWAIACTTSDPSAHRSIS

SEQ ID NO: 495400 - protein, 316 aa, unidentified
MNPQVFIGLDVSKQHLDVAVRPQNRHFVTPNDDRGIKQLVKRLAALKPQLIVLEASGGYEFLVTAALAEAQLAVALVNPQSVRKFAGATGKLAKTDKIDAQVLAHFAEALRPEPRPLPDQAQQRLKAALQRRLQVVKMIGQEKNRLEKTFIPAVRQDIQAHLTWLSQRLEQLDRDLSDQIRQSPLWRDRDRLLRTIPGIGPIVSRAVIAQLPEAGTLPGKKTVALVGVAPYNRDSGRFRGKRMIRGGRSYLRRMLYMAAVVASRWNPVIRAFYQRLLAAGKPKKLALTACMRKLVLILNAMVKNNQPWNQFITQVP

SEQ ID NO: 495401 - protein, 323 aa, unidentified
MQGQKSPERSAQPGVYVGVDVCKDWLDVYLHPIGQAFRVSNAPEGLKALKRRIGELPVELIVMEATGKFHRQTHRTLHAAGFAVAVVNPLRARLFAEAVGQLAKTDRLDARVLALMGHALEPSAIAPAPETIEALQELARARAAAKADQTALSNQRGASQTAFLKAELGRRLKTLAGHIERLDAEIQRRIGVNPALKRRFDILLTIPGVGPVAALALVVGLPELGACSAKAASLLAGLAPLACDSGEKAGERHIKGGRAFVRTSLYLAAIAAARFNPQLSDDYKRLRDAGKKAKVAITAIMRKLVVLASVLIKEDRPWMPIHP

SEQ ID NO: 495402 - protein, 331 aa, unidentified
MTKRSHKNTNNAKPNHTKPSHEKLSDHLGIDVSKRQLDFSFGQGLHRNSVPNGVEGHAHLIEVCRLRPGVRVVCEATGGYEKKLVKALRKEGIETHVVMPLKVKCLAIAMGLMAKTDRIDAEKLSLFSRTIELKATHVVSEHEEKLRELVMCRKHLVERLVQLAGRKENAGEMLGALIKKEERQTQRHLQRIEKQIEQCIAEDKASEDKIERMCQVKGVGRTVAACVLAHMPELGTIEDKTASALGGLAPYPNQSGPVERPSRIRGGRHEVRLALYPAALCAMRHNPTLRKFNQRLKDKGKPGMVRVVAVMRKLLCLLNKICADPEFSPLT

SEQ ID NO: 495403 - protein, 377 aa, unidentified
MLNLPLFVGIDYHTNTIQVCIMDQHRKILTNQTVANDPKAVFRVVAPYGSNVHVAIEASTGVADFAEKLIEQYNWNVELAHPGYVARMKQTPDKSDWTDAKLLADLTRVGYIPRVWLAPQYIRDLRDLVRHRYGLVEQRKQSKLRLRALLRNHRIVCPESPWTIKGKRWLLNAKNITSPHLLFLLQDHYDTIEYFNKKVAAVEDKMRAATANDPVVKQLMGQSGIGLITAVTMRALVGRFDRFRSGKQLAHFCAVTPRNNSTGGKTTTGGLIKAGDPILRIILMEVAHRLMRYDKHWQAMATRLRANGKKTCVIVAAVANRWIRKLFYQMVESKSVGRITVGFSRHEQKSVMEESSSGAEPFMVSTPEAHFFDSAIP

SEQ ID NO: 495404 - protein, 402 aa, unidentified
MTDNPMRFIGLDIHKEYFVAVGVNEKREVIFGPQRISNYQLDEWITRSLTPKDAVVLEMSTNTYQFYDALLPHVHSVLAVHSANVAMVTNVRVKTDKKAALALAQLHAAGLLTGVWIPPYPVRDLRALIARREKMVRLSTMAKNRLHSMLHRHHLVVPDKPFAPEQRTWWKSLSISATEQFLIHSDLDTLDFAQKQVEQVEACLKQKSGEDDRIPLLIQLPGVAMLTAITVLAAIGEITRFPSAKKLVGYAGLGTRVHDSGMTHSSGRITKAGRKDLRSAMISAANHAVEHHIHWKKEFERLGSHLGRSKAIVAIARKLLVAVWHVLSKEVADRFADPRDVASSFLRYAYQVSIGNLPNRQPALAFTRDQLDRLSVGKDLQEIPWGSRCFKLPPSKIVPQKE

SEQ ID NO: 495405 - protein, 317 aa, unidentified
MTQSSTTTAGIDTSKGKLDVAVHGRTGHWQVANSLAGWRVLATKLTEAGVSRIGIEATGGYERGVVEHLRAAAFTVLVLQPIQVKAYGRVHLRRAKNDVLDAVLIAACAAALDQVRTAPDQRLAELAERLTFLEQVEEDIRRCKTRLEHIDEPRLRRLVLGDIARSKARRLAQIRHLAKQLRSHPDLAARLDLVLSIPGIGERTALALLIRMPELGQVSREQAAALAGLAPFDNDSGQQKGRRRIAGGRARLRRSLFAAALPAAFRWNTALMALYARLIAAGKAHNAALVACARKLLIYANTVVQRGTPWAEKRLST

SEQ ID NO: 495406 - protein, 391 aa, unidentified
MTQSAMAGRSTKAFDADATLVVVVEMSRSVWLVAGLLPGIERRPLKKMTPDENELALLLGRWRGEVAATGRCVRRVVVAYEAGRDGFWLARWLRAQEVECEVIHASSIAVSRDRKRAKTDRLDTALLMRALLGWLRGEQGHCTMVSVPSIEEEDAKRPTRERENLVGERTRLINRMKGAMARLGIRGFNPALRKAEGELEDIRTPEGTKLPPNTLAELRRDTARLRIIEGQIREIEQGRRERLEAAGSSEADAMVSNLTRVVGLGLETADMLVHEILLRNLRDRRAVARYAGLTGSPNESGGRRRERGLSRAGNARVRRGMVHLAWRFLVFQKDSALVRWFRQRTADGRVRTKMAMVVALARKLLVALWRMARTGEVPEGVRLRPMAPVIA

SEQ ID NO: 495407 - protein, 419 aa, unidentified
METETGEPISVVHPCCCGLDVHKREVQACLLTSLAGGRVRQEQRTFKTMTADLLALLDWLVAAGCTHVAMESTGVYWKPIYNLLDGHVALLVVNAQHIKQVPGRKTDVKDAAWIAGLLRHGLLRPSFVPDRDQRELRELTRYRMSLVDERSAEVNRLQKTLEGANIKAAGIATDIMGKSGRAMLDLLVAGQTDPAVLAQCARGRMKEKIPQLERALAGSFGEHQCFLVARQLAHIDFLDGAIAEVSAEVAQRLAPFEEEIALLDTIPGVGRTTAEALIAEIGLDMGQFPSAAHLASWAGLAPGNHESAGKRKSGKTRKGSRWLRAALVNAAHAAGRTKDTAVGARYRALVARRGKKRAAVAVGHAILLIAYHVLQSHEPYDDLAARPLPSRCAPTPAYLVQQLHDLGFDVSIAPRAPAA

SEQ ID NO: 495408 - protein, 410 aa, unidentified
MKEQQRKVKANTVHVDHRNIVGIDIGKRKHAATAVTPKGMVIASLKSFENNRTGVELLERQVLQPATGKSKPLIAMEATGQYWNALHDELQRRGYSCVVLNPIQTNSRSNKQIRKAKTDPLDSAVIARTILAGDALATLVPSESIYELRLLVRHRWRMIKVHGMILRYAIGLLDQVFPEYEGVFCKPFLTSVRTLIRDVGLTPKTLVAKKADVILTLQKASRKRLSVETIDDLLKRAKDSIGTRQSDVVINGQFHMVADYLDFVEGQVQSINKQLQERMATLNSPLMSLGIGAEVAATILAESDDLTRFPGPGEYAAFCGLDPSVRDSGDSVRGVSHISKRGSPLLRWALYVSAQTMVNKHRDFARIYERHVNRRKGHRFSLIAVAHKLARVIWRLAKDGRNYTKRPPKR

SEQ ID NO: 495409 - protein, 434 aa, unidentified
MTRYVGIDLHKHLIVGHVLDDQGQTVDRFRYESVDATTLEHLGGRRLTREDHVVVEATTNCWAVVRALQPHVGRMIVSNPMATKAIAKAKVKTDKVDASVLAHLLRLGYLPEVWQPDPATRDLREWTIRRGRIVHQQTALVNRIRGTLAQRLLDCPYVMTGASATDWLAGQQLDADTRWLIDSDLRMLSAVQAELKAIEEQLAKRGYVDERVKLLMTLPGVSQHTAQALLAAIGDISRFREADALASYLGLVPSTRQSADHCYHGPITKQGRAHTRWMLIQAAQAVRTDPGPLGFFFRRMKQRKNHNIAVVAVAHKLALVAWHLLTKNEPYRYSQPKATEAKLQKLRVLATGQKRRTGPPKGTKCQAKLPGGSRTIKALPEVYRSESVPALTAAPAGEQRHIQELKLDGFVRDLQHEHVVPRRSRKEGAEPANE

SEQ ID NO: 495410 - protein, 341 aa, unidentified
MQITTIGLDIAKNVFQVHGIDAAEKVVVRKQLRRGQVLKFFAALPPCLVGMEACATAHYWARELTKLGHEVRLMPAKDVKAYVKRNKNDAADAEAICEAVRRPTMRFVGAKSAEQQGRLMQHRTRDLLMRQRTQVINALRAHLAELGIVAAQGREGLKQLLTIIADEKDARLPIDARASLIVLAAQLQALQTMIGSIEKRLTVQHRANEASKRLESVPGIGTIGASAIAATVTDPNAFRSGRDFAAWIGLVPRQDSTGGKQKLGPISKQGDRYLRRILVVGAHSVLRRAKQNPEKYPWLTQLLARRPFKVVAIALANKMARVAWALLARGGTYRVPALAAA

SEQ ID NO: 495411 - protein, 339 aa, unidentified
MQISIIGLDIAKQVFQVHAADAEGRRVAQVRLRRAQVIDYFRKLPPCLVGMEACATAHHWARELIALGHEVKLMPPAYVKPYVKRNKTDAADAEAIAEAVTRPTMRFVAVKSVEQQSMLMLHRVRELLVRQRTMLATALRAHLAEFGIVAPQGIHRVEKLAEQVRDPSVPSLAQEVLSILVGELAGVWRRLDKLDEQLVALHRTDQTSRRLASIPGVGPITAMAIASTVPDPSVFRSGREFAAWLGLTPKSHSSGGKDKLGRISKRGDRYIRHLLYVGAGNAIRFSKARVATGEAWIQGLQERRPPKVVIIALANKMARIAWALMMRGESFRSPATATA

SEQ ID NO: 495412 - protein, 431 aa, unidentified
MRNGANQRLEEITITTLIVGVDIAKTTHYARFTDYRGMEIGKAVSFKSNAEGFESIVARIEQIRNSKLANKPFTEVIIGMEPTGHYWKTLAHYLMEAGYRVVGVNPYHTKKAKELDDNSPTKNDKKDALTVARLVKDGRFFNPYLPTDIYAELRTLANGRANVMKRSNAVKNTITAILDEYFPEIWQVFKNPLTGKASRQILKSCPFPMMILALSECEILAEMKKAVKKTVGMKKVVELIATAKESVGVGYGSEVSKMRLGHLLDELEMVERQLSEIETAMEKKLCATGYAESMLSIKGIGIVTAARFLGEVGDPLRFDDARQISNYAGYNLTEDSSGKSKSGTVISKRGRSQLRGLLYQMAFTMVNCNPEMKALHKHLTSRVKNPLKKKQSLVVVSKKIITVIYSLLKKRTTYNPALALGVVRRELMNAA

SEQ ID NO: 495413 - protein, 348 aa, unidentified
MEMVGGLDLHRSQITFRTVDLRTGEVKRGRIYPGAREAFREWLERFEAGTEAHFALEGTTGWRFVAEEIERRGFVAHLADPAELSTLRGPKRRAKTDHADCELMVNLLLEGRLPESWIPPAHILELRALVRLRKTLLDQRTEWQQRLQAQLFHQGVVAGLRLRSPQDRRRLTGVEMSPAGRQTMGTGLVMLDDVDAQLEPLSTQLVALAKTQPGCRALEHELYGVGWLTAVAVVAELGDCRRFHSADQAVRCSGLDITVHESNGKRPGGHLARQGPQVLRWALFEAAQCAARKGSPDHAYYLKVRERIDHNRACLSVARKLCRRACRILRDLGDAAMAPPASQEPKAA

SEQ ID NO: 495414 - protein, 396 aa, unidentified
MERDSGRVVIGMDPHKRSVTIEVMSADESVVGGGRFGTDVAGYRSMLEVARRWPDRVWAIEGCSGIGRHVAMRLIADGEEVVDVPPKLSARTRVFATGQGRKTDATDAHSVALVGTRMSGLRPVVDDQQLAVLRILVDRRRSLGEDHTRMTSQLHQLLLELIPGGAKKDLSAAQAKALLAKVRPRDVAGKTRRRVAAELIADLERIYARKKAANKELNERVAATGTSLMDLHGIGPSGAARLLVEVGDITRFPDRDHFASWNGTAPIDASSGDQVRHRLSRAGNRQINRTLHIMATVQLRNATEGRAYFDRRKADGKTSMEAMRALKRRLSNIVYRTMLDDAAAHAANNSGTGPGGHRGNDSDSSAAGSQPQTSSSEKPHPNPSTTKPRTPLPAAS

SEQ ID NO: 495415 - protein, 371 aa, unidentified
MKSILSVGMDVHKNSFSLCAYDGYTGEIVSESTFASDVKLVIKFIETLKSRYESDVEIKCGYEAGCLGYSLYKSLTSRGVDCVILAPTTMQVSAKNKMVKNDRMDALNIAKNLASGSYKAVYVPDEEDVEIKEYIRMIHDFKKELKRVKQEIYAFVLRHGYQYDGKSKWTIRYMNWIRELEMSEIQRETLDEYLAEMDNLNDKIERFMNRIDEMYQSDRYNEKVSELRCFKGIDTFAAMTIQVETADFERFPNAKAYASYTGLTTGEHSSGDKNNRIGITKQGNTVIRKTLVECAQSLVKGNVYTPKSKRLKSRQKGMDVNIIAYADKATERLKKKYQKLIERNVPRNKAIVAVARELACFIWGMETGNIH

SEQ ID NO: 495416 - protein, 363 aa, unidentified
MIIIGVDFHPSFQQIAFMDQETGECDERQLNHSDGEAEKFYRELKQRGVSVRVGMEATGHSRWFERLLAELGFEMWIGDAAKIKRQRDRKQKTDREDARLVRKLLLENRFPRIWVPSLENRDLRQLLWHRHRLVQMRTRIMNQLQAVAMNEGYRWKKKLFSAQGRALLEKLSLAPWASRRRKELLELLDQLDPKIAELTAAVEREANKRPEVVRLMTHPGVGPITGVAYVLVIGTPERFPCGKQIGSYTGLIPCEDSSAGKQRLGHISKQGNTLLRYLLGEAAQAAARCNPDWRRRYMHLAMRRHKNIAKAAMARKLAVRLYWMWRNGWDYSQLVEFGSHAGKLGTGHGVKQSVVHLIGHPAP

SEQ ID NO: 495417 - protein, 483 aa, unidentified
MRKRRMSTFERLNSDRMNRKQRRVLARRVAAADPGLSIVNPHAAGIDVGNASHFAAVPPDRDPTPVREFGFWTADLHKMAEWLVSCGIDTVAMQSTGVYWIPLYDILEQHGLRVVLVNARHTQNVPGRKTDVQECQWLMKLHTYGLLRDSFRLALNMEGVRTVWRVRGRHVEEAARSVQHMQKALTKMNVQLANVISDISGLTGQAIVGAILQGERDPYKLAELSDPHIQASKEEIARSLEGTWREDVLFELQQAVDGYQFAHRQIRQCDDKLRVYLASLESRVLEKPAVPAGTPPLQPKTRKRRKQGANAPPMDLTEELVRICGADLTSIDGINIIAAMTIIAEVGPDPSKFPDEDHFTSWLGLTGSQNISGGKRVKGPQRKVKNRVADVLRMAATSLLNSDSYLGARYRQLRRNAKIPAVAVKAMARYLAVLVYRLLTKGQAWVDRGAELFEQQRQARDLMVLREKAQQHGLQLVPIAAAN

SEQ ID NO: 495418 - protein, 369 aa, unidentified
MSRKSSKKLYVGMDVHKESIDIGLAQVGGDVQHHGRIGGDMNALARAVRKLESLGQPLVFVYEAGPCGYGIYRSLKARGHECWVVAPSNTPRRVRDRIKTDRRDCLKLAGLARAGELEPIYVPDVADEAMRDLVRTREDAVAMQRQARHRLSALLLRNDIRYAGSTAWTEAHRRWISRLVIARPAQRIAFEEYVQAVHEASERVRRLTQAIEQELLHWRWLPVVHALQACRGIQLIHAVRIVAELGDLSRFTHPRQLMAYLGLIPTEDSSAQRRHQGAITKAGNSSARRALVEAAWAYQHRAAVSPVIARRQSGLPKTVIDIAWKAQLRLCARFRRLSARGLTRNKIVVAIARELAGFVWAIARQLKPL

SEQ ID NO: 495419 - protein, 430 aa, unidentified
MKSNTQNAKIEAITEKTLVLGIDVGSETHYARAFDYRGIEYSKKPFKFSNTEAGFVTFKEWILDLKDRHEKEKVVPGMEPTGHYWFNLGKFLQDNEMKPVLVNPHHVKKSKELDDNHPTKNDRKDPKVIAGLVREGRYMIPYLPDGVYADLRTASNIRFQLQAELTRIQNRISRWFNIYFPEYKTVYGKPDAKSGMLILKAAPLPEDILTLGIDGVNQIWRDAKLRAVGKARAKTLIEAAGHSVGSKEGAVSARMEIRMLLEDYESRNMRLQEVMVLIEELVKGIPMAEKLLEIKGVGIRTVSGFLAEVGDISRFNNPKELQKLAGLALVENSSGKHKGGTTISRRGRKRLRYLLFEAAMSLVAKNPEFRELHNYYTTRRRNPLKKMQSLMAVATKLIRVFYAMLTKGVDYDPKKMVSDIRRPEAYLQAA

SEQ ID NO: 495420 - protein, 354 aa, unidentified
MNATQVFEKRKIAVAIGIDLAKDHCDVVAYNADNKICFSKANMSYPKLMEWLANAYPAVVLMESCKGCHVRARDIADLGHDTRLIKGADVKALRNVCQKNDIRDADYIVRLLYVPGTKFVFVKNQRQQSLQFLQNEYKSFQELRIQVGNQIHAGLEEFGCPAPKSKKFIQSRMMAHLEKNAELIPDEVMSSFLRRRDMWLNLFEQEEEAKKRMEEIAKTDDDAKRIMTVPGVGAQTAVGMLVHIGGDIGRFKNSGQFAASIGLVPKQNSTGGNTTLNGITKCGPKRLRANLVQCGQVILMHADKLKGNFGDWVRKMRDSGKKRGVIACAIAAKLARIIYRLMKDKVDYTPVPSR

SEQ ID NO: 495421 - protein, 367 aa, unidentified
MKQVTTFVGIDAHKKDLFIAMLIGDQSTPVTWQLANEPNAVRRLVRKLEREAPGPVRACYEAGPCGYALQRQMTTTRVRCQVIAPALVPRKPGERVKTNRRDARKLVELLRAGLLTEVRPPTPEEEAVRDLCRGRDDARTDLQRCRHRLGKLLLRRGLHYSGRNWTRAHRQWMASLTWTHAAERVVVEDYLLAIDQVEARLRELDAHLTETAQTDPYREPVAWLRCFRGIDTLTAIVILAELHDFRRFQSPRAFMAYLGLVPGEDSSGEKHRRGRITRTGNTLVRRLLVETAWHYQHRPTVGIALTRRRKGQPGRVIAIADKAQQRLCRRFRKLAAEHKPAPKIAVAIARELAGFLWAALQPPVVAN

SEQ ID NO: 495422 - protein, 371 aa, unidentified
MKQQTKSSNITVGLDLGDRRHRFCALDERGEVVEQDSICNDRVSLRKLAGRYHGALGVMEAGAHSPWISRFLEALGWRVVVSNPRKVRAIYQHERKSDQRDALMLARIGRMDLALLYPVRHGTAEAQQDLLRIKLRDSLVRARVAVINSVRFTLKSLGYTVRNPSSARFHKVVMEEVPESVREMITPSVQALAELTARIKMLELEINTLAQMKYPQSAQLQQIPGVGPITALYFVLKIEDPNRFAHVRDVGAYAGLCPRRDQSGESDPQLRISKCGDAYLRRLLVSAAHYILGPFGPQSALRAYGLMLAADGTARAKKRATVAVARKLAVLLLSLWKSQQPYQPFPGACLNGEQEDRRSGTIALHRMEATD

SEQ ID NO: 495423 - protein, 321 aa, unidentified
MTYVGIDVSKATFVVAYSSAKTSKTKTFKNTVKGIHEFVQTISAAEHHCVLEATGNYSALLVYLLSEAGITVSLENPLKIKNFARVMLTVTKTDEIDARLIALYGERMQPTPYKLRSDSILVLKQKRTVLRQLKKQLVATRNLKGSMEVLPHFDPECKKTIEKTIGFLERQIKAMEEKLASLAQGEYKKQMDLLTSIKGIGVTLATALIVATGGFTYFDNAKQLTRYLGLSPTYQQSGTSVNVKGHINRNGDSNLRSQLYVAAFSSLRSNTECKACFDRLRSNGKPGKVAVIAVANKLVRQAFAVVTHGKPYVDGFKSEKP

SEQ ID NO: 495424 - protein, 423 aa, unidentified
MENNPSQPALFIGIDWADQEHEAYVIDGQGQGTQETIEHTPEAIDAWVGEKLRQAGGRPIAILLEQKRGALIHALMFRENVILYPINPKQFARYRESYTNAGCKDDRSDARLLARMLNERYLQLEPWRPDDESTRMLARLCQTRRQLVDERTRLALQLIAQLKAYFPLVLGLASGRSVSPLMLELVRRWPDPRQLRRADRRILHKVLKEHGCRNEEKRQELIERIRSAKLLSQDRALIEPAAVVVQSLARQIPVLQKAIDELERKIETEMKSHPDAALFTKLPGAGKALAPRLLTAFGSQRDRYAHADEVATLSGIAPVTKQSGKSRFVHRRYACPKYLRQTFHEFADQARKWCPWSRAYYRLQRSRGMKHHAAVRKLASRWIRILFRVWKTRTAYDPAAYLETITRKNPQIVQFLQVENSQV

SEQ ID NO: 495425 - protein, 355 aa, unidentified
MVNDKQIKVYGGIDTHADTHHVAVIDAAGRRLADVQVPTTAPGYQAALRFLGSWPMLVSVGIECTGSYGAAVTRAVREAGIGVFEVNRPNRFDRHLRGKTDVFDAYSAAEAVLSGRATAAPKGSDGLVESLRVLRTSRSSALSARTATINQIKGMLVTAPEQLRARYRGMSNTKLIAALAASRPTATPVTAAEAAAYSLRLLARRWLALTEQIEDLAGHMQRLLDDHAPALMGVFGCGQDTIAQLLITAGDNPDRLRSEAAFASLAGACPIPASSGKTNRHRLNRAGDRQANSALYHVIIVRLRYDEETQDYAARRTAEGKTKMEIIRCLKRYLVRQLYPLIVQTLQPRPEALTA

SEQ ID NO: 495426 - protein, 395 aa, unidentified
MSAEGKAIRSNDYRKDTTVKAPSTRPAAVLGLDVGKSSHWACLIDRDGEVLASAPVRNREAELDTLFASAPAGTLVVVDQFRNIGSLAVRRARAAGLGVAYLPGLAASRAAGLFAGEAKTDERDAAVIARTALGVPDSLSGVPGRGEALEAARALSSQRDHVVACATRDKNRLRAVLLESCPALEAAVDLSDRRWLELLAGFGGAWGIARSGAGGPRAEAAGEAAAASTAPPPALVEAENRQVRFLAARISEALDEAGALEAETAALLEGDETYACLLTVPGIGPRTAAQLAVSVDIGRFPDHDHLASYCGIAPRVRSSGTSVRSVRASRRGDARLKSLLIFSCNSLVRSSGRYGEYYRACRARGMGHGRALKAVARKRLRAIYAVMRDRVPYRE

SEQ ID NO: 495427 - protein, 315 aa, unidentified
MAMPSSEHSTIIGVDVAKAELVIYEDSSGQLSTIANNKTAIKQWIKALHGKVSIAIEATNVYHLLFTDMVHEAGHTLYLMDGYALSHYRKGIGSRAKTDPIDARVLARYLKNEGANLTPWTPPSTLYRDLVSLFRRRAMLVQTRTALRLSWEGEPLLKSLLKSQLTSMKRLEDLIENMIKKLLDQAGLMPLVKQCMKVEGIGFLTAARLVATYQRGEFKSADAFIAFLGMDLRVAQSGKKKERSTLTKRGDPEVRRLLHNAAMSAGRTAAWKTFYEDKQSRGFKKTQVLVMLARKLARVVFALIRSGEEYRPKAA

SEQ ID NO: 495428 - protein, 345 aa, unidentified
MVVGVDTHKEIHVAAAVDWQGTLVGEECFPTTRQGYRQLESWARSLGEVLRVGVECSGSYGSGLTRHLAKNGFAVPEVTFPDKTVRRKRGKDDFIDAEMAAEAAFTGARTVTPKSRDGMVEALRMLQKTRSTAVAARRVALQMIRADVISAPEELRDRLRGMTRMQLIRHLVATRPDATDFRTPLGAAKIALKRLAKRYVDLDDEVSELDDMIAAILADAAPLLVQLKCVGAQSAAQLMVTVGDNPERLRSEASFAMLCGVAPVPVSSGMTYRHRLNRGGDRQANSAIHIVAIGRLRTDERTKEYVAKKMAEGHTKMEAIRCLKRYIAREVYYTIKKQSELVNCS

SEQ ID NO: 495429 - protein, 388 aa, unidentified
MNKIIYIGKDVHSTNFTLCSFEPGYGFEADKNFGQTQIKEDIFNSTVKYINKLKSMRPDVDVICGYEAGCLGYNLHRKLKAKEIESVILAPTTMAVSRNSSKKKNDYRDAITIAKCLASSAYKAVYIPDEKDEDVRDFIRMRDDHKTALKQIKQQLNAFCLRHGHHYDKTKWTGLHLNWLRKLELSKVQRETVEEYLATYDALTGKIAALDVRIEDIASEERYAEKVNKLKCIKGIKTHTALSFVCEIGDFNRFKSADKFAGFIGLVPRECSSGNTERMLGITKAGNRHLRRLVVEISNTYRRGTVGRKSADLKERQKDMPKDVVAYADKATNRCQRKYQRMMFKGKNSNQAVAAVARELCCFIFGMMTGHYSRTAQAEASVYRSELD

SEQ ID NO: 495430 - protein, 344 aa, unidentified
MNEIKVIGIDLAKSVFQVCVWMSDGNIAFNRKVSRAKLLDTIRQFPPGSMIAMEACATSHYWGRTFQSIGFQVRLIPTQHVKALTHHQKNDANDALAICETAFRPGIHFVAIKTVEQQDIKALRAARQLMVEQRTALANQARSLAAEQGVEIPVGIHILQQRLPDIIEDAEQLISPVLRQLLLSLLENIHSLNERILSVEHSLAALCQQQPKYKVLMTIPGIGPLIAAAFLSEVNAAQFTNGRQLSAWCGLVPRQHSSGGKNSLSAMTKNGNRDLRTLIIHGARSVMHWAHKRDDALGMWLKRLIERRGKMKATVALANKMTRIVWRLLTESTSFNIDRAFAMN

SEQ ID NO: 495431 - protein, 360 aa, unidentified
MAKTKSVRPPFVVGGVDTHKDLHVAAVVDENNRVLGSDFFATTRQGYRQMLTWMASFGTVARIGVECTGSYGAGLLRHLQNAGITVLEVTAPDKMERRRRGKSDTIDAESAAHAAFSLIRTVTPKTRSGMIEALRVLKVCRKTAVAARRIALQMIQMNIVSSPDELRDQLRNLTRMQLIRTLAAWRPDVTAYRNVQDAYRIALKSLARRYLELHDEIADLDIMIASIVDELAPELIKRNAIGYESASQLLITAGDNPQRLQSEPGFAALCGVSPVPVSSGKTNRHRLNRGGDRAANSALHIIAIGRLRTDTKTQEYVAKRVAEEHSKMEALRCLKRYIAREVFTLLRNQNRQINSTQITT

SEQ ID NO: 495432 - protein, 420 aa, unidentified
MGAGGRVSRWWAGIDWSESLQDCAIVDETGKMVTHLRIEETREGVHRFVTALRDLNPSSHRFSRRQVPVAIEDGRRLIAAELLRLGQPLVVIPPAVTARHRGRLATAASKADRTDAALLANIIRMNPRLHRPVPKTSDHASAVAMLARGQADAADRARELMQALRSHLMLYFPVAAQAWAALPSGLRRPEARAVLALAPTPGQAAALRKKKITDVLAAAGRTRLVDQEAARLVALFGLPQLRQRSMTEQAMGARTLMLLAELGHACDHAQTLITQTDELFAGHPHAEIYTSFPACGPVLRARLFAEIGDDPDRFSSPRGLRAYAGTAPLTWASGGSRSVTHRKIANRRLKATVHLWSFATLTRSPGCRALYDTRRGKGDGYAAALRHVGNRLLSGLHHCLQHQVLYSEEAMFPEVPAEPD

SEQ ID NO: 495433 - protein, 346 aa, unidentified
MDHVSRIGMDTSKHIFQLHGVNAAEAPVLRKKLRRKEMVAFFGKLPPTVIAIEACGASHHWARLLQSFGHTVKLIPPQLAKPYVKRGKNDAADAEALCEAMSRPTMRFVPVKTAEQQAALMLVGVRDRLIRNRTQLANTIRGYAAEFGLTAAKGMAHLAPLLERIAADESLPVMARELFVIHAQEYGQLQARIDEVDAKLTTWHRADECSRRLVKIPGVGPIGAVLLTMKTPDPALFHSGRQFAAWIGLTPKDHSTAGKVRLGVITRAGDEGLRSVLVVGATAVIQQAQRSGRASPWLAALLKRKSPKLAAVALANKMARIAWKMMVTGETYAANSVPAAVAASAA

SEQ ID NO: 495434 - protein, 349 aa, unidentified
MDHYAGIDVSLELSSVCVVDAKGKIIKEAKISSEPGALVIFLRGLGMVVERIGLEAGPLSQWLHAGLTQAGFDVVLLETRHVKAALSAMTVKTDRKDARGIAQLIRMGWFRPVHCKSVGSQEVRALLVGRKLLLGKLLDVEFSIRGILRGFGLKMGMVTRRNFEARVRELCAGHSMLEQICAAMLAARSALQTEYTKLHKAMLKIVRKDEVCCRLMTTPGVGPLVAITFKTGIDDPSRIGKSKAVGALFGLTPKKYQSGETDVTGGITRVGDEMVRTALYEAANILLSRVTRFSALKRWGMDIAKRRGTKRAKVALARKIGVILHRMWVDSTNFRWTKEAPNAPRLIQA

SEQ ID NO: 495435 - protein, 391 aa, unidentified
MIYAGIDVAKDKHDCFITNSDGEVLFKAFTIPNNLDGFDELYQKIQSVTDDLTKVKVGLEATGHYSYNILGYLLDKGLTTFVINPLHTNLYRKSLSLRKTKTDKVDAHTIATMLMSDVNLKSYSDTSYHNEELKSLTRYRFDKVKERAKLKQSISRLVAILFPELEKLVPTLHMASVYDLLFELSSVSDIASVHLTRLTNLLNTSSKGHYGKDTAILFREAARTSIGSHMPAKSLELKHTIRLIRELDSEISEIESEIKSIMDKINSPILSIPGINYRMGSMIIAEIGDFRRFDSPDKILAYAGLSPSTYQSGQLESWYSHMEKRGSRYLRYALFNATKFVCHWDPTFAAYLEKKRSEGKHYNVAISHAAKKLVRVIYQLERSGQSYIKAA

SEQ ID NO: 495436 - protein, 455 aa, unidentified
MARKKTIPHPKLKPMNVGAAAIDIGSTMHMAAVNPEHSDEPIRAFGTFTHDLHDLADWFASCGVTSVAMESTGVYWIPAFEILEQHGFDVILVNARYAKNVPGRKTDVNDAAWLRQLHSYGLLRGSFRPDAEIATLRAYLRQRERLVEYAAAHIQHMQKAMMEMNLQLHHVVSDITGATGMRIIRAIVAGERDPDVLAAFRDVRCHSSTETIRAALVGNDRDEHIFALTQSLEFYDFYQTKMLECDRRLETVLAELAADKVYDATTLPRARTKTKQVNTPSFDVRAALYGVLGTDLTQIHGLGPSLALKLVGECGTDLKAWPSAKHFTSWLCLAPGNKISGGKVLSSRTRRSSSRAAALLRLAAVTIGRSDTALGAFYRRLAARAGKAKAVTATARKIAVLFYNTLRYGMTYKDPGASLYEERYRSRVLGNLQRRAKAFGFVLTEVPDQGELAVS

SEQ ID NO: 495437 - protein, 377 aa, unidentified
MKTITTVPTPHTATDIKPSPVPDKSVVRQVFTLGLDVDLRFVVTAIQCDQGVILPARKYTRTQLVAWVQEKVQAGHTVRTVYECCGFGYTLHEQLTAAGAHSLLTTPMRLSLERRRKNDRLDARELCVRLSRYHAGQRHELRPIRLPSRAEVQRRELGRQREFWKREVRRLENHGRALRIEHEHETLPGGWAGPRKWKALAKACSAFVRQQLEPVAQHIRSLKAELDRLTEELEALVAQEKIPHGLGALTVSLLDGEVCDWQRFRHRKAVGSYTGCCPSEHSSGGVQRFGGIDRHGNARVRVLLVEAVWRLLKWQPGWHARQKWLAKLQHGAALKKKSAVALARQLAIDLWRWRTGRATAAELGWVLKPAAVEPPTE

SEQ ID NO: 495438 - protein, 341 aa, unidentified
MTISLLAIDLAKHVFQLHGVDHSGAVVLRKRLKRNQLLGFVQALLPCTIAMEACSSAHFWGREFTRLGQSVKLLPPQYVKPYVKTNTHDAADAEAIAEAATRPSMRTVTVKSQEQQDLQTLHRGRERVIKTKTMLLNSLRGLCAEYGIITPKGSSWLTRDLAGTRQQLEAVNSQCLTLLFERSLAEFHRIEEEEKFYTAQLERIATTHPVALRLMQIPGVGLLTATAALAVVAAPQEFKNGRHFAAFLGLVPRPHSRGGKAKLLGLSKRGNSYLRRILVSGAQSILRWSPRRTDAIGRWVTALRQKKPWNLVAVALANKNARVIWHLLRYDVDYCPHGAVA

SEQ ID NO: 495439 - protein, 495 aa, unidentified
MSDFKIPRRNVRTRPTPAPAPAANDLSRAARHAEKTRRHAEECAKLVSMPVQHAHAAGIDAGDISHWACVESTPDDTDAVREFPTHTAGLRQLVDWLRQCGVTTVALEATGVYAHVLFLTLLEAGFVVVMTAPQFARQIKGRPKTDKRDCQWIQRLHKHGLLPAVFQPDEATQTLRDYVRQRANLVRLSGQHIQRMQKALQLMNLKLTRVLGDVTGVTGLMIIRAILAGQRDPQQLAKLRDRRCRHSVADIAQALDGRYRPEHVTELRCCLTLWEKYQEVIGELDEAIDAHLRTMRRQTELPALPPKPRLRGRKPHDPRFDVRQALYYATGVDLTAIEGIDEVHALTLVSELGTDFTKWPTVKQFTCWLGLCPNWQKTGGKVKSSQTRRGKNRAASALRLAAWSLMRSKSYLGAYLRRQRSRLGARKAVMASAHKLARIVYHLVRYGLAYVKQTEEAYAAQVRERLERQLRRRATELGFVLQKIEPPAMPTVSEA

SEQ ID NO: 495440 - protein, 358 aa, unidentified
MVDKVTKAAVVGGVDTHKDLHVAAVVDQNNKVLGTQYFSTTRQGYRQMLAWMTSFGTLKRIGVECTGTYGSGLLRYFQNAGLEVLEVTAPDRMERRKRGKSDTIDAECAAHAAFSGIRTVTPKTRDGMIESLRVLKTCRKTAISARRVALQIIHSNIISAPDELREQLRNMTRMQLIRTLGSWRPDVSEYRNVTNVYRISLKSLARRYLELHDEIADLDVMIAAIVDELAPELIKRNAIGYESASQLLITAGDNPQRLRSESGFAALCGVSPVPVSSGKTNRYRLNRGGDRAANSALHIIAIGRLRTDAKTKEYVARRVAEGHTKMEAIRCLKRYISREVYTLLRNQNRRINSIPITA

SEQ ID NO: 495441 - protein, 459 aa, unidentified
MSKRTTRRRRIPKPGSDNQGFPLINLNAAGIDLGSRTHFVSVPEDRDAQPVRQFGCYTAQLQDMASWLKRCRIETIAMEATGVYWVPVFEILESYGFEVLLVDARQVKNLTGRKSDVVDCQWIRHLHSHGLLSAAFRPKAEICQMRAYWRQRCNLVESASRQILLMQKALEQMNVQLHKAVSDITGKTGISIIRAIVRGEHDPQVLAQMRHTRLKSSREELAQALTGHYREEHVFALAQALESYDFTHQQIESCDRMLQTCMGRLPGTASPTARAKPRPARRKNQPYFDLGAEQIRIAGVDLSRIPSIDTLTVQVVLTEVGVDVSSFPSEKNFASWATLCPNNRKTGGKIRSRRTRPSSHRLAAALRVAAQTLSRSKTALGAYYRRKRAHLGAPKAITAAAHKLARLIYRMLKYGEEYVEQGQQAYEDQYRRHSLKTLTRMARDLGYELMSPKTGELLV

SEQ ID NO: 495442 - protein, 309 aa, unidentified
MDIIVVGIDVSKDRLDVAVRPGGALLRFGRDAAGIEELIGEVGCLGAQLIAVEATGGFETVVVASLAAANLPVVVVNPAQVRAFARALGQRAKTDPIDAAVIAHFAAAIRPRVRPLPDAATAALADLVARRRQIVQMMVAERAREKRASPRARKSIARLLKTLQAELSDLDGEIDESVRGSPVWREKEDLLASVPGVGPITARTMLAELPELGCLDRRRIAALAGLAPFTRQSGQWRGKSFIGGGRASVRTVLFTAAMAAMRHNPNLRTFHQRLRSAGKPKMVALIAVARKLLTILNAILRDKTPWQIA

SEQ ID NO: 495443 - protein, 340 aa, unidentified
MDITTLGIDIAKSVFQLHGIDADGAVVVQKKLRRGAVLNFLGKVGPCLIGMEACATSHYWAREIAALGHEVRLIPPAYVKPYVKRQKNDAADAEVICEAVTRPNMRFVPIKTEEQQSVLVLHRARDLLMRQRTMILNAIRGHLAEFGIIAAQGPRQVMGMIARLRDDGDASLPEIARSALLALGAHLEALAGEIRALERQLIVWHRADPTSQRLETIPGVGLITATALAASVSDPSVFKSSREFAAFLGLVPRQNSSGGKDRLGRISKMGDRYLRKLLVVGATSVIRRAGSNSTKTGAWVRSLMERKPARVVTVAMANKTARISWAVMTRGEAYRASPIA

SEQ ID NO: 495444 - protein, 350 aa, unidentified
MEKQDRDRLLIVTRMVAGTTWFVCKAGTTKMNEISTKTAGIDTGKMWLDIAVYPASERLRVANTSDGHQWLASWLAAHKITRVGIEASGGYERAVVAYLRAAGFEVALLQPRQVRAFAVYKLRRAKNDRIDAALIAECAANLGDLHEPPDTRLAALAEHLLFIEQIEYDIAHLKTRRERFTDKRILKQIDRDIQRLLRRRDGELVLLQVVIRKHGDLARRLELIASVDGIGMRTALTLVVLLPELGKVSREQISALVGVAPYDDDSGERTGQRHIVGGRSRVRRALFNAALPASQRWNSALVALYGRLTDSGKAHKKALIACVRKLLIFANAVVERGTPWIKNAPAKQAT

SEQ ID NO: 495445 - protein, 482 aa, unidentified
MKKRTIYRNQSQEILSLFESAGDRNKAMCIPMDYAKKDHVVMFCNGNGDILRKPFSVKNSLEGKNYLVDQVKKSCRRRGISRQHVFFGGEDCGSYADNFIAALRSDSWVVAGVNACDAKKYRDNKQASTDILDLLGICKMLLSCKGNCSPAQTGIYWNLRMLVRQRRKLVQMATGVKRRIHFLVDQIFPGFLDEKKSGIFPFSRGSLALMSNRFSVHQIRRRNRSTLSRFLACNLVHHADHCAEHLQKYTSQVLQPPAKYIATLQLSLQQQVKLFICLQENIQQLEKEIAEHLAQTPGAFLTSIRGIGIVLAAGVCAEIGDPDKQKSLSQLVSYAGIIPRIKQTGGVQGKTQVKKVAKRCNRILKDYVVRSGYHIGVNGPEELKLDHKRRGAQGQHADFGMSRRYLRMAMCLMRTSQTYLPKNLRDTRTPMEERAQYYILTWSTLREKWKRKDALGFAFDKDRPLGQWRNVVQALYGIELGL

SEQ ID NO: 495446 - protein, 366 aa, unidentified
MRYYTRNHPCYCGIDLHSRTMHVCILDHDGNAVVDQGIACNPKAFLKLIAPYRQGLVVGVEAIFCWYWLADLCQEEKIAFVLGHAFYMKLIHGGKGKNDRIDADKIARLLRCGSFPLAYAYPKGMRETRDLLRRRLYLVRQRSGLLTHIHIVNSQYNLPAIDKQLRWDSNQEGVAERFTSASVRQNVSVDLRLIHHLSQLIVDLEHYLIRTARVEDQQTYERLQTIPGVGRVLALVLLYEMHDWSRCSSVGQFLSYARLVRCLHESAGKTVGSGNNNIGNPHLKWAFAEAACLMLRVSERARQWKQRYQQKRGKGKAMSVLAAKLGRAVYHMLRKGEAFAEDRFWNEGARAGNRASPAAKAGAGCP

SEQ ID NO: 495447 - protein, 340 aa, unidentified
MLPRAQISNFGLSDGCALLRKEGYFLDAMRVCCAGLDVHQAMVVACIIKGPLECKPKVEIREFSTVLSGLLALQDWLSQEGCTDVAMESTGVYWKPIHNILESTCDITLGNARHIKNLPGRKTDVNDARWIAELHRSGLIQKSFVAPLAIRELRDLTRYRKKLKGYETSERNRILKILEDANIKISTYMSDVFGVSGRLMLNALIDSEVIEASHLAELAKRQLRAKIPELTQALNGRVTKHHRSIMKRSFDHLTFLEQQIAEIELDMEQYFAPYQNEIELLDTIPGVGVHVAQSILAEIGVDMSVFPSEAHISSWAGLSPGNNESAGKKKVPERPWAIKL

SEQ ID NO: 495448 - protein, 343 aa, unidentified
MNDTIYDHYIAIDWSIKNMAIARMTKKSNMIKAIDVPSDVEDLQAYLKNLKGSKILAIEETSTSQWLYTEFKEYVDRILICDPHRNKLLNEGPKTDKIDASKLVQLLKTGLMKEVYHSTDKFLYLRRVVSGYEDLVKSGVRLKNQRYALLRACGKSGKEKAGSPIASQGEQFVLNCLDRQIEAYETEKECYEKEFERLARKYSEIKHQKSLPGIGTINAVKIVARVVSPHRFPDKGHYLSYAGLIKLEKTSGGRSYGKRNPRYSRQLKSVYKSGVLAAIAGNNPIHDYYEHLIQEKGYPEHDARQKACRRLATLSLGVFKSGKKYQPFRRNDVKSNTKSASGL

SEQ ID NO: 495449 - protein, 370 aa, unidentified
MKPKLSDYELATIAYHRDTLGVNPVAVDVASRVMQVCYFDSDKKLLKNFQLTRSKFFEFVEKATGPLLFGIEACGSCNYLSRYFESKGHQCRIIPASKVKAFLKLDKNDKIDATGIFKAMLSSVESIPAKSLENQLLMNLFTIRDQLLKQHTQCLNAAHGILYEHGIVTGSACVASSGKIIQGFTDAQESFEHAPMASSHFSVIKTAVFNSLDNLKEQIETINKYLLKYGSSNNTCLNLATIPGVGIQTAVALNAAMGDPERFHGAREFAAYVGVTPIITGSGGKITVMGIRKSGIRSLKKSLYMGAMVYLSNAMKNGTESSWVKDRLKTKRKKVIICAIMNRLARIAYAVAKNGETFDETRCNLIKKLR

SEQ ID NO: 495450 - protein, 351 aa, unidentified
MQHISRIGLDIAKRWFQVHAVQADGSEVLNRKLARSSVLSFFSDLPICDVALEACGSAHYWARELVRLGHRVRLVSPAYVKPFVKRSKTDAHDARAICEAASRPDMRFVPIKSEDQQAVLMQHMARQLLVEQRTAVVNSLRAHLAEFGVIANKGIQNVPELARMVDDGADELSPIPALGIAIMKLLVAHLRAIEESLETVDEQIATWQKASAPAQVLASIPGIGTITSAAVAASVPDPAAFRSGRDFAAWMGLVPRQHSSGGKERLGHISKQGNKYLRRLLVLAATSHLRWLYKRTGVVADWCRMLLKRRPARLVTIALANKLARICWAMMTTGELYHGEVMAATSASAAV

SEQ ID NO: 495451 - protein, 411 aa, unidentified
MDKVYDKCCGIDLHKKLIVACFKQGNRQEIRDFGATTRELLEMADWLKEGGCEMVAMESTASYWKPLYNILETCELKAMVVNAQHMKAVPGRKTDVKDAEWIADLLQHGLLTASYIPDKDQRELRELVRYRKSLVGERTRELNRLQKMLEGANIKISGTIRDINGKSARNILEHLLSGKQIDSAEYDILYEKKVIAHNLKATKEQIIDDLNGVMSALQKKMMRIILNHLDELNAHIRELDDDIDNFMKPEEKEAAKVIQDIPGIGNTSAQAIISVIGADMSRFPTDAHIASWAGLCPGNNKSANKRKSGKTRKGNGLLRDTLIVCAHSAVKNKSSYFHAQFARISAHRGSKRAYVAVAHSMLVAIYHILKEGVVFKDLGADYYNQFNRERKINAYLKKLKALGWEVPVVAA

SEQ ID NO: 495452 - protein, 407 aa, unidentified
MQHPKMQYTYVGIDSHKDTHTAVFLDCFFEKLGEITFANLPSSFPQFFDNAQRFKLDGTVFLFGLEDTSVYGRNLMTFLHANNQQVKHVNSLLVARERKNQNIVQKSDSIDAECAARVLLSKFGDLPDAHPEEMYWILRSIVVRRAALVRQNIANKNLLHSFLTQHYPNYRSFFENIDCISSLAFFAKYPSPSLLQGITVEELAAFLEKHSGVQFGMLKAKQILGNLQDTTVPYQEIRDNVVQSLVKQVQQSLDTIAQLDEQLVDFFKKFDSPLLSMTGIDVTSAAQIMSCIGDIRKFSTPAKLARYAGIAPVTYSSGKVDLQHANQRGNRELNSLFFNLAVRLTMTAGPKRKIINSFCYDYYQRKRSEGKTKRQALKCVQRRLVNIIWTMLTNGEEYVNPPTYDLK

SEQ ID NO: 495453 - protein, 427 aa, unidentified
MSATQNEKIRQVTDTAMVIGVDIASEIHWARAFDWRGLELGKAVKFENSAEGFNFFLRRASELAVEQKKDSIMAGLESTGHYWFTLAAHLQGGDFKLVLVNPYHVKRSKELDDGHPSKSDKKDTKTIAKLVLEGRYVYPYIPQGLYAELRVAMNCRWRVRKELASLQNQIQRWLKIYFPEHGKVFGRFTGAGSMALLHSAPLPSDLISLGVEGISGIWKQMKLSGIGKKRAQRIYEAAQTSVGCTTGMEAVRMELQILLEDYDAKLQQYERVMQVVENLCSQIPTVAELLKIQGLGLVTVAGLFAEIGDIRRFESPHQIQKLAGLAITENSSVKHKGPTEISRRGRARLRAILFRAAIPLLAKNREFQLLHRYYTTRQDNPLQKIQSVIAICCKLLRVFYALATKGCAYSPEKMLADIQRNQPLKAA

SEQ ID NO: 495454 - protein, 378 aa, unidentified
MIESLSEAGYGRSIDLRSTKTVGKRGRHALISNKARTVVRVNQTRMMQGRAKQEKRPMTEEPVCVGVDVAKSTLDVAVSNSKETRQFDNDHKGITSAVRYIAGLKPARIILEATGKYEMPLAASLQASRLPVVIVNPRQVRDFARATGVLAKTDRIDARILAIFGLQVNPEVRLLPNQKAREMSNLLARRRQLIEMLTAEHNRLLQADDSIRPSIEIHIKWLEEAVSAINDDLDRQIQSSPSWLEKDNLLKSVPGVGKVVSTTLLIELPELGILNRRKIAALVGVAPLNRDSGTLRGKRTVWGGRAKLRAVLYMAALVGVRCNPVMAAFYQRLLNAGKAKKVALVACMRKLLTILNAIIRSKTTWRSENTYGSIVVEA

SEQ ID NO: 495455 - protein, 350 aa, unidentified
MTTIARGITGGVDTHLDTHVAAAPDERGGLLGVQSFAATATGYQELQHWLESFGTVDLVGIEGTGSYGAGLTRHLLGHQVAVVEVDRPNRQRRRRTGKSDPEDAVAAARAAQGGDATGSAKTRDGNVEAMRVLRVARSSARRSRTQALNQMRSLISTAPDELRAELRDLSIYKVLTVTSAYRHTGRTDVAGVTKITLRTLARRAISLEEEVKEIDRMLKTLVAETAPELCAIDGVGTDVASALLVAAGDNPERLKSESTFAKLCGVSPLDASSGKQQRHRLNRSGDRQANAALWHIVFTRMVKDPRTKHYIERRMKDGQTKKEAMRCLKRYVAREVFAALPRSEFALDSP

SEQ ID NO: 495456 - protein, 363 aa, unidentified
MDIRSVGIDLGKTTFHMVAPGDDGNVLLKKKVTQKQLITFTANLQTSLIGMEACSGAHFLGRTLRAQGHDVKLIPAQFVKPFVKSNKNDFIDAEAIAEAVDRQNMRFVPIKTDDQLDLQALHRERDRLITRRTSVINQMRAFLLERGLVFAKGPAKLRERMPEILENAEEDLTPHMRNLLALLWEEWKYLEQQVVDLNHEVELIASSDTACMRLRQIPGIGPLVATAIVASIGNGAAFHKGREFAAWLGLVPKQYSTGGKAKLSGISKRGNRYLRKILIHGARAVVLRCKRDRTPMGTWMTALEARAPRNVLIVATASKTARIAWAVLSSGEDYRPLPNPTTVRQAGIALSVCGVFITIDDDS

SEQ ID NO: 495457 - protein, 338 aa, unidentified
MQTYAAIDLHSNNGVLTIIDDTDRVLKQRRIANKLEEFIKELEPFRATLQGVAVESTFNWYWLVDGLQAKKFPVTLVNTSAIQQYEGLKRSDDNYDAWWLAHMMRLGILPKGYIYPRENRAVRDLLRKRATLVRQRTANILSVQNLEARNRGTKISSNEAKRLTGARVAELYGNGDLALALTTTIAVIDSLTEQTRLIESAVLKKARLRPEWDLITSVWGVGKILGLTIMYEAGDMSRFSLPGDFASYSRCVNAQRFSNGKKKGENNAKNGNRYLAWAFIEAAHFAVRFYPEAKRFHDRKAAKTNGVVAIKALAHKLARATFFVLRDQQPFDPKKVFV

SEQ ID NO: 495458 - protein, 337 aa, unidentified
MKYCGMDLHSNNSVVVVIDEEDRIVLSKRLPNDLGQIGAALEPYREELFGVVVESTYNWYWLVDGLMDAGHRLHLAHPSAIKKYEGLKYSGDFADARYLAQLLRLGLLAEGYIYPREERGARDLARKRMQLVRFRVMQILSIENIMTRQTGSTLKGHAVKQLTAEQVNELGFAPDVALALESNRAVSQALGQQIDAIERRLHETIRLRSEYDLLKTVPGIGKTLATTIMLETGSIGRFAQVGNFSSYCRCVDSLRESNGKKKGEGNSRNGNKYLAWAFVEAANFAIRHCPQAKSFYERKKRKANRVLAIKALAHKLARACYHMLKEQKPFDVSRCFG

SEQ ID NO: 495459 - protein, 345 aa, unidentified
MDHFAGLDVSVKETSVCIVDDTSTIVREVKVSSEPDALLAVLTNPAYQFKRIGLEAGPLSQWLFSALAEAGLPVICVETRHMRAALKAQINKTDRNDARGIAQMMRVGLYRPVHVKTLRSQKLRMLLTHRKLLQTKAIAIENDLRGTLRNFGLKVGVVGAVKFEARIKELVENLPDLAALIEPLLIVRRVLREQIGILHRRLLVVVRADDICRRLMTVPGVGPVVALTYRATVDVPARFRNSKAVGAVFGLTPAKYQSGEIDRTGGISRCGDEMMRVMLYEAAHIMLVRSTKWSWLKAWALQIARRRGLKKAVVALARRLAVIMHRIWVDGTEFRWTREQAVAAA

SEQ ID NO: 495460 - protein, 429 aa, unidentified
MTRISAGVDVSKNRSTVCIIDQDGKVIMRPFLVWHSTEELDFLADTLKRLNGEVRVIMESTSIYQYPIALHLKEKGIFISIVNAYKVKKFANTDFRGGKTDKKDSRTIASYGISYWDKLVEWQIPKDTYFNLDLLNRTYMNAKKHRQIILQELQHYIDCAMPGMDKELHSLNLSTKKGFMLDFVEKFWHRDEIVNMTEAEFTEVFTAWAKKKGYRPVEGKAAKIYAIAKSCIPYYPANPTVKTILQCIVDKLSGVNRTLVTIVTQMIEEAKKLPEYQIVREMPGVGDPLAARFFGSAGDIRRFKNSKALVAYAGIDSPPDESGDFSSTHRHITKKGSKVFRDTGYEIMMALRAQKRTWEKVRKNPEVYDYMLRKEAEEKPRKVAKIAALNKFLRIVYARIKELYDNMALAGRAKSKTKSKAKAKTKATA

SEQ ID NO: 495461 - protein, 389 aa, unidentified
MIYVGIDVAAEKHACCILAESGKVLKQFTFSNDMPGFEKFHKALLTPSETKIGLESTGVYGNNLAEFLRRNGYETHIFNPLLVKKSIQATTLRKTKTDKSDAKHIAQYTKEHSQPNPKISYHTSELKSLSRGRFSLVRERSKVKTQAKGLLVQLFPEFSQIFSDIFGAAASAVLRQLPSARMIAQCPVGVLTDLLRTASHGRLGKVKAELLIDLAEHSVGIQSMALELQMQMLLQQIDLFTLQINRYEAAIKSEMETIQSPITTIPGIGCVLGAAILSEIGDIRRFTTPAKLQAYAGVDPSVGESGTSVSTPGRMVKHGSHYLRWALCQAARCVSLYDPIFAAYMKAKRDEGKHYCVACSHVAKKLTRVIYSILKNNTAYSLTYSQIGA

SEQ ID NO: 495462 - protein, 356 aa, unidentified
MDHVNKLDFTGQQIYVGMDVHKKSWSISIYTDQFEHKTFSQPPEVGVLVNYLKRNFPGAAYKTVYEAGFSGFWIHDRLQEHGVHCIVVNPADVPTKDKERAGKTDRVDCRKMARSLRSGEIEGIYIPSRPKTEDRSLLRTRNSMVKKQTRCKNQIKSVLCFYGINIPNELAKSHWSKRFINWIESIRMERASGNLALKVHLAELTHIRQVIAELNRAIRALAKTDDYRNNVQILKTVPGVSILSAMTLLTELYDIDRFKTLDKLCSYVGLIPNTNSSGETDHKTGMTSRRNNHLRVILIESAWTAVRKDPALMMAFNELCKHMTKTNAIVRIARKLLNRIRYVLKNQQEYVPAIIQ

SEQ ID NO: 495463 - protein, 378 aa, unidentified
MYRILKIGMDVHSKNFTLCAMEPVIGSEDRIFANIQVEPDCKNILKFIDNLKEKLGSDDEYDIECGYEAGCLGYSLYKKLTAAGVKCVILAPTTMMTQKGVRIKTDARDAVLIAQCLSYGTYKAVYIPTEEDESVKEYIRMRDDHKTALKKVKQQINAFCMRHGFIYDGGKWTIAHLKWLKTLALSPVLQETLNEYMASYDEQTAKIERFDARIEEFASQEEYSEKVRRLGCFLGIKTHTALSLIVETGDFNRFAKGSTYASYLGLVPGEHSSSDDTNRLGITKAGNGHLRKLLVESAGGICKGQIGHKSKLLRQRQIGNPAEVIAYADKANTRMRSKYYRLIRHGKKRNIAVAAIARELACFVWGMMTDNICIYDNV

SEQ ID NO: 495464 - protein, 451 aa, unidentified
MSDLPVLDARAAFVDVGSEQMHVSVAGGPPQVFGAVTAQLHALRDWLEAQGVRSVAMEATGVYWLPLYGLLEAAGFEVRMVNGRQTRNLPGRKTDMQDCQWGATLHSHGLLRAGFVPPAHIRRMQDYMRLRADHISMAATHVQHMQQALERMNVKLHDVIAKLTGVSGLAVVRAILGGERDPQRLLALCDTQIQRAKAERVKESLRGTWTEEHLFALRQALQSWEHYQAQIAECDRRVEAVLHDIDPGQPPNARALAARPSRPGVNAPDIPDLRAILAQICGGQDLTQLPAHTEYGVLQVIAEVGTDLTKWRTEKHFTSWMGLAPGSHQSGKRKRSAKRSRNRAGRLFCVIARSLARSKDIALGGFYRRMAARRGGLVANIALARKLAALFWRVMVKGMDYVELGLQQYEAKVLETKQRSLRRLARQLGQQLVPMTIPVQTKGPSTNNAIS

SEQ ID NO: 495465 - protein, 273 aa, unidentified
MSEITTVGLDLAKRVVSLCGEDAEGRVVVQRTLRREAVLMWFVQRAPCLVGMEACASAHGFARELTALGHTACIIAPEFVRPFRLSGKNDTNDAAAICAAVRQPQLRWKNAEQQARLVVHRLRQGWQEERTAGLNRLRGLLAEFGQVYAISAAAILSGAYATLADETLPAALRRGVTRQLEHLRELAAHLADCDREIAQQARDDPRAQRLARLAGVGVLTASAVAATVVDPQQFRCGRQFAAWIGLIPRQYSTGGKPRLGRITRRGDSYLRVT

SEQ ID NO: 495466 - protein, 416 aa, unidentified
MKKHNNSGKKSEPTSKRTKSRGPVQRDTKEVLAELVGKLKEKLDPTKVAATSAGEKHQRGELRPNLDRLTVGVDLGDQWSHYCILGLEGETLAEGQLRTTQEDLATFFQGLNGARVVVEVGTHSAWVQEVISGCGHEVLVANPRLMDGSKRRKRKNDRIDANKLARLGRVDPESLYPIQHRSREVRQDLVMLRARDALVAARTEIINTTRGLVKSMGTRRPKCSSQSFAQKGEEAVAVEMREALLPLVRLAATLSADIKEYDKKIETLGQEKYGHAALLRQVKGVGPITALAYVLTLENPQRFAKSRDVGPYLGLVPKQEDSGESQPQLGISKAGDTMVRKLLVGSAQYILGPFGPDTNLRRYGLRLCERGGKNAKKRAAVAVARKLAVLLHRLWVSGEVYEPLHNAMSAPIAAAA

SEQ ID NO: 495467 - protein, 315 aa, unidentified
MMRTQVFVGIDVSKAQLDVAFRPEGRFSAPNDEAGCAQVLERLRAVPPTLVVLEATGGLEIPLTGVLAAAGVPVVVVNPRQVRDFAKATGRLAKTDTLDAQTLAHFAQVMRPELRPLPDEQTQALAAILARRRQLVEMLTAEKNRLGSAPKPVRKSLRTHIAWLERELRHTDSNLAHAIRESPVWREKDALLRSTPGVGPVMTTTLLANLPELGTLTGKQIAALAGVAPLNRDSGTWRGKRTVWGGRAQIRATLYMAALVAARFNPVIRAFYQRLCATGKAKKVALTACMRKLLIILNAMLKHRTPWRTELVPCA

SEQ ID NO: 495468 - protein, 419 aa, unidentified
MSKSNISKQLKQVQPGTLHVGVDLALDKNVVIVINEKAERLDHFSFPQDRGGYDYFLRRVEGLRQKHHASSAVVAMEPSNYFWKLLARELEEKGITYHLVNAYTVKKHREGDQLDRSKDDRRDAGQIAELSRNGHYTQTRLQKGAYEELRQYATLYDQTVQAIRREKQVLWGLAEQAFPELFQVFKNLGGETSQALLVSDACAATIRQTTEEDFIAKVRLAHTGKKLGISRVRRAYHLAATSIGVTEGLAAIQLAIQLHLSRLQTLQAQLEQVTHAMATCLASLPETPFLLSLKSLKTVSVALFLAEVGDPKRYQAAAQWVKLAGIQPAPNTSGKKQRSKTPMSHQGRARLRTMLYFTCLRMVQHDPHFVQLYSDLQRRPTNPLTKMQALGVLMNKLLHILWALIQNQTFYNPSFAQSI

SEQ ID NO: 495469 - protein, 388 aa, unidentified
MLPSIHNASTEQTATVRPDLTLYASLELSRATWLVTCLLPERDRMSKYSTPGGDGGALLGLLERMRTRAQQLTGRPVKIVVIQEAGLDGFWVHRLLESNGIESHVVDPASIAVPRRRRRAKTDAIDGETLLRTLLAWSRGEPRVCAMVVPPTPEEEDSRRVCRERAILLRERIRHTNRIKGLLAGQGIMGFNPLHKDRRQLLDAARTGDGRPLPPQLKAEILREIELIELLLRQIADVEAASEVLAGPKTAKVPSPVVLLKQLKGIGPEIASVLYFEGLFRSFGNRRQLAAYAGLAPTPWRSGTVNQEQGISKAGNRRLRRTMIELAWLWQRHQPASALSRWFQTRVGNERGRIRRISIVALARKLLIAVWRYVTQGEVPEGAALKAA

SEQ ID NO: 495470 - protein, 354 aa, unidentified
MSQKSSSEIAVIGIDIGKNSFHVVGQDRRGAIVVRQKWSRGQVETRLANLPPCLIGMEACVGAHHLSRKLQGLGHNARLMPAKYVRPYSKGQKNDYRDAEAIAEAVQRPTMKFVATKTADQLDLQALHRVRERLVSQRTGIINQIRAFLLERSIAVRQGLRFLRAELPRILAMRSDVLSPRMLRVIEDLAGDWRHLDARIASLSGEIETLAHQDQHCERLMTVPGIGPIISSAMVAAIGSGDVFSKGRDFGAWLGLVPKQISTGDRTILGGISRRGNRYLRALFVQAAWVVLVRPTQWERYGLKSWIEAAKKRLHHNVLAIALANKLARIAWAVLNRGRAFEFVKTDAMASRPA

SEQ ID NO: 495471 - protein, 404 aa, unidentified
MGSNPLAGTDGPLWAGIDAGKTHHHLAVVDAVGEVVWSERVPNDQAAVEKAITMVTAAGVRVAWAVDLTSRTSALLLALLTAAGQDVVYVPGRTVNRMAGAFSGEAKTDAKDAVTIANTARMRRDFLPARPQPELVAELALLTGRRADVNADWVRSVSRLRDLLSGIFPALEREFDFATRAALVLVERYQTPQALRRAGLTRITAHLRKHGVRRAEEIAERAVAAAKSQTVVLPGQDIAARLISQIAADLLRLRDRLKDLDGQIRDTFARHPQAEVILSMPGMGPQLGAEFVIAVGDLSTFRDSAHLAAYAGLAPVPRDSGRITGNLHRPKRYHRRLRRVFYLSALSSLKTHGPNRDYYRRKRAEGKKHQNALMALARRRIDVLWALLRDDRCFTSSAPVAQAA

SEQ ID NO: 495472 - protein, 346 aa, unidentified
MDHFIGLDVSLASTAICVLNAHGKVAKETTAASEPEELVTALRALSGNVIAVGLEAGPLSQWLHKHLTEAGFEAVLMETRQVKGALKAMPIKTDRRDAEGIARLLQMGWFRPVHCKSVSAQETRAILTSRKAIQRGIINIELSVRGVLRNFGLKIGRISKPGFDARVRELAEGNEMLVAAVEPILRARMALRKELAGLEKRVRDLAKTDPVCKLMMTMPGVGAVVALTVRAAIDDPERFHSSKDIGPWAGLTPSRNQSGEMDVIGQITRAGDAGLRTALYQAATVMLNRGKHNWLTGWALRVAQRRGKKRATVALARRIGVVLHRMWRNETEFRFTRDVVATATDV

SEQ ID NO: 495473 - protein, 354 aa, unidentified
MNTTQVFEKRKIAVAIGIDLAKDHCDVVAYNADNKICFTKANWAYPHLMEWLANAQPAVVLMESCKGCHVRARDIADLGHDTRLVKGADVKALRNVCQKNDIRDADYIARLLYVPGTKFVFVKNQRQQSLQFLQNEYKSIQELRIQVGNQIHAGLEEFGCPGPKSKKFIQSRMMAHLEKNAELIPDEVMSSFLRRREMWLNLFEQEEEAKKRMEEIARTDDDAQRIMTVPGVGAQTAVGMLVHIGGDIGRFKNSGQFAASIGLVPKQNSTGSNTTLNGITKCGPKRLRANLVQCGQVILMHADKLKGNFGDWVRKLRDSGKKRGVIVCAIAAKIARIVYRLMKDKVDYTPVPSR

SEQ ID NO: 495474 - protein, 446 aa, unidentified
MSRKKYTHLRGERGQAFADKIRGIPLEQILCVSLDIHKYFHVVMIHNALGEIVTMTFEIDIFQTGFDRLCQAIDEAVARTNAQVVLVGMEPTGHYFENLARHLHHDQRSLQPVTLINSFAVSRNRDQQMMHREKDDEIDVAAIGDLLRRGEGTPFQPVRGLYLEMQHLSRVRLSKVKMRTALKNQILGHLDRIFPGLVIQGKVARERYEPLFVADFWSCQTLQHLIRVCPDPRQLATMAPHELRTAFHEQGFALGPKTAARIITYTQKVLLPDPEVVAIRCELLARDLALLAEVEQLIAELEDRLHALLQQTPYWVWTQVRGLSMTQVASLAAGIGDPAHYTHAAQVFRRSGLVSGRNDSGTRRHKGKGKRVVKTGDVYLRRALMTAILSLIRHQPVLQDYFNELHRTKHAGVARVATARRAIGILWAMQRDQQSRTLVLKRGAEM

SEQ ID NO: 495475 - protein, 457 aa, unidentified
MESYYMGIDVSKGYADFVILDAKKDVVEPNFQLDDTFGSHCKLFEILKRFFESHSEAVLFAAVESTGGYENNWLHSLGGFQGALDIRSARLNPLGVRANSKASLRRVITDKISARDVAEYLIAHPEKVTYQQEDSLAGLRRQWGFVRLLVKQKTQILNQFESLLYTANPELIAYCQSGVPVWLLKLLKKYPTAVKLSKARATSVARIPYVTAGRAKELIDQAKKSVASATDETTGSLITAIAEQIIRMEETIRIQSQQMAKRCAIPEVALLKTIPGISDASAIGLMLEIQSVKRFASVKKLAAHFGLHPAFKTSGDGTSGVRMSKQGRKEPRKILFMVAMVSLTTNPHIRKIYEEHTEKGMKKMAAIGLCMHKILRIIYGMLKNNQAYDSQVDQKNREIITARKATHTAKNENRRYEMFDQQAPISKRQSNKRKEWKQSQGDNIAQCGIGVPIPSAA

SEQ ID NO: 495476 - protein, 408 aa, unidentified
MTVVGIDVSKGKSMVAAMKPGGELVAAPYEVRHSDIELSRLALDVLCMEPDTRVVMEATGRYHEPVAALLHSEGIFVSILNPLLIKQSGAGSLRKVKSDPKDALKIAKYGLDNWSTLREYTPTEAIRQQLKLCERQCDLYSKNIVMLTNNLISLSDKTFPGVNELFSSPEKADGHLKWVDFYRTFWHCDCINRMSPDAFGERYKKWCKKKGYHFSADATDALYAASCGLYTTLPRDNNAKLLVTVAADQLIALRENQSKLEAEMLNLCKQLPEYETVMAMYGVGKSTGPHLMAELGDIRRFPHRSSIVAFAGVAPGVVGSGKMQLSSVATSKRGSPQLRKALFQVVSTYVKRKPENEAVYQFYAKKRDEGKPFFVCTTAAANKFLRIYYARVKECLNAAESAVQTEEG

SEQ ID NO: 495477 - protein, 342 aa, unidentified
MESTRHIGIDLHRNCFTACVRLENGRNYLTEWRLEQLPKFVAKLRPNDEVAVEVTGNTRLFYDAVAPHVKRVVAVNPNQFQVITHSVKKTDPNDARNLALYLAKDLLPEVRMKDKTRAQIASLTQTRDTMVKLRTALKNKINNICSAHGVNLSKESLAGEKGLKAVLEMPFDPLVEHELKILVEQIRSLNKSIAELEETISRESQKLEGHKHLTSIKGIGGLSAGILLSIIGDIGDFADEGKLAAYFGIVPRISHSNETEHSGRITKRGTKLGRTTLVQCALIAQRYSPYLKNYYERKKNRGTGKAIIALARKFLGIIYRTLKNKWLFEDFPNFVLAEEATA

SEQ ID NO: 495478 - protein, 410 aa, unidentified
MKVAGIDVHKKVLMVVVVDASTPEVKPARRRFVTMPSELHRLLTWLREQGVEEVVMESTAQYWRSVWLELESHMRLHLAQAFSNRAPRGRKHDFKDAERWVRRLIADELILSFVPSGEQRIWRSMTRMKLQLTRDRVRLQNQIECLLEEMRIKLSIVVSNLLGASGLRILHALANGETDPRKLAQLGGERLQCTEEQLVDALTGRAQPVHGEMLALQLQRLQLIDQQMARLNSMIAAAMKAQQDAVIRLAEVPGLGVDSAQQIIAEVGAQASTFPSAAELTSWVGTCPGKEESAEQNHSSRSAKGNKYMRRVLNQAAHAAVAKKGSHFQAVFRRLLPRLGYQSAIWAVAHRLCRLVWKILHEGVRFIEQGHQVGPREKRKRAQMLARALRKLGYEVTITPINQLTANPVV

SEQ ID NO: 495479 - protein, 395 aa, unidentified
MRHILSFDIAKDKSVYCFIDELRNVIIDATLIEHKKDEFDLLFNKVKNHSNLIVIMESTSIYHLPVENYFRSKGIDTIVMNPKLVKQFKDTLNKSKTDKLDCFKIARCYLGTIDNFYQKQDEYFMYNPLARQYWSLIEGQTRLKNRYRQLIDIVFPEFALIFNDLYDDLALNFIHDFPHPVLFVNRRIDYLMNYLKEKNGTTQAYRFKNKVLKMKELASNSLCFVAFDSYQVQNLVQVIEMIQYHKSEINKIKNQLINDMKDKELFKIINSIPGFGEFSTALFLAEVGDITRFDDKYQFISFIGIDSVTSQSGVSAYHGPISKTGCKFGRTILFNIVTTVLQISAHADKTNPIYLFFRKKQSEGKHHYKCIIACETKLCKIIYKLCSSNCLYENK

SEQ ID NO: 495480 - protein, 412 aa, unidentified
MRRVVGMDIHRTFGEVVIWENGVLRHAGRVDMTRSALEGLGNRLAATDEVVIEATGNSMAVSRVLSRFVARVIIANPLQVKAIAHAHVKTDKIDAGTLASLRAAGYLPEIWTPDAITERKRRLAARRYQVVRHRTRLKNEVHAILHAHLIPKCPHADLFNARGRTWLAHQPLPDDERSAIDRHVRELDRLADDLDILDREIAQGALDDQAIKRLMTITGVNLTVAAGVMAAIGDIDRFKSPRKLVSYFGLNPRVRQSGLGAAHHGRISKIGRSHARAMLVEAAWAAARAAGPLHGFFVRIRARRGHQIAAVAVARKLAVLCWHLLTKDEDYLWARPALVASKTRAMELQAGRPQRKGNQRGPAYAYNVKTLRDQEMQIAKQAERNYARFVARWKTRSASGAVRERLNPARQE

SEQ ID NO: 495481 - protein, 466 aa, unidentified
MPRHQPRRSTARSSRAVLEHINPNAAGIDCGSAEHYVAVPPDRDATAVRAFRTFTGDLYQLAEWLTACRVTHVAMEATGVYWIPIFEILDARGFSVSLVNARHVKNVPGRKSDVSDCEWLRDLHMMGLLRGSFRPADGIVTLRAYLRHRAGLVESAGEHVQRMQKALVQMNVQLPLVVSDIMGVTGQRIVRDIVAGEREPQRLARHRDARCRASEAEIIAALTGNYRPEHVFALTQHLALFDFCQQQLRACDAAIAAQVATLVAQTPAPNEPVPPARRHGPLRGNEPQLELRTPLHHLTGGVDLSQIEAIGPYTALRLIAEIGTDMTRWPTEHHFTSWLTLAPRNKISGGRLLSSHTQPSANRAAALLRLTAMSVGRTQTALGAFYRRLAYRVGKAKAITATARKLAILVYRMLKGELTYDDPGAAAYEAQQRTQALRRLRNRATRLGFGLVDLSSGEVLAPEAVS

SEQ ID NO: 495482 - protein, 409 aa, unidentified
MQAPTRFIGMDIHRQFVMVAAVDEQQHILFDPIKVPLDTFEFWAENHLQTTDQVALEATTNAWTVYDHMRPLVAEVTVADAHKISLISRSPRKTDQHDALVLAKLLAAHLLPAVWVPPQPVRELRDLIAHRRHLVRDRTATKNRLHSVLHRHNLYLPEGDPFSEANRAWWQALALSRSEQLRVRHELVHIQHLTQLIEEVEAEIAYLSTQEPWCEQLAFLIQLPGVSWLSGMTILSAIGDITRFPGSRQLVGYSGLGASVHASGNTYRTGRITKQGRRELRTVLVECAWSTVRYSPFWKARFERLRAQVGKQKAIVAIARKLLVVIWHVLSKREVDRQADPPAIARSLMKWAAWQRIATSNGLSRADFVWRELDRLGLGPHINQFVYNGHLYVRPPTALPAVREAAGPT

SEQ ID NO: 495483 - protein, 355 aa, unidentified
MSGLKHQKEKRSMDHFAGLDVSVKETSVCIVDDSGKIVREVKVASEPQVLLAVLRNPACHFKRIGLEAGPLSQWLYSAFAEAGLPVICVETRHMRAVLKAQINKTDRNDARGIAQMMRVGLYRPVHVKTLRSQKLRMLLTHRKLLQSKAIALENDLRSTLRNFGLKVGMVGAVKFEGRIKELVENLPDLAVLVEPLLVVRRVLHEQIVILHRRLLTIVRDDDVCRRLMTVPGVGPVVALTYRATVDVPARFKNSKAVGASFGLTPSRHQSGESDRPGGISRCGDEMMRVMLYEAAQVMLTRTSKWSWLKAWAMKIARHRGRKKAIVALARRLAVIMHRLWVDGTEFRWTREVVAA

SEQ ID NO: 495484 - protein, 289 aa, unidentified
MEHFAGIDVSLKDSSICVVDAAGRIVREAKVASEPEALIAWFGGLGFAVTRIGLEAGPLSQWLHAGLSGAGFEAVLLETRHVKAALSAMVVKTDRKDARGIAQLLRMGWFRPVHRKSADAQEVRALLVGRKLLQSKLRDVELSIRGILRGFGLKVGEISKGRFAARIRELVAGHEMLETVTGAMLAAREALLAEFMRLHRRMLVTVRADAVCRRLMTVPGVGALVAVTFKTAVDDPGRFIRSRALVAYFGLTPKKYQSGERDVTGAISRVGERWCGSLSTRRPISCSAV

SEQ ID NO: 495485 - protein, 321 aa, unidentified
MAKHTTICAGIDTGKRKLDVAIDGSSEQLQVENTAEGHEALLTWLRQHRVKRIGIEASGGYEQPVVAELRRKGFVVVVFQPAQVRAYAKFHLQRAKNDKIDAAIIAACTAAVRKIHAAPDPRLLPFAEQLTMINQIGEDIARLKNRIESCRNETINKLWQEDIARLEQRERAALKALVAAIRKHPDLAKRLALISSVDGIGLPTAVAILVRLPEIGQITREQAVALAGLAPYDDDSGDRSGVRHIEGGRKRLRRALYTASLAASFRWNPQLIQLYQRLTAAGKEHKPALVACARKMLIFANTVVARGTPWCGEPPGSLPAS

SEQ ID NO: 495486 - protein, 408 aa, unidentified
MGRAAEVVAPSSSRRTDGGCPVAQVNDLSRSLTAFDPLSTLVVVVEMSKASWLVSGAVPGVERQPLKKLEPDATALLRLIERWRNEAVRAGRPISRIALAYEAGRDGFWLARWLIARGIEAYVIHSASVAVSRERKRAKTDRLDAAMLMRVFLGWLRGERGHCGMVAIPTMEEEDARRPSRERESLVNERSRITNRMKSALARLGVRGFKPHLRKAPERLADLRTAEGTGLPANIIEEFRRDMARLALVREQISSIEKTRAERLERAPDTGPHAMVRLLARVIGIGIETADMLVREILSRRLRDRRAVARYAGLTGSPDESGLKRREKGLAKAGNARVRRGLIQLAWRFLIFQKDSALARWYRMRTEGPSGARKTTMIVALARKLLIALWRLVTTGEVPDGVELRPAA

SEQ ID NO: 495487 - protein, 403 aa, unidentified
MSQNSSVAAERRRDATTDGRVPMAIYCTYFGIDSHLRTTTICALTPEDGELRTRTFKGNDYGEMAEWMAGFPQPSHGVYESGCTGFVPARMLTRGDTLVEPVASSKLPSSADSRSRKNDRRDAERLARLALAGEVSPVWVPPEQVEGLRELAQAMDDLACVREAARQRVNAILCRHGISWDERTPTGRLKKRWGQHFWNWLRSIDLGDAGSQAAYLAALSAAESAEVAYDELRARAEGIARVSDLGPPVVALMCVKGVGFSSALAFAAEVGDFSRFASGRKVTSYFGLAPSESSSAESRRLGRISRNGCALVRKLLIEGAWVLARGNPACRKRGGTSVPLAIREHARACSGRLLGRRRELVSRGLMPCKANTATAAEMARMLLYIGRDAQEAAALAAEVALVA

SEQ ID NO: 495488 - protein, 487 aa, unidentified
MACGRLSTPSNTVVPCEAVYRAGRRMSLYGPLTVAALTSTRIRFVVPVAISAGDHSHVVRVKEESMLAESHDEEQIIARVAALDIAKAELVCCVRVPSPAGGKRRLQEVTTHSTMTQALTELANRLVEMGVQRVVMEATSSYWKPVFYLLEAHGLDPWLVNARDVKHLPGRPKTDVLDAVWLCKVAERQMLRPSFVPPWPIRRLRDLTRYRTDLVAARTAEKNRVEKLLEDACIKLSVVASDIFGVSGRAMLAALVAGERDPKVLAQLARARMRGKIDRLEQAFDGHFADHHRFLLSRMLSRIEGLDADIAALDAQIDVQLAPFAEAAAHLDEIPGIGSVAAAAIIAEIGVDMSRFPTAGHLCSWAKFAPGINSSAGKTKRSASSGHGNPYLARVLGEAAVGTTKTNTFLAARYRRIARRRGQPRAVVAVGRSILVIIWHLLHDPDARYQDLGADHYNRHVDPSAKKRSHIRQLEALGYTVTLTPAA

SEQ ID NO: 495489 - protein, 355 aa, unidentified
MTSMTTDSSAVTGGVDTHGQTHHGAALDSVGRQLGDREFPTTPAGYRALVNWLQTYGHLERVGVEGTGTYGAGLTRQLRAAGVTVVEVDRPDRKARRAQGKSDPLDAYSAARAALARKATGVPKTQDGRVEAIRLLRGARSSAVIARSGATPQLKALLVTAPAELREQLRTLSNTKLIATCARLRPTGDIADPEQATKTALRRLARRHQYLSEEITAADTELRTLVTAAAPRLIALPGVGTEVAGQILITAGDNPDRLRSEAAFAHLCGVAPIPASSGRAASSSPAAAGRGSPATSYAQRAWATTRASWYVRASDQARSRADRGWAAATIAARVGRAARTAASAACATGPGRRRS

SEQ ID NO: 495490 - protein, 346 aa, unidentified
MGTQITGGVDTHLEVHVAAALDEHGGLVGTASFATTPAGYRELVEWFASLGTVVLVGVEGTGSYGAGLTRHLQALGIAVVEVDRPNRQRRRRSGKSDTHDAISAARAAFAGDALGEAKTRDGNVEAIRVLRLARNSAKRDRTRALNQMRALIATAPDELRSQLRDLTIPRLVRAAASFRPARRTDVTNANRVALKTLARRVLELDAEIDMLDELLTPLVAQTAPEMLARVGVGTDTAGALLVAAGENTSRIHNERSFARLCGAAPLDASSGKQQRHRLSRGGDRQANSALWRIVITRLSYDPATRRYLQRRCAEGKTKTEAIRCLKRYIARELYACLPREDWLDST

SEQ ID NO: 495491 - protein, 342 aa, unidentified
MNTFYVGLDLGSSSFQQVALNHAGVSRVNRDFGTSEANLVKAFSDLQGEIHVHLEAGELAPWAAAVIAPLVTRVVCSHPQHNAWIAKDADKSDRIDAYKLAELLRLNRFKEVHYPQQQKRREFKTLVQHYDELTSQQARLKTKLKARLRMQGVIVTGERLYSGTGRKAVLAKVKSSAVRAAISQLYAVLDQSVASQTEAKLLMLRMAQAFPEIKLLRTAPGVGPIGACRFSAYIHTPSRFSSTRKLWKYCRLSISHRSSNGKPLRRPRLDRFGCGRLKDVSRKAFDAALRSRQDNGFKRAYQRALETTHDATHARLTVQRKIVSTLRAIWINQTPYCEELMR

SEQ ID NO: 495492 - protein, 374 aa, unidentified
MENTITYVAMDTHKKQHKIALHYPCREEIVEFTINNNVRDIKKMVNKIKKQAPGKVEFCYEAGVCGFTLKRRIEQFDCRCRVIAPSLVPRKPGDRVKTDRRDAGKLLMMFRAGLLTEVHAPNEHQEAARELTRLRETARDNLKRIRHQLLKLLTRHGYVYTEGRHWTQKHIAWLRTIQFTESMLTNVFENYFNEMIYCIGRLENLDKEVGLLAGSPEYKEIVGLLCCYHGIDTLTAITIITEIFEFGRFESPRHLMSYLGLTPSEDSSGDKQKKGAITKAGNKRIRRLLNETSWHYRHRYVPSAALKKRRKGQPQWAIEIADAAGRRLSTRHRYLVNKGKMPCKANIAVARELAGFIWFTVTQYQARKNTNDAA

SEQ ID NO: 495493 - protein, 311 aa, unidentified
MQDIIGIDISKDRLDAFRLSDRQHNSFGNDKAGFKTLLKWIGNAEGLRIVYEPTGPYHRAMEEALAKAGHALVKVNPRQARRFAEATGIQAKTDRVDAMLLARMGLALDLPPRPVRGELMNELRELHVARLALIKDRTAAGNRADTAAISLIRRQAKARLAIIEKQLAEVDETIATLIAAEPALAERLDILTSIPGIGTVTACMLLIEMPELGTLEPKQAASLAGLAPFTRRSGKWKGKEMIRGGRASLRAAIFMPALVAIRFNADLKRKYQQLRDSGKAPKLAITAVMRKLVLLANALLRDGRKWAERPA

SEQ ID NO: 495494 - protein, 456 aa, unidentified
MRGLLPRDGVVIGIDLAEDKQALAVIDHDVRVLARKTVRVKAFRLGEALAWAVGQARAKGFAQVTVACEPTGPRWLQVQRLCAERGLPLVCIQPLVSHIAREQQDYTTHKTDEADCVMIARLAIELHCYIPEELDEAWAHLRHLGRRRARLITAATASVQRVRDFLSVAWPVAPEACAHPFESVTWLAAMQVVTLRCGGQPEKLAAIGLAEFTALVRQAVAGWGGQRPAGPVCRAVFAALASTEGVVVSHRRGLLRRCADELGDLRRTRAQLRAVEAGMAAVLGELGLSRLADIPGLTAVGAAAILAETGDPRRYDSSSSLVKHAGLSPSGNASGAFEGQAHISRRGRPGLRLTVWRAIWPLLIHNPVMAAKYAAMITAADAAAAQAVPAPPGTGSPQASAAAAARARRAKARVACAASLLRWIYSMVVHGTGWDPDVASGAASCQHAPRYQAEAA

SEQ ID NO: 495495 - protein, 421 aa, unidentified
MPSPLFVGIDVSSQNNVVCCLTRDDELRPVSRFTVPNNRPGILEFQDRIAKLARQHRSEEILFGLEHTGCYSTHAAMYLQRHLDFGVPRSQVYVFNPSLIREFKKSHYLSAPKNDRVDAWFIAAKLRTGLLPHPFTWSEPLMALQRLTRARYHLMQDLTRESNFLMTNLFLKFSDYTITGPFRRNKLSATSLAVMEEFTSAEDIAEMSLERLVDFLVKHGRNRFDDPAAVAQALQKAARSSYRLPQSLSDSVNLAMASNIRVIRTVQEQLKALRKGIEDHLATIPQTLDSIPGIGPIFASGIVAELDVSQFKHHAEAAKYAGLAWTVHQSGTFTANRTRLIHSGNRYLKYYMVEAANSVRVHDSVFAEYYAKKKTDQKEFAEGRALALTARKLIRVVFYLLKTNRLYTPEGVIRQHALTKM

SEQ ID NO: 495496 - protein, 372 aa, unidentified
MLVKTTPMSLTLNPNPIMHYAGIDYHKRYSVVHVLDESGETVGKGRINHDRPANFRDFFDSIGGSFSVVFEASMNWHWLHDILEEIDSIESIVMAHPYKTRIIAEAQVKSDKIDARLLAQLLRGDLICKAYACGREARHRKELVRQRAFWVRIRTSLRNRVHRLLGGEHDLQLPEVSDLFGRKGIGVLNKLELHEPAGMQLKQNLRMLSELNQHIKTVEKSLDDEIGSDENVIRLKSITGIGPIIAAVIVSEIDHIERFNSSNKFCSYAGLIPSSSSSGGKTHNGKLVARCNRWLRWAFVEAAWVAVGCDGYFGSLYRQHKARGKKPNTAIMIVARRMCQITYRLLTEKREYSAAPLNDKTFPGGSEVRMAV

SEQ ID NO: 495497 - protein, 387 aa, unidentified
MSDAITLIKAADKLFIGMDLHKNTSTFVVKDREGKLIDSMKVLTDKNDVTRYINAIKRNNEDKELSLVVEPVSQWYYYADLIENLGVDVHLAHPMEVKAIAHAHIKTDKIDAGVLADLLRTNFLPEAYFSPAEVRGWKEQCRFRASLINLRTQTKNKIHAILFKHSLKHNFSDLFGKGGRRWLAALELKEPFKGNLDKYLNLVDYLTDETGYAEERITNTVINCPQAKLLISIPGISYCSALTIMAEIGDIERFVSVKHLQSYAGLIPSTYNSGDKQIHGKITKRGSKWLRWIMIESAYHQMNCKRIPGFGSYYNTLKKRKGSKTAAVATARKLLAVVWRLLKDNRPYEVADPRLSAIALATAGCWKSGPIASKISSVSPVVLTTAD

SEQ ID NO: 495498 - protein, 444 aa, unidentified
MVSRRAYRRVSVNEIDHQELLELTKEHGKPGTVLGLDIARNEIVACLRWDQDHFERPWKIINPKEIGVLVELCELLKSHCTGFSIGLESTGTYGDVVRYALPESGISVQRVSGKAVSDYHEIFDGVPSQHDGKDAAMVAELVAHGKGTLWPFATLSEHEQILRHQVFRIDAFRKQQTQWLGRIEALTARHWPELTSVLKLNSVTLLNLLSTYGSPAKAIADPKLEKMLRLWGKKYLKEEKIAALVLSARSTKGLPMNASEISWMQELAAESLRCHREQLACEKIIKEQVASDPVMQRYSDAVGAATLAVLWSEVGDPVAYSSAGAYVKALGLNLKERSSGKRLGQLAISKRGPAMSRRWLFYWAMRAVQRDELQGWYEAFIQVGNGSSSGEHRKMKGLIAMMRKLCKSLWHVRVHNKDFDYSLVINGMPPRGRRRRRKAAKKAA

SEQ ID NO: 495499 - protein, 400 aa, unidentified
MMTPDDIDVWVGLDVGKSAHHAHALDHDGNTLYDKPLKQDEKAIRTMLGKLSKHGRVLLVVDQPNTIGSLPLTVARNMGIAVAYLPGTAMRRTAQLLPGDAKTDRRDAHVIAWAALKLPETLRDAGPDDETLAALKLLAGHDEDLAHESTRHVNRLRSLLLQTHPAFERALKGERITRDATLALFERYGGPMGVKRAGIEDVKDWAKSNGLRAGRIIDDMFKAIGEQTVTVPGTLMAETIIPSIAHDIKTIRDRRREVDRQVEKLLEDHPLLTVLTSMPGIGVRTASNILLGIGGDIANFKSSAHLAAYAGISPVTGQSGTSIKGERPSRRGNKRLKNALWQTAFVASTKHPPSVAYYKRKREQGKHHNAAIICLARRRCDVIYSMLKNGTLYQEPALVA

SEQ ID NO: 495500 - protein, 377 aa, unidentified
MKHWIGVDVSKAHLDVALLDEAGALLAQERISNEPKAVRALLRRWGKEFRLDKSSMLVCLEPTGHYGYRLVEELVHLAIPTWLAHPLDIKHSIGNTRGKSDSIDALRIADYARRYQDKARLVGAEALRMNKLRQLLSCRRQLVTERRRQQVRIKDTNRHMDRSLQSLFDRMSRQRIKQVDQQLVEVDGLILEFIRSDQQLNQQYQLLLSVDGVGPVLASYLLACTEGFTRFRTVRQLACQAGVAPYEHTSGSSIKGRTRVSPQADQVLKTLLHMSALGGDRKGGRVAGLLSKEAQARQSAYVCDQCRSMQDPPSSVRRDPAKHTLRAYATCTGHRIRRAHVIPPHPARRSHLLGRWRVAASVQERGITCPAPWNNAP

SEQ ID NO: 495501 - protein, 341 aa, unidentified
MNQKYLIGVDISKKKGDSALITDGLSVLSEKVVQNTDVKWERYLMTVLKKNKIAREDLLVCCENTGIYSNPLKRVCHKLGIALWVEHALKIKRASTDMRGKTDRQDALRIAEYARRYRDKAVIYQPEKPLVRALQHQVKIRETLIEKKVAMENQLREAKSHDPELYKALVKGYRTVLKTINAAIKKAEAEIEGLAAQDEEISTNEALLRSIPGIGAQTALRFIIRTDNFRNFSSAKHLACYAGVVPFANESGTIIKRQRISKMADKNLKQLLHMAAMAAIRSKGELQDYYKRKVAEGKNKMSVLNAVRNKLVHRIFAVILRQTPYQRENYFSIKNEISLAC

SEQ ID NO: 495502 - protein, 441 aa, unidentified
MSHGRALSRGDRRRNERLARLRSVVRRDFAVVAVDLASAKQAAVVTDHDSMVLGRRMFTGNTWVIDDILDWAEPIAAKAGYAGVVVGCEPTGHRWKPLLDRSRARGLELVCVNPMLVHRGREEEDFTRDRSDFKDATIIAKRVAELRCYVPYVMEGHWCRLRHLGARRADQLVAVGSARQRLRDLLECAWPAVLSAAADPLDALTWRAAMAVSTDPGRIVAMGFGAFADAVREQLPRWGGTRRNLRILRAIFDAAHAPGGVETERAAACERAAYALEDWHYALDQVADVEHRMVEVLDALDLYELVTTITGLSVVGAAAILAETGDPARFDCARTWAKHAGLCPRANESGNFHGSTNVSRRGRPGLRLAAWRALWGALRHNPVYAARYTHLTTRADNPLCDGQARAAIAAALLRQLFVVVTRRVAWDPAIAAGTGVVPQAA

SEQ ID NO: 495503 - protein, 398 aa, unidentified
MTESSDYESVQVFIGVDVGKDTHHAVAVNRSGKRLFDKALPNDENKLRSLISDLKQHGQILLVVDQPATIGALPVAVARSEGVLVGYLPGLAMRRIADLHAGEAKTDARDAAIIAEAARTLPHALRTLKLADEHIAELSMLCGFDDDLAAQTTQASNRIRGLLTQIHPALERVLGPRLDHPAVLDLLQRYPSPEKLASLGEKKLATQLGKLAPRLGKRLAADITQALTEQTVVVPGTNAAVVVLPRLALQLITLRKQRDEVALEVEQRVLAHPLYPVLTSMPGVGVRTAARLLTEVACRAFASAAHLAAYAGLAPVTRRSGSSIRGEHPSRRGNKTLKRALFLSAFAALRDPISRAYYTRKMSQGKRHNQALIALARRRCDVLFAMMRDGTFYTPTAS

SEQ ID NO: 495504 - protein, 388 aa, unidentified
MRQVCGLDVHKDSVFVCILNENGVVFQEKFGVLTTELEQMLGIMREYDVSEVCMESTSIYWMPVWRVLEPYFELKLVNPFFIKQLPGKKSDVKDAEWIATCLHKDLIKGSYVPEDRIQQLRQYDRRIFDLDKDIVYKLTKLDAALQRCNIRISNYLSNTNRKGYKDMVGKIADGITNPEELIRAIHGRTINRVGRDVILGALTGVISEADCDMIRQLRDEVEPAEKHKDECQSKMDTLCRQWFPDEYALLQTIPGVKARSATVILAELGNDVSAFPDAAHLTSWCGLKSRNEESAGKIKSRKITHGNKYLRKTLIECSWAARRTQGSFYSRFSYHQTVVRRKNSMKVQVAVARKMLSAIWFILHDHVPYKDYTPPTPEETSSDIATTE

SEQ ID NO: 495505 - protein, 343 aa, unidentified
MQTITTIGLDIAKSVFQVHGVDAQGNAVIRRQLKRRAVLAFFEKLPPCLIGIEACASSHHWSRELKALGHTVRLMPPAYVKPYVKRQKNDAADAEAICEAVTRSNMRFVPTKTVEQQSCLMLHRTRHLFIRQQTAVINSIRAHLAEFGIVAPVGRRGAEELLDVVADSNDDRLPEVARVCLAALGAQLRRLKEQILEFDRMIMAWHRSDETSRRLRYIPGVGPMLATALVASVADPKAFRSGRNFSAWIGLVPKQHSSGGKDRLGSISKQGDRYLRGLFVAGALSVIRYAKIRGTKHRPWLTALLARKPTKVAAIALANKLARMAWAMMARGERYKEPVALAA

SEQ ID NO: 495506 - protein, 410 aa, unidentified
MEVVVPCCAGLDVHQASVVACVNSTGRGGRSHKEVRTFGTMRDDLGALRDWLKAAGVTLVAMESTGVYWKPVYEALEDHCQTIVVNAQHIRNVPGRKTDVKDCEWISDLLRHGLLRPGFVPPPDIRDLRELNRYRRKLVQAQAGERNRLIKVLETAGIKLAGVASDVFGVSGRAMLRALIEGEDTPEAMAALARGKLRVKRKELARALDVPLKPHQRFMLRTQLLRIEQAEADLQRIDTMLAERVGRYDHYVRLLMSIPGVDWITAVTIIAEIGVDMSAFASPAHLASWAGICPGNNESAGKKRSGKSRKGNVYMKTALVTAAITGSRRRGTYLAEKYRRLATRRGKPRAAVAIAHKILVSVWHMLTDGVFYHDLGAGYLDRLDRERTSKHLVRRLEGMGFEVQLQQKAA

SEQ ID NO: 495507 - protein, 436 aa, unidentified
MDEVEDEPLFRERVAGIDIGKTTIMVTIRVPSDTRRGRRQQETREFRAVRKDLLALADWLRCWGVTRIGMEATGDYWKPVYFLLEREGFDCVLYHASQVKALPGRPKTDKLDSVWLAKITERGNLPGSFVPPEDIRRLRTHTRYRRHLVQARTAEKNRCEKLLEDAHLKLSSVISDIHGVSGREMLTAIIAGQRDPKVLAQMARTRMRGKIAQLEEALDCSFFTGQHAFILQMMLANIDHLTAQVTELNARIDELCQPYERQIAQLDAIPGFGIITAQDIIGEIGVDMTVFPTAGHLCSWARQAPQVSESAGKRKGKNATGRGNPYLGGALGEAAANAGRTSTFLGTKYRRLVKHMPKKKAQGAISRSQLVIAYELLSDPDAEYQDLGTDYYEQRANIRREVRSHARAIERRGYRVILEPIDPGLAPDILPITKAS

SEQ ID NO: 495508 - protein, 448 aa, unidentified
MSKIKTKNETVKRISQLTVINPTAAGVDVSDTEMMVAYPINSVQLEVRVFGCYTIDLHSIAKTLIANGITTVAMESTGVYWIPLFLLLQEYGFEVCLVNAKHVKNVTGRKDDESDAEWIQKLHSCGLLSASFQPDSQTRTLRSIVRHRKSLESTCSVYINRIQKALELMNIKVHTIISDIDGKTGLFIIESILAGERNPEKLADLRDKRIKASREEIIKSLQGHYTAEHLFELRQCYQLYHTHRQMIEECDREIEKQLIEQIASKNGGVVAEIAEVKRKASKKHKLPFNATSYLKEIFGVDITEVFGISELSALAILSEVGTDMSKWKTEHHFTSWLGLAPNTKISGGKIISSRIMKKKHHAGQSFRMAANGLHNSKSPIGDYYRRLKAKAGAGKAVVATARKLAIIFYKMVACQQNFNPKMLIDFQEKYKQKKINQLKRKLQLLEAA

SEQ ID NO: 495509 - protein, 489 aa, unidentified
MAPGRRLNIGEASEHSPRLESTYQPTWAVVFGKVAQMQDDRKDIKGLPVVLHDVAGIDLGSTEHWVCAPMINGVGREVAKFGATTPELIRMAQWLHERKVESVAMESTGVYWIAPHEVLEAQGFELLLVDTRQLARVPGRNKKTDRTDCEWIQQLHSCGLLAGSFRPQEDICMLRTLVRDKANLVAECGDWLRRMQKSLDQMNVRLHRAVSDIDGLTGMSILRAIANGERDPRKLAKFRDPRCSRSEEEIAKELTGHWREDHLFSLRQSLKMYDAIQERIAAYDQEIQRKLAELGQENPPAGPAPELKNPEKARSIKKRGEEPMRQALYQMAGVDLASIDSIGVATIQIVLSEYGPDLSCFPTEKQFVSHATLAPHKPTSGGKPLKKKKRNSASSRVAAALRMAALSQRHSNTALGAYYRNIARRKDGGVAVFATARKLATYIYRLLRWGQPYVDEGAVAYEKRYNEGRVKALMAKANQLGYKLTPATS

SEQ ID NO: 495510 - protein, 337 aa, unidentified
MLFCGIDLHSNNSFVVISDDTDKVLYSRRLPNSLPEICAALSPYQQEMFGIVVESTYNWYWLVDGLMEAGYSIHLANTTAIKQYDGLKHRGDESDARHLAHILRLGLLPEGHIMPKAARAVRDLARKRMQLVQQRTTQIVSIETCLAQQTGARISCNDVKQLTNEEIDKMPVGHHEAMGMKANVAVMQALQIQIDRIEKELSAHCRRDPGYRLLNTVSGIGPILATVILLETGSIERFADVGNYASYCRCVDSIHVSNGKKKGEGNTKNGNCYLAWAYVEAANFAIRFCEPARKFYQRKKAKRNGIVAIKAVAHKLARACFHILKTGECFSVERCFT

SEQ ID NO: 495511 - protein, 456 aa, unidentified
MSKQRKSAMPAVHAKPTQRKHAAGIDIGATSIYVAVPVDRDPQPVRSFQTFTEDLHRLADWLQRCRIKTVAMESTGVFWVPLFQILEQRGFEVCLVNARHVKNVPGRKTDVSDCQWLQYLHSVGLLQASFRPAQQVCALRSLLRHRDSLVQTASTYAQRIQKALDQMNLQLHHVISDITGVSGVTILDAILSGERDPLKLASLRDHRIKATEETVAKSLVGDYRPEHLFTLRQSLDAWRYHRKLIAECDDEVQRHLVQFASKADPKQNPLPHPRKVSSSKVYSSQPGYDLRTEHYRILGVDLTEVPGINTLLVHTLLAEVGPDLSKFRSAAAFASWLGLCPDNRISGGKTLSVRTRHVQNRAALALRIAAHTLHHNQSVLGHYYRRMRAKLGAPKAITATAHKLARILYYLLTTGQPYQESIFAERETQNQKRALFSLHARARTLGYQLIPLTAST

SEQ ID NO: 495512 - protein, 342 aa, unidentified
MQNMMIGVDLAKNVFQVHVASRAGEVQYRKKLSRKQFSAFMAQQEPSLVIFEACGSAHYWAREMEALDHEVRLIAPQYVRPFVKRQKNDAADAEAIVIAARQPEMRFVVPKTIEQQSRAAVFRGRERLVRQRTADVNALRALLYEHGHVFPAGIRHLNRMTALIEEETSGLPMLIREECKDLQAQIAEKTARITERTAKLKTLAAQSDKARRLQTMPGVGPLTAVAVEAFGPDMAQFKTGRGFAAWLGLVPKQYSSGGKERLGRMTKAGQADIRRLLIIGAMSRLTWLGRRTIPEGSWLSRMLARKPKMLVAIALANKMARQIWAMLTKNENYRDPALAVAA

SEQ ID NO: 495513 - protein, 351 aa, unidentified
MIIVGCDFHPKWQQVAVLDAETGEIGEHKLMNGDGQAEQFYCILPAPALVGIEACGNSQWFIDMLERLGHEVWIGDAAQIRASYVRKQKTDRRDAGHILRLLIEKRFPRLWQPTAAERDLRQLLIHRHKLVEIRTRVKNGLQHLALNRGMQKQHSLWGARGMDAFKNLSFEGWSEKRRGDLLRLLAELDERVEELDTAVTEAAQSDARARLLMTQPGVGPITALAFAVTIGDVSRFPTSGQVASYLGLIPGEHSSGGKQRLGAITKQGNRFMRQLLVEAVQTTNRLDEGFRRQYQARCHKKPKGVAKVAAARKLTVRLYWMLKTNTSYPQIAHIESSSGVPMVAQAHRAFD

SEQ ID NO: 495514 - protein, 409 aa, unidentified
MDIVRPRCPGIDIGKRSLTACVITTDARGTPAKEIRTFGTLTSELLALADWLDTAGVTAVAMESTGSYWKPIWNLLEDRFELLLANAAHLKAVPGRKTDVRDAEWIADLFRHGLLRASFIPPRPERELRELVRYRTTLVRERASEINRLAKVLEGANIKLGSVSTNIGGVSGRAILAALASGTTDPAVLAELARGRLRRKHDTLVEALAGSVGPHQRFLLATQLHHLADLDALVESLDAEIAGRLRGADELIERLVTVPGIGRRTAETVLVEIGTDMARFGSSRRLASWAGMCPGNYESAGTRHGGRTRRGSPWLRSALVGSARSASRTDTYLGAQYHRLAARRGAKRASVAVGHTILGIIYAVLVTGQPFHDLGPRYFDDRDHERVRRRLTRRLEQLGYAVTLRPDAA

SEQ ID NO: 495515 - protein, 371 aa, unidentified
MNHVTSIGLDVHARSITAVALDSTTGEVRSQRFGYSPAELASWILGFESPKAVYESGVTGFHLVRTLRALGVDCVVGAVSKMHKPAGDKRRKNDRNDAEFLARQLLAHNVVEVFVPDEETEAARGLSRALEDIREDLTRAKHRLTHLLIRWGHVWDERTPEGKRRGTWTKAHWQWIRRVELPEPAANETLDFYISEVRHMEAQKKAIERRIAQHASRPRWAGRVEALRCMKGIETMTAFAITVEAGVFSRFDTARSFAAWLGLVPSEHSSGERVARGGITKAGNSHLRKLLVEASWHYTRATEERKRALNDPGVPFAISSHAAAGIKRLVKRRRHFTRDLRKRPVVANVATARELACWVWALGRMSEGALA

SEQ ID NO: 495516 - protein, 346 aa, unidentified
MTDSGIDLGRRMSQICILKQDGEIIERRVRTERERFAAVFKAHPGARVLIEAGTESEWVARCLEELGHQVIVADPNYAPMYGQRHRRVKTDRRDAQALAEACRLGAYRPAHRTSEAQRHVRWQIAVREALVRTRARSIVLIGSLLRQAGLHLPGGGAETFLNRLKALTLPEPLHQAIGPLLPALEMLNQQVATADGALEELARNDPRVRRLDSAPGIGPVTAATFVATVDRADRFTGPHQLEAYLGLVPREYSSGERQVRGRITKSGNTRLRCLLIEAAWSIVNYPKAETAALRQWTLRIAARRGMPRAVVALARRLAGILFAMMRDETVYESKRLTSRARPARVA

SEQ ID NO: 495517 - protein, 324 aa, unidentified
MIDGILGIDVCKNTLDVSISSYTKVRTKSFTNSPDGWRHLLDWLIAQKIQRVHACLESTGRYSLGIACALYEADHVVSIINPAQIRDFVRTKLGRNKTDGVDASHIREYCELFKPSPWAPPSEAHRRLGELQTIRSGIIAGLTEWKNRKNSGIVDAEAQALADATISHFTSQLGGVDKAIALTIDNDCDLQSKRDLLLSISGVGDTLAGVVLAELPGPDVLRSSAEVVAYAGLNPRQHQSGTSIDRATRISKIGNAVLRAALYMPALSAMRYNSAIVALVTRLKSRGRLKPKQIVVAAMRKLLVLCFGVLKTGRPFDAAIAMGG

SEQ ID NO: 495518 - protein, 340 aa, unidentified
MTQYKRIAIDTSKAVFTLHGIDHQDRVILQRNLRRAQLLPFFKKLPPTEIVLEACGGAHHWGRELTALGHSVRLLPPQYVKPFVKRGKNDRNDAGAICETGARPGIHPVPIKTVEQQAQGMMLKVRETLIGQRTALSNTLRGLAAEFGITTAKGLGRLAELLATIAADPALPVEAKDSFIILGEQLGRLDEQIKMLEKKVAAAHKANPLSTRLATIPGLAAIGSLMVATRVNADDFASGRHFSAWMGIVPKEHSTGGKQRMGGISRAGDERLRQLFVLGATSVIKAVTRPGGSKLASPWLLKLLERKPRKLVAVALANKMARTAWAMMKSGEVYRRPAAA

SEQ ID NO: 495519 - protein, 407 aa, unidentified
MEVLYPRCAGLDVHAGSVTACIRIASGTEVTYTHRTVATTTRGLLDLDEWLTSHRCTHVAMEATGVYWKPVWHVLDGHVTLVLANAMHIRNVPGRKSDMNDATWIADLLAHGLIRSSFVPPAPIQALRDLTRTRKQLVGEIARHTLRIQKTLEDANLKLTQVMSDLLGTSGRAILTALVAGETDPERLADLTRGRLKAPRAALVDALHGRVTEHHRFMIQLHLTQIETLDAAVATIEARIGDALGPFRAAVSLLTTMPGLSDTTARVLIAEIGTDMTRFPTVGHLISWAGLCPRLDESAGKRRSTRTRRSAPWLKTTLTTAAWAATRKTDSYLRAQFLRIKSRRGAKKAILAVASSMLAAAYVMLRDGVEYHDLGPHFLAHRDKEQVTKRLLQRLRDLGVVVEVKAA

SEQ ID NO: 495520 - protein, 365 aa, unidentified
MKKHSSKQQTTRNNPDRETFAFYIGIDLGDKHCDVCILDQAGEFHQQFRLRMKGAELQAYFSTIARSRVAVEAGGQSRWVVEQIQQCGHEVYVSHTRKVAYIHESDDKDDPGDAYKLAELVHFKPRLLHPIQHRSRELQAALSWIRAREACVASRTQLINAVRGMSKAFGERLSRCSAESFTGKLAAQIPEPIRQAVAPLLETIDHLNEKIRYYDQMEAHIAQQRYPQYRLLDQVDGVGVHTALSYMLTIGEPARFEKSRMVGCYLGMRPKKKDSGESRPQLGITKAGDEYLRKTLVNCAHYILGPFGADSDLRRFGQRICERGGKNAKKRAVVAVARKLSVLLHRLWVSGEVYEPLRHSQRKAA

SEQ ID NO: 495521 - protein, 400 aa, unidentified
MNRTRTVAGLDVHKDSIYLCIMGYDQAIIWENTYGVLTPDLRQMHHDMTAHGVTEAAMESTAVYWVPVWTELCESMELRLVNPYFIKQLPGRKSDVKDARWIAECLLKNLIKGSFVPEPIVQDMRKLNRRIMDLCEDTTYNSNKLDAALQRCGFRLSNYVATTKSKSYRSVLKAIIDGQTDPDELLSLVHGRILNKHGRERVKAALTGSFSETDLIVLRQLKETLDLIEKQTADCQQELVRLCKEHYPKPYERLQTIPGVKERAATAIIAETGVDMKMFATAASLVGWCGLKPRNDVSNGRFKSRKVTHGNRYLRQILIEIAWAASRTRNCFFSHFSYLQTTVKKKNKMKIQVAIARKILVAVWHMLSKEEDFIDIYLKRQEELKRTEGQIKLLESYMAD

SEQ ID NO: 495522 - protein, 333 aa, unidentified
MDTETGELQERRLQHREEAEKFYRDLAAQGMKVRVGMEASGHARWFERLLSELQFELWIGDAAEISSRRVRKQKTDRQDAQLILKLMLKDDFPQIWVPSWENRDLRQLLWHRHRMVQARTRMMNQLQAVALNEGLRCKKKLWREAGPEKLESFQLAPWASQRRRDLLELLDQLNPTIAKLTQAIEEEVKRYPAAQRLRTHPGVGPLTALAFVLIIGKADRFQCGKQIASYLGLVPLEKSSGNQRRLGHITKQGNSLLRFLLVEAAQVTVRSLPEWRSKYCHLTMRRGRKIAKVAMARKLAVRLYWMLRKEWDYEQLTKFGSHAGQPGNRHGVK

SEQ ID NO: 495523 - protein, 418 aa, unidentified
MKKHNNSGKKSEPTSKQAKPRGPIRRDTKDVLAELVGKLKEKLDPKKVAATSAGEKHKRGELRPNLDRLTVGVDLGDQWSNYCILDLEGETLTEGQLRTTQEDLAEFFQALNAARVVFEVGTHSPWVQEVIGGCGHEVLVANPRMMDGSKRRKRKNDRIDANKLARLGRVDPQSLHPIRHRSRGVRQDLAVLRARDALVAARTELINATRGLVKSMGTRLPKCSSPSFAEKVEGTIPAELRDALLPLARMAAALSDCIQEYDEKIEELGREKYGHTALLRQVKGVGPITSLAYVLTLENPDRFVKSRDVGPYLGLVPKQEDSGEIQPQLGISKTGDTMVRKLLVGSAHYILGPFGPDTDLRRYGLRLCERGGKNAKKRAAVAVARKLAVLLHCLWASGEVYEPLRQGTSATMAPAVAA

SEQ ID NO: 495524 - protein, 358 aa, unidentified
MSKLNQLDFTGTTIYCGLDVHLKNWRIHIRDEEMELRDFSQNPDPILLSYFLKKNYPGATYKVGYEAGFCGFHIQRKLTSLGIECVVLNAADIPKGNKDKRQKNDKRDARIISEEIKKKQVGIYIPSVDWEYGRSLVRTREQQIADSTRMKARIWQFLYFHNLAAPQKQEVGQHWSRRFIEQLQAHDCHNNAQLKAALHIMLTDYLQKRKLLLEVIKAMRQLYRQEPYKKNMELILSIPGIGEINAAVILFELQDIHRFKTFDQLCSYVGFIPDTDDSGETKRDKGITHRFNRRLRKALIESSCVVIRRDPALLMKYKHYCKRMHKNKAIVRVAKHLLARIRFVLKEQKKYVEGVLAG

SEQ ID NO: 495525 - protein, 365 aa, unidentified
MEQITRGQIVRVGVDLAKHVIQVHAVDGAGRVVVAKALTRDRFMAWCAQLPPGCMVAMEACGGAHHWARKLTTMGLQPRLIAGHFVGPYRMQGKRGKNDANDAAAVCEAASRPSMRFVPVKTAMQQGQLAVHRLREGYKQERTACINRIRGLLTEFGVAIAQSPEALRRALPEVLEDASNELPSLARMALQRAQLQWIELDCHIAWCDERIQAHVRSDEQAKAATQLCGIGPITASALVATVGDFKQFKTGAQFGSWLGLVPSQNSSGGRPSLGGITKRGDDYLRTLLIQGAKSAVMTAHKRRDRISQWLVQLVARVGWQKAAVALANKNARILWSVLAKGRRFDANHVCVKSEGPAMVVPTMAG

SEQ ID NO: 495526 - protein, 347 aa, unidentified
MRFYTKQHTFYCGIDLHARTMYLCILNQDGEIVLHRNMKAAPEPFLKAIAPYREDLVVCVECIFTWYWLADLCTQEGIPFVLGHALYMKAIHGGKAKNDKIDAHKIALLLRGGMLPQAYAYPAEMRATRDLLRRRMHLTRKRAELLAHIQNTNHQYNLPAISKKLAYKANRAGVAERFPEPAVQQSIEVDLTLIETYDHLLTALELSLVQTTTAHDAQTFYRLRSIPGVGKILALVLLYEIHDIHRFPRVQEFVSYCRLVKCAKESAGKRYGTSGTKIGNAYLKWAFSEAAVLFLRNNPAGQKYLARLAKKHGKGKALTVLAHTLARAVYYMLKRDTAFDLDKFFHE

SEQ ID NO: 495527 - protein, 341 aa, unidentified
MAVAGGFDLHRGQLTFDYVDTGTGESCRGRICPADRESLRGWLRRFDGVPDVEFAVEGCTGWRYVIEELQRAGITPHLAEPAETAGLRGSKRRAKTDWADARHLRDLLLDGRIPESWIPPAHVLEARALVRLYKDLLEERTSWQQRVHATLFHQGIPVVPKLGTADGQQRLDAAELSAAGRQAVQAGLRQIDRLNQEMAPLRRELARLSSRQPGCRALRKAHYGIGALLSVAAWAELGDCRRFSSSDDAVRHTGLDVTVYDSDGRRARGHIARQGPPVLRWALYEAARYASRPASPDYAYFCSVRDRIDGQRALLPVARKLARRCSHTLRDLGEDALLPAA

SEQ ID NO: 495528 - protein, 396 aa, unidentified
MNKLNSNVACAGMDVHYKFSNVTFRDTNGDVVSRQRLDHPDRRKLRQRLAQWPPGLPVIMEASFGWGWLSDLMDEYGMKVALSNCFKVEQMRRARGGVKTNKKDADLLSLLGFEQTDWWKVWRAPSEVRNRREQMRFRADLVAMQTAVKSRIHAIFHRHGIFHDFSDLFGAKGRVFLNELCMKNTAHLSVEALAALRGQVKLLDHLRRQLADVTRVLHRQMARTPLTVRLKTVPGIGLVLAHVLAAEIGHIERFRTHKSLAAYSLLAPRSSDTGEADPRHSPQGRHLGVQGNRTLKWAWIEAAHGAVRSRGRWRDLFERVTDGGRKDRGRGYIKVARELVKVTYAVWSKGADYRDVRPTRGGSDTSTSKCKCKTRRKPSRSETGQLYHPMVHALTA

SEQ ID NO: 495529 - protein, 372 aa, unidentified
MNYNTVYVGMDVHKESFTLCSCKYEDEKASHYQRTPASYKNVLRYLAFLRTIYGEDTRFVCGYEAGCLGYSLYHQLENFNVECVILAPTTMLEQRSKRRIKTDKRDAEIIAKSLAQHNYSPVHIPTETDNQTKEFIRMRDDHKAELKKIKQQILAFCLRQGYQYDGSGNWTAKHVKWLRSLEPAGLYKEILDEYLLTYTILTDKLNRLDQRIEELASKEEYKESVSKLTCFLGIKIHTALSVIVEVGDFQRFVSARKFAGYLGLVPGQHSSGDDRNGLGITKAGNTHVRRLLVESAQSYTRGKIGYKSRVLRSRQAGNSPQVINYADRANERLRRRYYKMVLKDGKKYNIAKTAIARELACFIWGMMTDNIY

SEQ ID NO: 495530 - protein, 430 aa, unidentified
MKKKNHSNEKIEAITFKTLIDGVDIAKHNQWARFVDCRGIEHNKALKFENNRNGFNTILTRIYEICKNEDFNKIIVGMEPTGHYWKAFANFLLKQAKIMVVLVNPYHTKKAKELDDNSQTKSDKKDALAIAGLVKDGRYFETYLPHDVYAELRGLTTTRHGMNKRKKSIVNTITAVLDEYFPEFISVFKYPFKGKASMHLLKVCPIPKFILELVEEGVLEEIKKAVKKTVGRKKAAQLAATAQDSIGVDYGEYAARFKIQQLMEELELIISQLAALEAEMEETLKKTEISEYLLSIDGMGVVSLAACLGELGNPLRFEDVRQMSRFAGYNLIEDSSGKNKSGTYISKRGRKNLRSVLYQISLTMAATNQEMRKLYDYLKTRENNPLKKMQALVVVSKKVLTLIFTLSKKKVYYEAERVFGSYRKSQLQAA

SEQ ID NO: 495531 - protein, 389 aa, unidentified
MIYVGIDVAKDKHDCCILDSEADKLYPVFSISNNKAGFDELYEKIFTVTDDKTKIKVGLEATGHYSLNLLGLLIDKGLPTCVINPLHTNLYRKGLSLRKTKTDKVDARSIAMMLMTNKTLKPYSDTSYHSEELKSLTRYRFDKVQERAKLKSSVARLVNILFPELEKLVPSLHMASMYALLSKLPGASYITECHLTHLKNLLETASKGHYGRDMAITLRNTARDSIGSVIPAKSMELKHTIHLIEVMTEEIDEIEDSIKSIMDTCNSPIMTIPGISYRMGAMILAEIGDFTRFNYADQILAFAGLSPSTYQSGQLDSSYSHMEKRGSRYLRYALFNAAKFVCKWDENFGAYLSKKIGEGKHYNVAIGHTTKKLVRTIYQMELTGEVYRR

SEQ ID NO: 495532 - protein, 343 aa, unidentified
MELYVGMDVSLKETSICVVDGKGEIVSEGTVISAPAAIAVFVKAKADGARRIGLETGPTTTWLWHELRALGLPVICIDARHAKAALSLQINKSDRNDAVGLARMMQAGWYKEVQVKSLPCHEIRAVLNSRAQLVKIKRDLENQIRGLLKNLGLVIGKAGGNVFRRRVEDLVGEHRLLQEAVRPLLGVREIVRREIAGLTRGLLAMARDNEESRRLMTVPGIGPINALAFCAAIDEPSRFRRSRSVGAYFGLTPRRHASGEVDWTGRISKCGDAMVRTYLFEAAGVLLTRVPQWCKLKAWGHRLWKRIGFKKAKVAVARKLAVILHRMWRDGTDFIWSAKEAAA

SEQ ID NO: 495533 - protein, 373 aa, unidentified
MIVIGADTHKDSHTLAAVDAGIGQVLAEVIVRARRRSFEDLLVWARGLDDGQRVWAIEDCRHVCGALERFLLARGECVMRVPPKLMAGARKSARERGKSDTIDAVAIARAAIKEGLDTLPVAQLAGPERDVRLLVDHRERLVAQRTALINDLRWGLHDLWPELEIPSRALIHANWQERVAGRLARAGQIAQVRIARDELRRIRELTRAVDALERELAGLVAALAPQLLAERGCGVLTAAKLIGEIAGVGRFATDAKLARTAASAPIPASSGRTHRHRLDRGGNRQLNCALHRLAVSKGRLDPETAAYLARKQAEGKTRREALRCLKRHLARRIWKLLQPPASTAAPADTTRATPPARVRTIHCNLSRSNLSLT

SEQ ID NO: 495534 - protein, 387 aa, unidentified
MTARTVSNLPAAMHFDTARCLFAIELSKQNWVIGFVTPLSAKISRRILSGGHWKGLLDLIEEVRARVSRETGRTVDVISCYEAGYDGFWLHRLLEAHGIRNHVIDPASLQTDRRARQVKTDRIDTERLLRSLMAYLRGEPKVWSVVRVPSVAEEDARRLHRERDRLVSERVQHVNRIKGLCALHGIYDYQPLRPQAMARLEQLRTAQGISLPPRLKSEIKRELQRLELVVEMIATLEAERDAIVEDEASTHVNAKKIQNLHQLKAIGPEFAAVLVGEIFHRDFNNRRQLASYVGYAPSPFQSGNVAHDQGISKAGNRKGRTTGIELAWLWLRYQPDSDLSVWFRTRVGTTKGRIRRIAIVALARKLLVALWRYLETGLVPRGAILKG

SEQ ID NO: 495535 - protein, 337 aa, unidentified
MTKVTLIGIDTAKQVFHLVGIDAKGHYVWRRTLRRTQLLSTLAKREACEVVLEACAASHHWARRIGELGHRVRLIAPQHVRPFRRGQKNDYRDAEAIISATLSPGMHFVGVKRVEQQSEQALHRVRSRLMSHRNAAANGLRGLLGEYGQAYAKGIKSLREGARCFAGTELARELGLVELIEDVLEEIDILEQRMDYYERQIMQRVKTDAISARLRKELNGVGPLSASALRVKVADVREFGNGRNFAAYIGMAPAHRGTGGKVKIGKLKKGHDRYLRQLLIHGARSVVTHLGDKQDAQSRWLREIVARRGINIASVALAHKNARQAWAILAQQQALVN

SEQ ID NO: 495536 - protein, 367 aa, unidentified
MQNTIVHNEGAASLEVAGTKVKLSRSIIKIGLDVHARIFVAVAQYDHLLPKSARRLAPSQFVPWVEQLLAAGHAVHVVYEACGFGFGLFRQLQAAGARCYVIAPRKLDEQFTRVKTDPRDATTLCQRLSRYVEGNTRELAVIRVPSEAEEQARHVSRQREQLVRHRQKLEAQGRSLLINHSLPSPAHWWKNQTWSRLSKLLPAWICLRLQVHRPALLTLEQQISALSAELEAAAPADVPAGVGKLTTVVMTREICSWERFRNRRAISSYTGLCPSEHSSGTKRVPGSVTKHGNPRLRAALVECAWRMVRFQPQYPPVKKRLSVLAKGARATGGQRKKAIVAVARHLAVDLWRVHTGRNTAAQLGLTI

SEQ ID NO: 495537 - protein, 339 aa, unidentified
MKVINQNVGIDISKETLAVCIVIMYEDFSVKVKGSKAFMNSKIGFKQMLTWVLSKRIPEIRLSFTMEPTGVYYENLAYFLYAKKEIIHVVLPIRAKRYAESLPGNSKTDKLDAKSLGRMGVERKLDVWQIDTPIYRNIKQLTRERDALIKERTNVKNRLHALDHSVSPYKKSLTRLKSLIKYLDKQIKVIEKDIYTLVTSDEWLRKKVEYIISIPGVGFLTAIIVIAETNGFALIKNIKQLVSYAGLDVKIRESGAWKGKSKISKKGNVHIRKALYFPAYTNMKHSNNYMGLYSRIFAKKQKSLIAATATQKKLLGLIYTLWKNETVYVENYQQQKKVA

SEQ ID NO: 495538 - protein, 408 aa, unidentified
MNDDFTLFVGVDWATEEHEVCAQDPGGGKAGARSFKHSGDGLADLCAWLLEKADPASIAIAIEVPHGAVVETLIERGFAVYSINPKQLDRFRDRFTMAGAKDDRLDALVLAASLRTDTHLFRRVSQLPAETIELREWSRIHDELQSERGGIVNQMRAQLARYFPAFSDVAPDPGEDWAIALFAAISDPAAAKKARPVRIAKLLKDHRIRRYSAEDILTKLRATPVHSAPGTATAAIAHLNLLGERARLLNRQLKDCRKHLEAVIDQMADDSGNESEQHDATIIQTMPGIGVIVAATLLAEAAGPLQSRDYPALRALTGVAPVTKRSGKKCTVIRRTACHPRLRNAAYHWARVATVHDPIAKRRYAALRARGKPHGQALRSVADRLLAVLCAMLKSRQPYRTQEITTAA

SEQ ID NO: 495539 - protein, 406 aa, unidentified
MDKPSVEIAVLKTDRGGKRLYFVGIDISKFKHDCAIVDELGDVITPSWSFQNDYEGFSLLRELLGALDGEKKIGLESTGHYGQNLKLFLENNGFSFMEFNPLLINRFVRSKSLRKTKTDSIDALMIAQYMMTVEYKPYPPSFYTLKKLKSLTRFRDSLIRQRSRQMVELTNILDKVFPEFKPFFKGRFSATALYILSHYASPEKISNMNSKSYEPLQRLSRGRFSMVDFVELKTLARNTVGSAHDYLLQEMEITIDIYDQLQSKVEEIELQINDCVLGLAPPMLTIPGIGVASAAVILAEFGDLSKFSSPSKLLSFAGLEPGYFQSGISESTGKMVKHGSSHLRYAIMNCAQTVINNEPTFAAYYAKKCAEGKEHRVALTHVAKKLLRVIYTLQTKDLSYNPDLVR

SEQ ID NO: 495540 - protein, 388 aa, unidentified
MNVVTDKSEPLTAIHTQLGAIFVSLELSRSSWLITSLSPGGGEKMSKHSVRGSDFAGLMQRFAQLQEKAKLRTGRSFRIIVVHEAGLDGFWLHRALQNEGIESHVVDAASIATSRRRRRAKTDKIDGETLVRTLLAYKRGEPRVCAMVKAPTPGEEDRRHLCRERKALTAERVRHVNRIKGFLFSQGISGYQPLRRDRRQRLEELQTGDGRALPQHLKALVSRELDRLELLLKQIKTVEAARDELLAEEQTAKLAPAPMLLDIRGIGPEFAAILWSEGLFRPFENRRQIAAYAGLAPTPWQSGTVDREQGVSKAGNPRLRTTSIQLAWLWLRNQPRSALSVWFHERVSRNGGRLRKTTIVALARKLLVALWKYVTAGVVIEGVTMKVA

SEQ ID NO: 495541 - protein, 385 aa, unidentified
MAPPRRPEIVIGLDVGKSSHWACVATRDGEVLASRPVANRENALDSLFAEFPGALVVVDQVRNIGALALSRARAAGMPSAYLPGLAAHEAARLFGGDAKTDERDAMVIAKTALGIPDALLPVPHPDPAIAAARALAAQRDFLTRESTRSKNRLRSILLESCPEFESLVDLSDVSELRLMAALGGPWSVADAGRRRAAALARGARRGKVDALVGSVGSSARPDAAAIAAEDRAVRFLARRIAENAAELQAATAEISALLERDETYRCLLTVPGIGPKTASELAISVNIDDFPNHDRLASYCGLAPRNRQSGTSVSSVSASRQGNKRLKNLLIFSCNCLARTDGRWGEYYARCRDRGMPHGKALKAVARKRLKVIYAVMRDKVPYVA

SEQ ID NO: 495542 - protein, 395 aa, unidentified
MFIVGIDIAKRSHEAIIIAEDGQVVRKAFSFRNNCTGYNLLLEQVRRLTLVKSQIVFAMESTAHYWLALYARLLKDGYAVMVLNPIQSHSLRELYIRKAKTDARDSLIIADLVRFGRCKASNVPQDKILALRELCRSRAYLVDMAADLKRKLIALLDRIFPEYESLFDSVFSKASIAVLSKYSTPQKVKNANLRKLTDILMESSNGHFGEWKAHQLKEAACSSFGIDDSGGVYSTLLGMFLEQILSLTAQADSLEKQISIFFQEFNNPLTSIPGVGTVLAATILSEIGDITRFSSADKLLAYAGLDPSVKQSGEFKSNQNRMSKRGSPYLRRAIWLASTVAVHRDPMFQTYYEKKISEGLHYMNVIGHVSRKMTAVIFAVLRDGQPYQPILQSAG

SEQ ID NO: 495543 - protein, 410 aa, unidentified
MSYTIAGIDVHKKLLMVVVLDVECLEQPPDRGRFGTTASELQRLIVWLQEREVQEAVMESTAQYWKPIWYALEGQVQLHLAQAFSNRAPRGRKRDFRDAERLVRRLVAQELFLSFVPAPEQRGWRTMTRMKTQLARDRVRLHSQLEGLLEEMRIKLSSVITDLFGVSGLRILSAVAAGQTDPQQLAELGDDRLKCTREQLIDALTGKAEAMHQQLLALYRERLPVIDQQMEKLNRMIAQAMQPHEDAVVRLAEATGFGVDAAQQVIAEVGPQASTFHSAAQLSSWAGTCPGKQESAEQNSSSRSAKGNKYLRRVLTEVAQAAVKTKGSHYQIVFRRLLPRLGYKQALWAVVHRLCRMVWKILHDGLRFVEQSTQRDPKAATQRAKTLTRALRRLGYKVHITPMTPAPAEG

SEQ ID NO: 495544 - protein, 353 aa, unidentified
MKYVGLDWAYRKAQWCALAPGGEIAGEGRIAADRDGLARLVLELGDEVEACLEMMSGALWVRDELVACGWQVEVADARKVKTVAPLAAKTDKVDARLLAELCRRQLVPALWLPSLDERALRERLRRRMHLVRLRTSAKGRIFGLQTQWGVRVSLARLRKPDGLTLLERAGVPEVWRRSISECVSVIDFLDARLEPLERELKPFAHADPRAALLDTIPGVAELLALTIAVEIGDISRFASPEKLVSYGRLAPRVHQSGQARARSGPLSKSGSRLLGWAAVEAAQQAWRESNPWHDLYLDVAHRSRHSNSAKAAVARKILIAAWHMLSRNQPFKPAPRCTSGTSVPASSRRALAA

SEQ ID NO: 495545 - protein, 414 aa, unidentified
MEQKLIYLGIDWADDHHDIVITDDSAKTLNQFQIDHTPDGFALLHANIANYQKSPADVLIAIETNRGLLVHELIRTGYTVYAINPKAVNRYKDRHVLSKAKSDILDAQALAHLLRTDRHLFQPIKPLPEDYRLLDRLCSDLRKVVDEKSRVTNQVISCLKEFYPKALETFSLNSQIFIDFLKTFPDHGTLNACTKKTFLAFLKKRRYPYPSRAEELWKVIQSPALQPDRVIARSGKLRLGMLLGQLENLKEHITHYEQEIQAILDSLPESNPIKSLPGVGERLAPELVATLGPNSKDGHHRFHAAVEIAKLSGCVPVVRESGKWRTVSLRYACVKPLRRTFHDWAFASINHSSWARAFYDYHKARNQSHCTILRNLGKKWIKILFAVWLKGTTYNETLHIQNLKARNVPWAMAL

SEQ ID NO: 495546 - protein, 344 aa, unidentified
MTIATIGLDLAKNVFQVHAIDGEGNVLLRKTLRRAQVLPFFEKTPSCLVGIEACGTSHHWGRELTRLGHEVRLMPPAYVKPYVKRGKTDAADAEAICEAVSRPTMRFVPIKSKEQQALLSMHRARDLFVKQRTQLINMMRGMLAEFGITISEGIGRALIKARQIVEGEALDTPAEASQMAAVLGEQALNIHLRLREIDRALAACQRENAAALRVATVPGVGPITATAIVASVPTPELFASGRQFAAWLGLTPLQKSSGGKERLGRISKMGDKYIRRLLITGATSMVRRAKERPETVDPRLVDLLARKPTRVATVAMANKMARMIWAIMLRGETYRPHHTPALEG

SEQ ID NO: 495547 - protein, 320 aa, unidentified
MSTTIAQTVGVDICKHTLDVYLHPQTTARQFPNTAAGIRAFLTWLKSVAIHRVVFEPTGAYHRPLERQLGEAAIPVVKVNPLQARRFAEAIGQRAKTDAVDAAMLARFGALDALQTRPVVNQTLSDMKELLVARRGLVKDRVAATNRNHVQCAPLLKRLAAQRLRQIERQIAAIDAALRALCRANPELAARLDILVSIPGIGEATAMTMLIEMPELGTIENKAAASLAGLAPVARDSGQHKGKRFIRGGRAELRQALYMPALVAIRFNADMRAKYQALIAAGKPPKVAIIAIMRKLAILANALLSSGRAWQPRLAATQFG

SEQ ID NO: 495548 - protein, 381 aa, unidentified
MPDVSSVAPIEVSTWVAIDQHKLSLVAAMLPASGGQPEVVRLENTERAIRRFIERLGGGDGLAVSYEAGPGGYELHRLLSSIGVACDVIAPSLVPVRAGDRVKTDRRDAKKLVRLYRAGELSFVAPPSPAQEGLRDLVRARDDLRCARTAARHRVVKALLRHGHIYRDGKAWTIRHRAWVASQRLEDELAQSALEHMSAHLAALDAQIAAVDQQLEQVATAEPWADPVNWLCCFRGISTRTALGLLAEIGDFRRFRHPRELMSYLGLTPSEYSSGEQQHRGHITKSGNRHARRLLVEAAWHYRHHPRTCARAASLAGHVPPEVSAHAWQAQVRLHHRHRVLGEHGKRSTVANVAVARELTGFIWASMTRTPLRQELESTAA

SEQ ID NO: 495549 - protein, 433 aa, unidentified
MHVAAVGADRASDPVRSFGTFTADLHRLADWFAECGVKTVVMESTSVYWIPIFELLDERGFEVLLVNARDSKHVPGRKTDVSDAQWLQRLHSYGLLRASFRPKGEIVELRAYLRQRERLLDTAASHIQHMQKAMTEMNLQLHHVVSDITGATGMRIIRAIIAGERDPAVLASMRDTRCHSSVEVIEKALTGHYRGEHLFVLEQALALYDVYQQKVAACDIRIESVLKELSSIRGRKEDARADGSGSSRRRSRQSNGPDFDVGEALHSLLGKDLTRIHGIGPYLALKLVSECGDDLSAWPSAKHFTSWLCLAPSNKISGGKVLSSRTRRSGSRAASLLRLAAVTIGRTETALGAFYRRLSARTGKAKAVTATARKIAVLFYNALRHGMDYVDPGASYYETRYRERVVKNLHRRAKAFGFVLQAADISAAEQAVS

SEQ ID NO: 495550 - protein, 370 aa, unidentified
MKMNSKNNKEKARQKALQAKSRKMKLTVGIDLGDEWSHCCFLGEDGEIVEECRVKTTREAVKSRFGELKLAVIALEVGTHSRWVSQMLSEFGHEVIVANARELRAITGSDRKSDRVDAEKLARYARVDRRILRPIKHRGEEAQVDLVVLRARAVLVKTRTQMVNSVRGMVKSFGYRMPKCSTERFVKLNNEVPEKLREHLAGLMEVLEHVQKQIEEYDQRVEKLAKEKYPETTVLRQIWGVGEITSVSYVLTIEDKGRFEKSRDVGPYLGLRPRRSQSSESDPELRITKAGDCFLRSLLVECAQRILSKKGPDTALKQFGLRIEARGKKKAKKRAIVAVARKLAVLLHKLWVTGEVYEPLRNSQQLSQSA

SEQ ID NO: 495551 - protein, 335 aa, unidentified
MEFEFFIGIDVSKNELDFAVRKGRQLLFHVEIANEPAAINAFLKELSRQDGFDLSKAVFCMEHTGIYNNHLLVCLNKKKANICLEAATHIKKSLGNIRGKNDKIDSIRIAEYAYDKREKLRMWAPKREIVQQLSHLAATRSRLIKVKKILKTPLKEAGPFVKKRIATQNLKVCNGTLNAIDADLKKVEKEIDKIINSDKELKRIFSLATSVCSIGAVIATQVLISTNEFIDITDAKQFACMGGMAPFTEESGIFKGKGRVSHMANKKIKTLFHMAALVAIQHDPELKLFYERKVNQDKKNKMSVLNAVRNKLILRIFACVNQNRKYEKNYARLVA

SEQ ID NO: 495552 - protein, 376 aa, unidentified
MRILALDLGKYKSVACDYETESGRHSFAAIPTNPQALHDLIVDREPDRVVIEICSIAGWVCDLARILEIEMQVANTNDERWHWRKVKTKNDRRDALKLAQLSARNELDLVHVPQSEVRQWRALIAYRHQLVQRRTKIKNHIRDLLLREGQLLPRYRSAWTAAAMTALEALAKPLSEVSLDELWRGELAVELAQFKAVQTQLTEVVAKLDALGAANHNVRLLRTISGVGPRLSEAVVAMFDDPHRFRRASQVSSYIGMVPKQFDSGETERLGHITRHGNRLVRALLVEVSWCALRHNPWARETYQRISGGKKSRKKIAVVAVGRRLLVRCWAMLRDQTEWRGVASEPPAAATGSSKQPKEIVIAEVRTRGKRLPSAA

SEQ ID NO: 495553 - protein, 354 aa, unidentified
MTSTQYIGMDVHKESISIAVRNAAGKIVMECVIETKASTILQFFGGLRGDVHVTFEEGTWAAWLYDLLKPQVTRLVVCDPRRNALLQEGNQNDRVDAQKLAELLHNNQLRSVYHGDHGLRTLKELVRSYLAITQDLSRVMTRVKAIYRSWAIPCTGKQVYGPSHRAEWLGKISEPGVRRRAEFYYQQLDALRSLRQEVRRDLLAESKKHQAWKLLCQIPSIGPIRAAVLLGILQTPHRFRTKRQLWTYGGIGIQTSSSADHHVVKGQLERKKQVEVRGLNRNHNHDLKNLFKGAAIVAATKPGPFAEFYAELLAKGMRPEMARLTLARKIATIVLIVWKKGVSFDAQYLKPQTA

SEQ ID NO: 495554 - protein, 363 aa, unidentified
MEGMFYVGVDLHKTQFTICILTSGTVLEEGTQFKMGKEGYQAFISLMRTLSSYQTFDDVVLAIESTANSRFFRDMMTGYGFKVVVVNTLRFKVVNLSTKKTDKNDARTLAEFLSKDILPVSHLCSAESEGLRRILKSRNLMVQDMVALKNQAHAVLLAYGHITKTAQFQSRRERKKILDKLPADIARTVGTIFETIDVVENQKKVLEGKLRQITSKDSAVNLLMTIPGIGIVNACTIRAYIDDIDRFESYKHFSAYCGLVPWVQTSNESTYYGRITKRGPQELRTALVQCVVAMVRMEDKTSNYKMIRQYLELKNDKSSGKAIIATARKLSRIIYIMLKTNTPFDSRKLTDNTVKKTGRPEAT

SEQ ID NO: 495555 - protein, 337 aa, unidentified
MDMHVGLDVSQRTTSVCILDALGKRAWQGTAPTEPAAIVQTIREHGAGEARVGMETGPLAVWLYHAIRQQGVNIDCIHARHVHAALTVQINKTDRNDAFGIAQLVRSGWYRATHVRSLECHQVRLMLTVREKLISLRTATNNQIRGLLKTFGVVLGAGKNRVFETSVQDTDPLRDGIKPVIGILLDTWRHLTTKIRELDRSIQRQVNQDPVCRLLMTVPGVGVITAASFRTAVDDPSRFKHVSDIGPFLGLTPRKYQSGEVDRNGTISKQGNRQTRSMLYEAALALLKRYGKETSLGKWGAKLEHRMGLRKAVVALARKLATVLLSMWRSGEQFRCA

SEQ ID NO: 495556 - protein, 316 aa, unidentified
MTKPREISVNVGIDVGKHQLDVCIHERDIQFQVTNDAKGIRTLIGRLGRYNLARVVVEATGRRETELVIAAAEHGFPVIICQPIRVRRYAGAKGILAKTDEIDAKILADYAAVMKPAVRPVALGNIRKIRDLCVRRRQLIDMRTMEKNRIDVMPKSFHADMRQHIRLIDKQIDKLERLIDQIIDDIDEWRALRNRLLTVPGVGHQLTNTLIADLPELGSLNHKQIAALVGLAPFNRDSGSMRGKRRIRGGRATVRTVLFMAAMTAVRYNPKLREMYQRLLAAGKIKKVALIACMRKMIVILNAMVKNNRDWNESCA

SEQ ID NO: 495557 - protein, 355 aa, unidentified
MERKNNKTNNTKATLSQKQETIIEFEQVIDRGAGLDVHKQTVVGTIQGKGLETTTRTFSSYRASLRELKAWLKENGITHVAMESTGVYWKPVVNILGEDFKILLVNARHVKNVPGHKTDKKDSQWLAKLLLSGLLKGSFISSQTIRALRELTRYRTKLIQQINGEKNRLLKILEDTNIKLSCVLTDPFGVSGSRIIEAIIEGKACSPSVLLGLVNNRVKAKKEELVQALEGHIRDHHRFMLKTIMFNIKKLEQTLEVLDQEIEAQTKPYEQEKELLKTIPGVGQQVAVVMLSEIGIDMEQFPSHKQLASWAGISPGNNQSAGKTQSSRINKGNRWLKSKLVEAGWGAARSKGTYM

SEQ ID NO: 495558 - protein, 343 aa, unidentified
MESIHYVGLDVHKKTIAYCIKTVSGKTVRQGVVGAERKALRQWLTELPGPWMGALEATIFTGWIYDFLKPHAVELKVAHPEMLKAITAAKKKNDRADAEKLADLLRVNLLPECTMMSTELRELRRILRYRNLVVRTATQMKNKMSGLLMEVGATYDKRRLHGRKYFGELLERVEDVPASVKELLRLSRGNLELFTAVQKKLTKTLREQPLIRERVERLMSIAGVGEIMALTWVLEIGDPTRFSNSRDAISYCGLCSAQRESAGKEQRGPISKKRNKHLQTMLIEAAKLAPHWNPQLAALHEKELARGNRNRATLAVARKLVEYLLAVDRRGTPFEAEAPPQVA

SEQ ID NO: 495559 - protein, 357 aa, unidentified
MEYGAIDLHKKESQIRIVTESGEIIDQRILTTRDRFTHVFWGRPRMRILIEASTESEWVAQHLEELGHEVVIADPNYSAMYGHRSRRIKTDRRDVAALTEACHQGTYRLTHRRSARQHEVQCRLNVRKEITQARTRAISVARAITRSAGLRIPSGKAETFATRLFGLELSPAMKATLSPSRNIIDVCDDELAAADEKFEAMVAGDPMVKRLTTLPGIGPITATAFVAALDTVSRFERVGQVTSYLGLVPHEYSSGEKQRRGRIVRSAHPHLQSLLVQAAWRLSRSKDPRTESFRTWAQAVARRRGKKVAMVALARRLARTLFAMWRDEADYQPRRIGTRSAQPVADATAKTGAGAPM

SEQ ID NO: 495560 - protein, 500 aa, unidentified
MKTDEPLERACPRVSVVLGHVDDIGEIARATIPFERVSTTTYPNRRGIPNVMMEEGMARRKRAVLELAHPNAAGIDIGSASHFVAVPADRDDESVREFKSFTDDLNALADWLRRCDVDTVAMESTGVYWIPLFELLESRGFTVYLVNARHVKNVSGRKSDVLDCQWLQQLMSYGLLSGAFRPKDEICALRAVSRQRDMLLSYQARHVQHMQKALAQMNVQLANVISDIVGDTGQKIVRAIIAGARDGRVLAKMKNVRIRASEADIEKSLRGNWRPEHLFALGQAMTLFDAYGEQLAACDRQLEAMLASLQQGDVGEPGKAKRRSRARNAPKFDVRAYLFGMCGVDLTRINGIDTTTALKVISEVGPDMSRFKSAKHFASWLGLCPGTKISGGQVLSGASKRTANRAAQALRLAAAALRSSQSSLGAYFRRLSARLDRAKAITATAHKLARLIYTMLTKGTEYTDQGQDYYEERYRQRVMHHLAKRAEKLGLQLTPIPQAA

SEQ ID NO: 495561 - protein, 347 aa, unidentified
MEEMKLFAGLDMHTESITGTIKDEAGNPVRVLKVETSQEGVKQLFNRLQKKHITAVFEASRNWPRYAQLINPYCAKIVMAHPLKVRAIASARIKTDAIDSNVLADLLRTNLIPESYMPSLEIVELRELLRYRAGLSRMRGELKTKAKNILSREGKKCEFDEVTGKRARLWLNNLVINDLNRKELDYTVALIDNLTAEINKFDVVIEREQYKYPESDILKSVVGISTFSALMILAEMADIGRFPSPDKLASYAGLVPSTYQSSQTQYSGRITKRGNAHLRWILTQCAHASIKSRYSHKLKTFYLRIERKKGKQKAVIATARKMLTTIWHLLNKNEYYAYRDIPSKNGL

SEQ ID NO: 495562 - protein, 374 aa, unidentified
MREFSKYVGLDTHKETVAVSVGDAIGGKARYYGEIANTPEAIRKLVKKLCPDGEVISFCYEAGPCGYEIYRQISQLGHHCSVVAPSLIPTKPGERVKTDRRDSEKLSRLDRAGELTAVWVPDQEQEAMRDLTRAREDMKGLERITKQRLNAFLLRYGRIYESGKSRWTQAHFRWVEGLKFDVTVQQIVFHEYVDAVKQAEARVAGLEKEMEKALEHWVLAPAVEALMALRGIKLITAMTVMAELGDITRFDSPRQLMSFLGLVPSEASSGQTRRQGGITKTGNSHVRRVLVESGWCYRFPARKTAHLQRRAEKCSAEVQAIAWKAQKRLCGRYTHLIGRGKLKVQVCTAVARELVGFIWAIACEVMNKPVESTC

SEQ ID NO: 495563 - protein, 340 aa, unidentified
MNIKRIGLDLAKNIFQIHAVDHHEHVVLRKTLRRDRMIAFFTQLTPCLIGIEACGSSHYWARELTRLGHTVRIIPPQRVKPYLKGQKNDANDADAICEAISRPGMRFVAVKTERQQTLQAEHRVRARLIRARTALSNEIRGLLAEFGLILPTGIRQLRKTLPEILSQQEQWDDRFMRLLCELSEELKILDERVARHDGRLQQAARDDIRIKRLLAIEGMGPVVASALVAAVGDGRQFKNGREMAAYLGLVPRQHSSGGKERLGHISKRGDSYLRTLLIHGARAVLNACKNKTDRRSRWLQALSERRNRNIATVALANKNARIAWAILSREEDYHGLQAAG

SEQ ID NO: 495564 - protein, 390 aa, unidentified
MRRLEKVSHIGLDCHKNFSTVAARDKDNRIVFGQRLEHADRQQLRLELRRWPAGTPVILEGTFGWGWMADELREAGHDPHLASSGKVAAWRTARGLAKSNKIDAKLLSELWPEKPRWWEVWLAPQEVRDQREWLRYRMSLVGIQTMTKNRIHATLHRHGILGDVADLFGKKGMEFLRALIAAEEPLRESSRQTLAGYLRLLEQVRRQIAAVTRQLRQWVKRDAQAQLWDSLPGIGWVLAYTIQAEVGDIARFKDGRHLASYSLLAPLANDSGDEDDDTPIGRHVGHAGRRTLKWAFIEAAHGAVKKSPFFRAIFDARTNGGKRDKNRGYIAVARQLCLIGFSCVSKRRRYSEQRPVRPGEQQSNHIENIKCSKPHPGLGQPEDPMVAAVP

SEQ ID NO: 495565 - protein, 364 aa, unidentified
MVKKATRIARFIAALENRPVFVGLDVHKKTYSVAIFEPQDGLVETWTCPAGEDALAAQLAGLGCPIEHVVYESGPTGFALARALERAGFAVSVIAASRIPRGYAASAKTDRLDAVKLANYFARGLLRPIAVPTVEQEGYRALVRRRKRIAESRAKIKQKIKGFLLASGITEPASLRSWTLAASKDLSALEIPPEHRTALASMVREYLFLLSEDKLLRAEIREATRRMHSERFKRLTAVAGVGETAAAHFLAEVFSPERFDRPEEVTSYLGLAPVVSQSGNGPARAKLRPVGQKRLRGILVEAAWQWSWRDPEAKAIYNQHFAKHGIGQKAIVAVARKLAIKLWRLSVETPSVPAEGAARGAWSG

SEQ ID NO: 495566 - protein, 410 aa, unidentified
MLEVKVERCAGIDVAKKFVMVCVLIGLAHQKPREEVRRFGTTVPELERLKAWLLETGCTEAVMESTGSYWKPVFNVLEGSLKVVLANPVQVKALRGKKTDPKDCRWLAGLLRHGLVEGSFIPPRDIRDLRDLTRRRRTLLEEGTAEKNRVQKVLEDANVKIGNVLTDVFGMSGQAMLEALLENKLNAEQMANLAQGRLRPKIPEIIDTLEGHRMSDHHRLLVRQGLKHMRFIEEMISELEVQIYERLKPYYKQIELACTVPGIGPAAAASILAETGMDMSEDGPFPDCHHLASWSAICPGNNESGGKRKSGHTRKGNRWLRAALAQTGWAGAAKKNSEFQSRYQRVKLRRGSKRAATAVSHAQIIALYWVLRTGKAFEEHVAESKQTRRASQIQHHLQRLTQLGYEIPNA

SEQ ID NO: 495567 - protein, 441 aa, unidentified
MIRRYVAGIDIGSEQHWVCAPTVDGNEREIASFGATTPELIRMAEWLKARQVESVAMESTGVYWIAPHEVLEGQGLQMLLVNARQLAQVPGRDKKSDPTDCEWIQRLHSCGLLQGSFRPAESVCMLRTLVRDKANLVAERGDWVRRMQKSLDQMNVRVHRAVSDIDGVTGMAILRAIVNGERDAQKLAKLRDPRCSKTEQEIAEQLSGHWREDHLFSLQQALKMYEAVEERIAAYEKEIVRKLEEMEQEQKRGQTPPPLNNANKAKMIKQRGQEAKREALFRMSGVDITQIDALGVETVEVVLSEYGADLSRFPTEKQFVSHVTLAPRVAKSGGKPLPKKKRNSASTRVATALRMAALSMRNSQTALGAHYRRIARRIGGDVAVFATARKLATLIYRLLRWGQPYVDEGVAAFEARYQQQRVGRLTATAKELGYQLVPANA

SEQ ID NO: 495568 - protein, 349 aa, unidentified
MRYIGVDLHKTNFVVCFLSEDDNYKLETFPLSKAGINRFTSELSKGDAVAVEVTQNIYYFYDQVKVFVARVVLVDTYRFAIIASSKKKTDKADALALARFLKLDHLPQVPIPSEKVRQLRHLLQARETLVGLRTKLKNLGHAALTRNGIALSRSAFASGAARERLRKRDDLSAADKVILESALRQIAELDKEIEQLENEIVRLGKTLAGVKRLLQLHGLNLLSAISLLAEIGDIHLFETSKQLVDCSGLATSVRQSNQTTRQGHITKQGRKRLRTVAIRAVLSMVNRTNTPLMDFYGRKKREKGSGKAICATARKLLTIIFVMLKKELDYWYLEDRLYNRKLRQLNAAV

SEQ ID NO: 495569 - protein, 485 aa, unidentified
MAKRRMSTFERLEGGRLNRKQRRELGRQVAAADPGLTIVHANAGGIDVGNESHYVAVPPDRDPNPVREFGCWTAALNQMAEWLKSCQIDTVAMQATGVYWIALYDVLEQHGIRVVLVNAQHTKNVPGRKTDVQECQWLMKLHTYGLLRDSFRLAQEMEGVRTIWRLRDRHVKEAGRAVQHMQKALTKMNIQLANVLSDINGLSGQQIIAAILKGERDPWKLADLKDYRVKASREEVARSLEGNWREDVLFELQQAVDSYHFAHRQMQECDKKLEGYLASLPARMLDIPAQPEGAPAATPKKKTKKAKKPSGNQPHLDLETELKRICGVDLTSIDGIDVMTALTIVSEIGTDVSRFQDENHFASWLGLTPAKDITGGKTIGRGKRKVKNRVAVVLRTAATTLLKSDSYLGARYRSLRRQLPSFAAAVKAMGRYLAVLIYRLLTQGEAWVDRGTTRFERRRMEQELASLNFKARAKGFKLIPITEAS

SEQ ID NO: 495570 - protein, 393 aa, unidentified
MERIFVGIDMAKETHWACAVDERGRIVLDRAVDNDPQAIDGFVAELRGLGAEAVIGLDVVGSFARFAQAVLLAEGFSLVHTPGIAVNRAGQGFAGGERKSDPKDARTIADLVRTRDLRPILPDDDTVVALRLKVARRRALVQDQTRRLARLRQLLCGIHPGLERALDVTCKGPLALLTRYVTPMEIRRAGNRRLVAHLKKTPHLRGTATLADTALAAATAQRVAVPGEAATAEMIRELAAEALVSRAKLARIDRDLEALLERHPDGALIRSLPGMGAVLAAELLAHLGDIARFPSADALASAAGLAPVLRQSGKSRGWRRAHGGDRALERVFFQSAFCAVVAGDPLSKAYYDRKRREGKLHNQALIALARRRVTVIWAMLRNRQVFDPDRKAA

SEQ ID NO: 495571 - protein, 327 aa, unidentified
MNTPVLGIDVAKETMDVALINAGRLIPKQFENSSSGHQQLATWLVKQKAAKAHVCLEATGQYGDGVAEYLHQQGYSVSVINPARIKHYADSKLRRNKTDKADAQLIAEYCLRETPALWTPPPASFKDLQAMVRHLDDLQSAHLQATNRLASGVRTAMVIDQLKSSIAFLKTQIVQIKKAIQEHITCLPELKRLQDLLVSIPGIGRLTAARLLGEIRNILDFQDARQLAAYAGLTPRNFISGTSVHKKSRLSKTGNAHLRKILFMPSITAKRWNPIVSQFCARLSQSGLRPMQLIGAAMRKLLHLVFGVLKTGRPFDPNYLVKDQVPS

SEQ ID NO: 495572 - protein, 408 aa, unidentified
MNAVGIDVSKGKSMVAALRPMGEVALLPQEFLHTAPGLDQMAHAILALGEDTRVVMEATGRYHEPVAAALSAYGIYVCILNPLYIKQSGAGSIRKVKTDKADSLKIAKYGLDNWVDLREHTAMDTIRQQLKLCSRQYNIYMKTEVSLQNNLISLTDKTFPGVNELFSSPARADGHQKWIDFVMTFWHCDCVFRISEKAFTARYEKWCKRKGYHFRAEKAAEIYAQSCELFVTLPKDDNTKLLITTAAQQLLAGKMTLAALRAEMTRLAQQLPEYDTVRAMYGVGETTAAQLMAEIGDVRRFPRRSSIVAFAGVDPAITQSGKHEVQSTATTKRGSPHLRKTLYQIVCTYLRKAPGDEPVYQFLDKKRGEGKPYFVYMTAAQNKFLRIYYARVKDCLEAFDTQQNTVQD

SEQ ID NO: 495573 - protein, 350 aa, unidentified
MPIVGGLDIHRKQITFDYLDTATGEVKRGQIAPADRAHLRSWLARFAGRDDVACALEGCTGWRYVAGELAAAGVAAHVAEPADTAFARGRKRHAKTDKTDSRHLRELLAEGRLPECWIPPSLILECRALLETYHDLRTEHTAWVQRIHAVFFHQGAPALGEGALRTEHDLQALRAAAACHLSLAGQLQVDTALDMLTALEGRLDVVRRRLLDAARALAGARELHARLYGAGPITALAMTCWLGGAGRFSSSRKAVRFAGLDVTVYSSDGKRSPGHLSRQGPEVLRWCVYEAGKAHARRSAPDHAYYAAAKDRLDGKRAALSEARKIIRQAVHILAGLGDDALMMDPSPPR

SEQ ID NO: 495574 - protein, 376 aa, unidentified
MEHDSTLYVGLDVHKDSITVAYALGSNEVELLGRIGTTQTDIDRLCKRLQSKAHCIRVVYEAGPCGYGLYRQLAKKGFDCMVCAPSLIPRKPGERVKTDRRDAVKLARLLRTGDLSAVYVPTIDDEAFRDLARAWVSAKDDMKRARQRLKAFLLSHGVRYTGRADWGPAHRRWLSAFSFDNLWQQLALDELRRAIEDRLAQCDRLEVALREAVANWRFYPAVLGLQAMRGVQFTTAVGMLAELGDLSRFAHPRQLMAWLGVTPSEHSSGNKRRQGSITKTGNGYARKLLVEAAWSYRHPARVSPEIQRRHEGLPKPIIDRAWDAQIRLCRRYRKLVAHGKEKNIAVVAVARELGGFIWDISQLAMSLAVPREVHVA

SEQ ID NO: 495575 - protein, 355 aa, unidentified
MTSTQYIGMDVHKESISIAVRNAVGKIVMECVIETKASTILQFMDGLRGDVQVTFEEGTWAAWLYDLLKPHVTKVVVCDPRRNALLQEGNQNDRVDARKLAELLHNNQLRSVYHGDHGLRTLKELVRSYLTITQDVSRVMTRVKAVYRSWAIPCTGKQVYAPHHRAEWLAKINEPGVHRRAEFYYQQLDALRCVRQQVRRELLAESKKHPAWKRLCGIPSIGPIRAAVLLGILQTPHRFRSKRQLWTYSGVGIETSSSADHQVVKGQLERKKKPVEIRGLNRNFNHDLKNLFKGAAIVAATKPGPFAEFYAELVAKGTRPEMARLTLARKIATIVLIVWKRGVCFDAQHLKPQTA

SEQ ID NO: 495576 - protein, 423 aa, unidentified
MNKYKYRATKFQQVNWKRVQEKAVDGRVILTIDVAKEDMYSVLLKPDRTVIETFRWSHPHETRLFVEQIVAIGADRVEAVLEPSGTYGDALRRLLGEAGVTVYRVSPKRVHDAAEVYDGVPSLHDAKAAYLIGRLHLEGVSRPWTEHDERRRTLRAQLTIVDFYQERYQRGLNRLEALLARHWPEAPYCLDLDSVSLLRLLAQYGDAAAVAAEPQAAEELLRKAGGPGLKPAKIEALLGSAGTTVGVPCLEAEREVIIWLAAELLEARAGRREIERALVPEVAMQPSLTRMVAGVGKRTAIVLYCALGDPENYTDAQSYAKAAGLNLKERSSGKHKGKLKLTKRGPGVARRYLYFAALRLIKKDGPAKRWYDAKVARDGGVKGKAIAALMRKLVKALWHVGRGAEFTEYKLFGTVERGLREAA

SEQ ID NO: 495577 - protein, 342 aa, unidentified
MYYIGLDVHKKTISYCVKDASGRVNQEGKLGATRCELDIWMRTLPQPWTVAMEATIFTGWIYDHLHPHAAQIKVAHPLMLRAIAAAKKKNDRVDASRIADCLRCDFLPECHMASTEIRDRRRTLRYRYLLVRQMVQTKNRISGLLMETGVTHNKQRLHKVGYFRELLASNEEVSESIRPLLRLSRDTIARLQKTERALVSSLQRDPLLTQRIKRLRTVPGVGPITALTWALEMGEISRFRSIRQAISYCGLCGDERSSAEKSIRTPISKQRNKNIQFVLIEAAKLAPRQDHDLALLYAREKEKGNANRATLAVARKMVAYLLAVDRGKRDFVPVEDHSNAAA

SEQ ID NO: 495578 - protein, 340 aa, unidentified
MKEVITTIGLDLGKKVFQVHGVDVAGGVRVRRSLRRSQVLEWFGKQQACLVGMEACATAHYWGRELSRLGHEVRLIAPAYAKACVRRNKNDAADAAAICEAVSRPGMRFVAIKTVAQQAAGGLHRVRDLLQKQRTMLINQLRGLMAEFGIVVAGGPQHVKDLLAVLADPADARVPELLRGPLLGLAQVLGDVERRVATLERQIVAWGRGNATYRHLITVPGYGPILAGAFAAFVVEPSALRSGRDFAASLGLVPRQEGTGGKLRLGSISKRGNGYLRRLLVNGAMSILNTSRARQDPWIARLLTSKPRKLVAVALANKLARIGWAMMVRQEDFRPRSAAA

SEQ ID NO: 495579 - protein, 402 aa, unidentified
MKVSGLDVHKDSIFCAIYDGAGYSDVKEYASMTNSIREMGIYLKSEGVQHLAMESTSIYWIPVWDILEEMGFDLVLVNPFLIKQTPGRKSDVKDAQWIATLLHKNMLKKSMIPCSVIKELRIYTRKYTRLQQKSAQVLTELDRIMVTANIRISSCVSKLTTKSVISVIEALIRGETNPENLVKLVYGNTKNKQSGKLREALTGNVKEHHRQSLKWAKEQYDLYAQQIQECLLYMDKICKEHYSKEMELLQSMPGISKISAICILAETGADMSAFENSGKITGWAGLRPRNDESAGKFKSKSITKGNKYLRAILIQIAWAASRTKGSFFKEKYNRLSLRKSNKKAIIAIARKMLVVIWNLLNDNKPYNPTLVHIYDPVKVERSIAYHQKEIEKATKLLPKKVV

SEQ ID NO: 495580 - protein, 483 aa, unidentified
MKSKPKEKSKKATDHPVQHHWHEMNRKQRRDMMRKVQSQELSLEVVHPDAAGIDIGNESHYVAVPPSRDNQPVRRFGCTTGELKAMAAWLKQCAIQTVAMQSTGVYWVAVYDILEQAGLEVYLVNARDTKNLPGRKSDVQESQWLMKLHTYGLLRNSFRPSQEIRVMRTYWRQRNDLVQSAGRHILRTQKVLTQMNLQLANVLTDISGATGQAIIKAILAGEHDPHNLAEFRDPRVKASKEEIAQSLEGNWQEDLLFVLKQEHEGYEFCQKQMAECDRQLQQYLQQREDRSHGAPLPEEKRQGRRKKKRANKPQFDLREGLFRMTGTDLTRIDGIDVMTATTVISEAGYDMSKWQTENHFVSWLRLCPDNRISGERIIGKGRLPTNNPISIALKMAASTLRESKTYLGAQFRRLRTRLGAPIAIKAMAAKLARLVYRMLRYGMKYVDQGAAFYELRHRELQIKRLKAKAEKLGYRVTPIPAAA

SEQ ID NO: 495581 - protein, 382 aa, unidentified
MQASTVDTPTAGHCGTIFVAIELSQKTWLVTLHSPDRDRISRRTLEGGDDAGLLALLEGVRTRVAGKLGTAPKVVTCYEAGYDGFWLHRLLTAAGITNLVFDPASIAVEQRSRRAKTDRIDGELLLRTLMAHLRGEPRVVRIVRVPSVEQEDVRRASRERDRLVKEQTGHTNRIKALLRLMGMAVSNPRRSDWLSWLAQQRDRQSRPVPPHLMSEVAREHARLMLVREQLAALEQAPTAAVAAAPAPMAERRNLLLRLKGLGAVFAATLTNEVFYKDFHNRREVASYCGLTPSPWRSGGIDREQGISKAGNPRARLKAVELAWLWLRHQPDSALSRWFAARTANAGKRARRIAIIALARKLIVALWRYLTTGLVPEQAVMKA

SEQ ID NO: 495582 - protein, 428 aa, unidentified
MTHSEIKSTEFAAYIGIDWADQKHDICLREAGSNRIESLQIDHKPDSISNWVSQLRQRFQGRSIAIALEQKRGPLLYSLMLYEFIILYPVNPHALASYREAFKTSGAKDDPVDADLLREMVYLHHDKLHPWTPDDPLTREISLLVEYRRRLVDDKTRLTNRLQALLKQYFPQALDWAGELDTLRALEFLTRWPQLEAIQVATPEQVRDFYRQYYRLGEKLPERLAEISAAQPLTRDRAVNNASIIMVKGLLETLRGLIAAIEAFDQRIKTCFEQHSDKDIFNSLPGAGAILAPRLLAAFGADRARYQSAKEIQCFSGIAPVTERSGKTKFVRRRLACPKFVRQSFHEFAKSSINWSAWARAYYDQQRRRGSKHNEAIRSLAYKWARIIYRCWQDHKPYDESVYIAKLELRGSPLAKLIPTAAEQAEAS

SEQ ID NO: 495583 - protein, 431 aa, unidentified
MKVMYERVAGIDVHKDMIKVGVRSPGDKAWTRKTEILEYRTFYGVLQLMAADLRKRAVTHVVMEASGVYTEPVYYALCEQDFERVEVINPAHAKALKGHKTDAKDCARLAELYECGLLRGSYIPAAELKELRDLTRYRVKTVQARTSEIQRLGKALESGGIKIGSVVSEITGKSATAMIEALIDGERRGAVLADLAIGRMRTAGKLADLSMALAGRFTGHHAMLCRLHMDRLAVFDTAVSGLDERITARAVPWRREQDLLMSVPGFGDIVSQAWLAEIGPAPHQWFSTHEKLASWVTLCPGNNISAGKRKHGRTGDAGTYIKPMLVQAAWSAIRTPGRLQARYGRLVRRFGGAKNPAAKKKAIIAIAHTLLKIAYQVLKSGMPYQDLGADFYTQRESPRQRQAYLLRQLEKLNPGCTITITPPEAALTPGA

SEQ ID NO: 495584 - protein, 343 aa, unidentified
MQGVTTIGLDIAKSVFQVHGVDALGKMVIRRQLKRRYVLAFFQKLSPCLVGIEACASSHHWSRELKALGHNVRLMPPAYVKPYVKRQKNDAADAEAICEAVSRANMRFVATKTPEQQSCLMLHRTRHLFIRQQTAVINAIRAHLAEFGVVAPVGRRGVEELLDVVADSGDERVPEVARACVGALGAQLRMLKAQILAFDRQIMAWHRSNETSKQLDEIPGVGPALATALVASVADPKAFRSARHFSAWVGLVPKQHSSGGKDRLGSISKQGDRYLRSLFTAGALAVIRYAKIHGTKHRPWLTALLARRPTKVVAIALANKIARMAWAMMAKGERYKEPAALAA

SEQ ID NO: 495585 - protein, 339 aa, unidentified
MKYTPVGVDIAKHLIQVHFINEHTGEVVDKQLRSRDFLTFFSNREPCLIGMEACGGSQHWARELTKLGHKVRLLQARFVKAFVMGNKNDVLDARAIWMAVQQPGKEIAVKTEEQQSVLVLHRTRRQLVKFRTAQINSLHGTLLEFGESIHKGRAAMDREFPEALERMKERLPPYLITVLEDQYNRLSELDSLIDDIEKQLTSVARQNETCKRLLDIPGIGPLIATAAVATMGEASAFKSGREFAAYVGLVPKQTGSGGKIRLLGISKRGDTYLRTLFIHGARAAALLTREPAPWITELKKRRPASVAIVAMANKLARTVWAIAAHGRKYDKNHVSIRPY

SEQ ID NO: 495586 - protein, 391 aa, unidentified
MSMYFVGIDISKYKHDCCIISAADQQIVSKFTITNDKDGFEQLRISLNSLSNSEDIRIGFESTAHYALNLELFLENSLLTFMEVNPVLISEYKKSKTLRRTKTDSVDCESIARWLMTVEYKPHSKGFYHAYSLKSLTRLRDRLIRQRSFYLVKITNVLDHTFPEFKPFFNERLSKTAIYLLENYGSAEKMANMNSVSYDKLRCISRGKFSIQQFLRLKELAANTVGVNNSIFDIELNSLLTLYNSLCKEIKTLEAEITRLIEEVHPHYMSIPGIGPISAAVIYAEYGDISNFSNPSQMLAFAGIEPGINDSGTESHGGRMVKHGSSQLRYVLLNACLPLIRFDLTFATYYAKKRAEGKKHRVAITHVAKKLIRVIYALERQDVDFNAQKLR

SEQ ID NO: 495587 - protein, 456 aa, unidentified
MQHYYLGIDVSKGYADFVILNDKKRPIEENFQLDDTFEGHCCLYERLLRFFDDHPNSTMYAALESTGGYEDNWFRALIKFQGTLNLKTARLNPLGVHANSKADLKRNVTDKISAQNVAEYMIAHPEKISYQQEDHLASLRKQWGFIKMLTKQSTQLLNQLESLIYTANPELLVYCRDGVPEWLLKLLIHYPTASSLSKAKIVKVARIPYISADRAKELVGNAKKSVASATDKVTGKLIVATVKQILHLKQVIKVQTGLMAQECSVPEVDLLKSFTGIKDFSAIGLMLEIRTVERFLSAKKLASFFGLHPVYKVSGDGIGGFRMSKRGRKEPRQILFMVALSAIQSNPLIRGIYLEHIQKGMEKMAAIGLCMHKILRIIYGMLKHNSVFDPEIDRRNREKMVHRNNRVSKDKNRRYQAFDSRAPISRRQHSKREERKQSHSDNNTNNGIIAPAPLST

SEQ ID NO: 495588 - protein, 367 aa, unidentified
MWKGITYVGLDAHQGTIHSAILLPDSQESVLDSFANSPDGIGRFVRRLRKRTSDQIRTCYEAGPLGYGLQRSLIALGLECAVIAPSLIPKKPGDRIKTDRRDARKLADLLRAGLLTEVHTPTPEQEAVRDLCRAREAVKEDQKRVRHRLSKFLLRRSIRWTPGRKAWTVAHRQWLRGLRLEHPADQLILDDHLFALEQLEGRLAAFDEQIEAFASQEPYAESVGWLRCFRGIDTLTALSIMAELHDLRRFASPRALMAYVGMVPSERSSGGQERRGALTKAGNRRLRRLLIEAAWHYRHRPAVGYRLKKRREGQPAHAIAVADRAQQRLHRRYRRLVERGKPHNKAVAAVGRELVGFVWAALQPQAS

SEQ ID NO: 495589 - protein, 403 aa, unidentified
MNSVGIDISKGRSTIAVMRPFGEVVISPFEVRHTGSELSKLAKQLKSLDGETRVVMEATGNYHASVAKLLHNAGLYVSVINAKLVHGYGNNELRRVKTDRKDAVKLANYGLDRWLTLPRYIPEEDTRLLLKNCYRQYRQYSKVQTVLKNNLISLLDTVCPNVNRLFSSPIRGDGSEKWVDFVAEFWHCRCVSEKSERAFTSKYLRWCRKHGYNFREAKAHTIYAEASGHIGVMPKSETTKLLVKQAVSQLRATSTALAALKQEMQSLASVLPEYPVVMDLFGVGPTLDPQLIAEIGDVRRFYSKKALVAYAGLDAPPNDSGDVTGRHKSMSKIGASSLRRTLFLVMSVYLQTAPLDEPVYQFMDRKRAEGKLYRVYMMASANKFLRIYYATVKAYLESLEHTV

SEQ ID NO: 495590 - protein, 356 aa, unidentified
MTTAQKQGCVFVGIDVHKDTHTAVGISPYGEKLFEITVGNYKEDFETLNEKVKEHSGVLSPFFGLEDVRGYGERLAGYLYQKYPVYHVPSILVDRARQNATHPEKSDSLDALGVAKVMIQSIDTLLPYTISHESEKAKQLKEISIDREDLILERTRLKNQVHTLLYRIYNTEYEQKFKDPFSLKALRFWRNAKPKCDLFLLKTMKRKVRRLLDIHVEVTDLEKDMAELLKNNYTIQTASGCGVVLASTIVGEIGDINRFTSPGALSKYAGCSPRERSSGKKVRHVKSRSGNRRLNCAFHRMALSQISRMGNDRAKAYFRRKISEGKSKSQALVCLRRQMVNIVWMMMKHKTIYRNA

SEQ ID NO: 495591 - protein, 423 aa, unidentified
MKIVRPICCGMDVHKNIIVATIGITNKKTRITEYIQETFSTLNPDLLNLKQWLINHKCFDACMESTGKYWIPIFNILEDEINIYLTHPKYVKAIKGKKTDKKDSKWICDLFKHDLIKFSFIPPKEIRALREVSRYRYKLVGMRSSERNRYQNCMTVSNIGIGSVFSDPFGKSAQAIMKEVLESDIIEDEKILKCIHGSCKNKDKILDSIKHCNIETDQRFKMNESMTHMEELQVHINNCEIEMMKRAAPMFDRFMHITQLPGISTLSAILIISEIGVDMKQFESDKQLTCWAGLAPANNESANKKKSVRISKAGQYLKPLLVQCALGAIKDKEGYFGIKYSRIKKRRGHKKAIIAIARMMLVSIYHMILTGETFNPSDYESFRNPNPPIKQQVLTEESAIEFLKKSGFDVSKLTKLLNRKLYP

SEQ ID NO: 495592 - protein, 406 aa, unidentified
MDVIYPRCAGLDVHKQTVVACARISRGGAPLQEVHTFATTTSGLLALADWLEGLGVEHVAMEATGVYWKPVWHVLEGHFELVLANAAHVKNVPGRKTDVNDAMWLADLLAHGLIRASFVPPVAVQQLRTLTRTRKQFVRERAAHVQRIEKVLEDANLKLSVVLTDILGKSGRAVLQAIVDGEDDPERLLARIGRVKASRAELLEALRGRISAHHRFMLKLHLAHIGALDKAIADIEKEVGRGLEPFRQAAKLLSSMPGLSTVSAHVVVAEIGIDMSRFATPAHLLSWACMCPRNDESAGKRRSTRLRRGGKWLKTTLVQAAWAAVKVKGSYLQAQFHRIRARRGAKKAIVAVAASMLTAAWHMLRDGTEWQDLGATHFDRTDAAKTARRLIRRLQQIGYVVQATPA

SEQ ID NO: 495593 - protein, 429 aa, unidentified
MKIIYPRVCGIDVHKKFIVAVICISESVEPVYLKKRFSTFHNDLIRFRDWLIQNDCQNVCMESTGKYYIPVYNILESHISNIVVANPKWVRAVKGEKDDDKDAKWIADLFKLGIVKSSFIPQKDFRILRELTRYKYKLVNMRSSEKNRYQNALTSGNCKLDMVFTDVFGKSASNIIDLILSDNPYTDEDILSKVHKNCKASPDMILNSINGTDLTPVQKSRIELVNNHIKQLSSNIQRLDKLIDLMIEPYEDYISFLCQIPGVSRNSAITILSEIGVDMNQFTSTRRLTSWAGLTPSSNQSAGKKKSVRISRAGVYLKPCLVEVAHAAVKDTNHPYYANKFNKISKRRGKKRAYIAIARKILVAAYHMLLTGEIWNPADLAEVETPVEQRIKYVKNNLKSDIKQLLDIGLTVEELTLMIQQNANNIATQ

SEQ ID NO: 495594 - protein, 391 aa, unidentified
MMIIGCDLHTRYQQIAMVDTETGEMLECRLEHENGEARAFYAALRGPVRVGIEATGYTHWFEALLAELGHELWMGDAARIRAAVVRKQKTDVRDATHLLDLLREGRFPKIWRPSPAERDLRQLVWHRQKLVWMRGAVKNQLHALAMGEGVCRKKQLFTVKGRKELEGLALGPWSSYRRQELLRMYDEMAAATAKLDLEVERAAKAQPLAVRLMTHPGVGPVTSLAFVLILGPVARFERSKQVVSYLGLNPQEHSSGGKQRMGSISKQGNPMMRSLLVEAGHTAARLDPELKRMYQRLKFRRGASVAKVAVARKLAVRLYWMLRSTADYAQLACKVARGPPWWRRIHRWADWAPCLPEQLGRLNNESWSKRPDRWWVERVSTAGFCKRALVA

SEQ ID NO: 495595 - protein, 324 aa, unidentified
MSLPAPSTNVGIDVSKETLDIAVHETAAHWTSKHEFTEFPQLLKSLRAIAPTRIILEASGGVENLLVSYLAMAGLPVIVINPRQLRDFARATGQLAKTDRIDAFVLARFGATLEPAVRQLKSAETQELEALVARRAQLVNMLTAERIRLQQAQQQRRQSIVSDLKAHISWLQKRLDKCERDLSQLLGSSPIWRATDERLQSVPGVGPITSLVLIAELPELGQLPDKQIVALCGLAPHARDSGKWHGKRTTRGGRARVRTALYMAALVATKHNLVIKSFYRRLLSAGKQKKVALTACMRKLLVILNAMFRNQTSWQPPRLAQELN

SEQ ID NO: 495596 - protein, 418 aa, unidentified
MKLFVGLDVSSEKLDVCFLSDDDQLTILLEDSLGNDIDGASQIKQKIVAFQKVYSFSQIVIGMESTSMYSFHPATFFNEDRELQRINTVVTIENPFRIKQFSRIFDEDKTDKNDAMRIADFLRIQRYTTSPIKEEKYMALQRLTRTRYQLIGQLVETKQHFLENLTYKCNALTRELKNSDTNSSVFGATLLALMTEDYGLDELAHMPLTDFTSLLQEKGNGRFKNPEGLAKTIQRAITMSYRLGEMAQESINIILSVLAREIRALEASIKDLDKAIEQLVIVLPEYQCLTSIPGVGKVYAAGLLAEIGQIQRFEDQKKLAKYAGLSWKIKQSGNYQSENTPLTKQGNRYLRYYLVEAANSVRRYLPEYQAFYQKKYKETPKHQHKRAIVLTARKFVRLVDTLLRNHQLYTPPRSVIEK

SEQ ID NO: 495597 - protein, 426 aa, unidentified
MNFTQNEKISQVTNTTLVVGIDISSETHYARAFDWRGLELTKVFKFESASYGFESFSEWLSELCKTNQKDNIIIGAEPTGHYWFTLAEYLKENNIKFVFVNPMHVKRTKELDDNHPSKNDRKDPKVIAKLVIDGRYLIPYIPEDIYAELRVMNESRMRINKELVAIKNRIQRWFAIYFPEYKNVFGNWECDSSIEILLNVPLPTDAVNMGAEAIKELWRAKKLRGVGIKRAKRLVEAAENSIGVKQGNNAARCEILMLIEDFLKKKEQEQRVVEILETLCIQVPNAEKLLNIKGVGVLTVASFLGEVGDIRRFDSPKQIQKLAGLAITENSSGKYKGQSSISKRGRKLLRYTLFQAVMSMIMHLPEFRELHRYYTTRTRNPLKGKQSKVALCCKTIRIFYTLLTKGVEYDGQKLMKDIVRPELIAA

SEQ ID NO: 495598 - protein, 318 aa, unidentified
MTNLTYTFNIGIDISKKTLDVSFNAKKTASYPNDLKGFKQLLNAISDKNMTRVAMEATGGYERPLVKFLQEKGVAVSVVNAKRVRDYAKALGKLAKTDKIDSHVIRLFSDAINPEITKKQSDSQQSLDALNLRRNQLVKQRSMEKQHIETVTNKDSKRSINRTKKFLDKEINQVEKKINELIESDKSIQEKINRLATMKGIGPVVALTFVAELPELGTLNNKEISALVGVAPFCRDSGTMRGKRTIWGGRAQVRSVLYMAALSAVRYNPAIKIFYDRLISKGKPKKTALVACMRKIITMANSMIKNNTDWDADHGKLA

SEQ ID NO: 495599 - protein, 464 aa, unidentified
MTVLNVGIDLGVTAKHHAEVINSEGIKVCSSVRFPGTKEGFDMMSQHVLQHVNEEAKLRFICEPTSMSWFPLAVYAKNNGHEMMRVKAQKSHDLRKYYSRHSKSDKLDAKALAMIPIVERDSIEQVYLPDKVTNALDRRCRQREKIIKEIASIKTRIKSLYHWVMPGLTDCFEDPYGERAKAFYKKYTNPFNVKQLGVSRLRRVMEKTGRQQPSEGLAERVHEAAIRGCQLYEHSDEYIDLDELQKEVECELNLLESHEKVQKKVNEAINRLYEGVHPTKNIETIPGIGETLGPVFLGIIANAKRFSSQSKARGYSGMIPKQNDSGESSKKGLNITKDGPSRYRRALYLASDTGRQWDPQLAKVYYDQMVYKGNCHTQAVCAVSTHLVGRIIRVLKDKRPYELRDLEEKPITQKEAKILITRELTVPEETRERIRNRKKKKGYKRNQIGGIARKQSSRFAPYPS

SEQ ID NO: 495600 - protein, 384 aa, unidentified
MNNHSILFVGLDTHKESTEVAYSPDSRGEPVVHKGKIKTTKQGFEKLVRQLQSTFPNATLHFVYEAGPCGYWVYRLLTRMGHCCYIVAPSLIPKKPGSRIKTDKRDALMLTELLKQGAIDSIYVPEPEDEAVRDLSRARERSMTDLNDAKYQLKALLLRNNIRYDGAASWSLKHLRWLTEIILPHPAQQLVLQEAIQTVNERIARLERLDNELLHHVKNWRYYPIVKAVQAMRGVRLLVATGVIAELGDLSRFDHPRKLMSYVGLTPSENSSGGSRRLGSITKCGNSRARRLLVEGAHGYRYTARVSTELQKRQEGVSKEIVDLAWQAQVRLCWRYQRLTQRGKHRNVIVTAIAREMIAFIWSISREVVLSPVNPKLRLARVPA

SEQ ID NO: 495601 - protein, 352 aa, unidentified
MMIIGCDFHPRFQQISFLLEETGECGQRRLMHTAEAEQFYRSLHGTRVRIGIEATGSYGWFRRLLDELGHELVVGDATQIRASNPRRQKTDKRDAEHILGLLVADRFPAIWQPPAENEQLRQLLLHRSRLVRLRTRVTNQLDGMAKNEGWVIAGGWSGKRRKAIEALPLPGWYGERRKDLLGLLDRLEERIAPLNKAVGQAAANNAEACLLMTHPGVGPVVSLAYVLTIGNWQRFPRGKQVGSYLGLIPSEDSSSDKRRLGHISKQGNTLLRWLLVEAASTAQRYDPSWHRQYLRLSMTKHHGVAKVAIAHKLAVRLYWMLRSGEDYQHVRERGSHARQSECPVGRNRRPIE

SEQ ID NO: 495602 - protein, 418 aa, unidentified
MLHPKMQYVYVGIDSHKDTHCAVVLNCFFEKLGEITFDNAPAKFEEFFQAIRKFKPKGSTLAFGLEDVSAYGRNLTVFLTGKKQVVKHVNASLVAAERRSRNVLHKTDSKDAECAARVLLNRFDQLPDADPQDKYWVLTSLVTRRRSIIKMNISLKNHLHSFLTSHYPSYDRFFARIDYQTALKFFEKYPSPSSLKSVAVEELAEFLAGYSARRIKIERAIEILDHVENDGDTRVQYQEARDLAVQSTIRQINNNLKEIESIEAILEELLEHFDYKLQSMRGIDTVTAANLIAEIGDIKRFPTPAKLARYSGVAPVTYSSGKSSVQYANQRGNRTLNAIFFSLAVVVTMTAGRHKKIINPFFYHYYHKKISEGKTKRQALKCVERRLVNIIWSMMTYKTEYINPPTQDFPKEAKAEST

SEQ ID NO: 495603 - protein, 315 aa, unidentified
MLYDGIKGRIKTRNIQNNRHSVENILRWLRLQHCSPEDVHVVMEATGVYHERLATELHDAGFRVSLANPHRSREFARGMGIMTKTDKVDAYMLACYAFLKKPHRWEPPAPEIRYLGALLRRRDVLLGDALREENRLEKYLSTDTPADIISSCRRMAQLLREEVSNIERQIKAHIKASPALRRDYTLLTSIKSVGPQLGMHMLVVLRSHNFVSAEQAAAFLGVVPIEKRSGTSVRSRPRMSKIGPPQLRAKLYMSALCGKIYNKRMRNIYDEMCLRGKPKMVAIGALMRKLVHWCYSVLKTGTVINDESLKQVLST

SEQ ID NO: 495604 - protein, 354 aa, unidentified
MSQTLNAAIAVIGIDIGKNSFHIVGHDERGAIVLRQKWSRSQVEARFANMPPCLIGMEACVGAHHLSRKLNSLGHDARLMPAKYVRPYSKGQKNDFRDAEAIAEAVQRPTMKWVATKTADQLDLQALHRVRERLVSQRTGITNQIRAFLLERGIAVRQGQRFLRAELPRILATPPDVLSPRMVRVIEGLAGDWRRLDERIEGLSGEIEAIARQEPGCERLMSVPGIGPIISSAMVAAIGTGDAFSKGRDFAAWLGLVPKQMSTGDRTILGKISKRGNRYLRVLFVQAAWVVLIKPMSWERHGLKPWIEAAKKRLHRNVLAIALANKLARIAWSVLARGRSFEARTITNVAAQAA

SEQ ID NO: 495605 - protein, 460 aa, unidentified
MRRWPTERKKISARLVEDEEYQLRYERVAGIDVGKGKADVCTRLPPVREGGRRVSRTEEVTSTVAEVAALAERLLADGVELVSMESTSGYWRIWFYVLEAAGLNVQLVNSSHARQLAGRPKTDRLDAQWLARLTEMGLLRPSFVPPAEIRALRDLTRTRLQLVHDRTREWQRLEKLLEGALVKLSSALSSLARVTSARLILEALAGGERDPRTLAGLAAAQVRAGRAGIEQALEGMRYGDHHGRLTRIHLDHITFLDRSVAAVEDDIAAALDAIPAAQGIDAAGARSPDPGPGATVLPAAERLAEIPGMSLDLARAIIAETGLDMTLFPTAAHLVSWAGLTPVARQSGPRSRKPGKGHGDSYLRGYCTQAATGAATTDTFLGERLRRLSRRLGGNRARCAAGRSILVIIWHLLADPEARYTDLGPGWHARKTDTDRRTPSLLNQLRALHPDSHITIAPAA

SEQ ID NO: 495606 - protein, 383 aa, unidentified
MIEQPDGTLTVEHREFGAFKRDRRALAEWVRTLGPDLVVMESTGIYWKSPYAALERVGIAAWVVNARHVKNVPGRKTDVADAQWLATLARAGLLRASFIPPADIRHLRLIARQRQKLGGMLASEKNRLHKLLTDAGIRLNVLVSDIHGQAGRAMVKALIEGQPIPEILNLAGRLRASREELFEALQPEELSDAHRFVLSEIMAHIEELEARMGRFEQTLLAGLAPWEPQLVLLQTLPGVDRIGAAMLLVEIGTDMASFASAEKLASWVGICPGNNESAGKRKSGKIRKGNAWVRRLLCEFAQAASRSRCGLKEKFQALNIRKGHKKAIVALAHKMLRIIFAMLKNHTPYQDQAVDYEALLVQRNAPRWMKMLVKHGFIIPASA

SEQ ID NO: 495607 - protein, 319 aa, unidentified
MKNTALPVGIDVAKDFLDLCAGPDGAVERIANDLEGHERLAQRLRQQAVALIVLEATGGYEAAVAGTLQAAGLPVAIVNPRQVRHFAKALGLLAKTDAIDARVLARFAALLAERPDLERVVKPLADAERRELQAQLLRRRQLVGMLTAERQRLSIAHPVTRRDLEESIRFLKKRLATLDGELARLVQRDHGELGRLLKSVAGIGPTTLVTLIADVPELGRLSRREVSALIGVAPFNRDSGHYRGRQSTWGGRAAVRKTLFMAALVGTRHNPVIRAFYQRLLAAGKPKKVALVACMRKLLTILNAIARDRVPFNPALHHA

SEQ ID NO: 495608 - protein, 326 aa, unidentified
MATIGIDVSKKKLDLCWLRDAQAGKVKTRVFPNAHDHYPALLAWLLKQTNEEAGDLQVYLEATGIYHEPLAYWLHQSGVTVYVLNPARVRYYARSLGDQGKSDKKDSKRIAYFAQANPELTPWQPEPEEVRTLRQLAKRLETVQKDIQREQNRLEKAQFNRDTQAEHSITHVLALLRREAKRLIKEVDDHIDRHDGLKRDRRLLESIPGIGEVLSVHLLVTLRSRRFKSGRQVAAFMGLVPVEWTSGSSVRHAPRLSKNGGPALRQKLYMGAVVAMQHNPSIRRQYQRLCAAGKRKMSALGAAMRKLVHIAYGVLAHQKEYEPQPT

SEQ ID NO: 495609 - protein, 417 aa, unidentified
MEYARSTLRAIPVNGLACGIDWAREDHAVAIVDGGGRQVHRSIVEHSSAGLRALVTVLARAGVTEVAIERPDGPVVDALLGAGITVVVISPNQLKNLRGRYGSAGNKDDRFDAFVLADTLRTDRARLRPLVPDSESTVALRALCRARKDLVAHRVRVANQLREHLNRVFPGAVGLFTKLDSPISLRFLSRFDCQDRADWLTPRRLQAWLASAGYCGRTDPAVVFGRLSAAPRGLSAAAGAALIPITRALVATLDNLVKQIATLSQQIGQQLNAHADAHIFTNLPHVGTVRAARLLAEIGDCRGRFPTPEALACLAGVAPSTRQSGKMRSVGFRWACDKQLRDAVCDFADGSRRSNLWAADLYGRARARGHDHPHAVRILARAWIYIIWTCWQNDTAYNPAQHRALQTVLHQDQPPAA

SEQ ID NO: 495610 - protein, 314 aa, unidentified
MRIVGIDVSKDKIDAAIVAASAHRSFGTSDQEQQQMLAWLDEHEVEKAVMEATGGYERPWAKLLQGSGIEVRIVDPRRVRYYAQAAGQQAKNDRLDAEVIALFGEAFADEPGQLQDEDASELDQLVSARARLKAMAWQLATWTEHTPPAGIAEAYQAVATLLEQQVKRLDKTIAGKIDQTERFAERAVIIESVPGLGSGSAAGLIAWLPELGLVDNKAIAALVGVAPYDNDSGKHHGPRSIRGGRAKLRELLYLPTVGAATRHNPVIKAYYQRMIDNGKPPKVALIACMRKLIVILNTMITRGEKWDPTKHISP

SEQ ID NO: 495611 - protein, 400 aa, unidentified
MKKPCIAIDVSKGESHVESYLDLNKLFIKATKIKHDAEGFNYILDVVKKVEDKVGEKPVILFEATGVYHKTLEFYVGEQNLEYFVINPLHSAKFRKRELRSVKTDKRDCSNLARMYYNGLLMESYKEEEIYNELRQLNRYYETQVSHLVKCKVNFNEKLDIVFPGYNGLFANLYNDIPLLIIKKYNHPKNIVGKEISSIAKHLESKTTHRKAYCINVAEKLISFSKQCCPGCDKKSVDVDILLGMINELEYYQDLCEKTLNRIINLAKNLPYFNILHSIPGIGENLAARLIAEIGDITRFENTKQLIAYAGIDPVIYQSGQMSGEHLKMSKKGNKRLRRLLYLAITCMLRNKSENNSIRDFYEKKMQQTTGMKSMIASFACANKFLRTIYSMCINGTLYQ

SEQ ID NO: 495612 - protein, 322 aa, unidentified
MSVTVLGIDIAKQKFDVALLADGKTKHKACKNSVEGFEILMIWLEKQGIKKVHACLEATGNYGEALAMYLHEAGHAVSIVNPARIKGFAQSELIRTKTDKIDAGVIARFCLAMKPETWVPPAPEIRSLRALVRRVDSLIGMRSQEKNRISTAHESVIVLIKEHIVYLDHEIEKIRKQIADLIKQNPHLKQRKDLLDSIPGLGKATVPHLLAELDNLDKFAHVREIVAFIGLAPKETLSGSSIKGKPRLCKIGHARLRKALYMPALVSIQCNPVMIAFYNRLKEKGKNGKVIVCAIMRKLVHVIFGVLKSGKMYDPNYKPTFA

SEQ ID NO: 495613 - protein, 343 aa, unidentified
MKITTVGIDLAKNVFAVHGVNEHGRTVLKKVLKRNHVAEFFANLPACVIGMEACASAHYWARKLQAMGHTVRLIAPQFVKPYVKTNKNDAADAEAICEAVARPNMRFVPVKSIEQQSVLSLHRVRQGFVRARTAQANQIRGLLAEFGIVVPQGIGHLVRRVPQLIEDADNELIGSFRLLIQRLMDHLKELDRQVRELEAQIQAWHCSDDTSQRLARVPGIGPLTASALVASVGDAKSFSNARQLAAWLGLVPRQNSSGGKNVLLGISKRGDTYLRTLLIHGARSLLQVAKRKECKSGWLNGLLQRRNANVAAVALANKNARIVWALLVHGREFHPDYHAPATA

SEQ ID NO: 495614 - protein, 343 aa, unidentified
MSGAYEGRQIVGMDLHRRRSVLVRMSETGEHLETVRISNDPEYLREVMTRAGEAPEVVLEAAYGWYWAADALAELGAHVHLAHPLGVKMFGLRRVKNDERDAADLADLLRMGRLPEAWIAPPATRELRGWVRHRAKLVALRSGLRCQIHAVLAGAGVQVPMSDLFGVSGHELLTTAALTVESRSRVESLLRIIGALDFEIDLYTKLVASRLRTDPGYHAIQAIPGVGPVLAAVFVAEIGDITRFHRPSELASWAGLTPKHHESDTTVHRGRITKQGSRLVRWAAVEAVQRVPARTRLGQRRDRVAERRGHNIGVVAAARDLITLVFYGLRDHHVRCLPTKAAP

SEQ ID NO: 495615 - protein, 377 aa, unidentified
MKRIKFVGLDVHAETIAVAVAEQEGEIRSLGMISNREESVRKLVKKLGPVEQLRFCYEAGVTGYALYWQLTRLGAKCEVVAPTLVPVKAGDRVKTDRRDALKLARNYRAGELTAVWVPDAEHEALRDLVRAREAAKKDQLRARHRLSKFLLRHGRRPPVGVALWAVKYLEWVKRDVHFAVKAQEATLLDYLHEVEHMAARIVRLDSAIEEAVKVTPAKMRAVIEGLQALRGIAQISAVTIVAELGEVMRFTKARELMGYAGIVASEDSSGERQRRGGITKTGNTHLRRVVVEAAWAYRHRPAIGFTLRKRQKNLSEEVKEIAWKAQHRLHARYGKLLAKGKNKGVVVTAVGRELLGFIWAIGVQVEAEQKESLRQAA

SEQ ID NO: 495616 - protein, 343 aa, unidentified
MDYYVGLDVSLKQTSICVVNQAGSIVHEGVADSDPEAIASFVRSKAPGTLRIGIETGPTTTWLWTELKRLGLPVICIDARHAKAVLKMQINKSDRNDAAGIARIMQTGWFKEVRVKDLDSHAVKALLASRALLVKIKRDLENQIRGLLKNLGLVIGRAKFNVFAVRAEELIEDRPELVAAVRPLLDARKAIERQVGDLDRKVHKLARHDVQVRRFMTVPGVGPITALCFKATIDDPTRFRRSRSVGAYVGLTTRRHASGEVDWSGRISKCGDAMLRMYLFEAAGVLLTRVPKWSGLKAWGAKLTKRNGLRKAKVAVARKLAVILHRMWIDGTEFDWSTKKASA

SEQ ID NO: 495617 - protein, 380 aa, unidentified
MRQVCGLDVHKDSVFVCILNENGIVFQEKFGVLTPELEQMLSVMLQYRVEEVCMESTSIYWMPVWRVLENYVSLKLVNPYFIKQLPGKKSDVKDAEWIATCLLKDLIKGSYVPEDLIQQLRQYDRRISDLNAEIVRKLGKLDAALQRCNIRISNYVSSTDGKSYKEVVRLISEGIRDPSELTKVIHGRTVNRVGRDVVLASLTGVISDTDIDVMRQLREEVELAEKHKDECQSKMDAICRQYFPDQLKNLQTIPGIKGRSATAIIAEVGTDMSSFEDAAHLVSWCGLKPRNEESAGKIKARSITHGNRYLRKTLIECAWAASKTQDCYFSKFSYHQVIVRRKSKMKVQVAIARKVLTAVWYVMHDNVAYRDFTADIVPTE

SEQ ID NO: 495618 - protein, 295 aa, unidentified
MPPSIGIDVSKKKFDVALITAQGKYRCKVFDNNASGFKAFLDWIQAHVPEGQAQACMEATGVYHEALANFLFDNQVTVFVVNPLRVKRFVESEGLRNKTDEGDAKALARFASKNELDAWEAPSKSVRELQALVVRLESLQTMRQAELNRLDIAHTSVRGSIEAVVAALDKEIEAVRSLIRKTIDDDPELRQRNDLLDTIPGLGDRTIPSLLAYIGRPERFKTVKALIAYAGLTPAIRQSGTSLDKKKGLHPAGHRDLRQALFYPAMAAGRYGAVLKVSEDGLITFYDQQEKIWDI

SEQ ID NO: 495619 - protein, 357 aa, unidentified
MSVKETIMRQLVRIGMDTSKKVFQLHGVDAEERVAPSRKLSRHQMIRFFEKLPPTVIGIEACGASHHWARTLGALGHEVRLMAPQLVKPYVRRSKNDAADAEALCEAMSRPTMRFVPVKTVEQQAALMLVGMRERLVGRRTQLANSIRGYAAEFGLTAPLGLSRVEPFLRQIASEDILPSLAREMFAQMAEEYGALMEHIRELDEKLATWHRSQEVSRRLSGIPGIGPLGAALLLMKAPDPHLFRSGRDFAAWIGLTPRDHSSGGKVRHGGITRAGDSRLRSTLVVGATTVLRHVRQNKQSRLATPWLVSLLGRKKAKLAAVALANRMARIAWKLMTSGETYRKPVAVDAMTAATAS

SEQ ID NO: 495620 - protein, 348 aa, unidentified
MNATRKSVVGVDTAKSVFQVYTVEQETGEVINKPIKRAQFLQWFANRAPCLIGMEACGGSQHWARELQKLGHEVKLMSGMMVKAFVCGNKNDAADARAIYMAAKQPEVKAVAIKTEAQQAVLAMHRIRQQLVKMRTAQMNALRGLLAEYGEVFGTGRKAFDTGIKAALERLAERLPMPLIDTLRDQWNELARLDERIARIEASLRTWLREDRAAKAIAEIPGVGLLTATAAVAAMGDAKAFRSGREFAAWIGLVPGQTGSGGKVRLLGMSKRGDTYLRTLLIHGARAVLQHAKTPAPWLQQLSQRRPPNVVIVGLANKMARTIWAVLAHERAYDKDHVSLRPHAAAVT

SEQ ID NO: 495621 - protein, 425 aa, unidentified
MHTKQYSKQQEKRKRIGNQTLVIGMDIGSEFNAACFMDKEGNVLGRYPTVYNSRKGFDYFQTMVMKIKRKHKLTDVLIGMEPTGHYWRKIAFFAKEQGYEVRFVRTTAVKHQRGLDESSPAKSDSKDAFTIANIVREGKYIDTVIEESVFRQLRTLAHARERILRYIVGSTHGLQAHLNDYFPELRKLFWSMKAKGLWSLLETYPFPEDVRSAGVAAVVTLLAKGRGKKRHIREQAEQVVKAAAESAGLTAIGRADRARLAMYLDEIKRSDARRQLLEREMKELLKEIPCAQYILSLPGMGKVGCAVFLGELGNPEYFNNPRQIIKYAGYDPKENDSGLRVGRKIISKKGRWLLRKCLFFMVLRLVQRSSFFKTYYEHKKKGFDRPLEKTEALCAVILKLIRVLFALIRDRRMFTEELPRCEKAA

SEQ ID NO: 495622 - protein, 354 aa, unidentified
MSQTLNAAIAVVGIDIGKNSFHVVGQDERGAIVLRQKWSRGQVEARFANMPPCLIGMEACVGAHHLSRKLKALGHDARLMPAKYVRPYSKGQKNDFRDAEAIAEAVQRPTMKFVATKTADQLDLQALHRVRERLVSQRTGIINQIRAFLLERGVAVRQGQRFLRAELPRILATPPEVLSPRMVRVIENLAGDWHRLDERIEGLSGEIGTIAREDAGCERLMSVPGIGPIISSAMVAAIGTGDAFSKGRDFAAWLGLVPRQMSTGDRTILGKISKRGNRYLRVLFVQAAWVVLIKPTVWERHGLKPWIDAAKKRLHHNVLAIALANKLARIAWSVLARGRAFEVRKIDEAANQSA

SEQ ID NO: 495623 - protein, 323 aa, unidentified
MQGKVKKSAAAKVNVGIDVSKSRLDVALAPVNISFSVSNDKKGHKALLRRFKDYEVGRIVIEATAKYHLCVHRHLHEAGFAVAVVNPYRSRKFADVLGQLAKTDRIDAQVLAAYATLIAPEARAPASNALMELAEFLHARNSAIALRAALKARLKTVLSRRLQRELKRQLRLKGAHVARLDVTINAIIQDDPELARRFEILTSIPGIGRVVAAAMVGLLKELGQCGDKQIAALVGVAPMNWDSGVMRGRRMIKGGRKSIRNLLYMAAISAGARGSNPDLGEFYRRLTAAGKAAKIAIVAVMRKLAIIANTLIREDRIWQSVRP

SEQ ID NO: 495624 - protein, 353 aa, unidentified
MALNVLYARCAGLDVHKVTVVACLLLTTASGKVSRQVRTFAATTLGLQELANWLASFGVTHVAMESTGIYWRPVFNLLESRFEVILVNAQHMKAVPGHKTDVKDSEWIADLLRHGLLTASFIPPKPIRDLRDLVRSRKTVVQQRAQAITRVQKVLETANIKLSSVATDVLGKSGREMLEAMLCGISDAETLADLARGRLRAKLPALREALDGRVEATHRVLLRHLLDLIDFLQGQIDTLSLDIEQRLAPYQNPLALLMQLPGIGRIAAAAILAEIGTDMGCFASAKHLASWAGVAPGNRQSGGKGPHQQGQYAPAGRVGRSCLGHFPYPRQLPLGAVSSPGSSHRQETRHCRR

SEQ ID NO: 495625 - protein, 346 aa, unidentified
MEYIALDVHKHYTWARVENDQGHKLYECKLAHGRGTIKNFTKQWSPGTPVAVETVGNWYWVVDEIEAGQGSPQLVNARLAKLMIGSVNKSDKLDAKGMNRLQRVGTLPTVWIAPSAVRDARELPRTRMVLSEQRTQFKNRIHATLGKYGLKVEGVSDAFGKRGRQIIEALFSKLPPHTQQALRLMLDELDHVEANLKTIEGQMREAFAPCLETTYLQSEPGVGEMLAVVIWAEIGTIERFGRAEQLASYAGLVPREHSSGGKVRYGRVRKDVNLYLKWAFTEAANSAVLNRERCQYRHVARLYENVKTRRGHGKAIVAVARHLAEAAFWMLKKGENYREPMSSTQG

SEQ ID NO: 495626 - protein, 361 aa, unidentified
MRIIGCDLHARQQTLAMLDTATGEVVNTTLTHEGNNVREFYSTLPRPVSVGIEATGSMQWFVNLMEELGIECRVGHPATIRAAEPRKQKHDRRDADLILKLLMENRFPAIWMPSKELQDLRSLLRHRHQWVRMRTRIQNALQSIALANGLRRGPWLWSHDGQNRIAALPLAPHTAYRRRELQAMYEKFEAEIEKLNQRVEEQAGGRAGARLLMTHPGVGPVTALATEVFLGDPARFADSKALASYAGIIPREYSSGGRQRLGGLSKQGNPLLRFLWGEAGAHAVRRDPELQRFYRRKLMQKGLGKASVAVARKLGIRLWIMLRDQIEYNEFCRRGQKQQKSSDACAGMPETPIWCDQSPAD

SEQ ID NO: 495627 - protein, 421 aa, unidentified
MKGLRTKRIRTVREGALMATVDIGMASNTGYCITADGRDTKPFKFSNTREGLDKFWDMITISKKRFCCNEVIVGYESTGPYAEPLLHYMMSKPVKIVQVNPMHTKRMKEVNDNSPLKTDDKDPRVIADIIRLGHALTVVVPEGDAAYLRRLNNARERHIGERTALFNQLQQLVFLIFPELKTVMKNIKVKTAIHVLKKYTTPDTLGKLSIEALGEEMRKKSYGKFGIKDAEALINHAKNTVGIKEGIAGLVLDIRHILMQLEMIDGFIAEIEAEMVAILLRIPYSARLLSIKGLGTVSVAGIIGEVGDFMKFNTQSEIMKLAGLDLYEISSGKRRGERRISKRGRSLLRKILYYTAIQTIRKNGIMYEYYVNLTSRGMKRIMALVAIARKLLRIIYAIVRDDSEYKADYGLLKRKVIKKAA

SEQ ID NO: 495628 - protein, 351 aa, unidentified
MPRTSTVHAVTTIGMDMGKNTLHMIGLDKRGAIVLREKVSRGRIASRLANLPSCLIGIEAGLATHYVARELAALGHDVKQVPPTYAKPFRQGHKNDFRDAHSVAEAVQRPTTRFVPAKTDEQLDLQALHRVRSRLVSERTAVINQIRGFLLERGIIVRQGLRFLRQALPDILAKRTDVLSPRMVRIVADLASDWRQLDERIEPVTDEIETLAKSDDGCRRVMTVPGIGPIISSAMVAAIGNGAAFARGRDFSAWIGLVPKQMSTGDRTILGRITKRGNGYLRMLFVQAARVILLRPGSWPKHSFGVWLARAAQRLHRNVLAAALANKLARIAWTVLAQERSYEARVTKAAT

SEQ ID NO: 495629 - protein, 317 aa, unidentified
MSVIYSRWVGIDVSRDWLDLHVLPAGTSYRIPYTEGEYESWLQTQGGASDEVLFILESTGGLEKPLHEAIERQGYRVARVNPRQVKDFSRALNRAKTDALDAQTLAEYGRRMEPATTPLLCEAQQTLKDLVNRRRQLVEMKSAEQNRLSRAPQRVREDIEAHIEELQGRIQVLDEEIAALQTQNAEFSHKAKLLTSVPGVGMVTASVCLALLPELGTLNAKPIARLVGLAPLNHDSGQKSGKRMINGGRSQVRCALYMAALVGIQHNPVLRAFYQRLLDQGKVKRVALVAVMHKLLTILNALIRTNKPWQQPEPEAV

SEQ ID NO: 495630 - protein, 363 aa, unidentified
MMTEHPSALEVFGGVDTHSLTHHAAVVDTLGRELGDREFPATVAGYEALKDWLAGFGQLVKVGIEGTGSYGAGLMRVLTGAGIIVVEVDRPDRTARRSLGKSDPLDAYAAARAAASGRATGTPKSRDGIVESIRCLRLAHRSAVKARTQCINQIRALLLNGPADLHEHLAPLPRAKMVKSIARLRPATNLTDPHVACKLALRSLARRHASLDEEVSQLHRGLSELTQEAAPQLRDRPGVGVLVAAQLLVTAGDNPDRLGSEASFAHLTGVAPVPASSGKRQHRHRLNRGGDRAANNALYTIALARMRYHPQTRAYVERRTAEGLSKKDIMRCLKRAIAREVYRLLTKPADPPAWTITALPAAA

SEQ ID NO: 495631 - protein, 352 aa, unidentified
MYYVGLDLHKKYITGCVLDSQGAVVAEQRRLPPVLETLLGWLAPVGQPVAVALEATLYWAWLHDRLTAAGYQVAVAHPQQVKLICHARCKTDPVDARKLADLLRTDLLPAIWIPDAATRARRTVLRGRAWVVRTRTRVKARIQAYLAAENERVPVSDLCSRGGRAWLATVALPPEVRQQVDRLVALVAHLDAQIAEQDRGVRELAQATPEAALLQTIPGIGPFGALLLLAEIGTIARFGSSHELAAYAGLVPSTRSSGGKTAHGSVGPAGSAWLKWLFVEAVQTLKRQPGPVRSQYERLLRAKGKPKATVAAARKLCCYVYWMMKEGRSYDDWLRQRHQREVRPIQAVASVA

SEQ ID NO: 495632 - protein, 392 aa, unidentified
MVTLTGHDSRILGIQFMHDFLLSKRKIELKVSVKYMTTQQRQNCLFVGIDVHKDTHTAVGISPFGEKLFEVTVGNYKPDFKVLEEKVEEKKGTLSPYIGLEDVRGYGERLAGYLYERYPVYHVPSILVDRLRQNATHPEKSDSLDAQGVAKVMIQSIDTLLPYTISQESQKAKQLKEISIDREDLVLERTRLKNQVHTLLYRIYNTEYEQKFKDPFALKALRFWRNAKPNCDPFLLKTMKRKVRRLLDIHVEVADLEKDMKILLDAGGYTIQTASGCGMVLASTIIGEIGDINRFTSPGALSKYAGCSPRERSSGKKVRHVKTRSGNRRLNCAFHRMALSQISRMGNDRARVYFKRKISEGKSKSQALVCLRRQMVNIIWMMLKYKTTYRNA

SEQ ID NO: 495633 - protein, 358 aa, unidentified
MAVNEGTRRIVGGVDTHKDLHVAAVVDEQDRVIGTRSFATTRQGYRQMLAWMRAFGDLQRIGVESTGSYGAGLLRFMQQAGIAVLEVTTPDKQDRRRRGKNDDLDAQNAAHAAFAGQRTVTPRSRDGMIESLRVLMACRKTAVSARRVALQMIHNTIVCAPDGLRDQLRSLTRMQLVRTLAAWRPDLTAYRDLDSAYRIGLKSLARRYLELHDEIADLDVMIAAIVDELAPNLVARNSIGHIGAAQLLLTAGDNPERLRSEASFASLCGVSPVPASSGKTVRHRLNRGGDRAANSALHIIAIGRLRTDQRTKDYVARRVGEGHSKLDAIRALKRYLAREVFTLITQRRREINATRIAA

SEQ ID NO: 495634 - protein, 419 aa, unidentified
MSFKIFKFNCCGLDVHKTWIYACIGITDSNNRTEYKQARFSSFSKGLHQLCVWLAKYNCNDVCMESTGKYWIPVFNILEQHKIRVTLSHPKYTKPMKGNKTDRKDAKWICDLYMCGMVKPSFIPPADIRELRDLVRYRFKLTCMITGEKNRAQNCLTVSNLKLDDVFSDVFGKSSRSITEQILQHPGEKFDVSPFVDSRCKTPIEEIQAAVDGNISKEQAVKLRQCLDHIDELQKHISEVEQEILRLSDKYEAALNLIRTVPGFDKNPMTAIQVLSEIGGDMSVFPTAKHLVSCAGCCPRNDKSDRKIKSTRISCAGSYFKPVLVQIANALIKSKKHFEFTTRYKRIKTRRGHKKAIIARCRMILTAIWHILTDLKPYTSDGFLESRPVKKEKILTTSQALNLLRQRGYLIKDEPSPVS

SEQ ID NO: 495635 - protein, 350 aa, unidentified
MCSLPVFVGLDYHDASVRVCVLDTDGRELANADRCNDWKAIAEFADRFGRPVRAAIESCCGAADLAEELVSCAGWSVDLAHPGYVQRMKQNPDKTDYQDAQLVADLERIGYLPRVWLAPQHIRELRQVVRYRLQLTEQRRATKLRVRALLREQRCRAPQGVNAWTKAWDHWLRHSAELSAEGRWVANQHLQELACLVTRIRQVEKRLERLTANDVEVQRLQQQVGIGPVTAWTIRAEIGHFDRFRTGKQLARFCGLSPRNASSGQRQADAGLIRAANPALRAVLIEAAHRLVNYDRYWQKFAQRLRAAGKPGSVVAAAVANRWIRRLYHEMKTPSGELAVAVRSARSEDS

SEQ ID NO: 495636 - protein, 390 aa, unidentified
MQPLLYCSCGVDVHAEMIETCIVRGLEDEPEIIRKRFGTNPEDLKGFAAYLMENDCFSIAMESTGVYWRPVYEAIEGNCAHIENLVVTNASHMRNVPGRKNDEDDAEWIATLLQHGLLSPSFIPERAFRNLREASRLYKKLVGERSRYTNRITKLLEAHGFKLSLVLSDILGVSGHNILNVLANKGSLSVQDVAGCLRGRTRNTPEVIHAAVSGSLTPHEQSMLSLLLIKFDSANREIEAVKSLMLDMASPYRWALDTMCSIPGIGIISALMTLAEISATPHLYFSSAPKLCSWAGLTPRNDESAGKIKSRRIMPGNPYIKSVLCQAAWASVKVRDNPLRDWFWSHRGKLGQKKAIIGVARKILTIIYALLRDNTVFNPHYFRSKRLVTR

SEQ ID NO: 495637 - protein, 370 aa, unidentified
MQTVRSFVGMDVHKETISISVAEDGRNGPVRFIGVIPNQPDDIAKMAKRLAKRGELDFCYEAGGCGYNIYRQLTTLGHSCTVAATSLIPRKPGERIKTDRRDSQKLAILHRSGDLTRVWVPDATHEALRDLVRARVDASMHLMRARQQLLAFLLRHGRSYPTGKHWTQRHRSWLAGQTFQQEVHRIVFQDYVETVWTAQERRDALIERIGAMTANWSLGPLVEALRGLRGIDLLSAATFIATTGDLSRFESPRMLMGYLGLVPSEHSSGGSIRRGGITKTGNREARRMLIEAAWSYRYPARIAKEKAEILVRLPKNIRDIAWKAQTRLCTRYRTMIARGKKPTVVVAALARELAGFIWAIGQEMRTQMTT

SEQ ID NO: 495638 - protein, 366 aa, unidentified
MKKISTVAKRGNEIFKEPKLTVGLDLGDRTSHYCILDEAGNVILERSLPTTPKGIQQVFSKIPRSRIALETGTHSPWVSRQLTPMGHEVIVAHARNVRLIGESSRKDDQLDARTLARLARIDPELLGPVRHRSAKAQIHLTVIRARAALVSTRTALVNAARGLTKSYGERLRKCGTGQMSREIAKGLSQELRDALEPLLEEIESLNERIAEYDRRIEKVAKEVYPEAALLQQVKGVGTLIALTYVLTLDDPHRFRRSRDAGCFLGLRPGRRNSGMSEPQMHISKEGDRYLRTLMVQGAHYILGPFGQDSDLRRWGLKLAERGGKNAKKRAVVAVARKLAVLLHKLWVSGEVYEPLRNNHQVVSAVA

SEQ ID NO: 495639 - protein, 417 aa, unidentified
MHLTASEARGAVLGLDVGKASHWACLLTPDGEVAVNRPVENTERALDDLFSQVDASTLVVVDQVRNIGALPIARARATGLPVAYLPGIAAHQASRLFSGDAKTDERDAHVIARTAMGVPDALLPVPERDEALEAARSLASQRDHLVTCGTRDKNRLRSILLESCPAFEALVDPSDARWLRVLERLGGPWGIVDAGRAAFGALTRGADRSAMAAAWDAVASSTRPAEVMVKAENPQVSMLARRISEAMSEVARLDREIAGLLEEDGTYACLMTVPGIGPRTASELAIAIDISAFPDHDHLASYCGVAPRNRQSGTSISSVTASRQGNKRLKNLLIFSCNSLVRSKGRFGEYYRSCRARGMCHGEALKAVARKRLKVIYAVMRDKAPTRPSPAEIEESCRADGLAPAWRESRSLNGENR

SEQ ID NO: 495640 - protein, 352 aa, unidentified
MHIIAFDSHKRYTVASVQDIGGRIIKEARINHGRGNILRFLEQWDKGSPVAVETIGSWYWIVEEIEHAQMHPLLVHARKAKLMLGMINKTDKLDARGLNKLQQTGTLPTVWIPPLEIRDKRELPRTRMVFAYQRTRLKNRIHSVIDKYGLQYKFTDISDIFCKKGRKLIKESLVLFPEQTRYTLEALLDHLEEIERQISKIEKRMKEVFHPNEEIKLLMTMPGVGFILSVVISLEVGDVSRFKGPEQLASYSGTVPRVHASGDKVRYGRLRPDTNRYLKWAFSEAGNSVAVNEKKWPYRHVSKIYRRVRHRQGHAKAVGAVARHLAEATYWILTKKQAYKERGVSRVSITEA

SEQ ID NO: 495641 - protein, 343 aa, unidentified
MTKLNVIGVDLAKNVIRISVLSPSNRELRNSALTRRKFSEFLGRQRPSLVAFEACATSHYWARVAQRHGHEVKIIPAKAVFPFRQGHKTDENDALAVAEAARRPNVKLAPLKTVEQQGMQAIQRSRELLVHERVSLANHLRGLLMEFGMVIPQGFASLYRLLPEILEDGENELPDLYRPTLNLLYGRLCDLREDLERLNREIEVLVQANPVCRRLTALEGVGPIGSVLLYATLGTGEAFTNGRQFSAYLGLTPKQFSSGGKVNLVGISKRVANRRLRAVLITGARAYVYHMKEPKTAKDRWLWAIVERSGKCKAAVALANKNVRTAWAMLTQNTEYQHYPIAA

SEQ ID NO: 495642 - protein, 348 aa, unidentified
MMIIGCDYHPGFQQIAFVDTETGECGERRLTHREEAEQFYGMLKERSVRVGMEASGHARWFERLLSDLQFELWIGDASEIRTKRVRKQKTDRQDAQLLLRLMIEDRFPRIWVADAENRDLRQLLWHRHRLVQMRTRVMNQLHVVALNEGLRRKKALWRPAGRNQLESLILAPWASRRRQDLLDLLDQLSPKIQELTRALEDEVEKRPVTRRLMTHPGVGPLTALAFELVIGSPERFHCGKQIASYVGLVPSEESSGDRRRLGHISKQGNSLLRYLLVEAAQVTVRSQQHWRSKFFHLAMRRGRKIAKVAMARKLAVHLYWMWRQGWDYGQFEKLGSYAGEPGNRQGVQ

SEQ ID NO: 495643 - protein, 371 aa, unidentified
MVWQVRSTTNQILELADQLVVQGIERVVVESTSDSWRPFVYLLEARGLVVWLVNARDARAPAGSSQTDKLDAVWLCKLNERGMLRRSFVPPAQIRRLRDYTRLRADLTQDRSRHKQRLEKLLEDALIKLGTVATDIFGVSGRAMLEALIGGERDPKALAELARGRLRVKHAALVEALTGQFTEHHAFVARMLLDQIDTLGEQIQRLTAKIEQTIAAIPAAMPPAGGPGGGPGRPVHDAIGPVRSVPAAVDPQTGEVLAAALPVVDRLDEVAGIGRHAAQVLIAELGLDMDQFPTPGHLVSWARLAPRTIQSGARHRSGATGKGNPYLKAALGEAATAAAKTDTFPWASATAAWSGASARARPWSPSPAPSW

SEQ ID NO: 495644 - protein, 373 aa, unidentified
MKQAIKELGCGKGVVSVGVDLGDRWSHWCALSSDGEVVGRGRVATTADGVRERAQAWLGARVAIENGTHSGWVSRALTAAGCVVTVANPSRWRGTAHSSKNDANDAEALARVVRVDPRLLFPIRHRSEQSQQDLAIVRCRAQLVKTRTLLINTVRGTVKSLGHRLPGSDAHYFCGKTWPHVPEVLRPALAPLYATLATVTQQIAALDRAIEQLSTARYPETKRLRSVPGIGPVTALTYVLTVGSRERFASSREAGAYLGLRPKQRQSGARDPDLGIAKNGDRYLRSLLVECAHHVLSRGPDSALKRWGQILNSGGKGAKRRALVAVARKLAVLLHRLWVTGENFQPFPAQTVETVDANGRAHRSHSTAAACMG

SEQ ID NO: 495645 - protein, 344 aa, unidentified
MSKQVVRGGDVAELLERFARLREKARARTGKVFPFVVIQEAGLDGFWIDRALQNEGIESHVVDPASIATSRRRRRAKTDGIDGEALVRALLAYKRGEPRVCAMVKAPTPEEEDRRRLCRERTVLIGERVQHVNRVKGLLFSQGISGYEPLRRDRRERLDTLQAGDGRLLPDHLKAQVCRELDRLELLLEQIKAVEAERDVLLAAQQVAAPAPAAMLLDIKGIGPEFAAILWSEGLFRHFDNRRQVASYAGLAPTPWQSGSVDREQGVSKTGNPRLRTTLIQLAWLWLRHQPQSALTLWFEERVRRNGGRLKKTTIVALARKLLVALWKYVTAGIVIEGAVMKRT

SEQ ID NO: 495646 - protein, 482 aa, unidentified
MKKRNIYQNQSQELLTLFEEAGNSAKVMCVPIDYAKTDHVVMFCNGHGSIVRKPFSVKNSPLGVDYLTDQVIRSCKSRGISKRHVFFGGEDVGSFAANFVTTLRSQGWLVAGVNAHDAKKQRANLQASTDRLDLMGIASMLLNRRANSCPAQSGIYWNLRTVVRHRQKLVKLTTEVRNRIHGVVDRLFPGYLDEEKSGISPFSKSSLWLMQARFSTPQIRRRKRSTLIKGLRKLGAKNPELTAAKLQQYAAQVLKPPQEYIATLQFSLAQHVKHFSCLQDNIDQLEKEMAVGLAQTQGAFLTSFRGIGIVLASGVTSEIGNPYEQAPLNNLVSYTGIIPRVKQTGGPQGESYSGKVSKRCNRILKNYVVQSASHLGLHGPQELMADYKRREAAGQHADFGMGRRFLRIAMCLMRTSQIYLPPRLREPEAKLQERADYYLMNWPNLHEKWRKSGALEVAFDKNMPLGQWRNIVQQLYKIKLAL

SEQ ID NO: 495647 - protein, 401 aa, unidentified
MESTKELRVCMDIGSNQHSVIVGLSTGEILERFEMSHTTKGIDDFFEKIAAYENDYALPVSIAMEAYNGHARPIDQYTLSKGYKLFNVNNHKLAQFKKIFPGPAKTDAIDTQKMFELFHLQSHLPLAKNVLQEVIPIDEVNIKLKRITRRRRSLVEEKKRVINRMQADIKAVSPGLLNITKNADNLWFLRFISARTDLKKLAGMRKSGLEGISGVGNVYLRIIEAWQKTAGFSADVDWVGDMIIRDAKRVLELKAEIKRLEQHIEEMLPDSEMAQRLKTIVGFGSVSAGALAGEIGTMKRFNSESGLALYLGMAVLDNSSGQYSGVKRFQHVNRNAKNTMMSAVARHIDHCEESKKYYNKKRCEGKKHNQAVRSMGRHLVRVMWSMLRNHRDYEMRKIGNS

SEQ ID NO: 495648 - protein, 415 aa, unidentified
MKEENKKVKRYYLGVDWAEEFHQVWVSDPEGKKVVEMKVLQQSEAMSEFGAWLHQRKAEEIELWAAIEKPHGRIVDFLLNHAVLVYPVNPKALDRARDRFRMSQSKSDSFDAYVLAEFLRTDHVHLRALEPSSVQAQELKMLSRDHERLMRQKTRLLNQIGITLKEYYPRPLEVFGDLESKIARDFLKAYPTPQALSKLNRRGWNRFAQRDHHLSEERSTELWEKLGKAQLPIPEHVIRAKAKLLLALVVQLEALLPEVESYSEEVERFFASMPAAELVKTLPGGKSGTTVAKLWAELGDANNRWQSFRHLQAEAGEVPVTQSSGKSRVVLFRFACNKHLRHAIYWFSFNSLRRCEWANKYYREQRAKGHSNPRALRALGAKWLKIIFVMWRDHKPYDENYHLANVARQRMRQAA

SEQ ID NO: 495649 - protein, 361 aa, unidentified
MRHLGARMLVDIESPANREPSMSEITTIGLDLAKHVFQVHGVDADGAVVLRKQLRRSQVLSFFSRLPRCVVGMEACATAHYWARELDALGHEVRLMPAQYVKAYVKRNKNDAADAEAICEAVVRPTMRFVPVKTAEQQAALLLHRGRERLVRERTALVNALRGHLAEFGVIAPLGLCNVGKLIAIIRDESDARLPALARQVLQVLATQIEQLEAAVAALEKQLMAWHKSNAVSQRLATIPGIGPIIATAIAATVVEPSSFRSGREFAAWLGLVPRQNSTGGKNRLGGISKRGNQYLRRLLINGASANLLRSKATNADPWVIGLRRRRPSLVVAVALANKTARIAWAVMHRQEDYQRMAAAA

SEQ ID NO: 495650 - protein, 419 aa, unidentified
MSNSNISRRLAQVKSGTLHAGVDLALESNVIIVLDEKARQCDRFRFPQDIDGYKYMHERLKKVCQKQGASQVVIAMEPTNYFWKLLANWLEQNQVDYHLVNAYTVNKHREGDQIDRSKDDPRDAFVIGDLSRTGKYTETQLPRGYYAELREYATLYYQTMKNVHRAKSILWGLLGQVFPELSRAFKSFSGATITALLKTCPAAVSIRALSEEDFIAKVTTAFSGKRLCRSKLRQAYRLARTSIGLVDGIQANALAIQIHLSHLETLQKEIVQIITALKSCLQQVEAAQYLLSVKGLNTLSVALILAEIGDPDRYRSASQLVKMAGIQPVPNSSGRKQRSSTPMSHQGRPGLRSTLYFACLRLTQVDRRFQEVYHYLQNRTKNPLTKMQALGVLMNKLLHILWALMHQKIFYNPNFFSAV

SEQ ID NO: 495651 - protein, 410 aa, unidentified
MDKLLVGLDVSLKDYKVCLMDMEGERVGKGFALKNNGEDSQVLVERIVQAAVKIKAEKVLIGYESTSVYGWHLQYFLADAPELAQFSPTIICFNPSLIENHKKSIGDLPKTDRMDAFVIADRLRGRLPKSASPDFRYLALQRLTRHRFHIVECIVREKNYYLSNLFLKCSGLCQTGVFANNFGAAATGLVDELDDFEQIADMPLEELVVWLVEKGREKFDNPEETSKKLQAAVKTSYRVHPSVDNSLNLVLRSCLSNIASLEKQKKAIEKSIKEQVKFFEREYICLKSVKGIGEVIAAGLIAEIAGISRFEDDDALAKFAGIYWNKRQSGDFTADESELRRRGNKYLRYYFVMAADHMRIWLPEYRDFYSRKFKESKTHHHKRALILTSRKAVRLVFALLRENKLYSPAH

SEQ ID NO: 495652 - protein, 341 aa, unidentified
MEQVTTIGLDLAKHVFQVHGADAAGHVLFRKRITRAKLLGFLAAQTRCVVAMEACAGAHYWAREIAKLGHHVRLIAPAYVKPFIKRQKNDAADAEAICEAAQRPSMRFVPVKTEEQQANGMVFRARDLLVRQRTQCVNALRGHLMEYGYVFPKGITHVEALVALVEDLQSSLPDSVRVILKLLVDTFTALEAQISALDAEINQRSKSDPTARRLMTIPGVGPITSTAITALVPAAEGFPAGRDFAAWLGLTPLQKSTGGKQKLGAVSKRGERTIRRLLIIGASAVVQQASRRGAPKGSWLAQMLARKPKMLVTVALANKMARIIWALLVKGGTYRTPIAAA

SEQ ID NO: 495653 - protein, 354 aa, unidentified
MITIGVDFHKRTSTYNVRDENGKQLKRSKLENRPELITEFLQQFPGPKRLAMEATRNWGLYYETVKPHVDEFLLGHPRRMKQITESQTKNDPKDADLICQMALSPFFPKAYVSSLDSRQMRSLLRYRHFLVDQRKSIRNQIQILLDRNLWPFQRPQNFKDPFCQRGLTWLRDVALPERERFILNGSLQTFQQLSQKISELESFIETQSLDHSDLPYLRRVPGFRKSKVNAYIVLFELVDIHRFRKAKNFAHYAGLIPSEHSSGDKHRTGRLVKEANHFLRTAFIESTLAALRQDKVLKVYYQTVKQRAGSGAAIIACARKLSYAVYHVLKSKTDYRPFNPAATTSHPLSIPQKG

SEQ ID NO: 495654 - protein, 340 aa, unidentified
MEKLHIVGVDLAKRVFQVHGADKNGHVLFRKKLSRPQFQRFLASTPTCVVAMEACSTAHHWGREAGSLGHTVHLIPPGYVKPFVKRHKNDAVDAEAIVEAALRPSMSSVAVKSKEQQAQAVLFRSRHLYLRQRTQLINALRGHLAEYGVLLSSARASVARMVSACCEYQEDLPTPVFDMAQRLAKDIAELTNTVAEIDKALKKIADASSEARLLRTMPGVGPITAVAIQAFCPDAKSFDHGRGFAAWLGLVPRQISTGGKERFGRVTKMGQRDVRRLLVTGAMSVISAAEKKGRCDDPWLADMLKRKPRMVAAVALANRMARRLWAMMVTERDYEIRAVA

SEQ ID NO: 495655 - protein, 343 aa, unidentified
MNVYVGMDVHRKRSQVAIVDDAGVQQRNRNLANDPAKLLPVLGALAPGTPVAFEAAYGWGWLVELLEELELEPHLVHPSRCRAIASARLKNDKVDAATLAQLLRADLLPEAWIAPQQVRDLRALLRHRASLVRPSSSLKNRVHAVLADRGIGEDRGLWTGPGRAWLADLELPPIPRGIIQDCCGLLDALATPIGRLERQIAALAKPDPRVQALMTLPGVGKLTAMMLVAEVGDVGRFPSARKLCAGAGLTPRVRNSDRTVRHGHITKQGSPWVRGILQEAAQTAKRHPMFAGAYAQLARRRGNHVATVAIARRLLARCFHVLTQLEAQKVSEKASTGRARGCA

SEQ ID NO: 495656 - protein, 392 aa, unidentified
MVVSVGIDVSKDKHDCFIVSSEGEVLADAFTIPNTIDGFHCLLQRIQDCTHAQDKIKVGLEATGHYSYNLLGFLLDNGLATYVLNPLRTNLYRKSLSLRKTKTDRVDARTIASMLLSDVGLKPYTDTAYHNEELKSLTRYRFDKVKERAKLKSSIARLVCILFPELEKFVPSLHIASVYALLEEFPGAKQIAAAHLTRLKTLLETTSKGHYKRDMALEIRDASRNSIGSWMPAKSLELQHTIRLIRELDHEIAEIEEQIQSIMDELHSPITTIPGLGFRMAAMILAEVGDFTRFDSPDKLLAYAGMSPSTYQSGQLKNCYPHMEKRGSRYLRYALYNATKYVCHWNPTFAAYLAKKRAEGKHYNVALSHAAKKLVRLIFAMEKSRQPYCSAA

SEQ ID NO: 495657 - protein, 334 aa, unidentified
MKQVNQVGVDVDSEELVCAMQRAGQRMPLARFANTAPGHQKFIRWATKGGHSARVCLEATGIYSLEFALALDQAKKVEVMVVNPRAIKDFGRACMQRAKTDAVDAGGILDYLERMPFVAWQPPAPEVLELQAINRRIVQLNTELTREKNRRHASAFAGASADAIARDIEVNIHHLERRIERMHDNGLKLVRGVPALATKLAHLVSTKGIAEASAMRLLAELLVLPDDLTAPQWVAHAGLDPRPYESGTSVHRPRRISKVGNRHLRAALYMPALVAIQHDPNVKAFYDKLVAAGKKPMQAVVAVMRKLLHAIWGMLKHDQDFDGEKFFKIAKENA

SEQ ID NO: 495658 - protein, 375 aa, unidentified
MSKVRFLGLDVHADTIAASVAEPDGEVRPLGIIPNRLESVRKMVAKLGPANQLKACYEAGPTGYVLYWQLTAMGVPCQVIAPSLVPVKAGDRVKTDRRDAAKLARSYRAGDLTPVWVPDAAHEALRDLVRTREDAKQDQLRARHRLNKFLLRHGQCPPEAVKKSWTQKYMTWMKEKVHFDQPALEATLLDYVHEVDHMAERIERLEKSIDVAIEKAPAEMRAVIEALQALRGVAKITAVSIVAEVGTLSRFEKPRQLMGYSGLVSSEFSSGNRIQRGHITKTGNAHLRRVIMEAAWAYQRRPWVGGALLKRQQGLDQEIKDLAWKAQWRLHHRYNKLAARGKNKNQIVTAVGRELLGFIWAVAVRTESRAAARVA

SEQ ID NO: 495659 - protein, 414 aa, unidentified
MLKIVYRVCCGMDVHKSFVVACIASTNEYGVTTYKSKRFSTFTKDLRRCADWLSENNCKDVCMESTGKYWIPIYNILEPTCNVVLAHPKYVKAIRGKKTDKRDAKWIADIFKHDLVAGSFIPPADIRQLRDLVRYRWKLTNFTTGEKNRAQNCLTVSNFKLDDVFSDVFGKAASAITTRILQDPTEKITDVSGFRTKGMKATNEQVLAAVDGEMCEEQAEKLRIIRSHMDSLELCKLNLESLILSTAEQYLPQLNLVMTVPGIQSFAAIGIISEIGVDMSVFPTSKHLCSWAGLTPQNNESAGKKKTTRISRAGAYIKPLLVQCALCAIRAKQFPELRNRYLALKKRRGHKKAIIAIARMLLTAIYNMLKKNETYNPEIYRKGDQPPAHREVSVEEAIFILQRQGYLVTAPPTS

SEQ ID NO: 495660 - protein, 422 aa, unidentified
MLEPAQDHQEIIGRIAALDIGKATLVCCTRVPGPGGTRRAQEVTTYSTMTRSLQAMTDRLLELGVTRVVMEATSDYWKPAFYLLEAHGFEVWLCNAKDVKHLPGRPKTDVLDAVWLCKIAERQMIRPSFVPPAPIRRLRDLTRYRAALVSDQSGEKNRVEKLLEDAQIKLSVVASDIFGVSGRDMMARLIAGERDPKVLAQLARSRMRSKLAQLEEAFVGNFTDHHAFLLTQMLGRIDRLGADIAGVEARIEAEIAPFASAVERLDEIPGVGRTAAHVIIAEIGLDMSRFPTAGHLASWAKFAPGVKESAGRKKGNGSTGHGDPYLARVLGEAAVAASKTDTFLGERYRRIARRRGKKKAIVAVGRSILVIIWHLLNDPDAQFHDLGSDFYDRRLGTERAKRNHIRQLESLGFKVTLEPTAA

SEQ ID NO: 495661 - protein, 342 aa, unidentified
MQVTTIGLDIAKNVFQVHGIDANEKVVVRKQLRRSQMIAFFAALAPCLIGMEACATAHYWARELTKLGHKVRLMPAKDVKAYVKRNKNDAADAEAICEAVRRPTMRFVQIKSAEQQGQLMQHRTRDLLMRQRTQLINALRAHLAELGIVAAKGDSGVKELLAIVADDGEARLPIDARASVIVLAAQLEAVQTVIGAIEKRIKTQHRSNEASQRVETIPGIGVLGATAIVATVADPTVFRSGRDFAAWIGLVPRQDSTGGKQKLGPISKQGDQYLRRILIVGAISVLRRALQNPGKYPWLTQLLARRPFKVVAVALANKMARTAWALLAHGGTYRAPELAEAA

SEQ ID NO: 495662 - protein, 399 aa, unidentified
MHYIGIDIAKKTHAVAILDERGEVKASPFTINNTANGFQKLLERFKKEGATSDDTLVGMEATGHYWIALFDFLSRHGYATAVINPIQTDAFRKVDTIRKTKTDDADAVLIANLLRFKAFEPSRLAEEATEALKQLTRFRMCLVKESTQLKNQATAILDRVFPEYHTLFHDTFGEASKALLEHCSTPEEILATDIRTLTRVLTEASNGRLGRAKAEVVKGAAKDSIGVSFASEALSFELKQIVGRLSYTWNQIDELDKEIERLLKDTSGKWLTTIPGIASNLAAQLVGEIGDPNRFEDAKKLIAYAGIDASKKESGTSINSPGHMSKRGSSQLRYALILAADSVRKFDPYFGEYYDAKMTEGKHHYVALSGVARKLAGCILALMKEERAYQPLPPRMQQA

SEQ ID NO: 495663 - protein, 346 aa, unidentified
MKDVQIIGVDLGKNSCSLVGLEHAGQVVLRRRVRRDGLTALLAKLPSAVVAMEACCGAHHLGRLLVAQGHEVRLMSPEYVRPYVKAQKNDDRDAEAIAEAATRPTMRFVALKSEAQLDVQVLHRVRDRLVGQRTSLMNQTRSILLERGLVVAQGRRALLDALQAVEEQGEASKLSGRVRLLLADLLDQWHALDSRIAALDEEFTEMARNDPAARRLATIPGVGVMNATALVAAVGDGRTFSRGRDLAAWLGLVPRQATTGGKPKLLGITKRGSKYLRKLIIQGARAALPSLARSPTPLGAWLRGLLARAHGNKVVVALAAKLIRVAWALLRHGTSWSWALSQLATA

SEQ ID NO: 495664 - protein, 346 aa, unidentified
MKHSVGLDVSVKETAICIVDEAGKVVREGKVATEPQAIIAFLSSAGVEYARIGLEAGPLSQWLVNGLSEAGLPVICVETRHMKAVLKAQQVNKSDRNDARGIAQMMRVGLYKPVHVKTLASQQARMLLTSRQLLRDKLQDMENELRGTLRNFGLKVGVVSPGHFEARIKELVAGQPPLEMIVVPLLTVRRVVREQLAKLDKMVLDQVRDDKLCRRLMTVPGVGPIVALTFRATVDQAQRFARSKTVGAHFGLAPRRFQSGERDYDGRVSKCGDAMMRTALYEAAQVLLTRTRTWSWLKAWGMQVARRRGAKKAIVALARRLAIVMHRMWVDGTEFLWRKEADTAAT

SEQ ID NO: 495665 - protein, 352 aa, unidentified
MLEAVFVGVDEHYKSIATKMAKGKENPIRKKFGRTKAEDRGFRKWVEDYAQGAQIILSYEAGPTGPRFARQVESWGWKCHVLAPHALDRSPKRRYQKCDYKDAERALEAMRNHYLAGSKLTECWLPDEELFDHREIVRGRVDLGDKIGKVKNQINTLCRRYGVKRPETMKTAWTKKHIAWLKEISISKTLNIYAGKQLASLMRQLDMLYAEEDILNTEIEKLSKKKRYNKTIRKLVQYPGIGLLSAMVYTLELGKAHRFKNRRQIGAYFGLVPKQDETGEQIRKGRITRAGQPRVRKILNQAAWAVIRFKPLGLYEWYMRVAKRRGKKKAIVALMRRLAVIMWHRMLETQAA

SEQ ID NO: 495666 - protein, 346 aa, unidentified
MNITTIGIDLAKEVFQIHGVNQHGKAVLRKQLKRAQMPLFFANLSPCLIGMEACGSAHHWARKLMELGHTVKLMAPQFVKPYVKTNKNDASDAEAICEAVSRPNMRFVPLKNVEQQALLALHRARAGFVHARTAQGNQIRGLLAEFGFAIRKGPWRIEQAVQPILEDAENGLPGMSRELFARLLEHLRHLDIQAKEIEKQIKEWHQNDADSQRLEAIPGIGPISASALVASIGDVHAFKNARQLAAWLGLVPRQHSTGGKQVLLGISKRGDTYLRTLLIHGGRSVLTAQKRWGRGEGSWSAALAKRRHTNVAAVALANKNARIVWALLARGQEYQPNHRASMRPAA

SEQ ID NO: 495667 - protein, 337 aa, unidentified
MKRYIGVDLHRTQFTVCVRQGGEGVEQRQWRIEQLPQFVEQLNGDDEVAVEAMGTTARFYDAVVGKVARVVVVNPHQFKVISDSVKKTDRGDAEQRALFLEKGLLPEVRMKAKPQRELQHLVETRDLLVKQRSALKAKINNLLAAQGINLKREALSSRKALQRVLAIEASAVVQLELRILVEQITHLNGSIAEVETRIEEEGEQLSGHKNLTSIKGIGSLSATVLLTAIGPIQDFADENKLAAYFGLVPKVQNSNESERSGRITKRGNKLAGTALVQCGLVAQRYSPYLKRFYERIKQRRGGGKAKIALARKLVKIVHDTLKNDWVFADFPSFTLAA

SEQ ID NO: 495668 - protein, 338 aa, unidentified
MIVIGVDVHKHSLTAVAVDEMGRLLAERTLESAEDGLLAWASQLDSERLWAVEDCRHVTGALERELVAAGERLLRVPPKLTAPERRVGRARGKSDSIDALAAARASLREPRLDRPRAGEERLRELKLLLVHRDDLVDERRRAQQRLRWHLHELDSTLAVPPGALDRAAQLERVSRWLARREQTVLVRIARDLVGRCRSLTRAILELERQLAAMTAQIAPALLELPGCGALTAAKLLAEIGPIERFQTDAQLARHGGVAPLEASSGRVRRHRLDRGGNRQLNCALHRIAVTQARVHPAARTYLERKQTEGKSRREAIRCLKRQLARVVFNTLKAGPLLT

SEQ ID NO: 495669 - protein, 408 aa, unidentified
MEVLYERCCGIDVHKKILVCCFKCGKKQEIRTFGSNNDDIREMAKWLLDGKCQMIAMESTSSYWKPLYNIFELSGLDVIVANARDIKNVPGRKTDIGDAEWIADLLKHGLIRASYIPSREQRELRELSRYRVSLIQERARELNRLQKMLEGGNVKITNVVSDINGRSSRNLLKALLENDEPLTEERVQGMVHGKMAHKVDAILKAMNGFLTPLQKQLIRRVVDHIDDMTKRIGEMDDMLSQYLQPYQEAIEKLDELPGIGKRSAETILIETGLDMERFPTDKHFSSWAGLSPGNNESASKRKRCRTVKGNKTLKTTIIQCAKSAKRCKSYFRAQYERLVVRRGANRATVAVAHSMLIAIYHILKEGSRFVDLGEDFYARFNKEKKISHHLKQLTKLGWIPNAAGAATA

SEQ ID NO: 495670 - protein, 316 aa, unidentified
MAQNDLVVAGIDVAKDKVDVCIRSLSLRRTFASTAEGRRELASWLRRQKVGKAVMEASGGYEREWAKALRDAGIEVRIVDPKRVRSFAQSAGRLAKNDAIDAEMIAWFAETFDQARGQACDAAREELVQIVNARQALLEQQTQMQNRCEHTVPVPVRKMHERLLKAIALEVDRLEAAITAMIKATPHFAEIAEIIESVPGITSAGLIAAMPELGQVSNEAISALLGVAPYDDDSGKRRGERQIKGGRRKVRNLFYMACLGAATRHNPVLKAFYRRLIAKGKKAKVALVACMRKLIVILNIMIARGEKWDASRYPVD

SEQ ID NO: 495671 - protein, 352 aa, unidentified
MNNIKFIGMDVHQATISVAVVSEGGAMLLETVIEAREKCIMEFMQRWSGSVHVTFEEGTWATWLYELLQPHVERVLVCNPRKNGKRRNKSDKIDARKLAFWLRSGDLSAVYHQDCGVRHVKELSHSYLALRKDVTRIMNRIKALYRSWGVACGGKSCYGQRQRSQWLAKLPPGGVRQRADQMYQQLDAVRPLLQESRKAMLAEGKKHMMCGRLKQIPYIGPVRATLLIALLQTPHRFRTKRQLWAYAGLGLATEVSGEYRMVQGKPQRHKTPLIRGLNPDCNHELKYVLKSTANRASGGQGPLHDFYVNLLAQGMRAEMARLTLARKIAAIVLVLWKKGVDFDPQQLKRQAA

SEQ ID NO: 495672 - protein, 410 aa, unidentified
MKVAGIDVHKKVLMAVVVDASRPEEKPARRRFATMPTELHRLLTWLREQEVEEAVMESTAQYWRSVWLELEPHMRLQLAQAFSNRAPRGRKHDFKDAERLVRRLIADELILSFVPSGEQRIWRSMTRMKLQLTRDRVRLQNQIECLLEEMRIKLSIVVSNLLGASGLRILHALAKGETDPRKLAQLGGERLQCTEEQLVDALTGRAQPVHREMLALQLQRLQLIDQQMAQLNSMIAAAMKPHQDAVIRLAEVPGLGVDSAQQIIAEVGAQASTFASAAELTSWVGTCPGKEESAEQNHSSRSAKGNKYLRRVLNQAAHAAVAKKGSHFQAVFRRLLPRLGYQSAIWAVAHRLCRLVWKILHEGVRFIEQGHEVTPQEKKKRAQLLARALRKLGYEVTITPINQLAPKPVV

SEQ ID NO: 495673 - protein, 404 aa, unidentified
MNMNAVGIDVSKRKSMVAILRPGGEVVAKPFEVPHLSGDIQSLIHQIQSLDGESRIVMECTGHYYESIAHELTSAGLFVSAVNPQIIRNYQDEDNSLRKVKSDKADSLKIARYTLDRWAKLKQYGLMDELRSQLKTMNRQFSFYMKHKTAMKNNLIGLLDQTYPGVNTYFDSPARGDGSQKWVDFATTYWHVDCVRKMSEGTFIEHYQKWCSRKKYNFSKAKAEEIYETAKGLVSVLPKDDFTKRIIKQAVEQLNTASQTVEQLRSLMDETAAQLPEYPAVMAMKGVGTSLGPQLMAEIGDVARFTHRNAITAFAGVDPGVNDSGDYSQKSVHASKHGSPTLRKTLFQVMDVLIKTKPQDDPVYLFMDKKRAQGKPYYVYMTAGANKFLRIYYGRVKEYLASLP

SEQ ID NO: 495674 - protein, 428 aa, unidentified
MPYKIAGIDAHKRMLAVVVSDVEVDGEYAFERRQFGSNPAQLRLLADWLLEQQVEEVVMESTAQYWQPVWAALERYWTPTCKKREGAGSMSGTPHLAQAQSNRARQGRKNDFADAERLVKRLVANELTLSFVPEPEQRLWRTVTRTKYQLTRNRVQLQNRLEALLEECHIKLSSLVSDLLGVSARRMVQALADGETDPAALAALANHHLRATQEQLRDALGACQELNPVSRRLLKLALEQLQLIEKQISQLDQEIADLLRPYQDQVQRLAEVPGLGVDSAQQIIAEVGPTAATFPSAGNLSSWVGACPGDDESAGLSHSHRSPKGNRQMRRLLNQAANAAVKYKGGIFEILYRRYVPRLGHKQTIGVIAHRLCRLIWKILYQGVRYEERGPDVRKKSQRYRAARMIRELQSLGYRVEQANSQSADVPA

SEQ ID NO: 495675 - protein, 351 aa, unidentified
MWIIGVDYHPSVQQIAFVNTDTGECGERRLNHSDGEAEKFYRELKAADCCVRVGMEATGHARWFERLLAELGFELWIGDPTKIKAKRVRKQKTDRLDAELLLQLLLEDRFPRVWVPSPENRDLRQLLWHRHRLVQMRTRIMNQLQAVAMNEGVRRKQALWSKSGRAQLESLPLAPWAARRRHDLLELLDRLSPTIEELSAAVEQQVKHRPEVLRLMTHPGVGPITALAFVLIIDSAERFACGKQIASYVGLIPCEDSSSDQRRLGHITKQGNTLLRYLLVEAAQAVVRCDPDWRRRYIHLAMRRDKRIAKVAMARKLAVRLYWMMRKEWNYEQLKKFGSYAGESDLVHGVQ

SEQ ID NO: 495676 - protein, 316 aa, unidentified
MKKISTAEATQIRNFAEQKLTIGLDLGDGSSWYCVLDETGRVRLEQRVSTTPKAMREGFGGMPRSRIALETGMHSPWVSRLLSELGHEVIVAHARNVRLIGESRKKDDRLDAQTLARLARIDPQLLSPVKHRSAKAQADLTVIRARAGLVRARTALVNTVRGLAKSYGERLRGCNARNMNPEKAEGLSPELQTALQPLLAAIESLSERICEYNQQIEQLAESRYPQVGLLKQVKGVGTLIALTFLLTLEDAYRFRKSRDVGCYLGLQPGRRNSGQSEPQMRISKEGGIPICEPCWCRERSTFWDRLVRTVICGAGG

SEQ ID NO: 495677 - protein, 364 aa, unidentified
MNTTSPAPNAKQAGVSVASPWLGADVSKSTFDAALYRPVPPGQHWEPRDIPVKQFHRNKEGVAKCLAWLATQWPATASAEDAAPEVRVVMEATGKYSRELAEWFTKAAPATSPAIINPRLAKSFAESLGVFTRTDKTDARSLARYGADRQPVALAPAAPEIAELRDMTRYRQTLVEQRTAETNRAAEGSVSREVCKMQKCRLEQIERNIARLDKALKAHVDKTERLVHDVARLETIPGVGQLTAQIVLGEVGDLRRFKRARQITSFIGLTPTSHDSGTSVHKKSHVSKSGSTHVRRILYLAALAATRGDNELAAVYKRLTTAGKHPMVALVAVMRKLLLLMRAVLVHEQDYQPNYAKTRRATCG

SEQ ID NO: 495678 - protein, 321 aa, unidentified
MQPVTVTVYAGVDVAKATLQLHLQGRQAEFTNQPAGLVQLCQQLKIIPHVHVVCEATGGYERLLVQAMHQAQIPVSVTNPAQVRAAAQAQGKRAKTDRIDAALLTDYGQRYQPKPTPPTSSSQDQLVALTQWLTQLVQAQALAKTQAEHHEAAFVRGRHTKLMTHYQSQIVAVEKQIQALLAQDAQLQQRVDCLDQIQGVGPRTAWLVLAHMPELGQLNRQEVAALAGLAPWTRESGAMKGICRIGGGRPEIRLALYMAALSAARCNPVLQPFYQRLRAKEKPAKVALTAVMRKLLVYMNHQLKALQPTPTAPKTEKSKIP

SEQ ID NO: 495679 - protein, 401 aa, unidentified
MQEPLQHNSIDVFVGVDVGKGQHHAVALDRSGKRLYNKALPNDEAKLRALINELKAHGQLLFVVDQPATIGALPVAVARDEGVLVAYLPGLAMRRIADLHAGEAKTDARDAAIIAEAARSMPHTLRSLRLADEPLAELTMLCGFDDDLAAQVTQTSNRIRGLLTQIHPALERVLGPRLDHPAVLDLLERYPSPAALAATTEKTLANRLTKLAPRMGKRLAAEIVQALGEQTVVVPGTQAATVVMPRLAKQLAALLQQRDEVASEVERLVHAHPLYSVLTSMPGVGVRTAARLLTEVAHKAFASAAHLAAYAGLAPVTRRSGSSIRGEHPSRRGNKVLKRTLFLSAFAALRDPISRAYYSRKIQQGKRHNQALIALARRRCDVMFAMLRDGTFYQPQTTPNA

SEQ ID NO: 495680 - protein, 356 aa, unidentified
MNVYTRQHPYYCGIDLHARTMFICVLDIDGKIVFHNNRPCNPESFLEAIAPFREGLVVGVECIFCWYWLADLCEQEEIDFILGHALYMRAIHGVKTKNDKLDSLKIARLMRGGNFPLAYVYPPAMRPTRDLMRRRNLFVRKRAELLSHIQNTTSQYNLEPLGTISRPHHRRGKAMDTYFPDPALQLMIDTDLKLIDHYDPIIKELDRRILALAKGHDPKSLALLRSIHGVGQVLALTMLYEIHDINRFPSKQDFCSYARLVKAQKSSNGKTFTGSGSRIGNAHLRWAFSEAAVTFIRKNKEANRYYNRLIARHGKSKALTILAKRLGIAVYYMLKREKSFNTERFLNHMMSKKATS

SEQ ID NO: 495681 - protein, 369 aa, unidentified
MGQCIIYVGLDVHKDTIAVALAEAGLRGEVREHGKIANTPAALKALTERVAGRGRELRFCYEAGPCGYGIQRQLSAIGHECAVVAPSLIPRKPGERIKTDRRDAINLAKLHRAGELTPVWVPDQAHEAIRDLVRARQAAVRSLRQSRQQLSGFLLRHGHHYHRPAWTLLHRRWLASLKFDQAVHHIVLEDCIATIEAATARRDRLEADIEAALPEWSLAPVVEALQALRGIGLVAAATLMAELGDITRFPNPRQLMAYLGLVPSEHSSGRTRRQGGITKAGNGAARRMLIEAAWSYRFPARISREQLLRQERLAKPIRDIAWKAQERLCRRYRALARAGKLPTVITAAIARELVGFIWAIAKEVQSAAS

SEQ ID NO: 495682 - protein, 330 aa, unidentified
MKNWNVILGVDISKLTLDVCCAEQGLYTKIDNCSKGFADFKKWCKDKGIDLKETLVVMEHTGGYEYRFLQFCESKSIPYCRIPGLEIKQSMGMVRGKSDKADSFRIGRYGEEKSDLLIPDKPLNKNILELKQLLSFRKRLVRERAGYESTLRERKHMYEVKKDDTITRIASAKIKENRRYTSQVEQQIRTLIKSEEDIWQNYRIITSIKGIGQVNAWMTIAHTENFTSFKDARTYGVYVGVIPFGHSSGTSIKGRKRVSHLANKELKSELNQAAKAAINHDPEIRAYAERKLKNKDYTLVLNNVKFKLILRMFSLVKRCEMYVENYRRAA

SEQ ID NO: 495683 - protein, 411 aa, unidentified
MRLFLGDDWAEDHHDVEVMDERGRVLARARLPEGVAGMARLHELIGEQLGEGADDAEVVIGTETDRGPWVGALVAAGYTVYGVNPLQASRYRERHGVSGAKSDRGDAHMLTDMVRTDSHQLRAVAGDSPDAEAVKVVARTHKTLIWERTRQVQRLRHQLREYFPAALEAFDDLDAPDALELLGKAPDPAKAAKLTRAQISAALKRARRRDIPGKATVILAALRSAQLGQPPAVTNAYAGTVRSLVAVITVLNEQVKTLQGQVEADFGRHPDAEIYLSQPGLGPILGARVLGEFGDDPDRYASGKARKNYAGTSPITRASGKRKIVAARFIRNNRLTDALMAQAFAALGVSPGARALYDAERASGTEHNPALRKLASRLVGILHGCLKTRTLYDEATAWPYREKTPQSDIAA

SEQ ID NO: 495684 - protein, 467 aa, unidentified
MKNNDYNLFVGIDVSKGKADAAVLAVPELRSVKPRFLRKKLSFKFIKSDVVEFLNSVRKYSSDPHCLHTYFALEVTGIYSTNVYGFIKENCNSDEEIHQLNTDFVNKWRESHNISKSDPLDAQTISTIIGTDDDVRYVSDSVFENKNGYQDLKALVHRHYQIKKLHSQETNRLIALCDCYFPELQYVFEPKSAAFLAVLSQYPTSHDIINASKNEVFSLVYEASKHRCNMDKIDKLFNYAQDTLVPHVSDHIRCVIFNTVESIFNIRAQLKLIEKDIRKLASTFNVYSLLMTITGCGPLTAAVIIAETGDIFRFKNADHYVSYSGSSPRNKRSGKSVEIMGKISKKGSKYLRHALYMIAEFARRHNPVLKHLFERVKNGNKKRHKLAVIAVANRIARYIYSIMKNESSFVIMHENIMRLPEETRNTFFNSISLDFPKNTRKQIYQYSDVNGEIHRFVYKNETTESIA

SEQ ID NO: 495685 - protein, 455 aa, unidentified
MRESARPLFGRKNKPRQRPGGNVLEILWGAIEVYIQRVVFRFAEPFDEVTPMAPVQDVITEAPILHVAFELSSVSWILASGVRSSRTVRRRSVKAGALKEVLDEIATAKGRFDLPQDARVVTCYEAGRDGFWLHRWLLDRGIENLVVDPASIDVNRRARRAKTDRLDADKLLERLRRYTRGEEEVWSVVRVPELEVEDLRRLQREVDRLKLERTQHSVRIRSILATHGLGHLCAAEGVHSLKGLHPPAGYDLGKYTLLEIQMISDRMDLAAKQLKEVEKIRRELERGPADLKSVRSVLLLLALRGIGEEGAWAVGTELFGWRKFHNRREVGAITGLVGAPYDTGKKDHEQGITKAGRSSLRRLLVELAWLWVRLQPKSALSQWFERRFGEGSKRCRRVGIVAVARKLVVALWRWVEFGELPEGAELSRSMAPEVLKAVGKGWEVPKGRDVVAATG

SEQ ID NO: 495686 - protein, 334 aa, unidentified
MEKITTVGIDLAKSVFSLHGVDGAGRVVLRRTVRRDQLLGVVASLSPCLIGMEACSGAHEWGRRFQELGHTVRLMAPKFVAPYRKSGKNDGNDAEAICEAVTRPNMRFVPVKSAEQQALLAMHRVRQGFVVERTATINRLRGLLCEFGVVLPLRSVTVRRQAAQAAENLPELARRAIGDLLEQLRVLDERIDGYDREIEAQARLCEPAQRLMKIRGIGPTTALAIVATVGNAREFKNGRQFAAWIGLTPSQHSTGGKPRLGHISKRGDAYLRNLLVQGARSVLNSAGRHQDRMSRWILELQPRRGYYRTLVAIANKNARIAWALLAKNETLRAA

SEQ ID NO: 495687 - protein, 359 aa, unidentified
MKTQRNEISFKGQSIYVGIDVHLKSWSVAVLSQTSVMKKFRMDPNPEGLKTYLTNNFPEADYYSVYEAGFCGFWIHDRLTSLGINNIVVNPADVPTTGGEKLRKTDAVDSVKLARSLRANELKGIYTPDAASLEIRSLIRLKNSITKDMTRQKNRIKSTLRYLGVEIPKEYTEPFSNWSKRFILWLCEVQMNTPSGRDALDLQIEQFEALRKQKLMMTRKLRALGRGDRFKDDLDLIMSVPGIGMTTGMALLAEICDISRFTDGAHLAAYIGMTPMCHSSGEHDGTGDITIRKNAIMRCNLIEAAWVAIRQDAAMNLYYTECCRRMVASKAIVKVARKLVNRIYYVLKRRKKYVNNVVS

SEQ ID NO: 495688 - protein, 355 aa, unidentified
MNSEKYIGLDVHQATISAAVMDPRGKLVMESILETKAATILEFFAGLRGTLSVTFEEGTWAAWLYDLLKPHVAKLVVCNPRKNALLKHGNKSDKIDARKLAGLLRLNDLEPVYHGETGVRMLRELARSYLTIVKDLSRVMNRLKALYRSWAIPCAGRDVYYTRHRSEWLEKIPEAGTRRRAEQLYQQLDMLQHLRQQARRELLAESRKHAITAKLRQIPSLGPIRSALAVALIQTPHRFRTKRQLWTYSGLGLETRDSGEYHYVQGQVRRRKKQVSIRGLNKDHNHDLKGLFKAAATRASVQPGPFQDFYQRSLAKGIKPTMVRLTLARKIAAITLTLWKKGENFDAEKLKSQAA

SEQ ID NO: 495689 - protein, 355 aa, unidentified
MEDAMIHIGIDLHTRNMTLAAVNDNGDLLKLESIRCCSLALDRFFSKISHPAQAVVESTSSWYWLDDWFRHKGITLKLAHAKMLKAISYAKVKTDSVDAHMLAELLRTGLVPESWKSEKRQRELRELTRARLRWILKRNQFQNFTYSIATRYNLTVKSSDWRNVRNLRMSLRNHLPDEAWLEASLSIDQVIEMQNSIDRIEKAIARQLWYREEVKRLMEIPGIGPVSAWSILSEVGDITRFPSDKQFASYCRLVPGSNDSGGKQRHKTGSKDGNKYLKIAFGQAAIGAYTNYGEVKKFYNKLRRRKGPKVARTIVAKELSRIVWYVLAKNQPYKGFKGQMTKKSKSYSWPHPVSP

SEQ ID NO: 495690 - protein, 276 aa, unidentified
MSALVCGLDVHKDSTYATILDSSGKIVSQMRMNNERVLPYLSRFIIGKVAMESSNQVAALYRRLESEGYSVLLSHPKKTRYIAEAKIKSDRVDSRAIAELAKLDALPLAYMPEKEVSMLREQVRRRAFLVRQRVKLRVKIKSILTHEGVRWPSDCGLFTKKGVEWLHGLGVESVESYLRIMRIVDDEIRLLNRQLRGIAGNDEDVKLLMTVPGIGYYSALLVKSEIGDINRFPFGDRLCSYAGLVPSTHASGSMVRHGGITKEGSRWLRWVMVEAA

SEQ ID NO: 495691 - protein, 363 aa, unidentified
MNEDNAVAAVAANTIVSIDLGKFRSVACLFDPLTGGHRFETIPTTPSAVHDLLVACSPATLVIEACSVSGWVSDLAGALGIGTQVANTNGEAWKWKRVKRKTDRDDALKLAKLSAGDQLPTVHAPKLDVRQHRALIKYRHGLIDRRTGVKNTIRSLLDAQGLSLPGRSKGWTLEAIAELTKLSKPLSECGISELWRGQLAMELQMLEQLQTLIKEADRKLDALAAQDARVLRLKTIPQVGARLAELVVTTLDDAKRFKSAGQVSAYAGLVPKQYQSGQMNRLGRITGQGPGLLRRVLVQVAWGLQRREGTRGRAVFERLCHGSRTRRKQAAVALARKILVWCWALLRDGSTWDDTRHTTPQLA

SEQ ID NO: 495692 - protein, 361 aa, unidentified
MQIIGCDLHTRQQTLAILDTQTGELVEKVLVHEASNVRNFYSTLPGPVRVGIEATGSMQWFLNLMEELGIECQVGHPAKIRAAEPRKQKHDRRDADLILKLLVENRFPSIWLPSKELRDLRALLLHRHQWVRMRTRVQNALQAIALANGLRRGPSLWSQVGQHTMASLPLAPHTAHRRSELQALYAKFEGEIEKLNQRVEEQAYERPGALLLMTHPGVGPVTALATDVFLGDPARFAASKALASYVGMIPSEYSSGGRQRLGGLSKQGNPLLRFLWCEAAMHAARREPELQRFYRRKLIQKGLGKARVAVARKLGIRLWIMLRDQIDYNEFCRRGQMRQKNGGACAGMPKTGYGAKPSPTE

SEQ ID NO: 495693 - protein, 340 aa, unidentified
MQITTLGLDIAKNVFQVHGIDAVESVVVRKQLRRSQVLAFFKAVPPCLVGMEACATAHYWARELTKLGHKVRLMPAKDVKAYVKRNKNDAADAEAICEAVRRPTMRFVQIKSPEQQSRLMQHRARDLLIRQRTQVINALRAHLAEFGITAAQGNAGLKELLAIIACDEDERLPADAHAILIVLAAELQAMQTLIGSIEKRIMAQHRTSEESQRVETIPGIGVIGATAIAATVPDPKIFRSGRDFAAWIGIVPRQDSTGGKQKLGPISKQGDRYLRRILIVGAISVLRRAKENPGKYPWLTQLLARRPFKVVAVALANKMARMAWALLAKGGTYRTPALAA

SEQ ID NO: 495694 - protein, 343 aa, unidentified
MQTITTIGLDIAKSVFQVHGVDAPGQVVIRRQLKRRQVLSFFEKLPPCLVGIEACASSHYWSRELQALGHTVRLMPPAYVKPYVKRQKNDMADAEAICEAVTRANMRFVPTKTPEQQSCLMLHRTRHLFIRQQTAVINSIRAHLAEFGIVAPVGRKGVTELLHVVADPNDGRVPEVARACLAALGTQLLRLKEQILEFDRMIIAWHRSNQTSKRLHCIPGVGPMLATALVASVADPKTFRSGRNFSAWIGLVPKQHSGGGKDRLGSISKQGDRYLRSLFVAGALAVIRYAKIHGTGHRPWLTALLGRRPTKVAAIALANKIARMAWAMMAKGERYKQPVALAR

SEQ ID NO: 495695 - protein, 412 aa, unidentified
MAVTCGIDWAGDHHDIAVADGEGRKLAKLRISDDPSGLAALLDLLAEHGDTPDDPIPIAIETSRGLLVAMLRATGRPIHAINPMAVARYRDRHSVARKKSDDFDALILANILRTDAAAHRVLPVDSELAQAIAVLARAQQDAVWDRTQAGNKLRSHLREYFPGFLAAFDDAEKFTSPVARTILAAAPTPAAASVLTRARLRALLRRAGRTRGIDAEAARLRAAFTVPQMRQPPLVEQAMGAKTLALLRQLDAACHSANELEQATCASFSQHPDAEIITSFPGLGLLLGARVLAEIGDDRSRFADARALKAYAGTAPITRASGKKTSVRVRRVKNDRLATAGYRWAFCALLPSPGARTHYDRRRTAGDWHAAALRNLTNKLLGCLFHCLQARTSYDETIAFPTPEDPNLRLAA

SEQ ID NO: 495696 - protein, 315 aa, unidentified
MFTGIDVSKDWFDAAWEVQGRLYCEHFAYTDEGMEQLMAQAPSGAVFVMEATGVYHARLALKLFEAGRPVSVVNPLVIKRYAQMKLLRVKSDRADAQLILRYGQEHQPARWEPAGEQVQELQQAHGWFNDLISERTRLLNRQAVQQYRARPSAFVAKQMGEQLEQLQRRIDACQEHLEELVKKSFAQLYERLLTIPSIGQKTALELIIVTDGFTRFEDVKELGAYIGVSPTTFSSGSSVKGRGTIAKMGQARMRQLLYLCSWTARKCNPACQQLHQRMKAQGKPSKVISIAIAHKLLRQAHAVATKNVSFSAQFA

SEQ ID NO: 495697 - protein, 363 aa, unidentified
MPMKKPKQHLIAEVPRRDSKVGMTIGIDLGDVWSHYCTLNEDGEVVDRGRFRTSPSGVETWFTDLPPVRIAMEAGTHSIWISEQLQELGHHVIVANVRELRAISHSDRKSDRVDAEKLARYARLDPKILRPIAHRTVAQQEALTLIRARNLIVRLRTAAVNAVRGLAKPCGYRLPASSTLCFAKRCVAVLPPGLALALGPVLDQIAEMTVKIKHYDRAIKRLTEAEYPETQALIKVYGVGQLTALTYVLTLGSKERFQRSRDVGCYLGLRPRRSQSGDRDPQLGITKAGNIYLRSLLVECANHVLGPHGKDSGLRQWGLHLASRGGKQTRNRAIVAVARKLAVLLHRIWITQEPYVPFHAVAA

SEQ ID NO: 495698 - protein, 369 aa, unidentified
MEKGTTYVALDDSKRKIVAGILRPGDGPPELREILNDPRQIRRLFERLKREGPVAACYEAGVSGYDLHRQITALGVTCAVIAPALTPRRPGQRIKTDRRDAAKLVRLFRAGELTAIHVLEESEEAVRDLVRCRDDLRRDVLRWRHRVLKLLARHGRAYLAGKNWSQAHWRWIREQRFDLPPLQRAFEATVFALEQALARQAELDKELEAVAATAPYREPVAWLRCFRGIDTLSAIILLAEVVDFQRFRRPRELMAYLGLVPSEYSSGESQRRGALTKAGNGHARRVLVEAAWHYRHRPTIGRALASRSQGQPDEIVGQAWRAQQRLHRRYRHLVGHGKRTPVAVAAIARELVGFLWAAMTRHESRRQAA

SEQ ID NO: 495699 - protein, 425 aa, unidentified
MKITQNLREIKPNQGLDVSVDVHKDTLNFFFSLEGKEYRDECPNHTRSIEKRLSKYYGIAQEQGIQRLRLICEPTSDYQNKLLRTARRQGHLTCLVNAESVYKFRVVETNDTGKTDTKDPKVIATLGRLNKVIRHRVLSDDYLVLRKLGRIYDELESEITSLRCRIDKLLIELFCDFSFTKDFLYGTSGNVLIDRFGCNPYRIIDTGYEAFASTMRQAVPRIRLESLQRLWQDAGSSVLNELPAGYRDVLEEQFRDLVAAFRNRETRMEQIVEQMKIVLQRIRDDDPRIPPPTAGVISEKNLARLLAETGPIGDFRNWRQLMRYGGLNIRMRQSGKYTGKNRISKKGSPLLRKVLNHIVLPLVRQNCLYGAYYHKKREVDKMPGTKAMTIVARHFLRKFYGWYKSGAVFDEKRFFASEREYLKAA

SEQ ID NO: 495700 - protein, 346 aa, unidentified
MTIVGCDFHPGWQQVAVLDTETGEVTECKLVNGNGEAERFYRRLPAPSLIGIEACGNSHWFLDLLQQLGHEVWMGDAAQIRASYVSKQKTDRRDAAHILKLLVEDRFPRLWMPSVKQLDLRQLLVHRHKLVEIRTRIKNGLQHLALNRGMQKKRKLWTEAGQKALRELPLESWAACRREDLLGLLASLEKQIDRLDVAVKQAADEDPQAALLMTQPGVGPITALAFVLTLGDVARFKRGKQVASYLGLIPREHSSGGKQRLGAINKQGNSFVRMLLVESAQTVTRLDEGFRKQYLHRCHRMAKGVAKVAAARRLAVRLYWMLRTKTGYPEIVRIESSPTLAMVDES

SEQ ID NO: 495701 - protein, 406 aa, unidentified
MTLIFVGDDWAEEHHDVFVMDEAGKRLAAKRFPEGLAGIRGLHALIATHAEESDQVVVGIETDRGLWVDALTAAGYQVFAINPLAAARYRDRHHLSGAKSDPADAKLLADLVRTDRHNHRPVAGDSGGAAAVKVLARAHQSLIWARTRHTNMLRSALREYYPGALETFDDLDDRDALAVLGRAPTPAEGARLSLAKIRSALKAAGRQRNIDARALEIQAGLRTEQLTASDAVTAAFAASTRAAVGIIAELNHQISDLETELATHFETHPDADIYLSLPGLGVILGARVLGEFGDDPNRYTTAKCRKNYAGTSPLTIASGRKRAVLARHVRNRRLYDAIDQWAFCALTTSPGARAFYDQRRDADDLHHQALRALGNRLVGILHGCLRHHTLYDEHKAWAHRQPTAAA

SEQ ID NO: 495702 - protein, 363 aa, unidentified
MRESTRVTVGLDVHARSIRFAAVRADELLEERTLPYDEAVVERLLRRWPGARCCYEAGPTGFGLYRYLVERGVACAVVAPGLVPQRPGDRVKTDPRDARKLARLHAGGLLEPIHVPSPELEAARDLVRAREDARLDRMRDRHRLSKFCLRHGRLLPTTAWTVTRRKWLGEQRFEHAAEQITFDSYLHAIDLVDARIEQLERAIRETAERQPWRQLVARLRCLRGIDTLSALALVAEIGDFSRFRCAEEFMAFVGLVPCEHSSGEQRRQGSITKVGNSHVRRLLVESAWHARRRPKVGYELARRQRGQDAVVIERAWRCQQRLYQRWQRMAGRGKPQQKIVVACARELAGFIWAIATDQPLRST

SEQ ID NO: 495703 - protein, 363 aa, unidentified
MEHVNNMELSSPEGTRCQFNGSTGAIKLGIDVHQDFYVVVEQVGGSNPKPPQRFAKEAFLHWAAKVKSQGGEVHAVYEACGFGFGLQRQLAGLGIQCHVVCPQKLDEQNRRVKTDGLDAKALCLKLDRFVQGTKDALALVRVPSEEEEQKRAIHRQREQLVKARKRLEAQGYSLMVNHGIEPLKSWWKPRTFGALPVPSWLKELLSNSQPILLALQEKIRALTLQLQAAASPDQPRGLGALTSIVIDREIGNWHRFSNRRQVGSYTGLCPGEHSSGNTRLQSCVTKHGNPRLRAALVELAWRLVRFQPNYKPILKWKEVLRRGALATKAARKKAIVAVARQLAVDLWRIRTSQVSAETLGLFN

SEQ ID NO: 495704 - protein, 421 aa, unidentified
MTPPNEVVWAGIDTHTDTHTIALLDERGRPLGAETFTADPDGYDRLIGMLPGPGRVAAVGVEGTNSFGAALARRLTAAGYEVREVLRPRRSVRRRDGKSDPLDAVAAARSVMAGDGTSLPKSSDGWVEALRHLNAQRSQLVSAMTAISNSTNGLLVTAPEPIRERYRGLRSETRMNRLAECRPAGGLVERSVLAALKSAAKAWKALKRQAGLLEERMRLILEEHARPLLDMYRAGTVIAATLAIVAGDNPERIRSEAAFAKLRGVCPIPASSGRTNRHRLNKGGNRQGDMALHRIAIVRLRYHKPTRDYMAKKTREGKGKLEIIRCVKRFIAREAYRALISIRNGEVGRGTPAERGAKLRELRVSRNITQQQIGEALCVPSSRISEIERGARDLPELEQRAIQWIHSTTNPKQHTQTLDNV

SEQ ID NO: 495705 - protein, 346 aa, unidentified
MLADDVAYVLGVDTHADSHALCLLEASSKRTRRHLSIPATRRGYRQALRLARRQAPGRRVWALEGSGSYGAGLARFLHERGEQVLEVERPARTGRRGRLKSDALDAERAARSLLEGVRGATPRLGAETQALRALLTTREGAVTACTAALNELRALLVSAPPELRERLQGLPEAALLAACVRLRGGRDAERAATALALRSLASRVRQLRAEAKLLEGELARRVQVLAPELLDQRGVGAICAAALLVAWSEPGRLRSEAAFARLAGVAPIPASSGKVVRYRLDRGGDRRLNRALHTIVLSRRRLDPETQAYIARRVAEGKSEREAVRCLKRYLARSLFRLLEAMPKTA

SEQ ID NO: 495706 - protein, 349 aa, unidentified
MDATTVAVDLAKNVFELAVADGEWHIVERHRLNRARFARFFVQRPPCRVVMEACGSAHHWARRLVAEGHTVRLLPAHYVKPYVRRSKTDRADAAALIEAARSSQIRAVPIKSLEQQQLQSLHRLRSQWLSTRQRYLATVRGVMREFGIMIPLGPSAAKAQIGLVLAQADSDIPQGLRPALAEMLREIAPLEEKILSVERQLAALTRADERVQQLREIPGVGLLTSTALLSTVGDIQRFPSGRHFACWLGLTPSERSSAERRRLGKISKQGDVYCRTLLVHGARSALLAAHRAQRAGKPLDRLRHWALNCERQRGHNKATVALANRLARIVWATWKYERAFDGNWGTDAV

SEQ ID NO: 495707 - protein, 376 aa, unidentified
MGTPSAQTLDEVGVREIFQELEEVPLMTMVGGLDVHRAQITFDYVDDDGLVHWGQIRPATRKTLRGWLAEHCPDGDAEFALEGCTGWRYVSEELAGAGVGVHLGDPAEIAVLRGPKKRAKTDRADARLLRTLLLQGRFPESWIAPAHVLEIRTLGRLYCTLMDERRAWRQRIHAQLFHQGCPPVRALLSVTGRAALAGAELSAVGGQYVDTALGRIDELSTEIEPLRAQLVNFARHQTGCQALQRHYGIGWLCAAIIWAEIGDARRFSSSDQLVRFAGLDVTVYSSDGKRSPGHLSRQGSPELRWAAFEAAKCAARRGSPDYGYYRKLAAKRDGHNGKNPTLAVERKILRRCHHTLRELGDAAVALPVAEPQEVAA

SEQ ID NO: 495708 - protein, 311 aa, unidentified
MQDIIGIDISKDRLDAYRLPDRQHAVFDNDKAGFKALLKWICGAGDLRIVYEPTGPYHRGMEDALAKAGYALVKVNPRQARRFAEATGTLAKTDRVDAMLLARMGLALDLPSRPVRGDMMNNLRELHVARLALVKERTAASNRAVAAQNKILKRQSKARLAFIERQLSELEETIAALIAADPDLSARRDILTSIPGIGLVTAHMLLIEMPELGTLEPKQAASLAGLAPFTRRSGKWKGKEVIRGGRADLRSAIFMPALVAVRFNADLKRKYQALLDKGKAPKLAITAIMRKLILLANALLRDGRKWDERPA

SEQ ID NO: 495709 - protein, 273 aa, unidentified
MSSVPLMIGLDYSDHVVQLCAMDQLGDVLLNRACGNDWRELVKAVAGKGVVKRVAIEACSGAADLAEELMTHAGWHVELGHPHYVAKLKGSPDKTDFSDGRLLADLTRVGYLPRTWLPPAPVRDLRQLVGYRQQLVDQRRALKLRVGALLREHRAKPPADAKVSRWSKAWVTFARRTEQLSAHARWIVNQTLDQVLELDGRIAGAAGRLRGAVAGDRIVAKLLTQEGVGEVTAWVLRAFVGTFGRFNSGKQLSRYCGLSPRNASSGGREAEGD

SEQ ID NO: 495710 - protein, 387 aa, unidentified
MTALTVNTLPAARDDGAVRCLLAIELSKASWLIAVNTPLSEKISRHTLKSGDWKGLLELIERLRARVGGATGRPVEVISCYEAGYDGFWLHRRLEAHGVRNYVIDPASLQVDRRARGAKTDRIDTERQLRSLMAYLRGEPKVWSVVRVPSVAQEDARRLHRERDRLIGERVQHVNRIKGLCALHGIYDYEPLRGKRLAQLEGLRTAEGEELPARLEAEIRRQVQRLALVLEMIATLEAERDAIVTDAAPAQLNAKKIRDLNMLKAIGPQVATVLVGEVLYRSFNNRRQVGSYVGFAPSPFCSGAMAREQGISKAGNAKARTTMIELAWLWLRYQPDSALSVWFRQRVGAMKGRIRRITIVALARKLLVALWRYLETGVVPQGARLKA

SEQ ID NO: 495711 - protein, 428 aa, unidentified
MNKDKLLSTLFVGIDVGSVNNFAYATDFFGNKLLSFSFINNDPGSRILIDNVLNCLKLNNLKYVVFAMESTSFYSFHLCCVLASSIELASFNPLVYCLNPKVTAAHRESFVCLDKTDPLDAVVICDFARVGKITSKPFNVSTFLALQRLTRQRFHVIKCLTREKSYILNNIFLKFSEFAVLDKSKHPFSDKFGATAISVISDFYSPDEIANMPLNDLIFYLDKISKGRFVDTENTAKLLQKAARDSYRLDKALYEPINLAIATSYNAVFLYENQLKDLEKAILKTVKGLHSNEFDCLTSIRGIGLIFASGIISEIGFISRFNREEQLASFAGFSWKKKQSGKHTSDVTKLTKAGNKYLRYYLIEAVNSVINHGNQEYSDFYHRKYSEVTKFQRKRALALSARKFVRLIFSMLQKNQLYIDKKEMVKLT

SEQ ID NO: 495712 - protein, 391 aa, unidentified
MYIVGIDIGKRHHEASIIDGQGNLQGKSLRFANTHTGFNKLLEAARKAADRDHQIVFGMEATGHYWLALYTHLRREGYPVHVINAVQSDALRGLYIRQAKNDSRDSFIIAEVIRFGRLCETSISAPDLHALRELCRHRFWIVDSISDLKRKVIALLDQVFPEYEKLFTNTFGKTSLQLLSEYTTPEELLAVDTDKLAETLYAASHGHHGLEKALEIKDAARNSFGILLDCDSIALLIRQYIEQIRFVEKQVDSIDIEIARLFSAFDNQLTTITGIGPTLAATILSEIGDIRRFDSPAKLAAFAGIDPSVKQSGNFTGTRVHMSKRGSPYLRRAIWLVATVAAFKDPAISIYYQRKRAEGKSHLTVLGHVSRKMVNIIFAVLRDNSPYSPAV

SEQ ID NO: 495713 - protein, 354 aa, unidentified
MTASYDYHIGVDYHKSYSHLVVQDSSGNTLRSGRVKNDRQSLCGFLERYRENSHAVVEATRNWMVIYDWLDDICDDVVLAHPLKVKAIADAKIKTDKIDATVLAHLLRADLVPEAWAPGERARELRIALRERTFYVRLRRMTKNRIVTVFDRYPEQTAQLKKLGDLFGKAGHAQLAQVNVSEIDRIQIDRGLAFIGDINVRIRQSEETIQAMTRANGNVKLLKTIPGIGEFFARLIDAEIDDIARFRTPKKLAAYAGLVPSTYSSGDKTWRRQDHQAGQQVATLGFCRSRRPCHRQRSAAARSIRTPEDQRSEQGARGHRAQALTIAFQILHDQRTYEPRGTTTEGASTISRLS

SEQ ID NO: 495714 - protein, 333 aa, unidentified
MAKRVFHLHGTTMAGEMKFRKKLTREQFRRFMTEQLACVVVFEACASANYWAREMAALGHEPRLIPAQYVKPFVKRHKNDAADAEAIAIAARQPEMRFVAPKTADQQAKAVLLRNRDRLVKQRTELVNALRAALYEQGHVFPVGINHLTRMQALLDDPNCDLPALIIEECQDLLAQIAEKTERIEAKAKALKALAAETDVARQMQTMPGVGPLTAMAIDAFAPDMAQFASGRDFAAWLGLVPRQHSTGGKARLGRISKAGQSDIRRLLIIGAMSRIIGRARHRIPDDSWLDRQLKSKPKMLVGIALANKMARQLWAMLTKNEDYRDPALVAAA

SEQ ID NO: 495715 - protein, 403 aa, unidentified
MNNVAGIDVSKGKSMVSVLRPFGEVVAKPFSIGHTGSELKELADYLKSLDGETRVVMEHPGRYYEPVARFLHDEGVFVSAVNPKLIKDYGNNTLRKVKTDKADSRKIARYGIDNWAELRQHTPMDTIRMQLKTLNRQQSLYTKTKTMMKNNLIALLDQTYPGVNALFDSPVREDGSQKWVDFATTFWHVDCVRNMSLTAFAERYRKWCKRHGYNFSQSKAVEVHAGAQDLIAMLPRDALTKTMVRQAIDALNAISASMERLKAEMQALAAQLPEYPVVMAMHGVGDSLGPQLMAELGDVTRFTHRNAITAFAGVDPGADQSGTHEAKSTRVSKSGAPELRRALFLVMDCLLKTQPQDDPVYRFMDKKRAEGKPYLVYMTAGANKFLRIYYGRVKEYLASLEGN

SEQ ID NO: 495716 - protein, 364 aa, unidentified
MGWTPPDGIYVPVCGLLELHTKEASVEEVSIIGLDLAKRIFQAHGADRSGKCLFSRKLSRAQLLGFFSSQKPCIVAMEACSSAHYWGREIAALGHEVRLIPAHYVKPYVKRGKNDAADAEAICEAASRPTMRFVEIRSAEQHSQAMVFRSRDLLVRQRTQAINAVRGHCAEFGLSAPTGHKGYEALKGLIGEATDLPEVAREVLELLMASIDQLEGQIGVLEKKMAQLAKRDPVNTALMSIPGIGPITAPAVKALGPDARGFASGRDYAAWMGLVPSQHSSGGKERLGKITKKGNRTLRRLFVICAGTVITSIARSRTVPDPWLAKLLARRPRMVAVTALANKIARIVWALQVKGGVYQSPMTT

SEQ ID NO: 495717 - protein, 320 aa, unidentified
MEKEKEYVGIDVAKSSMDIAVHATEQRWSFPNDDYGISKTVSLLRKLAPVLVVMEASGGIELTLTAALASAGLPLAVVNPRQVRDFAKATGKLAKTDTLDARVMAHFAATVRPVPRPLPNAQAEKFSSILARRRQVIEMLTAEKNRFGTANKAVRQGIEAHIKWLEQELSNIDDELRQSIQRSPVWREKDNLLRSVPGVGPVLSTTLLAELPELGTLNRRQIAALVGVAPLNRDSGTMRGKRTVWGGRAPVRATLYMATLVATRYNPVIRGFYQHLCIAGKAKKVAITACMRKLLVILNAMLKHRAPWCYVNAQMFGPCH

SEQ ID NO: 495718 - protein, 358 aa, unidentified
MKIIGCDLHARQQTIAMLDSDTGELEEKTLEHQGETVREFYSALSGPILVGIEATGSMQWFLELMEELGIECRVGHPAKIRKAETRKQKHDRRDARLLLTLLAENRFPTIWMPSSEQRDLRTLLRHRHQWVRLRSRVQHTLQSMALNHGLRRGRSLWSQAGQDELRALPLAPHASERRKALMTLYPGLQESIDELDRQVREQTQQRPDARRLMTHPGVGPITALATEVFLGDPLRFSDGKALASYIGMIPSEHSSGRRQRLGAMSKQGNALLRYLWCEAAMHAVERDPELKRFYRRKLVQKGLGKARVAAARKLGIRLWIMMRDQIDYEEFCRRGKARQESGSVRAGMPDRNSGPAEQ

SEQ ID NO: 495719 - protein, 345 aa, unidentified
MEQISRIGMDTSKHFFQLHGVNAAEKVVLRKKLRRKEMVAFFEALAPTVIGIEACGASHHWARILRSFGHEVKLIAPQLVKPYVKRGKNDTADAEALCEAMSRPTMRFVPVKTAEQQAALMIVGLRDRLIRNRTQLSNAIRGYAAEFGFTAARGMAHIDPLLDRIQADESVPVLARELFAAQAEEYAQLQAQIAEVDAKLMAWHKADECSRRLANIPGIGPIGATLLLMKTPAPEMFRSGRQFAAWIGLTPKDHSTAGKVRLGVITRAGDEALRSVLVVGATAVIQHVRRGGRGSPWIVGLLKRKPPKLAAVALANKMARIAWKLMVTGNSYAAKSAPAALMGAA

SEQ ID NO: 495720 - protein, 310 aa, unidentified
MDRIIVGIDVSKDRLDVVVRPSGETFAVERNAVGLEKLVARLLRLSPHIVALEATGGFESVVSAALGAAGLPVAVVNPAQVRAFAKAIGQRAKTDPIDAGVVAHFAEATNLEPRPLPDEQTRLLADLVARRRQIVAMLGAERQREQRVTASRPRKSIARLIKALEKELASLDADMDDAIKGSPAWRAKEELLTSAPGVGPVISRTLVAELPELGQLSHKQIAALVGLAPFTRQSGKWRGKSFIGGGRTAVRAALFMGAMVAKKHNPVLKAFFDRLVAAGKPKIVALIAVARKLLTILNAIVRDNQPWQTA

SEQ ID NO: 495721 - protein, 421 aa, unidentified
MEETGEMAELVERVAALDIGKAALTACIRVPHEDKPGRRCQEVREYATTTRALLELADRLRCQGVTLVVMEATSSYWKPPFYLLEAEGFECWLLNARHVKNVPGRPKTDKLDSVWLAKVAERGMCAPSLVHPKPIRQLRDLTRYRRTLIRERAREKQRLEKILEDAQIKLSAVVSDLFGVSGRAMIEALIAGERSPWALARLARGTLRNKTRVLEEALTGHFGDHHGFLCQMMLERIDGLSAQIQTLDAKVEQAIAPFARQVTQLDEIAGVGTTSAQELIAEIGVDMSRFPTAGHLVSWAKFAPIDNSSAGKKKGGSTGKGNPWIGGTLGEIVIGASRTHTFLAERYRRLARRRGKKRAIVATGNTVLTIAYHLLCDPAARYTDLGPAFYDSKAGRERHARNLIRQLEHLTGKKVALEEAA

SEQ ID NO: 495722 - protein, 283 aa, unidentified
MNATAALPVVGIDVANTVFQLAVADGTWRVTEEHRLTRSQMERWFANRAVGLVVMEACGSAHHWGHWLNALGIEVRLLPALYVRAYVKRNKTDAADACALLEAARCADITPVKVKSIEQQALQGLHRTRSLWMATRTSRINALRGFCREFGIVIAPGARLGVERIARVLADPHSSVPELIRGTMKLLIEEIRLLEARVAQLERELTVVARASGACTRLLTIPGVGLLTATAMVAATSGSVQHFRDARHFASWFGLVIFRRNGAGLFRRNGASLQGGKRTSRWG

SEQ ID NO: 495723 - protein, 373 aa, unidentified
MPRYSTAFGMDVHLRSTTVCALDAETGEAVTRRFRGNPWGEVAEWMSGFPGPSLAAYESGYLGFAPQRELSGLGVDCVVAAVSRVPRSAADLSSKNDRNDAARMAKAILSHDISPVWVPSPEIEGLRDLAGAHDAATARLAAAKQRLLAFLARRGYAYGGTTPAGNPRRYWTYDFLRWLDKVRPADDGGIRALAALRNEVEAAAETRDDLLAEYRAAVAAGPLSAEVEALQSIKGCGFALAAAFASEVGDFSRFRSGRQVTAYFGLAPKQRSSADSVRLGGISGAGNALVRRLAVEGSWSYVQASHQPKLMPKGSGVPLEVRMHGRKGSERLLRRREEMLARGMPQAKANAATAAELVRWLWALGAMCREATE

SEQ ID NO: 495724 - protein, 345 aa, unidentified
MSITMIGLDIAKSVFQVHGVDASGKVQLKRKLQRSELIPFFERQEHCTVVMEACGTAHHWARVLSGLGHEVKLIAPEAVKPFVKKNDAVDAAAICAAASRPDTMFVPAKSAEQQGTLALHSARSLLVKQQTMLANAMRGLAAEFGLIVPKGMSRLEELQALVDADKDFPEQARQVFTGLLDHCRATVEWIAAIEAEIVAHARQHDTARRLATIPGIGPITASLVAATVGDGIAAFKSARHFAAWLGLVPRQHSTGGKTRLGRITKTGNREIRRLLVLGATSMVYRAGQWNSAAGAWTRGLLERRPVRLVTVALANKMARIAWALMMRNEVYQARGRVAAAAAATA

SEQ ID NO: 495725 - protein, 456 aa, unidentified
MKVMKIKDESDSSNGVLKKKYGQGLPVFNPFAGGIDVGDTMFDVAISDGIAGYEVREYSTFTEDTVNLVNWLVAENITTVAMEATGIYWLNLYLMLEEAGIEPYLVNAKHVKNVTGRKKDDTDAIWLQKLHTCGLLKKSFQPDSDIRELRTYMRQRKNLINIASDSVRRMQKAMELMNLKLHVVISDILGKTGLQMVCAILKGERNPDELIKLKDPRIKATDQEIKKSLTGIWRQEYLFMLKQAYEEYSFYQSQIASCEEKIKECLLKQVAQITRGDITDIGLEKKKRKKNQFNVEIRPVLKIIAGVDLCDIDGINEISALELISEIGVDMSKWENNKHLSAWCNVAPNTKITGGKIISSKMQKKKNRAGQVLRMSASGLYRSKSGLGDYARKMRSRLGKRAAVVAIAHKLALIIYTMIKEKRPYNPQVTSNNQEQWKAKRIKYLEKQLLRLKNVA

SEQ ID NO: 495726 - protein, 379 aa, unidentified
MGADELFRLTRSMQNTIVHHEGATSPEVVVSRLKPGSAVIKIGLDVHARMYVAVAQYDQLLPKPACRLRAEEFVPWVEWFLRRGHTVHVVYEACGFGFTLYRQLIAAGAHCYVIAPRKLDEQHTGVKTDRRDATTLCQRLSRYVAGNTRELAVVRVPSESEEQARHVSRQRAQLVHLRQRLEAQGRSLLISHALPAPAHWWKQQSFGRLSKHLPVWMVERLEVHRPALLSLQKQIALLSSELEASAPSGIPRGLGKLTTAVLTREICDWRRFNNRRAISSYTGLCPGERTSGSKRVPGSVTKRGNPRVRAALVECAWRMVRFQPQYPPVQRRLAVLAKGSRAIGAVRKKAIVAVARRLAVDLWRLHTDRASAEQLGLQL

SEQ ID NO: 495727 - protein, 407 aa, unidentified
MISVGIDISKEKITVCALEQGSKIIWKPFDVSLNKTEIEELIEKLEKLKEEVKITMEATGKYHLPILYELKDRDYFVTVINPLKMKQFCRALNFRKAKNDKIDAKQIAEYGLMYWKELEEYKVDEENYRILKELNRNYQHYMDLRINQMNYIEQTIQQTFPGIKKLIPHNSGDFSKDKLLDFLEKWWHKDLIIEKTEEEFVEEYKTWAKEKRYHPNVNKAKAIYKIAEDSISTQPSQNSKIETNIREGINLIKQINQILKNILSQMIEISEPLEEYQEAKKFSGISEKLAVQIVAELGDLRKFKNKKSLISFIGIDAPPYESGNFKADQTKISKRGNAILRKVGYQAMKCMMSAKNPENEIYNYMIKKEKEGKAKKVCKFAGLNKFLRIYYARVMESKAQKQELKVA

SEQ ID NO: 495728 - protein, 404 aa, unidentified
MLNAVGVDVSKGKSTISVLQPGGVIVRKPFDVTHSKDDLKELARYIKSLDGETKVVMECTGRYHEPLLRSFLASDIFVCAVNPHLIKNYGNNSLRKVKSDPADSRKIARYALDNWAELRQYSTMDTTREQLKTLNAQMDFFTKQKAAQKTNLISILDMTYPGLNSLFSSPARSDGSEKWIDYAASFWHVDCVRSLSLKTFTERYQAFCVRHSYCYQPAKAQQIYDAAQELIACFPKEKAYKDMVQLCIRQLKTTIATVEQLRQEMNDLAKQLPEYDTVMSMAGVGKTLGPQLIAEIGDISRFTHREALTAYAGVDPGVDESGQRKYKSNGTSKVGPPRLRKALFLVISSLLQTQPEDDKVYQFVNKKRAEGKPYHVYMTAGANKFLRIYYGKVKECLALQSETI

SEQ ID NO: 495729 - protein, 346 aa, unidentified
MPVYIGVDFHARVQTISYLKTEDGAIEQVELEHLKDDVRGFYQQFVGEVIVGFETSGYAYWFEEMLEGLGHQVWIGDPAEIRRLARRRQKNDRRDANLILELMLRGDFPRLQRQSPESREVLQQLRYRQRLVKMRTMTINTLRFMAMSRGVSIRGHLSSRVSQERMKSLPLSPVLSQQRDELVSLVQELTLKIARVQQWLEAQARQDGQVRLLLTHPGLGPLTGLCLVHTLSPISRFANGRRVTGYVGLDPMEDSSADRQRFGSISKQGSRLLRFLLVEAGQVAARQDHDLKQFYRRVQLRRNRPKAKVAVARRLLVRAFIMLRDQIDYAEFLRRGVAARSARNSP

SEQ ID NO: 495730 - protein, 371 aa, unidentified
MKEYSKFIGLDVHKATIAVGVAEANGGEVRYHGEIPNTSEAVAKLVRQLRKGDANLSFCYEAGPCGYGIHRQITDLGWDCQVVAPSLIPKKAGDRVKTDRRDSLMLARLHRAGELTAVWVPDEAQEALRDLTRAREDMKHLQRQAKQRLLAMLLRYDKNYDGKSNWTQAHYRWFETVKFGHPVQQIVFQEYLDTVLAMTKRVAGLDEQIASTAAESVFWPVIESLMALRGVNLLTATTIVAEIGDLHRFASAPQLMAYLGVVPSEHSSGGTKSRGAITKTGNGHVRRVLVEAAWTYRHQARKTAALQRRAERTPEAVQEIAWKAQKRLCSRYHVMQEKGKLKVQVCTAIARELAGFIWAIGQAVPQPAAKV

SEQ ID NO: 495731 - protein, 348 aa, unidentified
MARLSRIGIDTSKSVFQLHGVDEKDQAVLRKQLRRRQFVAFFAKLEPTEVGLEACGASHHWARELQKLGHQVVLIPPQYVKPYVGRNKNDKIDAEAVCEAMSRPKVQDRFVPIKSVEQSAAQMLLGVRESLVKRRTQLTNTIRGHAAEFGLVAAKGLDKIEPLLARIAADDSLPGLTKEMFAVLGREYAELAPRIAQIDKKMLAFHRSNEMTRRLMEVPAIGPIGACLLVTKIVDPHAFRSGRCCAAWLGLTPKDHSTAGKQRLGGITRAGDERLRAVLVSGATTCIQHARRNRGKPSPWLAELLKRKPPKVAAVALANKTARIAWKLMTSGERYDPNRSVARQGLAA

SEQ ID NO: 495732 - protein, 315 aa, unidentified
MTFYLGIDVGCKSLDVAIFTPGAAAATHIGAYPNDSKGVKRLLRDLAKTPITHALLEATGGYENAALDWLSAHMPITRIASHRSAAYARSLGQYAKSDPVDARTLAQMAAGTTPRPHTAPTPERKALRGLVKVRDQLVQMRDDNRRRVKQADTVDAAAVLKRVNASIEREIKKLDGQLRDAAMACDAERVEQLTRVPGVGKVMVAMLIGYLPELGQCGNRQISALVGVAPYVKQSGKRDAPRQIMAGRPYVRRIMYMAALSSIRAKASPLRAYYKGLRARGKLAKVAIVACMRKLLIMLNAMVRNGTPWQKNAMA

SEQ ID NO: 495733 - protein, 427 aa, unidentified
MTAKQSGHEESEFAAFVGIDWADQKHAWCLQAVGSEKRESGELEHTPEAVEVWISELCQRFANRPIAVALEQSRGALVFMLAKYEPLHLFPVPPTMAGNMREALYPSGAKDDPRDAELLLDLVLQHRDKLRRLSPDTEATRRVQNLVEERRKLVDEKTALTNRLTSDLKIYFPQILGWFERLDTEVACTLLENWPTLEELQAVPADTLRTFFHKHNGRKQELIEQRIVGIGNAIPAIRDRAVIEAKSMVVKVIVRMIRNLVQGIADLDEKIKEAAAAHPDFFIFDSLPGAGAALAPRLLAAFGSQRERYGSAQEVQSYTGIAPVTERSGKKKWVHFRRAAPKFLRQSFHEWAGHSIAYSVWARSYYQQLRRDGKGHHAAVRALAFKWIRILFRCWKNGVAYDENKYLATLVRRSSPLGNLVAAGKTL

SEQ ID NO: 495734 - protein, 353 aa, unidentified
MKYVGLDWAYRTAQWCALDPGGEIAGEGRFAADRDGLARLVLELGDEVTACLEMMSGALWVRDQLVDCGWQVEVADARKVKTVAPLAAKTDKVDARLLAELSRRELVPALWLPSLDERALRERLRRRMHLVRLRTSAKGRIFGLQTQWGVRVSLARLRRADGLTLLERAGVPEVWRRSVGECLALIDFLDARLELLDAELRPFAKADPRAALLDTIPGIAELLALTIAVEVGEISRFAGPEKLVSYGRLAPRVRQSGQARPRSGPLSKSGSRLLGWAAVEAAQQAWRESNPWHGLYLDVSARSGNRNSAKAAVARKILIAVWHMLSRNEPFNPAPRSTRGDSVPASSRLALAA

SEQ ID NO: 495735 - protein, 390 aa, unidentified
MEVLYQSCAGIDVHQANIVVCILHGPLTSTRPKREMATFDTTTKGLRACHDFLSQFHVEAVGMESTGVYWRPVWHALCDDFELILAQPAHMKAIPGQKTDKKDAHWIAKLTRIGLLPRSFVPDETIQELRELTRQRKHYVESRNRETNRIHKILQSGGIKLTTYIEDIMGLSDRNLLQLLVDGTPITPRIVHQSVYTSLKKKVPQLLEALDDYFSDHHRFMLKQSLEIYDFYQKQIELLEERMNGYLSQYENHVEILDSIPGIDVITASVIISEVGVDMSRFPTAGHLASWAGLCPGNNESAGKKRSTKIRHGNSYLKKCLCQAAFAARNQKGSPLADRFYQIQSRRGSQKATIALAHQLLKIAYILLKEQITYPEFLAQKKTTRDELVA

SEQ ID NO: 495736 - protein, 414 aa, unidentified
MEQIHDRVAGLDVHRDVVVACARVPGARGGTVTEKERFQTTTGALARLAGWLADRYVTLVAMEATGVYWKPVYYALEDSFEVWLCNAHHVKNVPGRKTDMSDAEWLADVAAHGMIRPSFVPPPAIRELRELTRYRKTQTDARVAEIQRLEKVLQDAGVKLTSVASKVLTQSGRLMVEALIDGQRDPAELANLAKGKLRPKISELTEALNAHFGAHHAVAAARILAHVDFLDATIKALTEQIDVRTKPYQAARELLMPVPGFDRLTIDTVIAETGADMSKFPGPGHLAKWAGVCPGNHESAGKRRRVGVTPGNPWLRRALVEAARAAARTKGSYFGAQYRQIAKRRGPNKAAVAVAHSLSDLIWHMLSTGEVYHDLGDGYFQRRHDPERETRRLVAQLEQLGFQVALTTLQDPAA

SEQ ID NO: 495737 - protein, 343 aa, unidentified
MQTITTIGLDIAKSVFQVHGVDGAGQVVIRRQLKRRSVLAFFQKLAPCLVGIEACASAHHWSRELQALGHTVRLMPPAYVKPYVKRQKNDATDAEAICEAVTRANMRFVPTKTPEQQSGLVLHRTRHLFIRQQTSVINAIRAHLAEFGIVAPVGRRGVEELLNVVADPNDRRVPEIARACLSALEAQLRRMKEQILEFDRLIRAWHRSNEMCMRLEEAPGVGPVLATALVAAVADPKSFRSGRNFSAWIGMVPKQHSSGGKNRLGNISKQGDRYLRGLFVAGALSVIRYAKIHGTKHRPWLTALLARRPTKVVAIALANKIARMVWALMARGERYKEPVALAR

SEQ ID NO: 495738 - protein, 315 aa, unidentified
MAQDAVFVGIDCGKEVLDVVVVPGGETLRVANSAAGHEALIAGLKGRPVALVGIEASGGYERAVRDALEAAGIAVAVLDPARVRHLAKAKGQRAKTDPIDAALIADFTARFQPSATPSNRQRERLADLLGLRRLLVDKRADLKKAVARLPADVAALAEPALEALGTAVEAAEREITRRAQEDAALAKKAKALSSAPGVGALTALTLAVLVPELGQLSGGQAAALLGVAPYPDDSGQRHGARRIAGGREDARRALYMAALTAATGRRKGGVLASFYDHLIGRGKPPKVALTACMRKLIVRLNAMLAHGGTWSEQTD

SEQ ID NO: 495739 - protein, 408 aa, unidentified
MNPLFVGIDVSSRNNVVYLMKPDGSKHSSFSVQNNLGGAKLLSEKIVSALHSMQLIDVVIGLEATSIYGDSLVYALREDGSLGRFRRKIHVLNPKQVKKFKEAYPDLPKNDFVDAFVIADHLRFGRIAKEVYMDDYRYQALRTLTRARFDVIQNLTREKQRFANYLFLKCSGMAQDKDIQNTSATTIALMEHFETVDDLANADLDELTAFIAETGRGRFADPNTVAKVIQTAARGSYRLPKTVNDTVNQAMSVSIASIRALKEQIKVLDKAIEQQFEIIPNTLISIPGIGKVYSAGIIAEIGDIHRFDSQASVAKFAGLVWLKNQSGEFEAEHSQMIKSGNRYLRYYLLEAANSVRRCDSEFRRYYDLKFKEVNKYQHKRALALTARKLIRLVFRLLKDNRLYIPPEG

SEQ ID NO: 495740 - protein, 361 aa, unidentified
MATKRIAQHEPVRVTVGVDTHKDTHVARAKDQLGRRLGERTVPTTPAGYRDVLAWARGLGQVETFGLEGTGSYGAALARHLRREGEAVVEVIRPNRQARRRNGKSDPADADAAASAVLAGDAAGQPKAGDSTVEMVRALRVARSTAIKARTQAINAMDALVVTAPEALREALRGLSKTKLVRTCARLRPGDLGCPTTATKTALRSLAVRHEALEAEVKALDGQIVPLIAKAAPRLVALFGVGPDTAGALLVAAGDNPGRLRSEAAFSMLCGSSPVEASSGKVTRHRLNRGGVRQANAALYRIVVVRLRFDQPTKDYMERRTAEGKSRKDVIRCLKRYVAREVYAVLTAVPSLADDAVDAVA

SEQ ID NO: 495741 - protein, 372 aa, unidentified
MSQSSTLYVGMDVHKESIAIAYVAQAHGAEVVSLGTIGTRQCDIDKLIRQLQSKAKHLVFVYEAGPCGYWLYRYLTKKDYICWVVAPSLIPKKAGDRVKTDRRDAMQLARLMRSGDLTPVYVPALDDEAIRDLSRAREDTLRDLKAAKLRLKAFLLRHDIRYTGRANWSPAHLRWLSEVVCPTPAQQIVFQEYVQTVTEQTERLGRLELELHEQVTTWRLAPVVEALQALRGVQFTVAVTTVAELGDLTRFDNPRQLMNYLGLTPSEYSSGGRRQQGSITKTGNTHARRALVEGAWAYRYPAKVSRHLQLRLEKLPTAIQAISWKAQVRLCKRYRHLMAKGTNANQVVVAIARELRAFMWAIAKHIAVTSKA

SEQ ID NO: 495742 - protein, 350 aa, unidentified
MTIIGGLDVHRQQITFDYVDNDGLVRWGQIRPATRKTLRAWLAGHCPDGDGEFALEGCTGWRYVTEELAAASVDVHLGDPAEIAVARGPKKRAKTDRADARLLRTLVLEGRFPGSWIPPAHVVEIRTLGRLYCTLMDERRAWQQRVHAQLFHQGCPPIRALLSEAGRAALASVELSAAGRQYVDTALRRIDELTAEIDPLRTQLVGFARRQRGCQALQRHYGIGWLCAAIMWAEIGDARRFSSSDQLVRFAGLDVTVYSSAGKRSPGHLSRQGCPELRWAAFEAAKCAARRGSPDHAYYHKLAAKHDGHNGKNPTLAVERKILRRCYHTLRELADAALALPDTPPQEVAA

SEQ ID NO: 495743 - protein, 364 aa, unidentified
MSQSAWLVAAVVPGFKRQPLKKLDADAEALLKLLHRWRKEAGTAGRQIKRIAVAYEAGRDGFWLARWLRMRDVDAYVIHPTSVAVSREHRRAKTDRLDTELLMRAFIGWLRGEKRHCNMVAIPTVDEEDARRPNRERGNLVTEQTRIVNQIKAILARFGIRTFRPTLRKAEEKLEKLRTAEGMVLPHNTRAELCRYLARLGVVRQQIRAIEQGRLRQLAMAPAEQEGPHAMMRLIARVLGVGIETADMLVNEVLSRHLRDGKAIARYAGLTGSPDESGKRRREKGLARAGNARVRCGMIQLAWRFLRFQKDSDLAQWFRARTADGRGSTRKTMIVALARKLLIALWRLATTGELSDGIVLRPAS

SEQ ID NO: 495744 - protein, 427 aa, unidentified
MKEQSGTIVGIDWSADSHTCYDLKSDKSFKIPDSVKGYERLLNDYPEAVFVIEEANNRIGDYLLINNREVYVLPPCRSKEARKYHFSSGAKSDSLDAKAIALTFKEHPSYCLKARYSGVGAKITKLVTMYNIVSKSHSQQCNRLYSVLLRYFPEYLHIMDKQYRSDTSLKVLSICPTLTELRKVSNEELRKILNKENYRMTSILRKKLDRIRSEGISWGDTSCEGNLIMFLANQILTLREEQERLREEMGETLENSPYRIILSIPGVKAVIGSYIVKAYLTHDFRSYQEMQKYAGTIPFLFQSGRKSIMLMRKKCDKDLRNMIHIAAFASLKTCGWARNYYKRKRKEGKTYGHALRALGNIILKIAFSMLSKMKEYNETLFLNAKGINTTQQNNTIIPEAFTNPEYSQDAHPSLAATKDVVENLNVT

SEQ ID NO: 495745 - protein, 316 aa, unidentified
MTSPQPFVGIDVSAKRLDVAVLPATTHFTVAHTDAGIASLVRRLRELDPQIVVLEATGGYEIPVAYAMSEAHLPVVIMNPKVLRHFAKSTGKLAKTDKLDARVLAHYAQAIQSPVRPLKDSEQMELATLMSRRRQLRDMIVMEGNRRRTSTPKVRGNIDQHLLYLRQLLDDLDREINDFIRRTPWWHEKSEILQSFNGVGPKVSASLIADLAELGTAPRTQISALAGLAPMNRDSGQWRGKRTIQGGRPAVRQALYMAALVASRRNPVIREFYQRLRQAGKPAKVALTACMRKILVILNAMLRNRTYWNPQLPLAA

SEQ ID NO: 495746 - protein, 397 aa, unidentified
MYIVGIDIAKRKHEAAVIDGDGAVIIKPFSFTNNCSGYNRLLAMLAKAKLPLDEVSFAMEATGHYWLALFTRLQKEGFRVQVINPVQTNSIRSFYIRQAKTDPRDALLIAEVIRFGHFSESTLHPENIYELRELCRGRHAIVSMQADVKRKVVALLDQVFPEYETAFANMFGDTSMAILQTCPTPKELSEMPLEELCHLIEVSSHKRFRMAKAQELQALARNSFGFAMAGDVFSTMIRLYAKHLDFLKQQVREMDRKIAEIMETLDTPITTITGIGLTLGAYILSEIGDISRFSSAAKLAAYAGIDPTMRQSGEYNGVRNRMSKRGSPYLRHAIWLAASSAVLHDPALKLYFQKKRDEGKPYMASVGHACRKMVSIIYAVMRDNKAYTPYIPNEISA

SEQ ID NO: 495747 - protein, 320 aa, unidentified
MPQNARIVGLDISKLKADGCIRSLQLDLSQPSTPEGQAEMVAWLRANAVGTAVMEASGGYERSWAKALREAGIVVRIVDPKRVRHFAKSAGQHAKNDPIDAEMIAWFAETFAAAPAQPYDAEREELDFLVTARTALLKLSTQIGNHREHRQPRAAHSAYAAILRSVAVQLTKLEGAIAAKLAATARFAARAEIIESVPGLATQTAAGVIAWLPELGQVSNKVAAALLGAAPYDDDSGKHKGERHIKGGRQEIRNLLYMATLGAATKHNPVLKVFYQRLRAKGKPAKVALIACMRKLIVILNTMLARGEKWDPSRCTAALV

SEQ ID NO: 495748 - protein, 421 aa, unidentified
MTQSAPHTFAAFVGIDWADAKHDVCLQAAGSAKRECCQLDHTPEAIDAWVITLRTRFNGQPVAVCLELNKGPLVFALHKYDFLILFPLNPLTLARYREAFTPSRAKDDPTDAALPLALLLTHRDTLRPRNPHSPTLRALAQLVEHRRRVVGDKVRLTNRLTSTLKNYFPHALQWFQDKDTLLFCDFLSRWPTLKAAQLARRSTLETFFRDHHVRSSDVIDKRIHAIHAASPLTIDEGVIAPHALLVQALVSQLRVTLQAIETFDNAIAQRAQSHPDFPLFQALPGAGPVFASRLLVAFGEQRDRYASAAELQRYAGIAPVTERSGKKSWVHWRLQCPKFLRQTFVEWAAESTRHSFWAQVYYQQQRDKGKAHQAAVRALAFKWIRILFRCWQERTPYNESAYLQALNSRGSSLLHNLAKEA

SEQ ID NO: 495749 - protein, 427 aa, unidentified
MYRIAGIDVHKKKLAVVVSDVEVHGEYQFERGWFGANPEQLRCLSQWLVEHQVEEVVMESTALYWKPVWGALERYWQPICQKGEGAGATSGILHLAQAQSNRGPRGRKKDFRDAERLVKRLVADELKLSFVPDWEQRLWRTLTRRRYQLTRARVQLQNQLEALLEEAHLKLSSLVSDLLGVSARRMLQAIADGETNPEALAGLADRRLRATPAQLSDALGACTELHAVYRRLIKMMLGELKVIEEHTAELNQELATLLRPHQDAVERLAEVPGLGVDSAQQILAEVGANAVVFASDKNLCSWVGICPGDEESAGESSSHRCPQGNRQMRRLLNQAANAAVKTKGSIFEIVYRRLVPRLGHNQTIGAVAHRLCRLIWLLLRKGVRYEERGPAVSQRSRQNRTSKMIRELRTLGYRVEFLNAVPSNPMP

SEQ ID NO: 495750 - protein, 355 aa, unidentified
MKYHTSTTQFNCGIDLHARQMYVCLMDRDGKKLVHTNIRNNDFAYFLKLVAPYRHDLTVCAECMFGWYWLADACAEAGLHFVLAHALYLKAIHGGKNKNDRIDSEKIAHLLRTNLIPPAYVYPAEKRPLRALLRQRILYVWNRSELLSRIRSHQLAHNRELLRQTRPNRGPWAEQLLAQEPDPVRQLALQNDLALISHYDAQLASLEKELLKLTRQTASRDFTLLQTTPGIGEYLGLTILHEIGDIARFPTVKDFLSYCRLVKGTVASAGKIKGLRGKKLGNPYLRWAFGEAAIVAKRDHEVLGPLAQRLEARMNGNKFKANAILAIKLARAVYYMLKSHTVFDADRLVAALSRN

SEQ ID NO: 495751 - protein, 342 aa, unidentified
MDYYAGIDVSLECSSLCIVDGTGKIVREGKVASEPEALLDWLRSVGHELSRIGLEAGPLSQWLFAAMREAGLAVELLETRHVRDAFKAMPVKSDRNDARGIAQLMRLGWFRPVHCKSIAAQEIRAMLTARKLVQSKLLDLENSLRGILRGFGLKVGKTTRTNFAGRIEELVKGHPNLQTITEALLRARAVLLAEFNGFEKRVRAMSRLHEKARLLMSTPAVGPIVSLTFACAIDDPSRFTSSKQAGPHFGLTPKKYQSGETDYTGRISKHGDASVREALYEAAHIMLTKPLKGCSQLKSWAMRIAKRAGMSKAKVALARRLAVIMHRMLADGTPFNAAAAAA

SEQ ID NO: 495752 - protein, 344 aa, unidentified
MKIAVLGVDLGKNVCSLVGLDDVGVVIVRRRARRDTLIDFVGKLPACIVGMEACCGAHHLGRLFAAQGHDVRLMSPEYVRPYVKAQKNDDRDAEGIAEAATRPTMRFVEIKTPAQLDMQTLHRSRDRLVGERTALINQLRAILLERGIVVPQGKRKLEHYLVMLMGEHQGGALTTRMRMLVADMQAQWRELDRRIAALEAEFTSFAKEDEDARRLTTIPGVGIMNATALIAAIGKAETFAHGRDLAAWLGLVPRQWTTGGKPRLMGISKHGNKYLRKLLIHGARAALPHVAERNTPLGRWTKGLLARVHPNVAVVALANKLARISWAVLRHGQHFAAKEAPMLA

SEQ ID NO: 495753 - protein, 336 aa, unidentified
MEWSVAIGVDTHKDTHAAVACDRLGRQLDSLQIPACLAGYRQLLAWAEALGQPAFSVEGSGSYGVGLARFLVEAGISVVECERPHRRDRRRGKSDLIDAALAARKLVLGDGLSELRGDGVREDLRLLLLERRSAATARTAALNQLHAVLVTAPERLRRRLDRLGSGALGHACARLRPSAESRHAAVLARLGRRVLALDRELESIDGEINERVQTLVPELLDECGVGALSAAQLLVSSGDPTRMRNEAAFAALAGTSPVDASSGKQQRHRLNRGGDRQLNRALHVITLARVRHHPPTAAYYQRLLDTGKTPREARRCVKRTLARHFYRKLREAQISP

SEQ ID NO: 495754 - protein, 346 aa, unidentified
MMIIGCDFHPSWQQVSWLDTETGEVGEQKLVHGSGDAQRFYEQLAAPALIGMEATGNSQWFIELMQDLGHEIWIGDAAQIRASYVRKQKTDKRDAEHIRKLVGEGRFPRLWTPDREQRDLRQLVLHRHKLVEIRSRVKNELQHLALNKGMQRKAKLWSQAGQKLLRELPLKPWAACRREDLLGLLAMLDQQIGKLDGAVQRAAEEHPQARLLMTQPGVGPNTALAFVLTIGEVSRFPRGKQVASYLGLIPREESSGGRQKLGAITKQGNRLLRSLLVEAAQIAVRFDPGFRKQYLHRCHQKPKGVAKVAAARKLAVRLYWMLRTQTPYPEIVRIESSPRVPLVGAS

SEQ ID NO: 495755 - protein, 355 aa, unidentified
MDNTKYIGMDVHKETISIAVLDSSGKLVMESVIETKGSTVVQFMRGLRGELHVTLEEGTWAAWLYDLLRPYVHEVLVCDPRKNALLKAGNKSDQIDARKLAELLYLNKLTPVYHGEHGVRALKELSRSYVTISGDLVRVMTRLKAVYRSWAIPCAGKQVYALRYRAEWLGKIHEAGVRRRAEFYYQQLDELRSLRQQVRREMLAESAKHQASKLLCQIPSIGPIRAAQLIAILQTPNRFRTKRQLWAYGGLAIETHSSADHRYIDGQLRPSKRPVSLRGLNRNHNHELKNIFKGAAIIAATKAGPFQEFYAALVAKGIRPEMARLTLARKIAAITLIVWKKGVSFDAQHLKPQTA

SEQ ID NO: 495756 - protein, 368 aa, unidentified
MGKSSKLFVGMDVHKDSIDVATGDERGGEVRHYGAIGGDLVAVTRLARKLESAGGPLVFVYEAGPCGFGIYRMLRERGHECWVVSPGMTPRSNADRVKTDRRDALKLCRLARAGELTPIHVPDALDEAMRDLVRTREDAVAMQRQARQRLGALLLRNDIRYAGKTAWTPAHRRWIAELKLPHGAQQIAFEEYVQALNEAAARVERLGAAIQAELLHWRWLPVVAALQAFRGIQTIHGVRIVAELGDLTRFGSARCLMAFLGLVPSEHSSGQRRQQGSITKAGNSSARRALVEAAWAYRYGARVSPIIARRQSGIAKSVTDLAWKAQLRLCARFRRLSARGLHKNKIVVAIARELSGFVWALGQKVKPA

SEQ ID NO: 495757 - protein, 440 aa, unidentified
MGSSTICNLDECRYRHDEVITQNSNKGRIILDQLFQYFVGIDWGTQTHCVVLLDREGRAVEQYNAEHSGKGLRALVDRLKQKTACDSAAVAIGVEVGWGALVETLIENGFALFSINPKQVDRFRDRFTVAGAKDDSRDALVLASSLRTDQRSYKQVQLESADVIRLRELSRFEDELKTELRRATNRLWQQLHRYYPQILKLSPAADDRFIWDLLSKVPAPGKGAKLTRARLQLILATHRIKRFTVEEVLAILKETPLVLAEGAAEAATEHVLLLLPQVIMLDQQLRNVGRRVKQILNSWVETTREGEPPCDASLVSSIPGIGPAIAAILLTEAARPIRERDYEALRCYAGTAPVTKQSAKRRAVTMRQACSPRLRQAVYYWASTSINCDNRSRQQYDQLRASGHQHARALRGLADRLLQVLIAMLKRSAPFDPSRRQAVQ

SEQ ID NO: 495758 - protein, 341 aa, unidentified
MAKNVYFVGLDIACDDFVASIYQSPKQSVITKEGIENTLDGFNVFIPWLKEHGLSKTNCIICMEATGVYNEAIAHYLASQGFRVSVEPPLKVKRAFDPVGHKTDPVDSRQIAEYAYRYSDELRFWQPKDEIIEKIKHLLTAREQFTKQSTAIKNAMKSYEKHIVQVPLIVKAHRQTLREIKKHITEIDKELDRIIRQNPSISKMNNQLKSIPGFGLLLSASLITLTGAFSDISHYKTLAAFLGICPYQHQSGKSIYRQPHMRSFGPAYPRKLLTLAARSVATHNDVFKKYYARKLAEGKAKQLVLNNISNKLIKLACALIKNNSRYTVTYRSINPMFLNIS

SEQ ID NO: 495759 - protein, 463 aa, unidentified
MTTGRKAADTRSKKPTDYLMKALPVLDPKAAAIDVGSEKLHVSIGGDVPKVFGTFTGDLEALREWFQQQEVHTVAMEATGVYWLYLYEVLEAAGLAVVVVNGRHVQNVPGRKTDMADCQWLATLHAHGLLRGGFVPPAEIRHLQDYQRLRADHIIGAASQVQKMQQALERMNIKLHDVISDLTGVSGLKVVRAILKGERRPGELLALCDEQIQKKKSQAVKESLRGCWKKEQLFALRQALELWEAYQQKISDCDQEIQGLLQQLADPQAPQGGGGLIGPVQLAPAKLPGKNAPAIERFQELLARLCGGRDVTQIPGLGAYSVMQLISEVGTDLSAWKTEKHFVSWLGLAGGRKQSGKRKGSIKAHRNRAGRMFCAAARSLAQTVDKALGGFYRRLRGRVGGLAANVALARKLALLFYRLLRYGADYVEKGLKAYEAKVLETEKRLLLKLAKKQGLTLIPAASN

SEQ ID NO: 495760 - protein, 432 aa, unidentified
MVHHKEAVRSRLRSGEGANKMESSYKVAGIDVHKAMLAVVITDAAATGEFRLERRKFGTGAAELRALTEWLAGQAVREAVMESTAQYWKPVWQALEGQVQLHLAQAHSNRAPRGRKGDFRDAERLVRRHIAGELILSFVPDAEQQLWRTLTRTRQQLRRDRVRLHNELESFLEQARIKLSSHLSDLLGVSGRRMLEALAEGQTDPARIAALADQAVRATPEQLCDAVSAAATMSGLHRHILKLFLERLQLIEQQIDSLETSIGDAMREQQESVRRLAEVPGLGADSALQIIAEVGPRAATFASASQLASWVGCCPGREESAEVSKSNRSPKGNRAMRRILSQSANAAVKAKGTVFERLYRRLVARMGHRKAIWAIAHRLCRITWKILHQGVRYEERGPRFNPKADQRRATSLLRQLRQLGYAVNLTPLNPGA

SEQ ID NO: 495761 - protein, 391 aa, unidentified
MIFVGIDVAKDKHDCFILNSEGTVLADVFTIANNRIGFETLLSRIQSCSQGESKIKVGLEATGHYSYNLLGFLLDSGLATYVINPLHTNLYRKSLSLRRTKTDRIDARTIAMMLMSDVDLKSYSNTAYHNEELKSLTRYRFDKVKERAKLKSSVARLVNILFPELEKLVSSLHIAVVYALLSNYPGASYIANANTEELAETLCPASKGRYTKSKTAEIQVAAGVSIGSKMPAKSMELKHTIALIRELDKEISEVESAIDKITSQMDSPIFTIPGIGRHMGAMILAEVGDFSNFASADKLLAYAGLSPSTYQSGQLQNCYAHMEKRGSRYLRYALFNAAKYVCLWCPTFSAYLEKKRSEGKHYNVAISHAAKKLVRLIFAMQRSGKAFLADY

SEQ ID NO: 495762 - protein, 337 aa, unidentified
MNKSELNFVPCGIEVSSETLLVARGSKAPREFPNTAAGHQDLLRFLEQGGGRVRVCLEATGRYGLDLALALDAARLPVMVANPRAVRHFASALMERSKTDPLDARVLAEYAARMPFQSWQPPSPTVLKLVGVVRRLQALTEMRAAEKNRLHAASLSEALSGYVRLEIAHHLRTLEHSVQRLTRAAEQFIGDDLALAERYQLLQSIPGFGPTSALHVLAELSLLGADLDVRQWVAAAGLDPRHYSSGSSVHQKTRISKLGNARLRRGLYMPALVAIQHEPHLAAFYRKLLGRGKAKMQALVAVMRKLLHAIYGMFKHHQTYDGSNIHALTPLPEALCV

SEQ ID NO: 495763 - protein, 315 aa, unidentified
MTETTLTCIGIDVSKAFLDVAISGTGQVRRYSNDAEGTAALAAAFDRPDLAVLEATGGYELVCVAVLQAQGWPVAVVNPRQVRDFARAGGQLAKTDALDARVLVAFGQTMRPSVLPPADPARDSLANLVARRRQIVDMAIAEKNRLQQATDQQITDSINAMLGFFKSQLIAIDTSIALAIEAEPRMANACKRLMDVPGIGSVTAAVILAELPELGHIDGKKIAALVGVAPINRDSGRHRGERHIAGGRHSVRCALYMATISGVRCNPQLTTFYKRLKANGKPPKVALIATLRKLTGILNAIMRDHIKQTAEQYGC

SEQ ID NO: 495764 - protein, 386 aa, unidentified
MTIQAQVSVHAQVFIPRDYQIFAGLDVDKHSIAVTFCNHEGLLRSLSLPYSAPQLLSYVRKQFPEQRLAFVYEAGPTGFGLYDELVGEGHPCLVVAPAMVPTAPGQRVKTNRLDSRKLAVSLRGGELKSIHVPSPKYRELRHLVQLRDTHVGQLTATKCRIKALLLYEGIAFPSDDGKEKQWSARVLDELLELPCSGAVRFKLDQLVGTLHFHFNAAADAQKQIRHCCQNDPELRQSIRLLSTIPGIGVIVATHLVARLGDPALITNVRQIAGFLGLVSSEHSTGEKQNRGPITRAGDSRLRNKLIQSAWVTIRKDPELHEFYRRIYQRHPKKVAARKAIVAVARKLTTRIYAVLKEERPFVLRPESSTAPLTAEETAGPRERLDD

SEQ ID NO: 495765 - protein, 353 aa, unidentified
MLTYCGVDFHSRQQKVVYGNMADGEIKRIELKHQTDEVRQFYQQLPKPVIVGLEATGSSSWFEKLLAELGHEVWIGHATEIRRRARSRQKNDWRDAELVFDLMIKGEFPRIYRLSEESLEILRQLRYRHRLVKTRTMAKNSLHAIALSAGLSLKTRLLTQAGRTKLDLLELSPVLTQQRQEWLELINQINQRITRVESELEKIAEADPRVRLLKTHHGIGLLTALALVHTLSPADRFSTNRKVTAFVGLEPCEDSSDDKEHWRGISKAGSRLLRFLLIEAGHSAIRKDAELRRFYFRLLVKRDKPRAKVAVARKLLVRAWIMLRDQIDYEEFLRRGVAVGSARTEHRPSMPGV

SEQ ID NO: 495766 - protein, 397 aa, unidentified
MRYAGIDIGSEEHVVAVVGPGGELLVPPTRFGEHSEGYEKLLEKLGDPKDLLVAMEATGHYWCNLFISLANRGIAVALIHPLSARRFAQAQMQRAKTDAIDAASIAQLAALRRPEPTPLPDELTRELRELVRLRERLVQDLGDRVRELHRVVDLAFPELTEHLGDLGSLKALTVLLAFPTAKALAIASVRMVSQLCYDGRHKVGEALAKALIAAAKRSVGQHQGGVFSLEVKYFCQDIKTLKERLGELNRDLEKRVESHEVATLIRTIGGIGPTTAARLIAELGDPADWKSADAIAAHIGTVPELKHSGKQRPMRAGISSLGNRRLRHALWMPVLAAIQHNAWLKYHYERLRARGKLAKVALIACMRKLIAAIYSVAKNRKPFVPRIPTAAAVQSAT

SEQ ID NO: 495767 - protein, 387 aa, unidentified
MPQANDLSRCLTALDQDSTVIAVIEMSQASWLVAGIVPGIERHPAKKLEPDPAALLRLLQRWRAEAERTGRQISRIAVAFEAGRDGVWLARWLRARDVEAEVIHPNSIAVSREHRRAKTDRLDTALLKRAFLGWLRGEPDHCQMIAIPSLEEEDAKRPGRERDALVGERTRIINRFKSTLAWLGIRGFKPNLRNAAARLEALRTPEGAPLPDNTLAELRRELARLQLIAAQIREIEKARLERLQQQPSTGAHPMIRVLAQVRGVGVETADMLANEAFSRPLRDPRAVARYGGLTGSPDESGSRRREKGLARAGNARVRRGMIQLAWRFLMFQKDSALARWYWRRTAEARGGARKTMIVALARKLLIGLWRLATIGEIPEGVVLRPAS

SEQ ID NO: 495768 - protein, 462 aa, unidentified
MSRPHSTPATHRIEGLPTIFANAAGLDIGADEIVVAVPPDRDAEPVRVFRTFTPDLEALVAWLVACRIDTVAMESTGVYWVPIYELLEQQGIVPYLVNGRHVKTVPGRKSDWNDAQWLQKLHALGLLAASFRPDAEIAALRTLVRYRAELIQHRAPHILHMQKALQQMNIQLERVLSDIMGSTGQLILRAIVAGERDPIVLAQHRNPACKSSTDTIAKALTGTWKDELIFVLTQALVIYDVYTAQIAVCDGELEQYLQRMEARSGEPDAPLPDLPPAKTDSHSKNAPRFNARAHYARLLGIDLVAVMGLSSSSVQTIISEIGTDMSRFPTVKHFGAWLGLAPRNDISGGKVLRSRTRKVANRASQAFRQAAQAVSRSDSAIGAYYRSMRARKGPEQATVATAHKIARIVYHLLKYGEAYEAESAAAYEQQREERELRVLTRRAAKLGYTLAAVQEPSPDPIP

SEQ ID NO: 495769 - protein, 393 aa, unidentified
MERPMSQAFDASRSLTALEQHNTIIAVVEMSQSKWLVAAVVPGIKRQPLKKLDADQESLLKLLHRWRKEAELAGHPIKRVVVAYEAGRDGFWLARWLRMHDVEAYVIHPTSIAVSREHRRAKTDRLDTELLLRALLGWLRGEKRHCSMVAIPTAEEEDAKRPNRERDSLVTEQTRIVNQIKAILIRFGIRSFRPKLRKAEQLLRDLRTAEGSPLPDNTRAEMYRHLVRLRMVREQIRAVETERLQKLKAEHGRKKGPHAMVRLIARVVGIGVETADMLVNEVFSRRFRDRRAVARYAGLTGSPDESGKRRREKGLARAGNARVRTGMIQLAWRFLRFQEDSALAQWFQTRAADGRGSTRKTMIVALARKLLIALWRLVTTGELSDGIVLRPAS

SEQ ID NO: 495770 - protein, 344 aa, unidentified
MQITTVGIDLAKNVFQVHGVNDRGMAVLRKQLRRDQVAAFFANLPPCLVGMEACGGAHHWARKLQGLGHTVKLMAPQFIKPYVKSNKNDAADAEAICEAVSRPTMRFVPIKNIEQQSVLALHRVRQGFVRARTAQANQIRGLLGEYGLIVPQGIGHIAIRVPDLIEDASNELPGTFRLLIHRLLEHLKQLQRQVAEIEGQIKAWHRSSEASRRLEKVPGIGLLTATALVATVGDAKNFDNGRQLAAWLGLVPRQHSSGGKSTLLGMSKRGDAYLRTLLIHGARSVIYRAGQRAHADTWLVKLIRRRNANVAAVALANKTARITWALLARDREFQFDYTTVAATA

SEQ ID NO: 495771 - protein, 387 aa, unidentified
MQSVTSATAVATTVRAKDITLFASLELSKSKWVVTINSPGSEKFSKHVIEGGDGACLLDLLSRSRAKAEQRYGVQIKTIVIQEAGLDGFWIHRLLLANGVESHVVDAASIAVARRHRRAKTDAIDGETLLRTLMAWARGERRVCSMVLAPSPEEEDRRRLTRERGTLLKERIQHTNRIRGLLSGQGVRDYNPLRRNRFERLEALRTGDGRELPAMLKAEIRRELDRIALATTQLAAVERARDALIRTDAEEPNNPAALLLKLKGLGPEFASLLWLESLFRSFGNRRQVAAYGGLAPSPWQSGGVERDQGISKSGNRRLRKTMIELAWFWLRHQPDSALSRWFQVRVGAAKGRIRRIAIVALARKLLVALWRYVTQGVVPEGVVFKAA

SEQ ID NO: 495772 - protein, 448 aa, unidentified
MMAPQEIDDEEYEQVLERVAAVDVAKGSGMVCTRVPHPSRPGKRQSRVWQVDADTGSVMELADHLASEGVAKVALEAGLRLLAYLVLPAGGTRPGRAAGQRPRRGECPGRPKSDKLDCVWQAKLTERGMLRPSFVPPAEIRRLRDYTRLRTDLTRERTRHWSRLEKLLEDVLIKVTSVASKTGSKPVRDMLEALIAGERDPEILAGLARGKMRARHDRLVEALTGRFDDHHGELARMLLDQIDALTAHIDQITGRAGELIMAMPGAWGVDADGVTGPGAGLDAGAPVLPAVARLDEITGIGRDAQVLIAEIGLDMGVFPTPGHLVSWAKLSPRTIQSGAKSQAGRTGKGNPYLKGVLGEAVAAAGRTDTFLGERYRRIARRRGKLRALVAVARSILVIAWHLLADPATRFRELGAGYYASRIDKNRKTRSHVRQLEALGYTVTLAHAA

SEQ ID NO: 495773 - protein, 386 aa, unidentified
MPQPNDLSRSLVILEQDATLIAVIEMGQSSWLVAGIVPGVERSPLKKLAVDESALLKLLNRWREEAEKAGHRIERIAIAFEAGRDGFWLARWLRARGIEAHVIHASSVAVSREHRRAKTDRLDTELLKRAFLGWLRGERDHCKMVAIPTLAQEDAKRPNRERESLVGEQSRIVNRMKAALARLGIRGFNPKLKKAVERLDGLRTPEGEPIPPNTLAELKHDMERRRLVRSQIRDIEGTRLERLEQAPGDGPHVMVRLLARVIGVGVETADMLVQEVLSRNLRDRRAVARYGGLTGSPDESGKKRREKGLARSGNARVRRGMIQLAWRFLMFQKDSALAHWFYARTKNAPQTRKTMIVALARKLLIALWRLVREGAIPEGIVLRPAL

SEQ ID NO: 495774 - protein, 355 aa, unidentified
MDSKKYIGMDVHKESISIAVMNGAGKIVMECVIETKASMILQFIDGLRGDVHVTFEEGTSAAWMYDLLKPHVTKLVVCDPRKNASMREGNQSDKIDARRLAELLRLNHLSPVYHGEHGLRSLKELVRSYLTITKDLGRVMTRVKAIYRSWAIPCSGKQVYAPRHRAEWLGKITEPGVRRRAEFYYQQLDALRTVRQEVRRELLAEGKKHQAWKRLCQIPSIGPIRSAVLLGILQTPHRFRTKRQLWTYSGFGIETQSSADHRSVNGQLERVKKQSSIRGLNRNCNHDLKNLFKGAAIVASSKPGPFQEFYSALLSKGIRPEMARLTLARKIATIALIVWKRGACFDAQHLKPQTA

SEQ ID NO: 495775 - protein, 355 aa, unidentified
MNAIKYIGMDVHLATISIAVLDVNGKLTMEVTIATQSSALLDFIRGLSGTLNVTFEEGTAAQWLYTLLEPHVAKVVVCDPRQNPRRLGEKKSDRLDARKLAEGLRLGTLKPVYHGNALGPALKEVSRSYRTLVSDTTRVMSRLKALYRARGIRCAGSRVYSPRFRDQWLQQLREPGVRGRAERLYKQLDLLLPLRQEARAALLSESRKHPAQKILRSIPTLGPVRVALLLALLQTPYRFRGKRQLWTYAGLALVTRTTADYQVLDGQVTRSRKPALVLGLNANHNHFLKALFKDAAVTALTRPGPFRDFYTTRVAQGMEPELARLTLARKIAAIALTLWKKGECFNAEHLKTQAA

SEQ ID NO: 495776 - protein, 436 aa, unidentified
MNAFFTNSQRPVVDCLNVAAGILARSEGETICNDPQVCRIVDLPVYYELETNNGNRDYRIQKEATMNTIVYVGMDVHKESYTLCCYSYDRDKVEFKQTIPSDYRLVLKYMERVREQYEGEVKFVCGYEAGCLGYSLYHQLTDHAVDCKILAPTTMAITNTNRVKTDRRDAGNIARCLAFHTYSEVYVPDDEDNAVKEYIRMRDDQKLMLKKIKQQILAFVLRKGKRFEGGKTYWTITHLKWLKNLELEGLDKETLSEYMITYEYLTDKIQRMDERIQSLAEGERYCEQVQNMSCLLGIKTHTALSLLVEIGDFDRFEKASRFSAFLGLVPGEDTTSDNVKRLNITKAGNSHLRRLLVEAAQSYTRGAIGHKSQDLKKRQSKCSPEVIAYADKANERLRRKFYRMTLQKNINRNVAATAVARELACFIWGMNTGNIA

SEQ ID NO: 495777 - protein, 425 aa, unidentified
MKNTQNEKILQIKDYTLIVGVDIGKEYHYARAINYRGIEHGKVIKFSNSAAGYRELDQWMGELCKQHGMRENIVGFEPTGHYWFCLGEHLQEKGHKLAIVNPMHVKRSKEMDDNSPTKNDRKDPKTIAMLVKDGRYREVYIPDALYQELREVLEERDRLQQQITAITNRVIRWLDIRFPEFYTVFKDWRRMTALATLKHFPTPEKIIEAGVEKIEATWKQEINRTSRKKAEQLVKAAANSVGRTAGKASAQTALDNLLAEYDLLRGQIERVEQTMPELLLQVPNAEKLLTIKGVGIITAVTFVGEVGDIKRFKDPRQIQKLAGLNLVENSSGKHTGQTTISRRGRKKLRHGLFMAMISILGNNPTFKALHHRNITRENNPLKKMQSILALCGKLIRVFYALLTKGVDYNPEKMLGDIQWPETKAA

SEQ ID NO: 495778 - protein, 422 aa, unidentified
MSQKPEIQYAAFLAIDWADQKHVWSLQDANSSTCERGEVDHMPEAVEAWVAQITQRFAGRPIAVAVEQSRGALVFMLSKYEQLHIFPVPPAMTANLRKAFYSSGAKTDPADADLLLDLLQRHREKLRRLSPDTEATRLIQNLVEERRKLVDEKTAQSNRLEAHLKIYFPQIPRWFDDVGSPLVCALLERWATLEALQKARPETLRSFFRKHHSRKKELIESRIKAIGEAMPALKDRAVVEAKAAVVKVSVQMIQVLQEGIEGLNRQIQEAAEAHPDFFIFDSLPGAGAVMAPRLLAAFGSQRERYQNAAEVQTFAGIAPVTESSGKSRWVHFRFACSKFLRQSFHEWAALSILRSQWARAYYELQCRRGKKHHAAVRALAFKWIRIIYRCWKERVAYDENVYLAALAKHNSPLVAATKAAAL

SEQ ID NO: 495779 - protein, 404 aa, unidentified
MNNVAGIDVSKGKSMVSILRPFGEVVAKPFSVGHTGSELKELADYLKSLDGETRVVMEHTGRYYEPVARFLHEEGIFVSAVNPKLIKDYGNNTLRKVKTDKADARKIARYGLDNWVELRQHTPMDTIRMQLKTLNRQQGLYSKTKTMMKNNLIALLDQTYPGINALFDSPVREDGSQKWVDFATAFWHVDCVRSMSLAAFTERYRKWCKRYGYNFSQSRTVEIHTQAQELIAMLPKDALTKTMIRQAIDALNAVSASLERLKAEMRTLAAQLPEYPIVMAMRGVGDSLGPQLMAEIGDVTRFTHRNAITAFAGVDPGADQSGTHEAKSTRASKSGPPELRKALFLVMDCLLKTMPQDDPVYRFMDKKRAEGKPYLVYMTAGANKFLRIYYGRVKEYLASLENAD

SEQ ID NO: 495780 - protein, 326 aa, unidentified
MQGKEASEQETKVQSNVGIDISKCWLDAHVLPGDERLHVANNCAGIRQLKRWLSHYRIALVAIEATGKWHRHLHRSLVASAIPAAIVDPYRVRMFAKAQGILAKTDQLDARVLALFAAMMAPPVRPVAPQTMAELAELVVARASAVEAQTALKNQFAAAESTFLKRQLDRRISRAGKDIAALDREILKRIKADTSLARRYAVLTSIPSFGFAVAATLIACLAEIGSTTAKQIGMLAGLAPIADQSGDRQGIRVIWGGRPAVRRVLYLAALSASRFNADMKAFYKRLIDNGKPSKVALIAVARKLVVLANTLVSEDRTWQPSAPIQA

SEQ ID NO: 495781 - protein, 408 aa, unidentified
MLTPIVKRCAGLDVHKMVVVATVILEQEDGSLREETRQFGTFRKHRRQMVRWLDGLGVELAVMESTGIFWKSIFACLEEAGIATYVVNARHVKKVPGRKTDVSDSQWLATLGRLGLLKPGFIPPKDLRELRLITRQRIKLRGMLAAETNRLHKVLDDAGIRLGGVVSDINGLSARALIGGLIEGKAPEEIVPYVHGRLKEKIPQLLETLDEPLSERHRFLLHSLEEHIGYLEKEMATLDHYLFAAMNPYKRQWEILQTIPGIDAISAAMLLVEIGIEMQSFGSAHRLASWAGMCPGNNESAGKQKGGRTRKGNRVVRQVLCEISNAASKSKSQFKGQYQGLVIRRGHKRAIIAVGHKVLRVVYAMLKSLQPYRDPEIDYARLVVQRNAPRWLVALKRYGFLPAVGAAA

SEQ ID NO: 495782 - protein, 347 aa, unidentified
MGYYVGLDVSLDTVCVCIVDEQGKVIKEEGVPSTPEAIGGYLLGTGLKITKIGLESGNLTHYLTKGLLSMKYEVVVMESRKMAAILAVTINKTDKNDARGIANALRVGHYKSCVHRSDDSLETRTLLNGRGTLVDERTHLVSSIKGHLKVYGIKLGKGKDKTFRQKVETSISKLRDCVQKTIKALLNVLDVLDVEIKKLDKEVIHLGREDADVELLQSIDGVGPITALAFKAEMDNPARFKNSKDTGAYLGLTPTQYSSGETQRQGGISKCGSRRTRCLLVEAATSLLMRSKKWSKLKAWGMKLMKKKGAKKAIVAVARKMAVMMHRMLITKEPFKRTDKPKEEKVA

SEQ ID NO: 495783 - protein, 428 aa, unidentified
MTDLSDGTPACVLVAIDIAKQWNAALIEYPDGKRQRFQFKHVHEDYERLVKLLRSAGSSCRIAFEPTGVYHRTLAYRLLQEGFHVCQVSAVAGARYRDAMFNSWDKNDPKDAQVILELLKQGITQQYHDPLVKGTHDLEEISKTYELISRARTKLRHGIITHYLPLHFPEIERFWYSSRNDWFVRFLMQFPTAAAVRILDREAFITAAWEVVGRKVNKRRQLEEIHELAQNSIALPLAADSVAVETFRLQLSRYDALNQQRNALQARAHELLKDRRDYQRLCEIPGIGPIIALVILAEAGDLRRFSHHKQFLKYCGLDLAKAQSGVSRGHERLSKRGNARLRCALWQASISAIRMRENAFRDKYTRYIAADPENRDRRRKARTAVTAKLARVAYSLVKFDRPYRGRFEVGLPSGSISLNAAVEATGTS

SEQ ID NO: 495784 - protein, 355 aa, unidentified
MTGEKYIGLDVHQATICVAVMDAKGKVVMESILETKATTILEFLAGLRGTLSVTFEEGTWAAWLYDLLKPHVANLVVCNPRKNALLKHGNKSDKIDARKLANLLRLNDLEPVYHGETGVRMLRELARSYLTIVKDVSRVMSRLKAIYRSWAIPCAGRDVYYTRHRGEWLGKIPEAGSRRRAEQLYQQLDMLQPLRQQARRELLAESRKHTITAKLRQIPSLGPIRSALAVALIQTPHRFRTKRQLWTYSGLGLETRDSGEYHYVDGQVRRRKKQVFIRGLNKDYNHDLKGLFKAAATRASVQPGPFQDFYQRSLAKGIQPTMARLTLARKIAAITLTLWKKGENFDAEKLKAQAA

SEQ ID NO: 495785 - protein, 341 aa, unidentified
MRDTTIGIDLAKNVFHLCAMDERGQVSWRKKMTRRGLETVLATLPPSTIAMEACGGSHDWARRCLEHGHVPRLISGQFVKPFVKSNKNDVIDAEAITEAAQRPTMRFVPVKTTQQQDIQGLHRVRERLIRGRTALVNQCRGLILENGIAIRQGRHHLQRQLPELVENVSGKLSEAFSALIRELYEELVGLNERISTTERSLREISRSVEPCARLMSIPGIGYLTATAIFAAVGNGSEFKNGRHMAAWLGLVPRQVTTGGKPKLVGISKRGDTYLRKLLIHGARSVMISRNDLGSPQRWARKVAFRSCSNKAAVALANKNARIAWKLLRSGESFRDLAPQRT

SEQ ID NO: 495786 - protein, 383 aa, unidentified
MTGTEPHAWEKGLMDTITYVGLDVHKATVAVAVAQGGRGGEVRQLGVFENRSEILTKLAARLSKPGRRLSFCYEAGPCGYGLHRLLTGGGHDCVVVAPSLIPVKAGDRVKTDRRDALMLAKLHRAGELTPIWIPDAAHEAMRDLVRARATAGRVLSKARQHLQSFLLRHDQIYRGARAWTLAYRRWLTTVRFAHPAQQIVLQDYIHAVQDAEARLDRLTRQIEELLPSWAMAPVVAALQAMRGVALVVAVTVVAEVGDFRRFANARQLMAYLGLVPSEHSSGASVRRGGITKAGNVLARRVLIEGAWTYRMPARVSRKLHDRNEKLSPAIRDIAWKGQIRLCSRYRRLAAAGKPKVVVTTAIAREMVGFIWAIARIAQPALEG

SEQ ID NO: 495787 - protein, 371 aa, unidentified
MNYNTVYVGMDVHKESFTFCAYTIDAEKGSRFQRTEADYKNVLRYLEFLRTVYGNDANFICGYEAGCLGYTLYHQLTEHHVNCVILAPTTMLEQRSKKRIKTDKRDAEIIAKCLAQHNYSPVHIPTAADEETKEFLRMRDDHKLALKKVKQQILAFCLRHNYRYDGNSHWTAAHIKWLKSLKPEALYKEILDEYLLTYTALSDKLERLDKRIEELASKDEYKESVKKLCCFIGVKTHTALSVLVEVGDFHRFASAQNFASYLGLVPGEDSSGDGQTRLGITKAGNRHVRMLLTEASQCYARGQIGFKSKKLKSRQAGNSPQVIAYADKANERLRRRYYMVLGKSKKPNVAKTAIARELACFMWGMMTDHVA

SEQ ID NO: 495788 - protein, 405 aa, unidentified
MDIIVERGAGLDVHKGTVVACIMGTGIKKETRTYLTMTNDLFRPKQWLKENRITHVAMESTGVYWKPVFNVLEDAFEVMLVNARHVKNVPGRKTDVKDSEWLCKLLRSGLVRGSFIPPKPVRELRDLTRYKRKLIQSVTSEKQRVEKVLEDANIKLSSIASDTFGASGKRIIEELMKGELRPDEMAELSKGKLRQRKEELKEALVGNMEDHHKRMIQTSLGHINAMEEILLSVEHKIQEKIELHFKEEFELLKTIPSVKDSASVIIAEMGVNMDLFPTETHLSSWAGMSPGNNESAGKKKSGATTHGNKYLKTILTEFAWIASKMKGTYLFAKYRSLVGRRGKKKALVAVGHKILISCYQILKYKVPYKELGANYLTERKKDHIAKSYIKRLNSLGYAVTLKEVA

SEQ ID NO: 495789 - protein, 375 aa, unidentified
MKQYSKYVGLDVHKEKIMVAVAQANRRAPVYYGEVANTSEAIGKVVRKIAGQEETGFCYEAGPCGYGLYRQITAMGHQCEVAAPSLIPKKSGTRVKTDRRDALALAGLYRAGELTPVWVPDKEQEAMRDMTRAREDMKMMERHSRQRLGGILLRHGKVYPGRSKWTQGHFRWLEGIRFETASQQIVFQEYVDMVKHTQGRVAAMEAEMRKALDGYQMKEVVEGLMALRGIDLIAAMTIVAELGDISRFTSPRQLMAHLGLVPSAHSSGGKRRQGGITKTGNSHVRRVLVEGSWSYLLPARKTAHLQRKAAKASKAVQEIAWKAQKRLCSRYWYLVYKGKLPVESCTAVARELVGFIWAIACEVMGNKRSLPVGKG

SEQ ID NO: 495790 - protein, 329 aa, unidentified
MKTQKLNSSLYCGIDVSGDTLDICYQLLDGTFEWSKHLNSITGFKEIWKLTGDQYHLVMESTGVYQLPLCFFLVEKKANYSVVNALQIKRYIQMKLERNKTDKKDAFHICMYGIENHPECYQMPSLLYFECRAINNAIETITCEITSFKNKIHALTRLNIESKVILTGYNKILKTLQLELKKLEVELYKKLIAWQPDLVKQVSSVVGIGKRATAILIVTTQGFKHTASYQQLISYAGLSPKEYSSGSSIRGRVRICKQGGALLRHTLYMCALNAKETNKACKALFDRLVAKGKNKKLAVIAVANKLLKQVFGVVRTGTLFDRNYYENLA

SEQ ID NO: 495791 - protein, 471 aa, unidentified
MSRAKSTISSLAQGEIRSTQGLPVVNPHAAGADIGAQQIFVCIPGPDQTQIVRSFGIYTADLHTLADWLVENGIQTIAMESTGVYWIPLFEVLEDHGIHCCLISGNLARRLPARHKTDVLDCQWIQTLHSLGLLTESFRPDADLIALRSLLRHRAQLVEHRSPHILHMQKALTQMNIRLDQAVSDVTGQTGLAIIRAIVAGERDPHKLAALRNPRCKKTEDEIAQALTGTWRAEHLFILKQSLEFYDFYTHQIEACDLEIERTYSAIRPDWPDPSPDDQEPLPPNKRGSHSKNLSKESPVHVRQHLRRITGIDLTAVDGLSLDLAQKIVSEIGTDMSRFPTEKHFCSWLKLSPNNQITGGKIIRSSTGKSHNRARQAFLQAAASVAQSDCAFGAFYRRLKARVGPAQAQVATAHKIARVVYHLLKYQVEYRQTTAQEYEQQFREREIRHLQRKAARLGFSLTPIPEAGSVS

SEQ ID NO: 495792 - protein, 315 aa, unidentified
MMSTQVFVGIDVSKAQLDLAFRPAGRFCAPNDEGGCAQVLERLRAMPPTLVVLEATGGLEIPLTGVLAAAGVPVVVVNPRQVRDFAKATGRLAKTDALDAQTLAHFAEVMRPERRPVPDEQTQVLAAILARRRQLVEMLTAEKNRLGRAAQPVRNSLRTHIAWLERELNHTDHDLAHAIRESPVWREKEELLRSTPGVGPVMTTTLLANLPELGTLTGKQIAALAGVAPLNRDSGTWRGKRTVWGGRAQIRATLYMAALVAARFNPVIRAFYQRLCAAGKAKKVALTACMRKLLIILNAMLKHRSPWRAELVQCT

SEQ ID NO: 495793 - protein, 365 aa, unidentified
MKKIAYVGIDYHLKTLTCAVLIEGEKELFDTMRFTNIDKNIKKYMKKLSDTYDIRTCYEASCNGYSFQRKMQSWGYHCDVIAPSLIPKKPGDRRKNDFRDARTLVQNYAHGMLTIVHPPTEQEEAVRSLIRCRIAMKKNEKSLKQQINSLLLAQGFHWEKSKWTIQHRIWLKKIESQDENTQLVLDEYLGLLEYLSSRIQYLDQKIEDIANSKIYAPSVKKLKAFKGIRTLTAMLLIAEITDFRRFPNPRALMAYLGLIPSEDTSDDKQKGGTITKAGNSRCRTQIVESVIHYIKRPIISATMKSDLKNVDAYSANIAIKCMKRLHKRYWFLVMKGKNSNKAKTAIAREFVGFIWAMMQPEPAAI

SEQ ID NO: 495794 - protein, 343 aa, unidentified
MDHFAGLDVSVKETSVCIVDDTGKIVREVKVPSEPKALLKVLTNPAYRFKRIGLEAGPLSQWLLSALAEAGLPVICVETRHMRAVLQAQINKTDRNDARGIAQMMRVGLYRPVHVKTLRSQKLRMLLTHRKLLQSKAIAVDNDLRGTLRNFGLKVGIAGKAKFEARIKELVENYPDLAVLVEPLLIVRRVLREQIVILHRRLLAIVRDDEVCRRLMTVPGVGPVVALTYRATIDVPARFRKSKAVGAVFGLTCSKYQSGEINRTGAISRCGDDMMRMMLYEAAQSMLVRSTRWSWLKAWAMQIARRRGMKKAIVALARRLAVIMHRLWIDGTEFRWTREVAAA

SEQ ID NO: 495795 - protein, 387 aa, unidentified
MQKPHDESKACLTAFVQDSTLTVVIEMSLANWLVAGMIPGVDRQPLKKIAPNPEVLLQLLHRWRDEAIKAGKGITRIAVAYETGRDGFWLARWLRARGIDAHVIHATSVAVSREHRRAKTDRIDTAVLQRGFLGWLRGERGHCSMAYVPTVEEEDAKRPHRDRESLLKLRTSTVNRMKSILIQFGVRNFNPILRKAPENLASVRTPEGIPLPPNSVTALRRHMERFRVIKEQIKAIERTRLERLQRDPAEKLNAMVFLLVRIIGLGIETAEQLVHEILSRNLRDRKAVARYARLTGAPDESGSKRRDKGLSRSGNRRVRNILIQLSWRLLRFQPESNLVLWFKKRTANAQGSRKPMIVAFARKLIIALWRYVNTGLVPEGFQLRSAT

SEQ ID NO: 495796 - protein, 345 aa, unidentified
MKIIGCDFHPSFQQIAMVDTETGEHTEKKLTPAEAEQFYRQLPGEVVVGVEASGNMLWFERLLAGLGHRLRLGDASQIQSREVRKQKTDQRAAELILQLLQENRFPESWVPSLEMRDVRQLLVHRHKLVGMRRQVKNQLQHLAMNQGLQLKHRLWTQKGRQRLEELALSGWPARRREDGLRWLDQLTRDVTEMDAAVAKEAQQNAMAQLLQTHPGVGPITSLAYVLTLGQIERFPRSRNVVSYLGLNPSEHSSGVRRRYGAISKQGNPMLRSLLVEAGQSASRVDTELKRAYQRLKQKKHSAVAKVMVARKLAVRLYWMWKTQQPYSATRMQGSPSHPVALKPCR

SEQ ID NO: 495797 - protein, 441 aa, unidentified
MAMRTREDDEVYPNAAAIDVGASSHWVAVPRTADHQPVREFGTMTDDLNAMADWLLACGVDTVALESTGVYWIPVYEVLEQRGLTVWLVDARQMKYVPGRKSDVQDCQWLQKLMSLGLLRAAWRPAGEVCVVRAVVRQRELLLTEQGSWVQRMQKALVQINLQLTEVLTDVMGTTGQAIIRAIVAGERDPKVLARFRHSLVKASTEDVIRALTGNWRDEHLFVLAQALAMFDSLAERILECDAKTEALLVPLGRHDVELSGPDKKRQKNTPRFDARTALARWAGVDLTRINGLSVATVMTILSEIGPNLSRFASVKHFCSWLRLCPATKISGGKTLSSGTRRSANRARQALKMAAMSLSRSDSALGAFYRRLCARMDKPRANTAVAHKLARMVYFMLTRGEAFVDQGQQRYEEQQRQRSIAALRRRATALGFQLQPNPPTP

SEQ ID NO: 495798 - protein, 406 aa, unidentified
MNAVGIDVSKEKSTVVILRPFGEVVAAPYDVSHTDSELDRLAKVIKKLPGETRVVMEATGVYYEPVARRLHEHGIFVSVVNPVLISDYGDNTLRKAKTDRKDAIKIASYALSAWLDLVEYKPEEDRRRTLKSLNRQVKKVIKVNTMLKNNLISLTDTAFPGINKLFTSQERPSDGHLKWVDFVAKFPHRDTVAKLSLNAFKKKYKSWCEKNKYHYQDSKAEEIHAHARKCVAGVSAEETFCLMVTKAAEFVNAACENENALKNEMDRLSSTLPEYEVVMGMYGVGKSTGPQLMAEIGDTRRFRNRRAITAFFGYDTEPDDSGQHISKSRPITKKGSPSLRRTLFIIMKTLVTKKPVDNPVYAFLDKKRSEGKHYYSYMTAASAKFLRIYYAKVNEVLNKKETSMCT

SEQ ID NO: 495799 - protein, 340 aa, unidentified
MSEITTIGLDLAKHVFQVHGIDAQGTTVLRKRLRRGQVLAFFSRIPRCVVGLEACATAHYWARKLGALGHEVRLMPAQYVKAYIKRNKHDAADAEAICEAVQRPTMRFVSVKTAEQQATALLHRGREQLVRQRTMLVNALRAHLAEFGIVAAQGLRNVGELIAIVRDDGDTRLPDMARQVLQVLANQIEQIETAVAALERQLLAWHKTNPVSQRLASIPGIGPIIATAIAATVADPKVFRSGREFAAWLGLVPRQNSTGGKIRLGGITKRGNRYLRRLLINGASANLLRSKATKADPWVIGLRRRRPPLVVAVALANKTARIAWAVMLREKEYQPRAMAA

SEQ ID NO: 495800 - protein, 350 aa, unidentified
MTIVAEKFAYVIGVDTHARTHTYAITAARTGACLGCEVFPVTAAGIKRAIGWIRRNTTGAVLAAVEGTRSYGASLTRALTAENMPVVEAKPPWKKARGGAGKTDAIDAMAAATGILGTDTGRLLFPRIEGTRAAVSVLLAGRRRLEGQTTANRNALNALVREIDLGLDTREALTDKTVAEIGSWRPRPSDTVEQQTGREEASHLAREITAAAVRIKANEARLGRLCQELAPGLQDQPGLGPVTVTVGIILAAYSHHGRVRDEAAFASLAGVSPLQASSGNTTRHRLNRTGDRQLNMALDVVARTRMRCNQKTRDFVERRTKEGLSYREIKRVLKRYIARDIFRQLEKIFA

SEQ ID NO: 495801 - protein, 449 aa, unidentified
MGNCAGVDWAGDKHDVLVENQGGEQLLAATFVHDEKGLRALCRTLVRLRVQLIAIERPDGLLVERLLDAGLRVLPMHPKQVAAARARFRAAGGKSDRFDAFVLCELARTDNHRFRVLEPDGDQTKALRALTRTREDLVHARVAICGQLRAELERFWPGPIGLFQKLDSPISLAFLERYPSPADARGLGERRLAAFLARQHYSGGQKPAELLAKLRRAPEGCVGEAEMAARRAIVLALVAAITPLVEQIKQLTEQIGAALREHPDGEIFLSLFRTPGSVVTAAELLAEIGDCRARYPTRDTLAADAGQAAVAVESGKHKAANFRWGCNKRLRGAFCTLADSTRHWHPWAQDRYADARARGHDHPRALRTLGRAWCRVVWRCWQDRVPYDAARHRGLQQHITVTIPTSSGPVPDLAATKQMAGAAVTQRATRRAERKALDGKPTSATAARA

SEQ ID NO: 495802 - protein, 408 aa, unidentified
MEVLYPCCCGLDVHKRSVTACVLSPGPGGEPVRQLRTFSTMTGDLLELGDWLAVARVTHVAMESTGVYWKPVWNLLEAQFTLLLVNPAHIKAVPGRKTDVKDAEWLAQLLRHGLVAASMVPERSQRELRELTRYRTSLKQDRASEVNRLHKTLEGANIKLGSVVSDLTGVSARQMLRELAGGNGDLAQIADLARGTMRAKREQLLRALDGRLSPHQRFMITQHLVAIDAFDAQVTTVEAEIERRMRPFEPELTLVQTIPGLGPRLSTTILAEIGTDMRRFPSAAHLASWAGMCPGHHQSAGTQYSGRTRKANPWLRAALTEAAQAAGRTETELGTRFRRLAARRGKKRAAVAIGRVILELVSHVLTTGHPYEDTLVRAIEQDDTSQEQRRLIRRLEELGHQVVLAPAA

SEQ ID NO: 495803 - protein, 413 aa, unidentified
MTESSDYESVQVFIGVDVGKDTHHAVAINRSGKRLFDKALPNDENKLRSLISDLKQHGQILLVVDQPATIGALPVAVARSEGVLVGYLPGLAMRRIADLHAGEAKTDARDAAIIAEAARTLPHALRTLKLADEQIAELSMLCGFDDDLAAQTTQASNRIRGLLTQIHPALERVLGPRLEHPAVLDLLQRYPSPEKLASLGEKKLAAQLCKLAPRLGKRLAADIAQALAEQTVVVPGTNAAAVVLPRLALQLITLRKQRDEVALEVEQRVLAHPLYPVLTSMPGVGVRTAARLLTEVACRAFASAAHLAAYAGLAPVTRRSGSSIRGEHPSRRGNKALKRALFLSAFAALRDPLSRAYYTRKMSQGKRHNQALIALARRRCDVLFAMMRDGTFYTRRGHNMLDNLIGHPPQKNK

SEQ ID NO: 495804 - protein, 374 aa, unidentified
MNNNTTVYIGMDVHKESFTLCCFALGEKEPGHVQTVPSEHILVVKYVNRLRKLYGEETEFICGYEAGCLGYTLYHQLKGCGLECVILAPTTMMEQKGKKRVKTDKRDAKNIAKCLAYHTYSPVHIPTEEDEQVKEYIRMRDDIKANLKRTKQQILSFCLRHNYRFDGTTHHWTQAHLKWLRSLKPEGLYAEILQEYLLTYDNLTDKLERFDKRIEELASNETYQENVHKLSCFIGVKTVTALAVLTEVGDFKRFASAQHFASYIGLTPGEDSSGGDQNRLGITKAGNRHVRCLLVEAAQSYSRGQIGFKSKALKARQEGNNPGIIAYADKANERLRRKYYRMVLKNNKRTNVAKTAVARELACFMWGMITGNVA

SEQ ID NO: 495805 - protein, 353 aa, unidentified
MSTSASDLFKLYIGIDVHKKQWSVSIFTEAAHHRTFSQPPLPEALKSYIDKNFPGSAVTCAYEATKLGYWIYRKLVTFGYACLVVNAADIPTSDRESTSKTDPVDSRKIAKALRANLLTSIHVPDPVTEGDRQLFRYRKKLQADQTRVKNRIKDKLLFTGTPIPEEFDNPNWCKQFLQWLRKVELPDASTRLTLDRLLDQYDFLHKHFLKVSIEVRKLQREARYKKQARLLRSIPGIGPLTTVELLCEIEDIHRFPSFKKFNGFIGFRPYSHSSGEHDWKGSMTYRRHNALRSSLVECAWSAIQKDPIMARRYNELKQRMTGKRSIIIIARKLTARIYTVLKNEIPYQVGLAA

SEQ ID NO: 495806 - protein, 426 aa, unidentified
MDILYESCAGLDVHKKSVSACVRQVDSRGKVSSSVREFGTMTEDILRMGNWMAAQGVKHVAMESTGVYWKPIWNLLEGRFELMLCNARDVKNVPGRKTDTRDCQWLAQLLQYGLLRASFIPPKAQRELRDLTRHRAQLTGEHTRVANRIAKTLEDANIKLSSVASDILGKSGRLMLKAIIAGETDPQTLAELAQRKMRGKIPELRKALRGGVGEHHRYMLRTLFDHLQYLEKTIDELDEHIDELMGSETLNAAPKENDALPFDEAVELLRTIPGIETRTAQAVLAEIATNMGQFPSSAHLASWAGLCPGNNESGGKRKSGKTTHGNRWLKRALSQAAWAASHTKQTYLSAQYGRIARRRGRKRAIVALSHTLLTIIYHMLDQCLAYQDLGPDYFDTIAPESRARFYKKQLEKLGFNVTLETREMAA

SEQ ID NO: 495807 - protein, 414 aa, unidentified
MGLSRWVGRAIGLDVHRDFCVVAICEEGQVRTGARVPSTPEGLAVFAESLIGSDRVALEVTGSCWEVARILEPHVDRVIVVSPDDTGITQARAKTDRLDARTLARLLWSGELESVWMPDERCRVLRRRLARREQLVHSRSRAKNEIHAVLQRRLQGKPPCADLFGVKGRRWLAGLELPLEERESVEAGIRQIDFLDGEIAAVERLIAQQALQWPEIRRLMTVPGVNLICAASFIAAVGDPHRFFTSRKLVAYLGLDPKVRQSGDAPARSGRISKRGSAAARWALVEAAWSVVLQPGPLHAFYDRTRARRGHGKAIVATARKLAILFWCMLTRREDYAHQQPSLTKKKLRRLEITAGAPKYARTARGIWSANDAIRDAERELARQAEASYKRMVLDQRAGAPARRVGASATPERA

SEQ ID NO: 495808 - protein, 437 aa, unidentified
MRVLYPRCCGLDVHKASIAACVVCIGEDNQVQEQVRRFGTMTAELQDLAAWLKACSVERVAMESTGVYWKPVWNILEAAGLDLLLANAQQVKALPGRKTDQKDSQWLADLQQHGLLRNSFVPPRVIRDLRDLTRSRARLAQEHSAVSNRIQKVLEDANIKLAAVASDVLGVSGRLILKALIQGQTDAGRLAELSKGRLREKIPALRRALEGHVTAHHQFLLQRYWEQFEFLEKQIAHSDAEIAQRMKFTPEELARVVALLPPGASMPLSPREQALQCWMELPGIARVSGSSIVAEIGVDMNQYPSAAHLASWATLCPGNDESAGKRRSGKTRKGNVWLRRTMSEAAWAASHSKGTYFAAQFRRIAARRGKKRANIAVAHSLLVTGYTMLKYKRHYKELGDNFFNTINKDYIKKSCMKRLDKLGYEVTLKTKDNQSRA

SEQ ID NO: 495809 - protein, 399 aa, unidentified
MECRDAPAERPRPAPGQALSRSLVALDQNSTIIAVIEMSQSSWLVAGVLPGIERQPRKKLEPNAEGLLGLLHRWRDEAIRAGKEITRIALAFEAGRDGFWLARWLEARGVETHVIHPSSVAVSREHRRAKTDRLDTELLKRGFLGWLRGERGHCSMARVPTIAEEDAKRPNRERECLVGERTRIVNRIKATLARMGIRNFKPTLRKAAERLATVHTPEGMPLPPNTLAELQRDMARLGFVVSQIKEIEEARQKRLEQEPESGPHAMVRQLVRIVGVGVETADMLVHEVLSRPMRDRRAVARYAGLTGAPDESGAQRREQGLARAGNARVRRGMVQLAWRFLLFQKESALALWYRARTADSRTGTRKTMIVALARKLVIALWRFVTTGETLEGVVLRPAG

SEQ ID NO: 495810 - protein, 384 aa, unidentified
MDQTTSTLSANTLHCALELSKNSWLLAIQFRDREQPSLYPIEGGNTDKLMAKLAAARDCWAKVNGALPAITLCYEVGYDAFRLARFLRARGIECLVIDPGSLQVNRRARRVKTDRVDVKMLLRTLIAWCRGERHVWSLVRIPSVDEEDLRRSHRERSRLVRERTAHINRIKGLLFAQGVRGINIKSQYKTLAVDQLVTGDGHRLPPRLVCEVAREIQRLAMVQEQIAKIERERDTAPTPCEATERKRRLLLRLKSIGPAISALLSREVYYRQFANRRQVGSFLGLTPSPYSSGEEERCQGISRAGSGHVRAIMIEAAWLWIRHQPKSALTRWFLERTAGQSTRMRKTMIVAVARKLAIALWRYVEHGLVPQGAILNPPTTGNAR

SEQ ID NO: 495811 - protein, 271 aa, unidentified
MKYTPVGVDIAKHLIQVHFINEHSGEIVDKQLRSRDFLTFFSNREPCLIGMEACGGSQHWARELEKLGHQVRLMQGRFVKAFVMGNKNDVMDARAIWMAVQQPGKAIAVKTEEQQSVLVLHRSRQQLVKFRTAQINALHGTLLEFGETLHKGRAAMDKELPVALERMKARLPPYLITVLEDQYNRLNELDSLIDGIEKQLNSVARQNETCKRLMEIPGVGTLIATAAVATMGEASAFKSGREFAAYVGLVPKQTGSGGKVRLLGISRRGDT

SEQ ID NO: 495812 - protein, 348 aa, unidentified
MKELMAGIDLHSNNIMVGIVDRDGKRLAHQKLPCELKRIGEYLAPFKGRLAGMAVESTYNWYWLVDGLQAAGYPVVLANPAKIAPYSGLKHADDKSDAFFLAELLRLGILPTGYVLDAKLRPVRDLLRRRMKLVQHRTSLMLSFKSLFTRTTGGQMSLNRLKTMEVKEAQELYEHPANQLIAGLQLQHIEQLNASISRLEKAVLGVARELPCYPKLKTLPGVGIILGLTITMEIGDIKRFAGPGQFASYCRTVAAECTSNGKSKGENNRKCGNKYLAWAFVEAANFARRYDEQCRQWYERKAARTSKVVATKALACKLAKAAWYLVAEETDYEPGRMFPPTTGAAMKK

SEQ ID NO: 495813 - protein, 366 aa, unidentified
MGMLAEQADHVIGVDTHRDSHAAAAIDGATGAVGAQTTLPADAFGYRRLVRFGRRHAPGRRVWAIESSGSFGAGLTAFLLANGEWVVEIDRPKRPARRNGAKSDELDAIRAAREALQREHLAQPRARGDREAIRVLLITRRGAIRARTKAINHLKALVVTAREELRHQLRNTPTDELVFRCSRLRTLPSHSPEHRATIVALRHTARRILALEAEANDLESEIEDLVKQTIPQLLDEIGVGPITAAQLYCSWSHRGRLRNDGAFAMLGGAAPIPASSGQTIRYRLNRAGDRQLNCALHTIVLTRLQHDPATRAYAARRIADGKTPREIKRCLKRYVARNLFRLLEATGPHPAAAHRPPRSRTLGHCS

SEQ ID NO: 495814 - protein, 369 aa, unidentified
MGKYSEVFVAFDVAKKKHAVAIAEGGRTGEVRFMGDVENNPLPIERTIKRLANRYDRLHVCFEAGPTGYGLYRQVQALGHDCMVVAPALIPKRAGERIKTNRRDAVTLARLHRAGELTGVWAPDPAHEAVRDLARAREAAGDDLRRKRQQLLSFLLRHSRIYSGGGHWTLAHRRWLAGQKFEHAAQQIVFQEGIDAIEDSLQRLRRLERQLALVVPEWSMAPVVEAYQAMRGASFLVAVTFAAEIGDVRRFDTPRQLASFLGLVPAESSTGDTIRRKGLTLAGNRRARRALVEAAWTYRYPARVSETLRARLEGLPKPVRDIAWKAQVRLCARYRRLSATGKKPPVVVAAIARETAAFLWAIGREVAPA

SEQ ID NO: 495815 - protein, 350 aa, unidentified
MLIIGCDYHPGFEQIAYVDSETGEFQERGLKHPEEAEKFYRTLWEQGVKVRVGMEASGHARWFERLLEELSFELWTGDAAKIRAKRVRKKKTDREDARHILQLMLKDDFPKIWVPTWQNRDVRQLLWHRHRMVQTRTRIMNQLQAVAINEGVRYKKRLWREAGRKQLESLSLAPWASRRRKDLLEVLDGINPTIAELTQAIEEEAEKCPQARRLMTHPGVGALTAVAFVLIIGEANRFDCGKQIAAYLGLVPEEDSSGERRRLGHISKQGNSLLRFLLVEAGQATARCDQRWRNQFFHLAQRRGRKIAKVAMARRLAVRLYWMWRREWNYEQLQSFGSHVGQPGNPHGVQ

SEQ ID NO: 495816 - protein, 341 aa, unidentified
MMIIGCDFHPRMQQIAYLDQDTGECGERRLNHLQEAAEFYRRLRGRQVRIGVEATGNFRWFLRLMSELGHEVLLGDPSAIHASNPRKQKTDKRDARHLLTLLVEDRFPVVWQPSVENEDTRQLLLHRCRMVRFRARVKNQLDSMAKNEGLLSKRVWCAKRREQIEALPLAGWDAERRKDLLALLDGLDKRIEPLDQAVRKTAEGNAEARLLMTHPGVGPVVSLAYVLTIGDWRRFPRGKQVGSYLGLIPTEESSSNKRRLGQISKQGNTLVRWLLVEAATKAQRYDASWHRQYVRLSMNKHHGVAKVAIAHKLAVRLYWMLRSGQDYMQIVERGSHAGQSA

SEQ ID NO: 495817 - protein, 346 aa, unidentified
MTQHFVGIDLHKSVVQVCVMDDQGEVVREKRLSVDTSEDAEQVLAFLAGWKDRARFVVEALGMNRWFVNACRAAGLEIVIADPCKLGLKALGKKTDRRDARELARRLRLGDIERFALTYYPSDEEYGQRKLIRTRHRLVQIRQQLVNQIRGLLNAYRIRPPFSVLFNKGARAWLHACALPVEELTHCLQALAATLDGAQQQIEVLNKRVHALGNEKAALQLQEHLPSVGPQTALTLLCELGDVTRFHSRRAIASYAGLVPRVSQSAEKSHHGRLTKRGSRELRWILSQWAVRLLARNPLVQAWARPRLKRTHRNKVRLALARRLLIGVSIMLTRGEVFSLERCLGA

SEQ ID NO: 495818 - protein, 388 aa, unidentified
MNAIHPCVAEQTAIRTQLGAVFISLELSRSIWLVTSLSPGGGERMSKHSVKAGDVAGLLERFSSLAAKACARTGENFSIIAVQEAGLDGFWIHRVLVSHGIESWVVDPASIATSRRRRRAKTDKIDGEALVRALLAYKRGEPRVCAMVRVPTPEEEDRRRIGRERKTLIAERVEHVNRIKGLLFSQGISGYEPIVRARRARLDELRTGDGRPLPDYLKAQVIRELDRLELLLAQIKAVEAARDALVTPGQAGNPISPQVAMLVGLRGIGPEFANVLHSEGLFRHFDNRRQVAAYSGLAPTPWQSGSIDREQGVSKAGNPRLRSTMVELAWLWTRHQPESALSKWFQERAKIDSRRKVTIVALARKLLVALWKYVTAGVMIEGAVMKSA

SEQ ID NO: 495819 - protein, 416 aa, unidentified
MNAVGIDVSSRKSTVAVLRPLGEVVCLPFDVTHDIAGLASLAEKLKAIDGETRVVMEHTGRYYEAVAKALHEAGFFVCAVNPLLIKEYGANSLRRVKTDKADAVKIARYALDNWADLRDFTPMDAIRYDLKTLNRQFQLASKQRTASANNLIALLEQSFPGIRKCFDSPVRSDGTQKWVDFAHSFWHVDCVRKQPFPAFCERYRKWCKRHAYLFKLSNAEEVYALAKRAVVLTPKSKVVKVLVQEAANQLISISRSVEVYRAEMDRLAAMLPEYPVVMAMYGVGKSYGPQLMAEIGDVRRFERKQALVAFAGIDPMPNQSGDKNVRSNKSSKRGSPYLRKTLFNVIRTYLQCAPQDEPVFQFLNRKRAEGKPFYVYMLAAANKFLRRYYAKLRDYFASLDTLQSVDPIPTTLKASL

SEQ ID NO: 495820 - protein, 354 aa, unidentified
MNATQVFEKRKIAVAIGIDLAKDHCDVVAYNADNKICFTKANMTYPKLMEWLANTPPAVVLMEACKGSMVHARDIADLGHDARLVKGADVKALRNVCQKNDIRDADYIARLLYVPGTKFVFVKNQRQQSLQFLQNEYKSIQELRIQVGNQIHAGLEEFGCPGPKSKKFIQSRMMAHLEKNAEPISDEVMSSFLRRRDMWLNLFEQEEEAKKRMEEIAKTDDDAKRIMTVPGVGAQTAVGMLVHIGGDIGRFKNSGQFAASIGLVPKQNSTGGNTTLNGITKCGPKRLRANLVQCAQVILMHADKLKGNFGDWVRKMQDSGKKRGVIACAIASKIARIVYRLMKDKVDYTPVPSR

SEQ ID NO: 495821 - protein, 316 aa, unidentified
METPQTFVGIDVSSQHLDVDSLPASHHFSEPNTEDGIASLVLRLGKLNPQIVLLEATGGYEVPAAYALYEAGLPVVIMNPKALRHFAKAIGKLAKTDKLDAQVLALYAQSIQPPVRPLRDQEQLDLANLMTRRRQLQGMIVMEENRRRTCTPRVRGNIELSLAHLRQLLKDLDREIHDSIRRTPLWHENSEILQSFKGIGPKVSASLIAVIPELGTLPGNKVSALAGLAPMNRDSGQYRGKRKIQGGRPAVRQALYMAALVAAHHNPVIMEFYQRLRLAGKPAKLALTACMRKILVILNAMLKNRTYWNPQLPLAA

SEQ ID NO: 495822 - protein, 348 aa, unidentified
MNNMHYVGLDIHKKTISYCVRQSDGTILQENTIAATRPALETWMRHLPQPWTAGMEATMFTGWIYDYLGESGATVKVAHSAMLKAIAAGKKKNDQIDARKIADLLRCDYFPECHMAPREIRDRRRVLRYRNLLVRQAVQMKNKVSGLLMEVGVQYNQQKVHGKKYFAELLHEQRKEMPPSLPELLQLSRSTIESLTGMERQLMRALEQDDLLAARVERLATIPGVGRVLSLTWALEIGEISRFSSVKDAVSYCGLCGAEKSSGGKAERTSLSKQRNKHLQSMLIEAAKLAPRWNAELALVYEREKLKGNSNQATLAVARKLVAYLMAVDRRKQGFTKTAPKVGEKQAA

SEQ ID NO: 495823 - protein, 403 aa, unidentified
MNAVGIDVSKGKSMVAIMRPFGEIVSAPFEIKHTASDINSLVELINSVEGESRIVMEHTGRYYEVLAHQLSEANLFVSAINPKLIKDFDNDSLRKVKSDKADAVKIARYALDKWQNLKQYSVMDELRNQLKTMNRQFSFYMKHKTAMKNNLIGILDQTYPGVNTYFDSPARSDGSQKWVDFASTYWHVDCVRKMSLNAFIDHYQNWCKRKKYNFSQSKAEEIYGKAKELVPVLPKDEITKLIIKQAIDQLNSASVTVEELRSLMDKTASKLPEYPIVMQMKGVGSSLGPQLMAEIGDVSRFTHKGAITAFAGVDPGVNESGSYEQKSVPTSKRGSSGLRKTLFQIMDVLIKTHPQDDPVYQFLDKKRAQGKPYYVYMTAGANKFLRIYYGRVKEYLSSLPESE

SEQ ID NO: 495824 - protein, 382 aa, unidentified
MEPTLVALREMSVARTAKLFVSLELGDKKWHVAASDGGMRVSEYTVSAGDGPGLLEVIERARVRFGLGEDAAVVSCYEAGRDGFWLHRFLVSKGIENRLVDAASIEVNRRQRRAKTDRLDARKLLSMLIRFEAGEKRVWSVLRVPSEAEEDARRPHRERERLVKERRAHVVRIKSLLVLHNIRLKRVGGAGWAERLEALGLAPQLRQELEREAERLALVERQIGQLEAEQAKGLAEAAKAEVAEVLLVKQQRLQRLVAVGPIGAWVLTRELFGWRQFNNRRELAGSVGLGSSPYRSGELNHDQGISKAGNRRVRTLMVELAWSWLRYQPDSALSKWYLQRFGQGNTRSRRIGIVALARRLLIALWQFVEHGVIPEGAKLKAA

SEQ ID NO: 495825 - protein, 354 aa, unidentified
MRLYQTTTEFNCGVDLHARQMYVCTVDRTGQVLVHRNIKDNDFEFFLRLMAPYRHSLTVCSECCFCWYWLADACAEANIPFVLAHALYLRSIQADKKKNDRVDSEKIAHLLRTNMIPYAYVYPRGMRPLRTLLRRRMAYVWQRAQLVGWQTCGLIAEGKPEAEIQAGSREKWEQELLQRHDNEYLKLMVQSDLALIREYDRQIDLLERAINTAAKKDRWRDLHVLLSVPGVGKVLSMTLLYEIGEISRFDRHQDFCSYARLIKGSVESAGVIKGMRGGKMGNGYLKWAFKEAVMVAKRAHPDIRAMAQRLERRHGRQTTNAILAHRLARAVYYMLKHGMTFSMELFNQRTEHAA

SEQ ID NO: 495826 - protein, 415 aa, unidentified
MGDRQQWYAGVDWGSQSHCVFLTDGDGRKIGEKIFKHGGEGLAEMAAWLMMASGAAEPGQIHVAIEVPHGPVVETLIERGFAVHAINPKQMDRFRDRFTMAGAKDDSRDAEVMASCLRTDPRCFRLLAAADPIIIELREWSRIAEDLGVERNRIVNRLREQLWRYFPALLELEADLGAEWLLELWEAAPTPDKASRLREATIGKLLKRHRIRRFDAAFVVNTLRRPPVRVAAGTVEAASAHVALLVPRIRLLNRQIKDAHSRIDGLTARLMPAEEAEPGQKKQHDAEILASLPGVGRTILATLLAEAWDALRRRDYAALRSLTGVAPVTKRSGKSCIVVRRQACHDRLANAVYHWARVAVQHDPRSRAKYSELRRRGHSHGRALRSVADRLLNVACAMLKSGTAFNPSSVAQKPA

SEQ ID NO: 495827 - protein, 408 aa, unidentified
MKTLHKRCAGIDVHKAEVVACLRLITNRKVEREVRRFPTTAHGLLELAEWLEKARCTHVAMEATGVYWKPVWHILDGRFALILANAAHVKTVPGRKSDVNDASWLADLLAHGLIRPSFVPPAAIQELRDLTRTRKQLTREVVQHSQRIQAVLEEANVKLCSVITDILGASGRRMLKAMIAGETDAHKLAALGSERLGCAPVALVEALTGRMREHPRFLLAQHLRTIEQLEETIRVFDTRIEAKLVPFRDIVERLKEVPGLGTTAAEVVLAEIGTDMSPFPSAGHLLSWAGFVPRLDESAGKRRSMRIRKGAPWLKPVLVQAAWGAARKKNSYFQAQFLRLKARHGAKKAAIAVAASILTTVYHMLRDGTCYRDLGPDYFARRNPAKIAARLANRIRNLGYHVEITAAA

SEQ ID NO: 495828 - protein, 345 aa, unidentified
MSISRVGVDIAKSVFHVHGVDRHDQVEWRGKYKRDKWLDAIVKRVPAGAEIGMEACASAHHWARELQARGYHVKLIAAQFVKPYVKSNKNDRVDAEAICEAMGRPTMRFVAVKTAAQQDVQAAHRIRSELVQQRTAKANQIRGLVGEYGLVAPTGIGQLRAALPRWLEDAENGLTDDFRVLLSGLAEDLRHLDDRIATVTERIERHAQTDPVAKRLMTLRGVGTLTASALAGALGDAQAFKCGRDFAASLGLTPRQHSTGGRDRLLGISKRGDSYLRTLLTHGARAVLRHCESKEDNLSHWIRQLVERKHPNVAVVALANKTARIAWAITRHDRAYDPDLAAHTA

SEQ ID NO: 495829 - protein, 414 aa, unidentified
MELVYDRCCALDVHKRQVTACVHVPDRKGKRTELRAEFQTMTPDLLAMRDWLKGLGVSCVAMEATGVYWKPVYHLLEDDFELLLVNAQHVKNVPGRKTDVGDAQWLCQLLEHGLLRASFVPPKPIRELRDLTRYRKSLVWERAREANRLQKLLEDANIKLSDVASDVLGASGRAMLAALCEGNNDPAALAELARGKLRAKLPALETALQGRFSSHHALLLSHLLSHIDYLDHSIDSLSAEIEERLDPFAQQRELLCTIPGVAERTAEVILAELGPDMGRFPSHRHAASWAAICPGNDESAGKRKTGKTRKGDRWLRTALVEAANSAAGRTKDTYLRAQYLRVKRRQGHKKAIVAVAHSILVAAYYILRDQVPYQELGGDFFIRRQDQERLTQRLVRQLERLGQRVTLEPALQER

SEQ ID NO: 495830 - protein, 348 aa, unidentified
MTRVGCDLHARDQQVAVLDTATGEIQERRLVHDGDSVEQFYTALPGPVTVGIESTGYALWFHALLRRLGHEVIVGDAAKIRAMVVRKTKTDRRDAAHLLDLLRHDRFPTVWLPEPAVRDQRTLLAHRMRLVRMRTMVKNGVHAIALNYRLALGPSLFTRAGVAQLQALSLPPHTACRRSESLELLSWLNTRIKGLDDQIGEAAHAHPEAQRLMTHPGVGPLSALATVLVLGAVTRFPTSKHVVSYVGLAPAIESSAGKHRLGRITKQGNALLRYVLGQAGQAAIKRDPDLNRLYYAVLHRRGRSRAKIAVARKLLVRLYVMLRDQIDYPTFLHRAPAAARRKEMTPTS

SEQ ID NO: 495831 - protein, 347 aa, unidentified
MKISTIGIDLAKDIFQIHAVDQNGKVVQRKRLRRGEMAAYFCNLEPCLIGMEACASSHYWARKLGGMGHTVKLMAPQFVKPYVKTNKNDAADAEAICEAVTRPNMRFVAIKNVDQQTALSMHRVRQLLVEERTALASQIRGLLSEFGIVIPRGIDSLGNQIQGILEDAENELTPGMRELISERYDHMQTITQQIDGFDKRIRLMNKQSELAIKLEAIPGVGPLTASAFVATIGNALEFKNGRQLAAYIGLVPRQHSSGGKQTLLGISKRGDTYLRTLLIHGARAVVRSVIGKPDKNPWLQELMGRRNRNIATVALANKNVRTIWALLAKSREYDPNYAERELLAKVA

SEQ ID NO: 495832 - protein, 355 aa, unidentified
MTDNHQKIIIGVDTHKDFHHVAVISALGESLTDRKFDATPDGYAALIAWVTGQGDVLRAGVEGTGSYGAGLTARLRSAGIEVIDVLAPDKQERRLRGKTDQIDAYSAARAVLSKRATTVPKIRDGEVEAMRILRTSRRLVVKQRTEIMNQLHSLLVSAPETLRAKFAGLKAKDLAKACARLRELADDDVVTAATKDAAKSLGRRHVELSLEADRFEESIRALVTAYAPELLAVYGVGPDVAATLLTVAGENVDRIGTESALAHLAGTAPIPASSGKTNRHRLNRGGNRQGNAAFHRIVLVRMKRHPETRAYVEKTLARGKTKRDTMRLLKRYLAREIFPILIAVQERHATTQIAA

SEQ ID NO: 495833 - protein, 474 aa, unidentified
MEVGRVRREPEEIPDADHELVLERVCAIDVAKASGAVCVRVPHEAKPGRRVSRVWQVPATTRAITDLAARLVNERIAKVTVESTSDYWRIWFYLLEAAGLDVQLVNARDVKNLPGRPKTDKLDSVWLAKLTEKGLLRPSFVPPAPIRRLRDYTRLRVDLTRDRVRHYQRLEKLLEDALIKVSSVASKMDSLSVRDMLEALIAGERDPRRLAELARGRMKSKHPALVEALTGRFAEHHAELARMLLDQIDSLSAQIEQLTLRVEQLLAAMPEAQPPDPAQHGGGPSPDTDPAPPGPVPASGVLPGQLTDPAGGLSAWERLDEITGVGQLAAQVIIAEIGLDMRRFATADHLVSWAKLSPRTNQSGTKQRDGKTGKGNPYLKGVLGEAAAAAAKTDTFLGARYRRIAQRRGKLKALVAVARSILIIVWQLLANPTTRYRDLGADYHTTRIDTTRKIRNHIPQLTALGYRVTLEPAA

SEQ ID NO: 495834 - protein, 341 aa, unidentified
MRYIGLDVHKDNITACVLTSTGKPKFEKDFLKESGNWILDELLDFKDKEGFCVMMESGTYAYAPFRFFSDRGVEVHVVHAKALKVITDSDKKTDRKDALTIAKMLRLWRKGDIDLQMAYMPTREQCELKDICRYREEISKKIGDETRRIKSHMSRNCEHLPEEFDNFQTEKAREFVKKTYPEDRTLMRRMDCLIDLFGERDLIKEDVESRLPGSREVELLCGIPGIGRQTAVQIMSMIVDVNRFADAEKLCAYFGMAPRVRDSGGKEHHGRMTKNGDRMMRMIMERVTESHVRNCNSSLTQYYKRKREEMGTKKALITASRKMLSVIYAVLKSGRDFRPAA

SEQ ID NO: 495835 - protein, 420 aa, unidentified
MEVVHERCAGLDVHKKTVVACVLRPGPGGSVQRETRTFSTMLGALEALAAWLTEAEVTHIALEATGVYWKPLYNVLEGVGRWTILVVNPEHVKAISGRKTDRADAERLAFLVRHDLLQGSFIPERNQRELRELTRARTALVRERARVVQRLEKVLEGANIKLGAVVSDLLGVSGQRMLEAALQGVSDPDELADLAHPRLQPKRDLLVASLQGRLTRPLRFLAQQHLDHWRELDTRIAAFDDEIADQLRPFDELLARLDAIPGVGRRTAEVIATEIGTEVSAFPSDRQLAAWAGVSPGNRQSGGRRKTARTRHGNPWLKGALTEAAWAASRCRHGYLPAQYRRLAGRRGRKRALVAVAHSLVTIIYHLIAEGTQYQDLGTHYFDERERANRERRALAILHGLGYDVSLTPHPSTAPAPGGA

SEQ ID NO: 495836 - protein, 462 aa, unidentified
MKRKIRTRASQRAQRERRVLERIHLNAAGIDIGSKSHWVAVPEDRDPNPVREFQCFTSDLLALADWLEACGIDTVAMESTGVYWIPLYEILEERGIEVLLVNARHVKGVPGRKSDLRDCQWLQQLHTFGLLRGSFRPDAPIAALRSLVRHRDQLVEAAGSYVQRMQKAMVLMNLQLHNVITDVTGVTGIAILRDIVAGETDPAKLARHRHPRCRASEAEIAASLTGHYREEHRFVLRQALELYDVYQEKIGRCDEQIEARLRELEATCAAPAARLSPSRRPARCGANEPPFEIRSPLFALCGGVDLSELPGIGPYGALKLIAEIGLDMRRWATEQHFTAWLTLAPNRRITGGRVLSSRTLPSANRAAKVLRMAAMNLGRSDHALGAFYRRLAARIGKAKAITATARKLAVLVYRMLRYHMPYREMSTADYDEQQRSRILRGLRKRAASLGFELVDTSTGLVM

SEQ ID NO: 495837 - protein, 392 aa, unidentified
MYIVGIDIGKNHHEASIVSPEGKQIGRSLRFATTHKGADSLMSFIFNNIGNSSCIFGMEATGHYWYPIYSFLKARGYTIYVINPIQSDSLRKMYIRQTKNDSIDSFLIAEVIRFGQFTTTSMADENILAMRQLCRYRDSVISSRTEIKLRISTIMEQIFPEYEKQFSSLWVSTSMGILEKYFTPENIENAPIDELFEIIKDKSHNRLTKAKAISIKEAAADTFGIKIAQDAFSFQLKQLIDRMNFLDKQIEALDCQILEYYEKFDCYLHTIPGIGMIAAATILTEIGDINRFKSSSALVAFAGIDPTVRQSGEFNSTHNHMSKRGSPYLRHAIFLAATTCSFHNSPLNAYYKKKREQGKHHLTATGAVARKLTTVIYAVLRDSKPYEPKKFC

SEQ ID NO: 495838 - protein, 400 aa, unidentified
METVADRAKPTAIRTDLRAIFVSLELSRSRWLITSLSPGNRDRMSKHSVQAGDIAGMLARFSELRHKTQARTGQSFPIVVIQEAGLDGFWIHRVLRKEEIESHVVDPASIATSRRRRRANTDRIDGEALIRVLLAFKRGEPRVCMMVRAPTPAEEDRRRLCRERKVLTAERVQHVNRIKGLLFAQGVSEYEPLRRDRRDRLARLVTGDGRLLPNYLKAQIGRELDRLELLLEQIKAVEAERDSLLASTEANKSALPAMLLDLKGIGPEFAAILWSDGLCRHFDNRRQVAAYAGLAPTPWQSGSVDREQGISKAGNPRLRETMIQLAWLWRRHQPRSVLTLWFEERVRHNAGRLKKRTIVALARKLLVALWKCERRHCDRRGYEQNCLIHHSCRIFQSSRT

SEQ ID NO: 495839 - protein, 350 aa, unidentified
MAYQHYWVGLDAGHLETAVCLIDAEGGILFEAICETKSGPLRDILRRFGVEAAQCLTIEAGNGTQMVRELRSCGFPVQVVDVRKSSKFLAIRRQKTDVHDARGLAELGRLARSIKSQVFVKPMEHQNIRTLINVRRTMLKNRARTDALIQSIFRLYGGNVKLLNGRGALTAEVNNQVRKMRQHGLEIGVNLQPLVEISEALREQISTLDRQMRDIASSNPTCRNFQTIPGVGPVIALSFYSAIGDPHRFERSRDVGAYLGLTPTLYQSGATSRRGRISRHGNKLTRMHLITAATVLLCRIEIESRLRTWGLQLAQRVGLLKARVAVARKLAVIMLEMWKSGSLFHPCGKP

SEQ ID NO: 495840 - protein, 406 aa, unidentified
MDHLFAGLDWASCTHAVCIIDNTGAVGEQFEVTHDAAGLRELLARLQRCVPVPAQLPIAIERPSGLLVDVLIEAGYPVVPIHPNIVKATRPRYRSHGAKSDASDAYLLADLLRTDGARFHPLQPQSDAIRALRALVRGRDDLVATRVQLANQLRSLLESFWPGAAAVFAEIDSPIALAFVQRYPTPTSAARCGEKRLAAFLAQHRYCGRRSPAALLERLRAAPRGHADEAETDAKGTLVHALAATLNVVVEQIAQLTSRVEHAVSELPDGQLIMSLPRAGQVCAAQILAELGDVRDRFPSDAQLAAEAGVAPLTYQSGKSRSVTFRWACNHRLRRALTCFADNSRHASQWPAQVYAKARARGCDHPHAIRILARAWTRVLWRMWHDRSTYDVARHRAALPAITTGG

SEQ ID NO: 495841 - protein, 423 aa, unidentified
MTKLTSTPAGAVLVAVDMSKNRQEVLIERPEGGRRRRMTVMATRQDYDGFAEQLAAIGRRIIVGFEATGNYHRTLAHRLLTAGFELRLISSVALARTREALHNGWDKNDPKDAQVILHMLRIGATQRYVDPLAAGINDLQELSKTHETISRMKTQTWHRILTHYLPLYFPEIARFAGNSRSDWFLALIERFPTPASITALDREAFSAAAWPLIGRKVSKARLINDIYETASASTALPVPEDSAAITMFRMVIAQGRSLIHQRDAIERLAHARLADDVDYQLLRNIPGIGPINALTILAEAGDLRRFNHHRQFLKFCGLDLATCQSGTFRGRTKLSKYGNARLRRTFWMAAQVAARQRDNSFRDKLGRYTAGHADDADRRRKAMTALTAKMARVAHAVIKTGTEYRPFLERSDARWKDPSLQVP

SEQ ID NO: 495842 - protein, 427 aa, unidentified
MNDVEEKDDGLRVFAGIDWSTTLHAVSLVNDVGKVLLKEQVADTSIGFEKLCALLVEKSGLLPQQIGVAIEVSRGRLVEGLIERGFSVFGINPKQLDRFRDRFGVAGAKDDDKDAFVLASSLRTDRRCFRRLEIDEPLVVELREWSRELQGLRAEHTRITNQMRDHLRRYFPQLLDVDDDVSAPYMLDLFSLTPTPGAAQKIKLGDVATLVKRYRIRKHSAEEVLALLQQKPLFVAPGTIPGVSARVRHLVARVRLLMEQLKAAEANIDRICGILAAPVDDASAAETVEGQKGEHRDAAILLSLAGVGRIVCATLLAEAAQAIRERDYHALRLLTGVAPVTRASGKGRGVLMRRACHPRLREALYHWARVATVHDERARAHYAALRAKGKSHGRAIRGVGDRLLKVACVMLREGTLYDENKRRLLAA

SEQ ID NO: 495843 - protein, 426 aa, unidentified
MKSNTQNAKITAITEKTLVVGIDVGSEMHYARAFSWRGYEFSRQPLEFSNTEEGFETFRIWIEELKEKQGMDKVIPGMEPTGHYWFNLGKFLQDSGMKPVHVNPHHVKKSKEMDDNDPSKNDRKDPKVIAGLINEGRYFYPYIPDGIYAEIRALSGLQVLAKSEITRLKNRIARWFSIYFPNYKDVYGNVGAVSGLMVLKVAPLPEDIVKLGVEGVNRIWRDAKVRSVGMKKAKNLVTAAEHSVGSREAQGAARIELQILLSDYEMQTKREAELMEKIKEKIKEVPYVDKLLEIRGVGMKTVVGFVAEVGDIRRFDDPKQLQKLAGYAIVKNQSGKHKGESHISYRGRKRLRYVLYEAAVSVVAHSPEFRSIHQYYTTRNKNPLKKMQSMIAVACKLIRVFYLILQTGVTYDAAKMMGDIRRPTAA

SEQ ID NO: 495844 - protein, 529 aa, unidentified
MVLSSPSLNLVRTQSLEPGTVVSTLRWMNTRRNVFSSSQASFARRSKEHFVKENLRRCCGIDVHKNSVTVCVLAPAGQRHIETKKRKFRTFTRDLKQLRAWLKNCQVTEIAMESTGQYWRPLWNLLEGEFTKLILVNPQHIKGLNGYKTDPKDAQWIADLLDSGKLRGSWVPPRSIRELRDLTRHRVNILEDLNRAKNRIEQLCQSGNIKVSSVATDLFGVSGRKMLKAIVENQHDAGWMADYARGQLRNKRRELELALQGTFTDEQRWLLEKELRQVEWLEGQVEGLEEEIERRVSGFEEAIQRLRTIPGIDRKTAWTIVAEVGVDLSAFADAKHLASWAGLCPGNRESGGKRMSGRTRKANRYVKRAMCQAAWAASHSKNTYLSAFYRRMAIKKGAPKAVMALAHHMIVVIYQVLSRKEEYVEMGGDYYDQRNKPRTIARLVARLGRLGYQVDLKLLENAMPADPTEKDNESEPPSQPDAVPEEGLGAKRKRGRPCKCRQRGIICKHQAAREVNPLIQQPPSEGKFS

SEQ ID NO: 495845 - protein, 369 aa, unidentified
MVEYTEAFVGIDAAKSRNAIAIAEAGREGEIRYLGEVDATPQSMRKVVARLAAKYQRLHFCYEAGPTGYGLYRQLTALGHDCIVVAPSLIPRKPGVRVKTNRRDAISLARLLRAGELTEVWVPDEPHEALRDLVRARDAAVEDLRRKRQSVTSLMLRHGRIFPGKTTWGARHARWLQEQHFEHPAHQIVLQELVLAIQHAHERLERIEAAIAEFVPGWSLAPVVEALQALRGVNLISAVTFLVEVGDLRRFESPRQLMGYLGLVPGERSTGDTVRKDGITKAGNSRARRTLVESAWTYRYPPRIGKVKLYHLQRVTPVIRDIAWKAQSRLCSRYRALAARGKKSTVAVTAVARELAAFIWAIARAVPAT

SEQ ID NO: 495846 - protein, 370 aa, unidentified
MSVRRILAKTINTDLEYEAIGIDLAKNCVSVALLTTDGEVVCIDRLDYSELEKSAQVLCPTTFAMEPCTEMNYLVQKLEAWGHRCLVIGGKNVQNYVENHYSGQKTDLNDAQALAFLAQDTQLRTIKAKDMEQQKYASLTTLREQYIKQYRQTIVSLKGICQAWGLNISKGISGKARLKDLIENHAAFPEELKESLVDMVTHAQTAQKALNKITKTLELLAKNDKVCQLIQTIPGLGPICSCRLRATIGDIQRFKNPKDFPAYYGLVPRSIATGHNEKKGRITHRGDKTMRSLMVQGAGSVVNMATKGKLKSKQLTKWILKKQKEKRPWGKLVCAVAAKLLRIVRAVLISRKPYNPKIAGVAKCSLPKGT

SEQ ID NO: 495847 - protein, 367 aa, unidentified
MTVTRISQTEPDRHNADVEVVLGVDTHRDVHVAAVLTALGALLATAAFPTTAVGYRQLLAWARGFGVLHQAGVECTGSYGAALTRALHAEGIQVVEVNQPDRGNRRRKGKTDTIDAEAAARAVITGRATAIAKTSDGPVEAMRLLKLARDSAINASTKAINQLKSVLVGANPQLRETLTGLGPMTLIRHCAQLPDVDPAAAPADQAAVYTLQILARRVLTLKAEAYELEKRIRTQIRAQAPALLERVGVGPDSAAALLITAGDNPDRVQAEASYAALCGVSPVEASSGNTQRRRLNRGGDRQANAALYRIVQSRLRFDERTQQYLQRRLQEGKTRKETIRCLKRYVAREIFSLLHPGPTTQSNAMAT

SEQ ID NO: 495848 - protein, 339 aa, unidentified
MKLYAGIDLHSNNSVVCVIDEQDRVVAEKRLPNEIEGIVVLLAAFKRALVGVVVESTFNWYWLVDGLMAAGFRVHLAHPAAIVQYEGLKRTGDAHDARWLAHLLRLKILREGYIYPRQARGVRDLMRRRMQLVQSRSRQLLAMQTQLMRSTGRSLSSAQLKGTQAAAQLQGLVDDANVASALRANLAVAQALSGEIERLEREILAQVRLAAQFEPLLSVPGIGKILGLCIMLETGEIERFAKVGNFASYARCVDSERVSNGKKKGEGNAKCGNRYLAWAFVEAAHFAVRYNARIKRFYERKAAKTNPMVAIKAVAHKLARAAYHVMRTHERFEEARAFA

SEQ ID NO: 495849 - protein, 351 aa, unidentified
MEFFAGVDTHRDTHSIAIVNVLGELLDAFTIPADRAGYAEALERSRRFEGLIWGLEGTGSYGRPFADALVREGHTVFEVPGTITKRHRRRLRRRGKSDPQDAHAIAEAVLRERETLPQHLEVDEEEATRLLYERRDRNVRERTAKINRIRALSLRLELELPADLTSDKALDVVEMSLRDRHTFGYADYEVVDEIRDLLNDLHRIADRIADLEKRMRPFVERLAPVLLELRGCSVISAAGLIGHVGSTHNYHSADAFASHAGTAPVQCSSGKYQSVRLSTGGNRQLNRCLHNIANSQMHAAGHAGKVYYDRKRSEGKTHREAMRCLKRRLAAVVFRALKTAQSGREVTSHAA

SEQ ID NO: 495850 - protein, 403 aa, unidentified
MNMNAVGIDVSKGKSMVAILRPYGEIVSTPFEVKHTVSGIRSLIEHIQSIDGESRIVMEHTGRYYEPLVRELSQADLFVSAVNPKLIKDFGDNSLRKVKSDKADALKIARYTLDSWTELRQYSLMDEIRNQLKIMNRQFDFYMKHKTAMKNNLIGILDQTYPGVNTYFDSPAREDGSQKWVDFANTYWHVDCVRKLSLNAFIDHYQKWCKRRKYNFSQSKAVEIYEASKEIVSVLPKDDLTKLIIKQAVEQLNTASQTVEQLRSMMNEAASKLPEYPVVMAMKGVGKSLGPQLMAEIGDVSRFTHKGAITAFAGVDPGVNESGSYEQKSVPSSKRGSGTLRKTLFQVMDVLIKTKPQDDPVYLFMDKKRSQGKPYYVYMTAGANKFLRIYYGRVKEYLSSLPK

SEQ ID NO: 495851 - protein, 401 aa, unidentified
MTAVRSRAWIGVDIGKTHHWVCAVDETGKKLLSLKVLNDEAQIIEVITSITDLADGRVWAIDILGTPSALLVALLANAGEQVRYASGRVVAAMSTAYTGEGKTDAKDAYVIAETARIRTDLAVIDADTDLVRALGVLTGHRADLVADRVRMINRLRDLLTSVFPALEREFDFASCKGALVLLSGYATPESIRRMGEARLSRWLRQRRVRGYADVAARAVAAAHSQHTVLAGQDVAASIVAELAGAVLAQHEQLKLLDQQIQDVFAQHPRAEVIESIPGFGPVLGASLLVAAGDLAAFPTAGHLAAAAGLVPVPNDSGRRAGNLHKPRRYSRPLRHALYLSAQSSMMRAGPNRDYYLKKRDQGRTHSQAIIALARRRIDVLWALTRDNRTWTAAPPPRAQAA

SEQ ID NO: 495852 - protein, 320 aa, unidentified
MRNAVGLDISKLTFDASAIVGNAEYSAKFDNDSKGLNQFSDRLKSLGCQNLHICMEATGNYYEEVADYFAQYYSVYVVNPLKISKYAESRFKRTKTDKQDAKLIAQYCRSAQESELVKRQKPTDEQYRLSRMIAAYAQIKSECAAMKNRHHAAKDEEAAKAYAEIIKAMNEQLEVLKEKIKEQTEKPNCKEGVKRLETIPAIGRMTAAVLFHHLTSSKFETSNKFAAFAGLSPQQKESGTSVRGKGKLTKFGNRKLRAVLFMPAMVAYRIRAFPDFIKRLEEKKKPKKVIIAALMRKLAVIAYHVHKKGGDYDPSRYKSA

SEQ ID NO: 495853 - protein, 352 aa, unidentified
MSDKISRHTLKPSDGKELLDLCERIRTRVAKETTKRVEMVSCYEAGYDGFWLHRLLQAHDIRNHVIDPASLQVDRRARRAKTDRVDAERLLRSLMAYLRGEPKVWSVVRVPSVAEEDDRRLHRERGRLINERIQHVNRIKGLLAIHGIYDYQPLRRDRIQRLEQLHTADGRTLPPRLEAEILRELQRLEIVIGMIKTIEAERDAIASANTETERGSVKKIQHLAKIKSIGPEFATTLVGEVFYRSFDNRKQLASYVGLTPAHFQSGAMSRDQGISKAGNAKARTVMIELAWLWLRHQPDSDLSVWFRDRVGKLKGRIRRITIVAVARKLLITLWRYLETGLVPKGAALKVCD

SEQ ID NO: 495854 - protein, 345 aa, unidentified
METMYYIGLDVHKKTISYCVKDGSGRIYAEGSLPATRLHLDIWMKTLPQPWTAAMEATIFTSWIYDHLQPHAAAVKVAHPLMLRAIAVAKKKNDRIDASKIADCLRCDFLPECYMASTEIRERRRTLRYRNLLVRQTVQMKNKIAVLLMEAGVSYNKQKLHKVGYFRELLATNQDIDEGLKPLLRLCREMVVRLGKTESALVRSLQRDSLLVERVERLMTIPAVGPITALTWALEVGDVQRFSSIKKAISYCGLCGAEKSSANITQRTPLSKQRNKHLQTVLIEAAKMAPRNSPELAIVYDQEKQKGNANRATLAVARKMVAYLVAVDRRQKGFLVVENQNRTAA

SEQ ID NO: 495855 - protein, 432 aa, unidentified
MPLVNLNAAGIDIGDSLHVVAVPSDRDPVNVRRFGAFTEDLENIANWLEECRIDTVAMESTGVYWKNLFAVLIQRGIDVYLVNAKHTRNITGKKDDESDAEWIQKLHSCGLLKSCFLPDDRTETLRTLVRHRRSLTQDSSRYVLRMQKALELMNIKIHTIISDLTGKTGTAIVKAIIGGERNPQNFLPLIDGRIKAKPEAILKSLQGHWREEHLFLLKQCYNLYQHMQSQIELCEHEIEKVLQLMANMEDKQPPPQSEGKKPKTKNQPRFNTVSYLKGIHKIDVTQIFGISEISALEILSETGSDLSKWATENRFVSWLNLCPNNKITGGKLISSQLLKKKPNAAAQAFRMAANSLKQSRHWLGDYFRRMRSKGGQKYAIVATARKLAIIYYKMVRFKQPFTPFNLDKYREKYRLARIKYLEKALHQLKHAA

SEQ ID NO: 495856 - protein, 400 aa, unidentified
MDKDRIVAGLDVHKDTIYLCVMDNTEAVIFVKVYGTLTPDLELMCSEMVSHGVTEAAMESTSTYWVPVWNALCESMSLKLVNPYFIKQLPGRKSDVKDAQWIAECLLKNLIRGSFVPDKTVQDMRKYNRRIFDLNEDLTYNSNKQDAALQRCGFRLSNYVSRVNGKSYQKCVRAIITGITDPEELVKLIHGKTLRKYGRNIIKDAVTGDFHQADICLLKQYAELIGVIERQIEECRNALISMCQEHFPKQFKRLQSIPGVKERAASAIIAETGADMKPFEKATNLVGWCGLKPRNDISNNKVKSNRTTHGNRFLRQILIEISWVASRTRKCFFSNFSYVQCTQRHKNKMKIQVAIARKLLVAVWHMLTKDEDFIDVYLKRLEKQAEWQNDIQALESLLVG

SEQ ID NO: 495857 - protein, 358 aa, unidentified
MNYIGCDCHISSLDFAVVNERGQETKKQRVNTGVKEFMEFAKSIPKPRTVIIEEGTLASWLLEICTDYGEKLIITDPKMNRWIGRAGQKNDAIDATKLAHLARGGYIKEIHHPIGHRRRFRELVLLYHDTVKSQTRIKNKLKAKFRQNGIKCSGETVYSVKYREEWKNKLPQDKVVQVMVEGLWQQLDQVHEVQEELLGHIQKQSRQYSEIKRFKQIPGIGTVHATTISAIVETPHRFANKKKLWMYAGLGLAEKASGEKVYSRNLTRDYNRLLKSALKQATEAAIIARDNQFRRQYLRLTLEKGIPSHRAKLTVARSILATIFGIWKSGENYDPDIDKGRLESDKTQVRAYHLVRSG

SEQ ID NO: 495858 - protein, 424 aa, unidentified
MKVTYQTCCGVDVHTSFLVATIVKTTGGIEPSYQKKRFSTFNNSILEFKQWLLDNDCHDVCMESTGKYWVPVFNLLEDDINVVIANPKWVKAVKGNKDDTKDSKWIGDLFRLGLVKGSYIPCKKVRILREYTRYRYKLVSCRSSEKNRYQNALTVCNAALDSVVSDIFGKSSTSIIDYLLEQSGSSINHEEIASKLLRSLKSKEDAVIESVEGYQMTDAQKYRMRLVRAHMDYITAEINDVDKMIENMISSNTDFENAVQFLCTIPGVKRDSAITIISEIGTDMSQFSSSKRLCCWAGLTPGSNESAGKKKSVRITRAGVYLKPALVQCAHAAVKSDKSPYYKKKYESLVKRRGKKRAIIAIARMILTAIYQMLSTGEQWNPSNLYKIDMPVALVEKQKAKAIKQARKLLQREGLLPPDEPLAS

SEQ ID NO: 495859 - protein, 382 aa, unidentified
MQAPTHGTPTAGHDGTIFVAIELSQRRWLVTMYSPAKDRLSRHQLAGGDHAGLLALIEGARERVESRLGYRPAVVSCYEAGYDGFWLHRRLLAAGVENLVFDPASIAVEQRARRAKTDRIDGEVLLRTLMAHRRGEPRVVRIVRVPGEAEEDTRRSSRERGRLIKEQTAHSNRLKGLLRLLGMAVGNPHRPDWLSWLKGQRDWRGDAVRPHLMAELEREHARLMLVRDQLAALAAATTAQASAAPAQMAERKARLRRLKAVGPVLADTLVDEVFHKDFGNRREVAAYFGLAPSPWCSGSIDREQGISKSGNPRARHQAIELAWLWLRHQGDSALSQWFRMRTAAAGKRIRRITIVALARKLVVALWRYLTTGLVPEGAVVKA

SEQ ID NO: 495860 - protein, 344 aa, unidentified
MLYVGLDLSRKRLDWQALDREGERVAIGAVPPDRDGLVKLGGRLGDAPVLAVIESMSGARFVHDQLELAGWDVRIADAVKARGLAPLACKTDTIDCWVLAELARLGLIPEIWLPDPAVRAERERARFRQHLVKHRSALKNRVHAILFQHGVPNPSSDLFGVGGRRLLTRLCLPEPWASTVQASLSLIDSLDEQIAACERELRTLGADHPYIPLLLSCPGIGWILAFTIASEIGDIHRFPTPRKLAGYTGLCPRVDQSGERDRRGPLRKNGPNLLRWALVEAAHTAFRHPLYSPILARKRAQHGKKRGTKIAAIDVARRLSEAIWHMLTTNQPFAPAGAPASLAA

SEQ ID NO: 495861 - protein, 337 aa, unidentified
MKRNVFGIDIAKLVFQIHWVDTDTGEMHSEQVKRVGFLQWFSNKPSSQIGIEACSGAHHWARHLIGMGHEVTLLAAHRVKPFVVGNKNDVADARGVWTALQQPGMKTVAVKTEGQQAVLSLHRMREQLVKFRTAQINGLRGLLAEFGEVAPKGRAALKKQLPDCLARLCDQVPAFLMDSFREQWARISQLDVEIKGLEKRLQDWLKQDEACQRVAAIPGVGLLTATALVATIGDPKIFKSGREFAAWLGLVPRQTGTGGRVQLHGISKRGDIYLRTLLIHGARSVMTHNKQSDNWLARLKQRRPNNVALVAQANKTARTVWALLAHGRDYQSGWLHA

SEQ ID NO: 495862 - protein, 387 aa, unidentified
MSEAFDSRKSATAFDQASTLVAVLELSGKSWRAGAIVPGVSRRPSRQLDARDIDGALRAIEQWKTEASKAGHDVRRVVVGYEAGLDGFWIARALREHGIEVYVMHPASVAVERRGRRAKTDRIDVDILLRALLGWLRGEPRHCTMSPIPSEAEEDMREPGRRREALTAARLKVENQMRSLLVRFGVVDFRPRLKKALEHLEKLRTIDGRPLPPNTKASLDRLMEQHRLLSEQLKEIETARERVVAVTDPDRMERMIQALASLVGVGVETATTLVHEVFSRRFRDRRALAGFVGMTGTPYDSGGSTREQGLSKNGNPRVRKMLMQLTWRWLMFQPQSVLAQWFFARTAGAKGRMKKIMAVALARKLLVALWRAAETGVVPEGARLAAA

SEQ ID NO: 495863 - protein, 485 aa, unidentified
MRENGSRPWDRLDACGGTVISIEGVGVFLGLDVGKQTHHGHGLTPAGKTVFDKPLPNSEPQLRAVFDKLKAKFNIALVVVDQPASIGALPLTVARDVGCQVAYLPGLAMRRIADLYPGEAKTDAKDAAVIVDAARTMPHTLRSLELADEITAELTMLVGFDQDLAGEANRTSNRIRGLLTQFHPSLERVLGPRLDHQAVTWLLERYGSPAALRKVGRRRLVEVVRPRAPRMAERLIDDIFTALDEQTVVVPGTGTLDVIIPSPAKSLAAVHAQRRALEAQTETLPEAHPLSPVLTSLPGIGVRTAAVLLTTVGDGSSFPSAAHLASYAGLPPQPGSPAPRSMVNTPPEAGTGSSNGRCSSPRSRALHDPASRTYYDRCCSCPYGCGCTRTGRPPPRCRPRAPSCARWSAPTEPPPGPGELEPARRAGLLLRGSGRRGVADPGSRFRRLRPARTARCPPRGTPATPRPGPRWSKKPHGHGGLGLLA

SEQ ID NO: 495864 - protein, 331 aa, unidentified
MESSVVIGIDVSKASAVIAVHPSGERWTSDTASTEIDGLVTRLQTHRPQLIVMEATGGYERPLAAACAAVSLPVAIVNPRQVRAFAQAMGRTAKTDGIDAGVLALFGARLQPPSRAIPDAETQALAGLVTRRRQLLEMLGAERRRLAQAPPTGPITRDLRNHIRWLERRVDDVDDEIGTAIQQSAMWRVQEDLLRTVPGIGPTTARTLLAELPELGQLDRRAIAALVGVAPFNCDSGQHRGQRHIWGGRASVRASLYMAALVASRHNPILAAFYRRLRALGKAPKVALIAVARKLLTILNAMIKHQSRWNPKAASTPASTSEPARGAAVLA

SEQ ID NO: 495865 - protein, 422 aa, unidentified
MRKNKVKKFRIVNEKVIIATIDIGKNKNTGYWRRSNGVSIKPFEFNNNAEGFKVFWNRIWTAKVIHKVDNIIIGFESTGSYGEPLIHYLSNKSEKLSNNSVKLVQVNPMHTKRVKELNDNSPNKTDKKDPRVIADIIQLGHYLSLVIPKGAAAQLRRLTHCRERTIVDRTALINRLQNLVYVIFPEFLNIMKGIRSKCSFHFLNHYPTPDDIINLGFEALVIELQTISRGKLGFERARRLFDAAKNSVGINEGRESILMEIQHIINEVFLLNDFIGQIDKEMKHYLEKIPCGRYLLSIKGIKEVTVSGIIGEVGNFEDFHNQKAIIKLAGLNLYEVSSGKHKGEMRISKRGRSLLRKILFFASINVIRNGGIMHDYYHRLISNGMIRIKALIAVSRKLLRLMFSMARKKAYYIHDYTLKPAA

SEQ ID NO: 495866 - protein, 378 aa, unidentified
MYRILKIGMDVHTTNYTLCAVEPILGEEENVLAQIQIEPDYKMVIQFINRLKERLGVTDKECDILCGYEAGCLGYSLYHQLTNAGVKCVILAPTTMMTEKGKRIKTDKRDARLIAKCLCHGGYHAVYIPTADDNAIKEYIRMRDDHKIALKQKKQQMNALCIRYGCIYEGNNWTQAHLQWMRKLKLPELIRETLDEYLATYDELTAKIERYDKRIQELADQSEYQEKVKNLECFLGIKTHTALSLIVETGDFARFRKGNVYAAYLGLAPGEHSSSDDCNRLGISKAGNSHLRCLLIEASRGICKGVIGQKSKALRARQIGNSAEVIAYADKANVRLRRKYYKLIHRGKKRNVAVAAVARELACFVWGMMTDNIHGNAA

SEQ ID NO: 495867 - protein, 446 aa, unidentified
MVDGTGLSRGDRNRNGRLGRLRALLPAQHAIVGIDLADVKQAAVVTDHDSRVLARRRVSARAWELGTLLDWAVERATAAGFASVTVACEPTGHRWRVLDQLAAERGLPLVCVQPLLVWRAREAEDLTWDKSDPKDAVVIARLAAQLRCYEPERADATWARLRQLGARRARLVTDATAGVQQLRDLLDCVWPAVLDAAGSPFRSASWQAALAVVLDRAGGDLSRVHRLGLARFTVAVRRELPRWGATRPCLRIVRAVFDALVDPAGVATQRPGALERAELVLGDWRDTRRRLAETETRMVAVLDELDLTGLVTSIDGLTAVGAAAILAETGDLVRFGSPRAVVKHAGLCPRDNASGSHQGKTSISGKGRPGLRLAAWRAVWAALPNNRVLAARFRYLTTREHNRLARQQARAACAAALLRWLHVVVTQRVAWDPAIAAGHKALEPAA

SEQ ID NO: 495868 - protein, 354 aa, unidentified
MLSVGLDLHKRYSQLEVIDQAGLRRAGARLPNELEQVAGFFRSLGEPCRVVLEAGWNWGSMYDWLEGIENVVEVQLAHPYGVRAIAAAQVKTDRIDARMLGQLLRVGLIPQAYIPGRETRQLREAVRQRLFLVRVRTMLKNRIHALLDRYHITPPPASDMFGKKGRDYLGKVELPGPAQELLRQDLRLLQTLSLEIGQTESLLAKTLAGDRRVELLRTIPGLGALLATVVALEIDRIERFARPAKLVAYAGLVPSTYSSGGKTSHGGLMKMSNKWLRWALVEAAWSAVRYDPYFRHQYALRHRSKGAKTAIIAVARRLTQVIWCVLTENRNYEVRQPAAKRREYALTPAALSQD

SEQ ID NO: 495869 - protein, 345 aa, unidentified
MPSIVGGLDIHRKQITFDYVDLDTGAVQCGQIAPADREHFRSWLAGRFEHPENVAFAVEACTGWRYVAGELAAAGITAHLAETADTATQRGRKRRAKTDRADARLMRDLLAAGRLPECWIPPPQVLECRALLEAYHDLRREHTAWIQRVHAALFHQGAPVFHDLSRAGAPAELAALARARLSPAGQQQVMLCLRMLEATGGELDGLRRQLLAAARHLHGAKVLADSIYGVGPVTALALTCWLGGAGRFTSARKAVRFAGLDITACSSDGKRSPGHLSRQGPPVLRRAVYEAGRTHARPAAPDHGYYAAVKDRKDGKRAALPEARKIIRRACRILAQLGDDALATV

SEQ ID NO: 495870 - protein, 366 aa, unidentified
MKKPSTKTVRRMGRQQDQQLTIGLDLGDRSSFYCVLNGAGEVIVEEKVATSPEAMKKTFGKMPRSRIALETGTHSPWVSRLLSELGHEVIVANARNVRLIGESRKKDDRLDARTLARLARIDPQLLAPVKHRSAQAQADLTVIRARAVLVRARTSLINAVRGLAKSNGERLRSCSSRAMNAGVGSELRAELRVALKPLLDGIESLGMRIRQYDQQIEELSRSRYPEIALLIQVNGVGILTAITFILTLEDPHRFHKSRDAGCYVGLQPARRNSGQSQPQLHISKEGDAYLRTLLVQGAQHILGPFGVDSDLRRWGLRLAEHGGKSGKKRAIVAVARKLAVLLHRLWVSGEAYEPLRRTHQTVVLAA

SEQ ID NO: 495871 - protein, 348 aa, unidentified
MTRQPLKKLKSDPLALLALLRRWRDQSTKAGGQIRRMVLAFEAGRDGFWLARWLRVRGIEAYVIHPTSIPVSREHRRAKTDRLDTSLLMRALLGWLRGEPKHCSMAAIPTAAEEDACRPTRERETLVRERTRVVNRIKSTLIRFGIRSFKVKLRQARQALEALRTPEGEPLPPNTLAELRRDVARLELMREQIAEIERTRLERLKQAPHKGTHPMIRMLARVMGIGIETADMLVHEVLRRNLRDQRAVARYSGLTGSPDESGSKRREKGLARAGNARVRRGMIQLAWRWLMFQKNSALAQWYQARTADGRPGLRKTMIVALARKLLIALWRYVTSGETPAGAVLRPAT

SEQ ID NO: 495872 - protein, 363 aa, unidentified
MKIMVGIDLHSNNALCGLMDENGRRLLHKKLPCDLGAILELLEPYRKQIATIGIESTFNWYWLVDGLQDHGYHVVLANPAAMQPYSGKKHTDDVSDAYFIAELLRLNLLPTGHITDRKIRPVRDLLRRRMLFVRQRTTLILSFKSLNERTLGQRVPLTRVKTMTAAEAAARFTAPADQLLGGEQITLMSHLSDSITKLEQHILSVVGEWTSYQRLQELPGIGKILGLTIALETGTAQRFADAGNFASYCRCVKSLRQSNSKKKGENNRKCGNKYLAWAFVEAAHFACRHDEQCRRFYDRKQQQTNPVIATKALACKLAKAAWHVMAEDVPYDATRVFGPGKKENLGETGREPGNGSGPQSQQN

SEQ ID NO: 495873 - protein, 457 aa, unidentified
MRRKGKRTKGIEEAHPFAGMSRVNEDAAGIDIGAEEIVVCVAGDENTQIVKAFGNYTVDLQAIGKWLQDHNSKIVAMESTGVYWIPLFEVLEDLGFKCLLISSRSLRRVPGRKSDILDAQWIQTLHSYGLLESSFRPQADLVALRTLLRHRAQLLEHRSPHILHMQKALLQMNVQLSQALSDITGETGIAIMRAIVAGERDPQTLAAYRDRNCKKSAAEIGRALTGTWRAEHLFTLKQSLELYDFYTRQVEVCDAEIERLYALTRPDWETRELKPLPKKKRKTHSKNAPPNQEALRGHLQRIAGVDLSVVDGLGVSNAQKVIMECGSDMRQFPQEGNFCVWLGLAPKHEISGGKVLKNKILKTKNLAGQAFRMAAQSVKGSDCVFGLMYKRFRARMDNRQATVATAHAIARVVYRMLKYKVEYDQIDVTEYEKKYAEQQIKYMKKKAAKLGFQLVPA

SEQ ID NO: 495874 - protein, 418 aa, unidentified
MEVMYARCAGLDVHKETVVACVRIVEGGEVSRSVRTFATTTASLIELGEWLEVNGCTHVAMEATGVYWKPVWQVLADSSFELVLANAAQVKNVPGRKTDVNDAAWLSELLAHGLVRARFVPEPAIQELRGLLRTRKQLVREKASHVQRLQKTLEEANIKLETVLSDVMGRSGRAMIQALIDGETDPAKLAALAHWKVRASAATLREALHGRIKRHHRFLLRLHLQQVDALDAAIAEIDREADAGLACFRDAVKQLSTIPGVSELSAQVILSEIGTDMGRFASAAHLRSWAGLCRATTKVPASAGRLACAGESPGSRPCSFNALGLPRAPKLPTYTRNLCDCAVDAGRRKRSALLLPPSSRPRITCSKTARSMKISEPFTSIVGGPRRKRAASSNASPNSAFPSNSSPWPPSHEQSVSL

SEQ ID NO: 495875 - protein, 420 aa, unidentified
MARIRAAKATPAWLAIDVAKKRHEALLEDASGVRRRVTITNTHDGFEQLAKTLSPHLPCEIALEPTGDYHRPLANFLIRKGHHVHFVSSIATNRTREALFNSWDKNDPKDAQVILHLLKGGTTQIFADPLQRGNQDLQELLGTYRQVTDRKTRVYHSLMTHYLPLYFPEAEPFLSNPRGEWFLEVLRVAPCPSAVLLHKKSSFVKKFTASGGHYTSRQSLVASYYEMAKESVGIPVAADSKAAQMFQLTVEQYMELTKVRRELQELIHAQLEQNVDYQRLRSIPGIGPIVALTILAEAGDLRRFSHHRKFLNYCGLSLSSSQSGSSRGRAQLSKRGNARLRWAFWMAANAAINQRRNSFRKKFDNYVRRDPLDADLKRKAYVAVAAKVARVAFGLIKSGKEYRHYLEVAVHDGRIPSLGR

SEQ ID NO: 495876 - protein, 458 aa, unidentified
MTPRQDNFPHPTPRRRRRTLQVTNPDAAGIDVGAGEHWVAVPADRDAEPVRRFGTCTADLEAIAEWLHSCGVTTVAMESTGVYWIPLYELLEARGLAVQLVDARQVARAPGRPKTDANDCQWIQRLHSYGLLSAAFRPQDQVVVLRAYLRQRDMLVTYAGQHIQHMQKALEQMNVKLTEVVSDITGVTGMGIIQAILRGERDPVALAQRRDPRCKESEATIARALLGTWRQEHLFALRQAVALYEFYHQQISACDGAIEAHLRTFADHSGGQSVPYRPRRRKREANEPRFDARARLYAVCGVDLTAIEGIDETTALVLLSEIGTDMSRWPSLKHFCSWLGLCPQHKISGGRILSRRVRRGSSRAKRALRLAARSLHHSKSALGAFFRRIKSRQGTAAAITAAAHKLARLVYTLLKHGTDYVAQEMAAYEAKDRERKLQGITRQAQALGFVLVPATAAG

SEQ ID NO: 495877 - protein, 369 aa, unidentified
MKSITYIGMDVHTTNYTLCCYSVEDDRFFEEIEVKPDYQEVLKYINRVKSQRGKEAEILCGYEAGCLGYSLYHQLMYHGVECVILAPSTMPVTPGKKIKTDRMDARRISKCLAYHTYSAVYVPTAEDDAVKEYIRMRDDGNNTLKRIKQQTIALCTRHGKQYDGKSYWTKRHLYWLEGLDFGNGVLNEVLKEYLVLYYQAQEKVETYDKRIEELSRSETYREPVEKLGCFIGIKNHTALAFCCEVGDFRRFPSAQQFASYLGLVPGENSSGEKQQHTGITKAGNSHLRRLLIEAAQQYGRGAVGKKSAALKARQAGCPTQIVAYADKANERLRRKFYRIALRSKRNIAKTAVARELACFIWGMMTEHYA

SEQ ID NO: 495878 - protein, 369 aa, unidentified
MSETSVAFQSFVGVDLHKCTVSLVAVDPAGNEIAKLKVPTKCVGKITSWLRSLPDPVWMAVEACPFVEWFIDRLQWCVYRMDIADATELSNRRGKRRKNDINDAEDIALRLARGECPLGFIADDQLMQLRKRGRHWRQLSHLLSRTKHSMKSMLNAANIPGPKFDAAGAHRWFLAHGHLLKPVQQVCFADFLDTLMLLERQRERLRREIILANRSDEFTEITTLLKSVPGIDEIWACIIAAEIGPFDRFPNADALEFWAGMTADLKESAGRTQSGHITKAGSRTLRWALCKAAVTLCRSDAKQEATRQRTIRQVGGVKAKANVAMGRRLLGILYAMVRDGKPYEIGEPTNHNRAANRARAARKQRKEAA

SEQ ID NO: 495879 - protein, 334 aa, unidentified
MSKITTVGIDLAKNVFSVHGVDKVGAVMLRKTLTRCQLTAAVAQWPACVIGIEACSGAHEWARRFAALGHTVRIMAPRFVAPYRKSGKNDGNDAEAICEAVQRPNMRFVPVKSAEQQALLSLHRVRHGFVEERTATINRIRAVLCEFGIVLAHDAREVRRSATAAAENLPQLARRGVEDLRDHLRVLDERIAAYDKELEHQARSNEAVVRLMGIAGVGALTASATVASVGSAHEFASGRQFAAWLGLVPRQWSTGGRVRLGRITRRGDPYLRNLLVMGARAVLRMATRRTDKMSRWALALKERRGYHKAAVAIAAKNARIMWALLARGGHFTAA

SEQ ID NO: 495880 - protein, 391 aa, unidentified
MFYIGIDIAKHNHEVSIIDDNGKALGKSFSISNSQKGVDKFNTYLDSFNITSENCVIGMESTGHYWINLFSFLVNLKFNVFVINPIQSDAFRKMYIRKTKNDSKDSYIIAQIMRFGEYSSSNISDENIFALRQLSRYRTSLVDECSTWKRKIISILDQVFPEYSNLFSDTFGVTSKELLSKYPLPENMLELSTEELTNLLNKASKGRLGNEKAQEIKESAKNSFGVSFAKQTFSFQIKQIINQISFIESQLKELDNEISNMLKELNSEITTITGIGDTLGACILSEIGDISRFEKASQLVAFAGLDVAVKQSGEFTGTEMKITKRGSPYLRRAIWLAATVASFKDPALSIYYKSLIARGKKHLTAIGAVSRKMCNIIFSVLKNKKAYTPNI

SEQ ID NO: 495881 - protein, 425 aa, unidentified
MNVDSIDEPRFAAYVAIDWGDSKHVWSLQPADSDRREHGEIEHNPEAVAAWAAMLSARFGGQPVALAVEQSRGPLVFMLGKYEQLHVYPIHPRAAAQFRAALFPSGAKDDPSDAELLLDLLVHHRARLRQLKPDTEQTRLVQHLVEGRRKLVNERTRQTNRLTAQLKLYFPQMLDWFDAVDSPLVGALLKRWPTLEALQKARPDTVRSFFTAHNCRSQELIERRLDQIRQAVPAVRDKALIEAAQTMTKVLVELIATLREGIASFGCQIAQAVAAHPDFAIFNSFPGAGPALAPRLLAAFGSQRERYQSAADLQTFSGIAPVTERSGKSQWVHVRWACPRFLRQTFHEWAAHSIGFCDWARAYYQQQRGRGNDHHAAVRALAFKWIRIAFRCWKHAVPYDDARYMQSLRRRGSPLIAALAKPELP

SEQ ID NO: 495882 - protein, 315 aa, unidentified
MTSKLFIGIDVSKDWLDIAVHDASRPTRIANTPAALSAFLATLAPARVALVAFEPTGGYERVLRQALVAAGLPFARVHPNEVIAFRQQCGLKAKTDAGDARLLAAFAARELARRGLTPLCEADPVLQELAVRRRQVVDLLQAERCRMALAQAPGTRESLAAVIGALEASLARLEAALAEHIAAHADLAERAAQLRSLKGVGPVTVHTLLAELPELGRLSGKEIAALVGLAPRTRSSGKTRARATTGHGRPGVRRVLFNAARAAIRFNPVLKGFYERLVETNRRPGKVALTAVMRKLLVILNAIARDHQPWKHHTA

SEQ ID NO: 495883 - protein, 359 aa, unidentified
MIVVGIDPHKKTHTAVAIDAATAAARGEITVSSGKEGHGRLLAWARGLDGEHRFAIEDCRHVSGSLERFLIGRGERVVRVPPKLTARARRTARARGKSDPIDARAVAEAALREPSLPEARLSGAEHDVRLLVDHREDLVGERTRIQSRLRWHLHDLELGAGVPPKALDRFKWLDRLAAELTAAPATVQTSIAADLVGRCRSLTVEINRIERGIATTMAAMAPQLLATPGCGALISARLIGETGGAGRFKGEAAFAMHTGTAPLPVSSGQTSRHRLNRSGNRRLNSALHMIAVTQIRMHEPARAFMARKQAEGKSGREALRCLKRYIARSIFGLLKEIDAAGTGQVIEVAFTTETSGVAV

SEQ ID NO: 495884 - protein, 429 aa, unidentified
MNCTQNKKIEQVKETTMIVGIDVGSEKHYFRAFNWRGIELTRKPVAFSNSMEGFNSFYNTIVELMQKSELEEALVGIEPTGHYWFALGQFMGEKDIKFVMVNPHHVHKTKELDDNSPSKNDRKDPRVIAGLVRDGRYFYSYMPTGVYAELRNASNRRFVLVEEQTRAKNRLQKWIAVYFPEYKGIYTHIDAKGGMLVLKKAPTPEEIVRLGVEGIIKIWKDAKLRGNGHKKAMLILAAAMRSIGLKAGLTEARMEIQDLIEDYELQTKRLERVNDLIKGLCQQVRYADKLLEIKGIGITTVAGFIAEVGDITRFDSTKELQKLAGLELVADSSGKHNGKTKISKRGRKRLRYLLFEAAISVVGKNEEFKEIHRYYTTREKNPLKKMQSLIVVACKLIRVFHAILTKGIRYDASKMLKDIRHPGEQLKAA

SEQ ID NO: 495885 - protein, 348 aa, unidentified
MSITMIGLDTAKSVFQLHGIDASGKVQLKRKLRRSELIAFFEKQQPCTVVMEACGAAHHWARVLSGLGHEVKLIAPEAVRPFVKRGKKNDAADAAAICAAASRPDAKFVAAKSLEQQSVLALHSARTLLVKQQTMLANALRGLAAEFGLIAPKGMNKLEDLNALVEADEAFPEQARQVFTGLLGHCRATADRVAALEAEIAAHARRDDTARRLATIPGIGPITASLVAATVGDGIVAFKSARHFAAWLGLVPRQHSTGGRIRLGRITKTGSREIRRLLVLGATSMVYRAAQWNSVAGAWTRGILERRPVRLATVALANKMARIAWALMTRKEVYQAKGRVAAAAEAAG

SEQ ID NO: 495886 - protein, 334 aa, unidentified
MKQAIIKLNVGVDVSKDDIKVALSALTADYRIVVRASRTFANTMQGFKQLHEWIVLKKDPELMLHFTMEATGVYYEGLAFFLYEQEYALHVVLPNYAKKYAESLGIKSKTDKLDAKALAQMGLERDLRLWQPINTALLGLKQLTRERETLVCTRTSVANQLHAYRHQGKPNKESIKRSQQHIAFIDMQVKQIEKEITLFINQDEKLKAKIGYLDSIPGVGLITAAVVVAETNGFAAFDSIKQLTSYAGLDVRIQESGKWKGKSRISKRGNSHIRKALYMPSIAKKRHDSTTKQFFERIKEKKGIGMIALVAVERKLLGLMFSLWKKEEMYKSII

SEQ ID NO: 495887 - protein, 334 aa, unidentified
MGNVPVFVGLDYHQDSVQVCVLDRQGRRLLNRRCPNDWRAIAEAVAPLGRVERAAVEACCGAADLAEELRGKAGWRADLAHPAYVAKLKGSPDKSDFSDGHLLADLTRVGYVPVVYLPSSYERDLRQLVNHRQDLVDRRRAAKLRAGAVLREHRARPPQKLSRWTRAWERWAASAPQLSEHARWVVGELLAEVVHLDGPVDAADARLRRATKGDRLVGRLMGEPGVGEVTAWVLRAYVGDFARFRSGKGLARYCGLSPCNASSGGRQADAGLVRGCNRLLRATLIQAAHRLARTEPRWVALSKSLRARGKPGSVAAAAVANRWARGLWHRMVAA

SEQ ID NO: 495888 - protein, 309 aa, unidentified
MDATVVGIDVSKDRLDVHVEPSGEAFAVARDAAGLEALIERLKPLSVTTAAVEATGGFETVVAASLAAAGLPVVVVNPTQVRAFAQAVGKRAKTDPIDAAVIARFVAATKPQVRPLPDAETRALSDLVTRRRQIIAMMVAERQREKRAPRRTKKSIARLLKALQKELTEIEADIDDSVRGSPVWREKEDLLTSVPGIGPTIARTLLADLPELGALDRRQIAALVGLAPFTRQSGQWRGRSFIGAGRATVRSATFMGAIVAARWNPTLRAFYERLVAAGKPKLVAIIAVARKLITILNAILRDKRPWQNA

SEQ ID NO: 495889 - protein, 378 aa, unidentified
MDRVNTPTSPADRLHCAIELSKNSWLLGIQFPDRQRASVYPIKGGDSEGLMAKLFAACDRWTKVSGKKPSIIVCYEAGYDAFWLARFLKARGIECLVVDSGSMQVNRRSRRAKTDRIDLAKLLRALIAWCGGEQHVWSVVRTPTVDEEDLRRSHRERNRLITERTAHVNRIKGLLFAQGIRGINVKAGYKTLRIDKLVTGEGRSLPPRLAQEIKREIDRLELVQQQIAAIEQERNQSPTTCKETEKKRAQLLLLKGIGPTGSAVMAREVYYRQFSNRRQIAGFLGLATSPYDSGQVERSQGISRAGSGPVRATMIQIAWLWIKYQPKSEISRWFVQRTADQSGRIKRIMIVAVARKLAIALWRYLEQGLVPQGAALTR

SEQ ID NO: 495890 - protein, 390 aa, unidentified
MNEEKGKRIIGLDTHPDVFAAAALSADQSRQNADWVQDRMPTAGLEAWAKKQLRKEDVVVLEASGNSFAVGARLHAIGYTTLVLESAQAGKIRDNFCNDDRHSAVKLAKVYRSGLAKVVWQPDAKTHEYREVFFAHRNAVKDATRCRNRIRSYLNEHCVRLKPGVRLTEASGEATAKAAKEWTMLQLELLSQKFSQLREVESRRNQLERIMVRELVGAPHWARLWRLMGVRHRVAFALMAMVGDVHRFATAKKLVGYIGLAPRKDQSGNDKKGYDKGVGNFGRGDLRGLLIQSAHNALIQKDSPLHKWGWKLLMKKHRNEAAVAVARKLTVSIWHLLMGHFTPLLEATEHLHAKLLKLATVIGKDGLASLGFANREAFVTAQIKSIQLST

SEQ ID NO: 495891 - protein, 425 aa, unidentified
MSSDIEIAAFIGLDWADQQHVIRLRAAGSAAVEAQCLDQKPESLRAWIAQLRHRFAGRPVAIALEQSRGSLLYALMSVDFLRLYPINPQNLAKFRKAFYSSGAKDDPQDAQLLLEMLEKHRDRLRVWIPDDADTRCLRLLAENRRKLVNRRTAFTNQLTSLLKESFPQSLEWAGPLDSVRACDFLQHWPSLEALQKTSTSRLRKFYQKHTRVDDPTVQQRLDQIRQAQPLVTDPAVLAAAELMIPALVRQLRCLIESIQQLDQQLKQRFQQHADYILFHSFPGAGPALGPRLLSAFGSDRNRFESATEVQNFSGIAPVTERSGKSCRVHWRLACSKFLRQSFHEFAAQSILFSPWARAFYDQLRARGSSHHAAVRALAYKWIRILFRCWKNHQPYDESLYLASLKRRGSPLSLILPSQSKEVACA

SEQ ID NO: 495892 - protein, 402 aa, unidentified
MKKSSQMSVIHPHAAGVDIGAEFHVVAVPPDADAAPVRTFQRFTGDLHRMSGWLKTCHITTIAMESTGVYWLPAFEIPEAAGFNVILVNARDAKNVPGRKTDVNDAQWLQKLHSFGLLRASFRPEHDISVLRSYLRQRERLTEYRAAHIQHMQKALMQMNVQLHHAVSDITGVTGLSIVRAIVSGERDPSVLIQYRDVRCKKTPEVLQQALTGNWQPEHLFALEQSVAFFDFYQEKIRECDDQIETSLLQLSTGTEEPEGVLPSARHRTKQPNQLSFDVRPLLWKITGADLTQIHGFGPYLALKFVAECGTDMNRWPDASHFTSWLCLSPGNKISGGKVLSSKTRRSSSRIAAALRLAATTIGRSDTALGAFYRRLSSRIGKAKAVTATARKLAILFYNALK

SEQ ID NO: 495893 - protein, 355 aa, unidentified
MNDAKYIGMDVHTATISAAVRDSSGNLVMEATLETKSETILEFVHGLRGSLRVSFEEGTFASWLHDLLKPHVTEVLVCDPRKNALLRVGNKNDREDARKLSELLFLNKLHAVYHGETGIRTLKELARSYLTLTRDLTRVMNRLKAIYRGWGIACAGQQVYAPGFRAEWLAKITEAGVRRRAEIYYQQFDILVALRQEVRRELLAESRKHPAMSLLRQIPSIGPIRAALLIALMQTPHRFRTKRQLWAYCGLALRTYDSGEYRFVGGQLKRSKKAVTIRGLNKNHNHDLKNIFKGAATRAAATAGPLQNFYEARIANGMKPPMARLTLARKIAAITLLVWKKGVRFDAEQLKQQAA

SEQ ID NO: 495894 - protein, 356 aa, unidentified
MSRDVKYIGMDVHKEATVIAVLNGNGDLVMESIVETKASSLLQFIHGLRGELHVTWEEGTWAAWLYDLLKPQVQQVLVCDPRRNALLKEGNKSDKVDARKLADLLRTGMLRPVYHGENGLRTLRELGRSYQTISQDLNRVMNRMKALYRGWGIACAGTRVYAPRYRQEWLQKIEQAGVRRRAELLYQQLDGLQELRRTLRPELLAESRKHKASKLLRQIPCIGPIRAARLLALMQTPHRFRSKRQLWTYSGLGIETRDSAQYRFVDGQLRRAKKPQQIRGLNRNHNHEMKDIFKGAATRASCGVGPFREFYVGLLDKGMEPEMARLTLARKIAAIALTLWKKEERFDAEQLKAQAA

SEQ ID NO: 495895 - protein, 333 aa, unidentified
MLYVGVDGHPETSQVTVMDGTGKVLRRRRIVSSRQGVQEALGGYQEPIKAVLEASYCWGKMYDWLEEVADEVVLAHPLKVRAIAEARIKTDEIDSETLAHLLRADLIPKAYAPSKEIRAVKRVLRQRLFYVRVGTMIKNRIQALLAQHSVERPEMSTIYGQAGMEWLSSLELPSPDGELLDEDLKLLKVLERRIAATEGLIKKLSAGDPAVGWLDSLPGIGAFFSVLIRYEVDDITRFRAAKKFASYTGLVPSTYSSGNRTVHGHLTKQGNKWLRWAFIEAVSPAVRKSPWLRGYYQRIKARLGAKEARTATARKLAELAWTVWTEERCFEER

SEQ ID NO: 495896 - protein, 374 aa, unidentified
MKVKTIGIDLAKEVFGVHGVDARGKSLVHKRVSRKHLLGLLAKLEPCLVGMEACGSAHHWAREIEKLGHTVKLMSPQFVAPYRKGNKNDPNDAEAICEAVTRPSMRFVPIKSEAQQDLQALHRVREQLLKSRTALVNQVRGLLAEHGIVAPRGIAHLRRLMVEILAEPASRGLSGLFGETLFEIAERLRFLDERIRTYDLRIGRVFAHDERCQRLAKVEGVGPLVATALVAAVGNANEFKSGRELSAWLGLVPRQHSSGNRNVLLGISKRGDRYLRTLLIHGARSALCRAERRSDRRSIWASKLKLARGFNVAAVALANKNARILWALLTRGENYRPAAIPDQASKAERTAAFRHRPPTSGRRVVAESSLIKRI

SEQ ID NO: 495897 - protein, 409 aa, unidentified
MEIVITRGAGLDVHKATVVATVRVPDERGRRQSTTATFGTMTADLIALREWLQAFGVTHVALESTGVYWKPVYYVLEDAFELLLINMQALKHVPGRKTDVKDSEWLAQLLECGLLRSSFVPPPIIRELRDITRYRVQQTRERGREVNRLQKVLEDAGIKLASVATDVMGASGRAMVDALIGGTTDAEALADLARGRLRQKLPLLRRALVGRFRPVHAFLLEQILAKIDYLDEALQRLTTEIDGRVAPFAPMLTALDTIPGIDRIGAISLLAETGGDMAHFPSAAHLCSWAGMCPGHDESAGKRRSGKTRKANRYLRTTLIQAGVTGANKKESALRALYARLKPRRGHKKAVVAVGHQILEIAYYVMRDGVTYHELGADYFQRHNRERTARRHVKQLEALGYIVTVQPAA

SEQ ID NO: 495898 - protein, 445 aa, unidentified
MRRCIGLDVHREFAQVAIWEAGVVRQAGRIQTTPEALREFAASLCASDEVVLEATGNTYAIARLLERQVGRVVISNPQKTRAIAEAKVKTDKVDAAVLAQLLAAGFLPSVWLPDAATFALRRQIARRAHVVRQRTRLKNQVQSILHRNLVGRCPAADLFGHKGRAWLATQDLPQDEQQAVTALLRQLDFHGQELRIVDAELGRVALERDEVRRLLTIPGVDATVALAIVAAVGDFGRFSSPQRLVSYLGLNPRVRQSGGHPAQHGRITKQGRAHARGMLVEAAWAAAKTPGPLRAFSQRVRARRGMQIAVVATARKLVTLCWHLVVKGEDYAFARPSLTDKKLRSLELRAGLPSRRGQKGTAAAYSRKEVRRRERALAEQAELAYRQLVGNWQPKPPPTQPTRKGVGVAAATGARRSSPQGGKAARQGFQPQGPALRSGVDHAQP

SEQ ID NO: 495899 - protein, 425 aa, unidentified
MKNTQNQKISQIKNETLVVGIDVAKETHYARAFNYRGIELAKLLKFSNTAEGFKLLDQWMQDICKQKGKTEIVAGFEPTGHYWFVLGDHLKRQGHKLAIVNPFHVNRTKELDDNSPSKNDSKDCKTIAMLVKDGRYREVYIPDDIYQELREAVAERERLQEQLTSIHNRVVRWLDIRFPEFQKVFKDWRRNAALITLRSFPTPGKIVEAGARKICETWKTEMKRPSFKRAEALVEAASSSIGRTSGKLASEASLHNLLAEYDLYCQQYEALEELMVELLMQVPNASKLLDIKGVGLSTAATFVGEVGDISRFQDPRQIQKLAGLNLVASSSGKHKGKTTISRRGRRRLRHSLFFAMIAILAHNPEFRSLHQRNLTRDNNPLNKMQSIVALCGKLIRIFYALLSKSVDYDPEKMINDIHQPMQQAA

SEQ ID NO: 495900 - protein, 341 aa, unidentified
MEQATTIGLDIAKHVFQLHGAGAAGHVLFRKRITRVKLLSFLAAQPRCVVAMEACAGAHYWAREIAKLGHHVRLIAPAYVKPFIKRQKNDAADAEAICEAAQRPNMRFVPVKSEEQQANGIVFRARDLLVRQRTQCVNALRGHLMEYGYVFPKGITHVETLVALVENPQSSLPDSVRVILKLLVDTFTALEAQIAVLDAEINQRSKSDPTARRLMTIPGVGPITSTAITALVPAAEGFPAGRDFAAWLGLTPLQKSTGGKQKLGAVSKRGERTIRRLLIIGASAVVQQASRRGAPRGSWLAQMLARKPKMLVTVALANKMARIIWALLVKGGTYRTPAVAA

SEQ ID NO: 495901 - protein, 339 aa, unidentified
MPQYYAGIDLSARSSWICVVNAAGDRQVSRKVANDPECIAQILDPFLPDLSAVVESTFNWYWIVDVVEDLGAEVKLAHPLYIKAIAYAKVKTDRVDAHTLAQLLRMNYIPEAFIYPRELRPTRDLVRRRHRLVNLRAGLYRDLQLQLMKHNVTSFSRNAIKKLDGRNLRALMTHMHDRRCGIAWLHVIDALDKEIAELDRIIQASVRGHKPVVLLKTIPGIGKTLAPTIYYEVGQISRFASDKAFASYSRVAPTIAQSGAVSRQGKNRKQGNRYLKWAFSEAAHLAVVKYPAIREYYNCLLKKKKKRILAKAIMAHKIAIAAFHVLKEEKPYRPGVLPA

SEQ ID NO: 495902 - protein, 416 aa, unidentified
MNAAGIDVSSRKSTVAVLRPFGEVVKLPFDVRHSAEDLAALAAQLKSIDGETRVVMEHTGRYYESIAKVLHEAGLYVSAVNPLLIKEYGNNSLRKVKTDKADAMKIAKYALDNWTELRDYTPMDTIRYELKTLNRQFQLASKQKTATANNLIALQEQSFPGIRKLFDSPVRSDGTQKWVDFTHDFWHVDCVRSDSQNAFAERYRKWCKRNRYQFSMEKATEVYAVAKSAVVLVQKTSVTKTLVQEAANQLTAISRSVETYRSEMNKLASQLPEYPVVMEMYGVGESLGPHLMAEIGDVRRFERKQSLVAFAGIDPAPSESGDYCSRSNRTTKRGSPYLRKTLFNIMKVHLQRAPADEPVFQFLDKKRAEGKLYYVYMTAAGNKFLRRYYGKVMAYFSTLEGLPPVDMDSTGLHHAE

SEQ ID NO: 495903 - protein, 453 aa, unidentified
MARKKKVSLEMINPHAAGIDVGSRSHYVAIGQGKDDVRQFGVYAEDLQALAKWLLDNGITTTAMESTGTYWQNLYSTLQEAGLQVILVNGKFTKNIHGKKTDVKDCQWIQKLHSIGLLTGSFLPDAATEQLRTYCRHRSHLIDMAADATRKMQQYLRLLNLRLDVVVKDVTGETGLSIIEAVCKGESDAAALASHRHYNCRKSKEEIAKALQSNERQDYLFALQQELELYKLVRGKIAACDRAIELLLKEQIECDSAKRELNAEAKPYKRVNKNAPKNMDLNQLAYQYFDGVDLMAIEGVSHSTVIMLMSEVGNAGLKKFSCAKQFACWLRLAPNNKISGGKVLSNRIPKGSNRLKIALRNAANSIGNLKDTHLSNFFRRVLYRRGRAAAVSATARKLAVIIWNMVVKGISYQPPTNYEFLDQKRKRKVQEMKKLITKFNLTTDDLGLQTSPL

SEQ ID NO: 495904 - protein, 353 aa, unidentified
MTVYVGVDFHARQQTIRYCDSADGEVHECELQHKGDQVREFYAQFQGEVIVGLEASGYSTWFEELLESMQYEVWLGNPAEIRRKAPRRQKNDRRDADLILELMLKGDFPRLHRFSAESRMVLRQLRYRHKLVKVRTIAKNSLQAISLGAGCSQPRNLLSQRGQERLRGLALPPVLEQQREEWLQMVAQLDKRIATLEATLEKTAASDEQIKLLRTHPGIGLLTGLVVRHTIMPVARFSTTRKAVAYAGFDPVEDSSGPRNRLGSISKEGSRLLRFLLNEAGQTACRRDPELKRFYQRLVHRRNRQKAKVAVARKLLVRSFIMLRDQINYAEFLRRGVAARSARKTHRPSMPDL

SEQ ID NO: 495905 - protein, 323 aa, unidentified
MHKSFCQAIVCTHEGDVLKEGRIATEQQDIEEFFSGLEGLEIALEASTNYEYFYDLLESLGHHVVVAHPLKTRMIADAKVKTDKLDARILADLLRGDLLPTSYVPPKEQRELRHLVRHRIALGRLRGRLKTQIKTELRRKNIKYREGANCFTEKGKTELRRLHNPVIDSYLTIYAVVEDELKKMDRAIAEAGTRYEDVRLLTSIKGIGVYSALVIYSEIGDGSRFPTEDHVFSYAGLTPRVHQTGNEQYYGRITKEGSKYLRWILVEAARIHVQWCPESRITKHYEKIKRKRGEKIAIIAAARKLLQAIYYMLKHKEPFRIEG

SEQ ID NO: 495906 - protein, 374 aa, unidentified
MTGTITSAGVDVHARSIDAAAICVATGEVTRRRFGPAPEPVLGWLKQLPAPVHACYEAGPTGFGLHRAAAAAGIRMGVVAPSKTPRAAGDQVKTDRKDAELLARLLLAGQLTAVRVPDARMEARRELFRSHEQARGDLQRARHRTSKMLLRHGRVWSEGSAWTQAHRRWLARQEFDHPECELVFADYLATVAASAARKAALAQRLSRLAQEPNLWPTVSRLRAFRGIDTLTALGLHLELGGDWARFHRPAQLSAWLGLTPSLHQSGQSSAQGAITKTGSLYARRLLVESSWHYRRTPYLGPTLAARQDGVPDTVLQASWRAQRRLHRVFGRMKARGKPANVATPSRSRVEGPCGCLTLVGPQLAYAVGAAEPSP

SEQ ID NO: 495907 - protein, 349 aa, unidentified
MKIIGCDFHPIYQQIVMWDKATGEMLERALSHERKEEVRAFYAGLQGPVRVGIEASGQSQWFEQLLAELGPEVWIGDAAKIRASCERKQKTDRRDAELLVKLLEEERFPRIWVPTPAERDARQLLLHRHKLVRMRTQLKNQLQALALNQGVQRKRKLWSAAGRKPLEALPLLPWASRRRAELLVLLDQLEASIGELDGAAAEQANTRPAVRRVMTHPGVGPITALAFVLTMGPAQRFRRGKQVASYLGLIPTEHSSGGRGQRLGPISKQGNPFLRGLLVEAAQSAVRHEPEMRRAYQRLAQRKCRALAKVAMARKLAVRLYWMLRTEVDYAQLIQGSHAGQLESFRGRV

SEQ ID NO: 495908 - protein, 386 aa, unidentified
MIYVGIDISKYKHDCFICNDLGEIIVENLSFENTKKGFQQFLDLLKPYDNSNVHIGLEATGHYGLNLKLFLEKNNYTFMEFNPLLVKEFSKSLSLRKTKTDKVDAMTIAQKLLSVPYKPNSKLFYHKYSIKSLSRLRETLVKQRSKYMVQMTNILDIIFPEFKPFFSNRFSVTSLYILEKYKSANKIANMRDFDTLKSLSRSHFTYSKFIKLKDLAKNTIGESNEIFELQLQILLNLYKEIDIKIDSIDNQISTIVKELNPPTLSIPGIGVNSCATIISEFGDIAKFSSPSKMLSFAGLEPGVIESGTMSSKGKMVKRGSGYLRYALMNVAMVVIANNHVFYDFYFKKRSEGKCHRVALSHVCKKLIRVIYILETKNIYFDPSLLR

SEQ ID NO: 495909 - protein, 387 aa, unidentified
MQKPHDDSKACRTAFVQDNTLVAVIEMSLSSWLVAGMIPGVSREPVKKIAPDAEDLLQLLYRWRDGAITAGKEIIRIAVAYETGRDSFWLARWLRERGIDAQVIHATSVAISREHRRAKTDRIDTAMLRRGFLGWLRGEPGHCSMAIVPTVTEEDAKRPCRDRESLVHERTSIVNRMKAMLIQFGVRNFNPVLRKASEKLDAVRTPEGIALPPNTVCALRRNMERLHLIKEQIKAIEQAQLQSLQRDPTEKMNAIIFLLVRIIGLGVETAQQLAHEILFRNLRDRKAVARYAGVTGSPDESGSKRREKGISRSGNARVRKILIQLSWRIVKFQPESDLVLWFKNRTQNAQGSRKPMIVALARKLIIALWRYVNTGVVPEGFKLRPAS

SEQ ID NO: 495910 - protein, 312 aa, unidentified
METKFVGIDVSKLTLDFDCLPVSAPQQFSNDAVGIAALVALLQNSGVERIVIEATGGWETPGVSALAVAQLPVVVVNPKQVRDFAKAMGHFAKTDKLDAKVLALFGERLKPALRALPDEAQRTLADLLGRRNQLVAMRAQEKTRLATVPAVARKDVEQHIAWLGKRIAKLEGDLGNRLKQSPVWCHKAALLESTPGVGEVTTFSLLADLPELGTLNRQKISALVGVAPFPDDSGKRQGKRYIRGGRAEVRCALYMATLSAITHNPPIKALYERLTKAGKPFKLAMTACMRKLLTILNAILKNNQPWKIQPTS

SEQ ID NO: 495911 - protein, 335 aa, unidentified
MIKENFIYVGIDLHKETHTAVMIDCYNQKLGEITFPNRPADFPKLVTKVKKCNTDGKEVVYGLENAYGYGRALAVWLIDKGYLVKDVNTAISHRQAKHRGAMYRKSDSDDAKAIALATLNMLDKLPDACPNDAYWSLGQLVHRRDNIMKQRTRLVNQLHEQLCIAYPSYKQFFNDISRPTALYFWEHYPSRKYLKGKSVEDLRAELVPVSHNKCSTKTCEKILDAVASDKVKNNNFQDARDMVTLSIVSDLQHYDSQLAEVDKMLEQMYKMLGCTLTTIPGVNVITAVKILAEIGDIKRFSNANKLAQFAGIAPLHLSSSGKGKDVATKQGNRRL

SEQ ID NO: 495912 - protein, 372 aa, unidentified
MKKIRFLGLDVHAETIAIAVAEPDGEVRSLGIIPNREESVRKLVKKLGPAEQLQACYEAGPTGYVLYWQLTALGVKCEVVAPSLVPVKAGDRVKTDRRDATKLARSYRAGDLTAVWVPNQEHEALRDLVRAREAAKQDQLRARHRLSKFLLRHGRRAPAGIKVWTQKHQHWIKEQVHFEQPAQEYTLLDYLHEVEHTADRIRRLEQAIEEAVKLAPPRMQGVIQALQALRGVAQISAVTIVAELGEISRFDGARQLMGYSGAVLSEHSSGKRIQRGPITKTGNTHLRRIAIEAVWAYRHRPTVGPALRKRQEGLSEEVKGIAWKAQHRLHKRYRNLVAAGKEKQKVITAVGRELLGFIWAIGVQVERNSRVA

SEQ ID NO: 495913 - protein, 411 aa, unidentified
MHNRQNYLYVGVDLHKEHHTAVIINCWQEKLGEIQFENKPSAFSEFLLEVETYVSNGLSVVFGLEDVGGYGRALAKYLVDHEQVVKEVNPALSFLERKSQVMIQKNDSWDAECVARILVNKFNQLPDAKPNDLFWSIQQLVSRRNALVKAQSALKNQLHIQLNHHYPSYKKFFSELDGKTALAFWQQYPSPSCLEGANIKQLTAFLLDVSNNTCSVKKASDILKLVKEDGQTMKEYQEMRNFLVRSIVREIEFKKKEMKYIERELKQLVNLLDYQLETMPGIELVTASALIAEIGDVRRFPNANKLARFAGIAPVYFGSGGKGKTHKSKQGNRALHALFYNLAVQQVQVAKGSKMPRNPVFHAYYQKKLKEGKTKGQALVCIMRRLVNIVYGMMKYKTAYELPVVEEKEVV

SEQ ID NO: 495914 - protein, 405 aa, unidentified
MEVLYKRCCGIDIHKNMMVACIFTSVRKKEIRQFSTMTEDILQLVSWLKETDCEMAAMESTGSYWKPVYNIFEEEQIPIMVVNAQHIKGVPGRKTDVKDAEWIADLVRHGLVKASYIPNRDQRELREITRYRQEVIEERARELNRIQAVLEGCNVKLSSVITDISGKSGMTILKAIVSGETDPVVLSELAEGRARDKIPEMQKSLQGRISEHQQKMLKHQLGHIESLTALIMDLDADIKKKSESINWAIEALDDMPGIGRKSAERILAETGVEMEHFQNESRFSSWAGLVPECKESAGKKMSTRIRKGNKYLKATLVECARAGIRNKQSYLYSRYQRIAARRGGKRALIAVAHAMLIAIYHILKEKVPYHDLGADYYSVINQEKMINRNIRTLEKLGVNVMIQPK

SEQ ID NO: 495915 - protein, 469 aa, unidentified
MQLLYRCCAGLDVHRDTVSACIRRQVRGKAEAVIEEEVFGTFTEDLERLGRWLKKHHIQQVAMESTGVYWIPVWNVLETKVELMLVNPATVHALQGNKTDRIDARRIAEYLQHGLLRGSFIPAKPIRELRELTRMRVHGQQDRNRVVNRIARLLETANLKLASVISNIVGMSGLEMLRLLAKGQTKPERLAECARGHMRVKIPALVQALDGRTDEHFRWKLSELLRKLDALDAEQGRLDARLSELAAPYADVLRRLDTIPGVDRIAALALLAEFGSDMAQFPTPAHLASWAGLCPGNAESAGKRFSGRTRKGNRYVRRMLVQSAWAAARTNDCFLAALFFRTAQRRGMKKAAVAVAHRILIIAWHILAEAGVEYHERGGDYFDRRNPQRTAKRLTERLQAIGYTVTLTPRSDTHALPKKTKPARAKPPRPCIDPATCQRCARRQLPRCICLLKPKPRNPSVVSSVVSTT

SEQ ID NO: 495916 - protein, 308 aa, unidentified
MDIYAGIDVSKDWLDVSVAPSGEAVRFRRDADGLDELVAFLQPQGRCLAVVEATGGFETVVTASLAAAGLNVVTVNPAQVRAFAFSLGQRAKTDKVDARVIALFAQAVRPPGRPIPDVQAVALADLVSRRRQIIAMIVAERQREHRASATMKKSIARLVRALEKELSNVDGGIDEAVRNSPAWAGTLDLLKSVPGIGDQIARTLIAELPELGGLDRRQIAALAGLAPYTRQSGQWRGQSFISGGRASVRSALFMGAMVAARYNPVLKAFRDDLIARGKPKKVALIAVARKLLTILNAIVRDKQPWQNA

SEQ ID NO: 495917 - protein, 353 aa, unidentified
MDTIYIGVDFHARQQTICYLTTEEGEVLTCELKHQNKDEVRGFYAQFSGRVVVGLEASGYSPWFEQLLEELGHEVWLGDATEIRRRARWRQKNDRRDAELILDLLVHDEFPRLHRPCPQSREILRMLRYRQKLIKIRTMGKNSLQALALQSGLAKRSQLFTKAGQQELRTAAMSPVMQWQREQWFQLLEPLNQRLLETMLWLKQQTKDDERISRLRTHPGVGLLTSLCVVHTLWPVSRFRNQRKVAAYAGFDPMERSSAERKHFLGISKAGSRVLRYLLVEAAHTAVKKDDDLKRFYQRLVERRGRPKAKTAAARKLLVRSYIMLRDEIDYAEFRHRAVAARLARQSSRPPCL

SEQ ID NO: 495918 - protein, 333 aa, unidentified
MQYYAGLDIHKKTCQAIICTDKGNIIKEGKITTEKEEIKEFFSEFKELTIAIEACNTWEHIFETLEMDGHQVVLAHPLKTRVIAEARVKTDRVDAKILMHLLRTGFLPTSYIPCREIRDLRNLVRRRIFLGRYTARLKNKIYAELLRQGIQYKRGPTLFNGRGRQWLRLLKISSVDSYLNMYESTLEEIKILERELKNRARQYKEAQLLTTIPGVGIYSALIILSEIGDITRFPCEEKLYAYAGVIPSVHQSGEHTYHGHITKQGSKHLRWILTEAVRIHLIWTDRHMIETKISRFYHRLCKKKPKNVAAIAAARKMLQIIYHMLKNQDEFRG

SEQ ID NO: 495919 - protein, 393 aa, unidentified
MFYVGIDIAKHSHEASITDSNGYLLGKSISFSNSQKGCEKLIALLERFSATVDNTIIGLEATGHYWLSVYSFLLELGYDLKVINPIQSDAFRKMYIRQTKNDSKDSFVIAQIMRFGEFSSTILSDENIMALRQLSRYRLALVDECSDWKRKVICLLDQVFPEYSSFFSDTFGVTSKEVLLKYPTPEDMITVSSKKLTTLLNKASKGRFNINKTKQLKETANNSFGIKFAKDAFSFQIKQMISQIIFIENQLNDLEKEISSLLHETNHVITSIIGIGDVLGALIIGEIGDISRFESAPKLVAFSGLDVKINQSGQFSGSRMRISKRGSPYLRRAIWTAANRAAFADPVLSNYYQSLRARGKHHLTAVGGVARKLCNIIFPVLRDNKPYTPIFPK

SEQ ID NO: 495920 - protein, 340 aa, unidentified
MTITTVGIDLAKNVFAVHGVDQNGKTVLVKSRVTRAALPGLIAGLPPCVIGMEACSGAHYWARLFRQYGHEPRLMAAKFVPPYRMAGKSGKNDAADAQAICEAVRRPHMRFVPVKDESQQAMQCLHRTRQGFIEEKTATYNRLRGLISEFGVIAPQSTDALRHMISVQKSSLPLQVQQCVDDLLEHVDRIEANITEYDRILSRMAKTDHRSQRLMELKGVGPTTACALVACIGNAHDFKNGRQLAAWLGLTPSQYSSGGKSKLGRITKAGDSYLRTLLGQGARSVLIGAEKRTDPFSRWVCSLVERRGYWRAVVAIAAKNARLCWASLHYGDDFRLYSAS

SEQ ID NO: 495921 - protein, 352 aa, unidentified
MFSYHRTTTEYSCGIDLHSRMMYICVMDRDGNILVHRNIRGNNFEYFLRQVEPYKHSLTACCECTFNWYWLADACLDAGIEFVLGHALYMSAIHGFKTKNDKTDSMQIAHLLRSNLIPPAYVYPRKKRAVRGLLRKRIGFVWKRSEILTCLSMGVMTMGHAPLNSTNKTRERWLGELKEVYTEPIDKVSMEASMHMVRQFDITIEKLDQTIVGHTRSNYLAEYNTLKTVPGIGRMLALIMLYEIDDIERFSSVQDFLSYCRLVKGTVASAGKIKGGKAGKIGNGYLKYAFHEAAVLGKGRNPEMRKYYQRLEAKKGKFLANSILACKYARAVYYMLKTKKVFEFSKLARRAA

SEQ ID NO: 495922 - protein, 350 aa, unidentified
MKRILKQSVGIDVAQKELVVCIGRMYEDLSTELYAHKSFANTAKGFILLVQWILKLTEPTVSIRYVMEATGVYHESLACYLADHGYSVSIILPNKISNYFRTLSVKTITDKSASEAIALFGLERNLEDWKRPKPVFKYLRQLTRERDQLVQERTMIKNQLHAEKTESDPNSSTLKRIKQRIDLLNKQEKVIKEEIETLSKKEKELKGELALLCSIPGIGTLTAATILAETNGFELVRNKRQLASYAGFDVQEKQSGTSVKGKTRISKKGNKNLRKAMHLPALTAIRHDARYKAIFARLVSKHGIKMKAAVAVQRKLLELSYTIFKTQRPYNKNHLQEAQAAAQKNEMQIA

SEQ ID NO: 495923 - protein, 388 aa, unidentified
MVSDFRKGRYKLMKIYVGIDIAKLNHFAAAISSDGEIIIEPFKFTNDADGFQLLVSKLESFDKNSLIIGLESTAHYGDNLVRYLVTELYQVCVLNPIKTCQMRKNNVRKTKTDKVDTYVIAKTLMMQDNLRFVSFFDLDMMDLKALGRFRQKTIKQRTRLKIQLTTYVDQVFPEIQYFFKSGLHQHAVYALLKEAPSPKEIASMHMTHLANLLKVNSHGHFTKEQAKELRVLAQKSVGANDSAISIQITQTIQQIELLDSQLEKIEAEMTDIMKYNDSVIMTIPGIGYINGGMILGEIGDIHRFSNPNKLLAFAGLEPSVYQSDNFQAKTTRMSKRGSRVLRYALVNAAWNVVRNNATFKAYYDAKRAEGRSHYNALGHCTGKLVRVI

SEQ ID NO: 495924 - protein, 343 aa, unidentified
MYYIGLDVHKKTISYCVKDAAGHVHREGKIGSTRCELDAWIRTLPQPRTIAMEATIFTGWIYDHLLPHAEAVKVAHPLMLRAIAAAKRKNDKIDASKIADCLRCDFLPECYMTSTEIRDRRRTLRYRGLLVRQMAQMKNRVSGLLMETGVSYNKQRLHKVGYFAELMSGNAEIDASIRPLLKLSREHIVRAQKLDYALVSSLERDPVLSERLKRLRTVPGVGPITALTWTLEVGDVARFRSIKQAISYCGLCGAERSSADKTMRMPISKQRNKHIQHVLVEAAKLAPRQNHELALVYEKEMQRGNRNRATLAVARKMVTWMLAVERRKQDFVPAEKLGGKTAA

SEQ ID NO: 495925 - protein, 344 aa, unidentified
MTYYTGIDVSLRSVSICVVDDKGEVCLEAKVAAEIDAIVDRLRRFSSEVKSVGFEAGTLTQYLTYGLQAAGFEVICLEARQVSVTLSAMRNKTDRNDARGLAQILRTGWYSRVHVKSLHSHQVRALLASRKAILKKCVDLENELRGLLKVFGIRLPSRVGHGSFDAELRETVSTDEMLACALVPLLDARTVLYKTYLKLDNAVKGLVRVDPICRRLMSIPGVGPVTALTFKAAVDDPNRFKSSRTVAAHFGLTPRRFQSGEVDNSGHISRAGDADVRSALYVAAHSLLTRNAQWSTLKAWGVRLAKTRGHRRAVIAVARKLAVVLHRMWIDGSEFRWGAVATPA

SEQ ID NO: 495926 - protein, 344 aa, unidentified
MQSMYYIGLDVHKKTISYCVKDGSGTIHDEGTIPATRFDLDRWMKTLPQPWTAAMEATVFTGWIYDHLQPHAAALKVAHPLMLRAIAAAKKKNDRIDANKICDCLRCDFLPECYMAATAIRERRRTLRYRNLLVRQMVQMKNKISMLLMEAGVSYNKQRLHKAGYFRELLATNPAIDEGLCSLLRLCRETVVRLSKTESALVRSLERDSLLIDRVERLMSIPAVGPITALTWALEIGDPQRFPSIKKAISYCGLCGAEKSSANTVQRTPLSKQRNKHLQTTLIEAAKMAPRNSPELAMLYDKEKQKGNANRATLAVARKLVAYLMAVDRGQRNFQVLQTNCIAA

SEQ ID NO: 495927 - protein, 320 aa, unidentified
MQTPTIVLNIGADVAKDEIVVACSEGSFPVRKLANKRTALLAFLKTIPAGSRIGMESTGIYHELFASLAHKLGFIVFVLNPKDVRHYAKGVGKRGKTDRVDAELIARMVTKEHAELHPWVPPTPDQREIDRLIKRRAKLSSLRQALGMSLKGMVGFSADLKTLRQRFDQVIAHIDQRIKELIEANPDRKEHDMHLRTITGFGHVVSAAMVNSLERIPLKNADAFVAFTGLDPRPDDSGQHQGKRRLSKRGPSELRRLLYLAALSAIKTKTWRPIYEHYRGKGLSSTAAIVIVARRIARTAWSMYTYKTEFDPGRLMKSLT

SEQ ID NO: 495928 - protein, 402 aa, unidentified
MNCVGIDVSKGKSMIAVMRPFGEVVVSPFEVRHTASELSELARLLKNLDGETRVVMESTGNYHAPVAWLLHGAGFYVSVVNAMLVHDYGNNSLRRAKTDKKDAVKLANYGLDHWLTLPRYVPEEDTRLMLKTCYRQYQQYSKVQTMLKNNLISLLDTAFPDVNRLFTSPPRADGSEKWVDFVATFWHCECVCGLSKKAFTAKYQRWCRKHGYNFSQDKALDIYASACGRFGVMPKTNTAKLLVEQAISQLQTTSAALAALKQEMQSLAASLPEYPVVMGMFGVGPTLGPQLIAEIGDVRRFHSKKALVAFAGIDAPPYQSGQIDVRSRSISKRGSASLRRTLFLVMGVLLQCAPMDEPVYQFMNKKRSEGKPYRVYMMASANKFLRIYYASVKAYLDSLEHD

SEQ ID NO: 495929 - protein, 298 aa, unidentified
MIKNTNYFGIDISKDVFDVMGSDGKHHQFKNDLSGFKKLFSLTNEFSHCVMESTGVYHLGLAYYLYEKGIAVSIENPLSIKRFIQMRLTKIKTDKRDSEMIYEYAVNTGDELRLWKGQSKTQIACSQIISLTNLYTKQTTALKNKLQTEESMGSPCSKVIRSLKRSLKHLKNEIDNLEESLLELVKQDNQDLLTRVESIPGIGRKSSMLLIVLTGGFERFNKASELCSFAGLTPMIRQSGSSIRSRSRISKMGNRRLRKTLFMCSLSAKKHNKACKEIFDRIVAKGKSKKVALIAVCK

SEQ ID NO: 495930 - protein, 368 aa, unidentified
MLHNVAGFQSFVGVDLHKCTVTLKAVSAAGESTAHLTISTKSVEKIERWLRDLPQPVWLAVEACPFVEWFIDRYRDCVARIDIADATELAHRRGKRRKNDPNDALDIARRLARGECPLGFIADPTLMQLRKLGRHWRQLSRLISRSKHAMKSMLNAANLRGPKFDGAGAQRWLLAHGHLLKPVQHQAFSDYLDHVLLVERQREKLRRAMHWAARSETFAQTELLLETVPGIGDIWGLIIAAEIGPFDRFPNSDALEFWAGLTADLKESAGRTQSGNITKAGSAPLRWALCQAAVTLCHCDARQEAIRQRLIKRIGKAKANVAMGRRLLRTLYAMVRDQKPYRCEQPINRTTRLNKARAARKTQADKAA

SEQ ID NO: 495931 - protein, 320 aa, unidentified
MDSVLGIDIGKAKFHGTLLFSDGTRRRKACANSPAGCSELLAWLARHGAGRVHACLEATGAYSELLATTLVDAGHQVSILNPAIIHHYAKSRLSRAKTDPVDADVIADYAAKEHPPLWTPLPREVRELQALVRRLDALIGMHTDERNRAQAGALTPAVQHSIETVLAHLEAQIEAVRQQIRQHMDQHPGLRVQRDLLTSIPGIGEATAALLLAELFNKAFASARQAAAFAGVVPRPNDSGTREGRRVMCKLGSSRLRKGLYFPAIAAIRFNPSLQPLAHRLRAAGKPPMLIIGAAMRKLIHLAFGVLKSGRAYDPDLAKA

SEQ ID NO: 495932 - protein, 353 aa, unidentified
MRTYYVGMDVHQASIVIVVLNGTGKVIESTILKTGASAMRSYLQRLKGRVYVTFEEGTQAQWLYEVVQPLVTAVIVCDPRQNRLLSSGNKSDRIDAQKLAELLRNGSLKEVDHRDHGVRVLKELVRNYECLVQDTTRVMGRLKAIYRGQAIACKGHEIYRQDKSAKWLRKLKEPGRRARASFLYEQLAALRPLRQKAKLAMLREARRHAAQRWLLSVPRLGPVSVAQLLAIVGTPHRFRSKRQFWTYVGLAVVTRTTADQEVINGVLRRSRRPVATRGLNRNHNHLLKRVFKTAATSACHSGPFAAAYEARVERGMDPALARLTIARQIAAITLSLWKRGELFQVERMKLATT

SEQ ID NO: 495933 - protein, 347 aa, unidentified
MRFYTKQHKMYCGIDLHARTMYVCILSQDGEVMVHQNFTANPETFLKVIAPYRDDVVVAVECIFTWYWLADLCVREGIPFVLGHALYMKAIHGGKAKNDRIDAQKVAVLLRGGMLPQAYVYPAAMRATRDLLRRRLHLMRKRAELLTHIQNTNSQYNLPEIGKKIAYKANREGVAERFPDPAVQKSIEVDLALLDHYDRLLRDMELTILKTAKQHDANTLYLLRTVPGIGEILSLVLLYEIHDIERFPRVQDFVSYCRLVKCAKESAGKRYGTSGTKIGNAYLKWAFSEAAVLFLRANPAGQKYLTRLEKKHGKGKALTVLAHKLARAVYYMLKRARAFDMKTFLQQ

SEQ ID NO: 495934 - protein, 301 aa, unidentified
MTIVGCDLHTRKQQVAVLHTDTGEVVEQELLHSGDAVEQFYRALPCPVTVGIESTGYALWFHELMQRLGHTLLVGEAAKIRAMVVRKTKTDRRDAQHRLDLLKHERFPAVWIPDPATRDLRALVTHRVRLVRIRTMVKNGLQALALNRRLALGSKLWSQRGRAQLTALDLPRHTAQRREDSLELLTWLETHFDGLDARIVDAAHAHPGARLLLTHPGVGALTALTTVLVLGPTARFPGSKHVVSYVGLAPAVRASADTCHLGQITKQGSALLRWVLGQAAPLAAREDSGPRAAVPVRAFSE

SEQ ID NO: 495935 - protein, 338 aa, unidentified
MEHQRQYVGIDLHRRRSVIVRITDDGEVLETVRVVNDPLKLALAMAEAGDNPEVALEATYGWYWAADLLQAEGAHVHLVHPLGLHWDSRRVKNDVLDATELARRLSRGDLPEAWIAPPELRELRELVRYRAKLVALRISAKAQVHAVMAKLGILPPLDDMFGPGGQRHLDEMAFDGAYAIRVESLRDLLEIYQREITTVEREVARRLRGHVGYQAVQAINGVGPVMAAIFVAEIGDVSRFESAGHLCSWSGLTPRHRESDTKVSRGHITKQGSNLVRWAAIEAVACYHGGAPIAPTYARVAARRGAMIARVAAARKLLCLVYYGLRDGEIRCLAEATA

SEQ ID NO: 495936 - protein, 393 aa, unidentified
MVVSVGIDVSKNKHDCFIVSSEGEVLADVFTIPNNMDGFYALLEKIRACTTPQDKIKVGLEATGHYSYNILGFLLDNGLATYVLNPLRTNLYRKSLSLRKTKTDRVDARTIAAMLLSDGGLKPHTNTAYHNEELKSLTRYRFDKVKERAKLKSSISRLVCILFPELEKLVSSLHLATVYALLEEFPGSKQIAKAHLTRLKTLLGNASKGRYGRDMAVTIRSAAQNSVGSCMPAKSLELQHTIRLIRELDAEIAEIEAEIETMMDKIQSPITTIPGMGSRMAAMILAEIGDFSRFESPDKLLAYAGMSPSTYQSGQLKNCYPHMEKRGSRYLRYALYNAAKYVCHWDPTFAAYLAKKRDEGKHYNVALSHATKKLVRLLFALERSRQPYCSLAA

SEQ ID NO: 495937 - protein, 343 aa, unidentified
MQIRTIGVDLAKNVFQVHGVDSAGKVVITRQLRRKQVIEFFSKIPPCLVGMEACGTAHHWAREVSKLGHTVRLMPPSYVKGYVKRSKNDAADAAAICEAVTRPSMRFVAVKSTDQQASLMLHRTRDLLIRQRTQLINALRAHLAEFGLVAETGREGVAQLAALITDESDREALPFAMKQALQAIVDQLAALELQVGTLDRAIHAHHRANDMSSRLETVPGIGVIGATAIASAVTDPSNFKSGRDFAAWIGLVPRQHSTGGKERLGGISKQGDRYLRRLLVVGATAVVRHARQHPQKHPWIIRLLAKKPAKLVAVAVANKMARIAWAIMAKGGYYRAPELAAAA

SEQ ID NO: 495938 - protein, 353 aa, unidentified
MSYIIGCDAHKHYSQFAVFEGDQTRCKQVRVEHERGAIREFLSEFPEGTPVALESIGNWYWIVEEIEQAGCIPLLTHPAKAKAMMGNVNKTDKLDARGLATLLRNGTLPTVWIAPSEVRDERELPRTRMALCKIRVALKNRIHATLAKYNLSLPTESDIFAPKWSGQLNQVIEQLPPETQKCLKQELELLDKVQGQIGAMEERMKVCIALTPDMQLLKTIPGVGDILAIVIGTEIGLVGRFSRAEQLASYAGTVPAVKSSGGKVRYGHTPKESNHYLKWAFVEAANAPAQYCKKPRWQHRHVTHLYERVKRRKGHSVAVGAVARHLAEATFWILNKKEPYREPTRPKVLPRQA

SEQ ID NO: 495939 - protein, 429 aa, unidentified
MDGDEGNRIEEFRQLKKEIRGSSEYLIVGIDVAKHKHHAFFGTAKGKTLLRRLIFENNIEGFGRLRSRTEAIKVQHSLSKVVFGLEPTANYHKPLAEYLIKCGHNVVLVSGVAVNNNRELLDGRWDKHDTKDSSNVADLISQGKCLFYDYPSMPLRDLRNLLSLKRRLKKQEHGTRVRIRNHLLAQYFPEFDRYFGKRSSESLPIVKWCLNPSMIAGMEYDEFRAFVAPRMKTIGQEKRLKSIWGMAIDSVGCDAGQTLDFEAKVMVEDLQRLTDTLHEVEDHIEDICRGFPEYGYLLTIPGFGPDVSSKVLGAIGNPFRFDNGKQVLKLAGYDLGAHRSGKTSDTAVPVISKRGKAYLRYALYQAAFIASTANSSFITYYTNKLRGRQREKGIKTKMKVKLAAKMLIIAWTLMKKKEPFNPEYLNTDE

SEQ ID NO: 495940 - protein, 344 aa, unidentified
MKHYAGLDVSVKETSVCIIDEAGKTIREVKVASEPEAILSVLVDEALTIERIGLEAGPLSQWVYSGLAETGLPVICVETRHMKAALSAQLNKSDRNDARGIAHMMRVGLYRPVHVKTLASQKRRMLLTSRQLLQAKALDIENDLRGTLRNFGLKVGMVGVAKFEARIRDLVVDHPDLAAITEPLLIARRALREQLGVLHRRLLAVVRQDEVCRRLMTVPGVGPVVALTFRATVDVAARFKNSKAVGAVFGLTPRRHQSGEIDRMGSISKSGDAMVRTVLFGAAQVMLTRTIRWSWLKAWGMKIARHRGMKRAIVAVARRMAVIMHRMWADGSEFRWTNPSTAAA

SEQ ID NO: 495941 - protein, 405 aa, unidentified
MEITPIHRRVVGLDVHQNKITACALIEQADGSVVVEQREFGGFKRDRRALAEWVHGFAPDIVVMESTGIYWKSPYAALEKVGIAAWVVNARHVKNVPGRKTDISDAQWLATLARAGLVRASFIPPADIRHLRLIARQRQKLGGVLAAEKNRLHKVLADAGIRLNVLVSDLHGQSARAMVKALLADEPIHAILDRAGRLRATREELFEALQPEELSAKHRFVLNEIMAHIEYLEATMARFEQALLDGLAPWEPQMSLLETVPGIDRMGAAMLLVEIGTDMDNFGSAERLASWVGICPGNNESAGKRKRGRTRKGNAWVRRLLCEFAQAASRTRCALKDKFAALSIRKGHKRSIVALAHKMLRIVYAMLANTTPYQDRTVDYEALMVGRNAPRWLKMLAKHGYIATA

SEQ ID NO: 495942 - protein, 403 aa, unidentified
MSPEHSIDIFLGLDVGKSEHHACALDRDGNKVFDKPLPQLESELAGVFHQLQKLGTVLVIVDQPNTIGALPIAVARDCGCEVGYLPGLAMRKAADLYPGRAKTDKRDAFIIADTARTMPHTLRAVDRNDEVLSALKMLSGFDDDIARDCTRTVNRLRSVLTQIYPSLERVFAGSTLTRTPILELLIHYKGPQGLKRAGYQRVLNWMIKRTRKDPTPLVDDIFTALKAQTVTVPGSDAAELVIPQLAANIQALKEQRNTIAEQVEEMLADFPLCEVLMSMPGVGIKTAAQILLAIGDGSDFASAGHLAAYAGLAPAPRRSGSSIRGEFPARSGNKRLKNALFYSAFAVIRSHEPSRRYYERKRAEGKRHNAAVICLARRRCNVIYAMLKNKEFFREIPPRPVAA

SEQ ID NO: 495943 - protein, 378 aa, unidentified
MTTMAHPAVTRVTVGVDTHGDVHLAHAGDQLGRRLDTVIVPTTPSGYRGLLAWARGLGELDAWGVEGTGAYGAALARFLHDCGQVVVAVNRPDRAARRRRGKSDPVDAEAAARTVQAGQATALPKAGTGQVEMLRSLRMARASAMKARTQAINAIKALLVTAPVDLREQLRGLPAAQLVRCAAALEPGRLTSPTAAAMLALRTLACRYQALSAEITTLTTELKRLTATAAAPLVALFGVGSDSAGALLVAAGDNPGRLRSEATFSMLCGSSPIEASSGTTIRYRLNRGGDRQVNAALYRIVLVRLRYDPATRAYMARRITQGKSKREVIRCLNATWPGGSSQPSARWSACAAHVPEGSRHPLPPAQRDHGWRRGQCQW

SEQ ID NO: 495944 - protein, 394 aa, unidentified
MTTAEFEILNQTSIVRRFAAGIDVGCEKCSISVLRPDKTVVIKPLEFTNDAQGYTFLLTKLVSLGVNPAEIVIGLEATGRYWENLYHYLAKLGYSLILLHPAQTHQFSQRRGLRAKTDALDAGTIARVVLSDEARPAYVPGDLVATYRELVRLHSNLADEIGRYRNEIHALLFVLFPEYTQVFADPCRPTALAILKLYPTPQVIAEVPVAVLGAKLTELSNGHYGLKTAERLITLGKTSASSGLASNARAQGLVILCDQLLHTQANLEILESEIAQLLQQDEAAKKLAEIPEFGPKTIAGLRAELGEVGRFSNCNQVVAYAGLDLTVKESGGYPRSGWERQDETLQAWQWSVASPLIHGGLSQFAAQGIRLWGLLPRIKETWPEWTQCFDGGYA

SEQ ID NO: 495945 - protein, 474 aa, unidentified
MAARRLLTRGPNPLEPPEAQPQTVPVGKRTALKVQEKVAPRRAGIRATCRSCSAAACAKSEGGELVRYYLGVDWADQTHAVWVVDERGTKLTARAVPHTAEGLSEWGRELDEWRAQGIELWAAIERPEGRVVDFLLDHGVVVYPVNPKALDRARDRFRQSGAKDDPFDARVLADFLRTDHAHLHALQPSSEAAQELKLLTEDYHRQVRQQTRLVNQLTITLKAYYPRALEVAELTTALAREFLQAYPTPEAVLALTKRQWQGWARAHHLSETRTRALWEVLQQPQLPVPAHVVRPKARLMRTLVAELAAVVAAVGEYREAIEDFFASMPTAQWVRTLPIGDHGITAPTLWARLGDAPERWESFRHLQAQAGAVPLTKRSGKQCVVQFRFACDKALRYVVDHVAFLSLRSCEWARAYYDQQRARGHSHRQALRALGAKWLKIIFVMWQRQASYDDQYHLASMARQQLRQPQKKIA

SEQ ID NO: 495946 - protein, 313 aa, unidentified
MKEDKTFIGIDVSKEKLDVGVRPQVDFMTFANTEDGISLMTDFVKSKQPELIVLEATGGLEMAALRSLVVAKLPAVCVNPRQVRDFAKAMGVLAKTDKIDAHVIARFADSVRPEIRPLKTEETEMLDAFNTRRSQIIIMLTAEKNRLTTASKWTKKDIERSIKGLEKALAKINREVENLIKKSPHWRHMDKILQSVPGVGPVMSLTILADLPEIGTMNRRQIAALVGVAPLNRDSGKYKGRRAIWGGRARIRSVLYMCVISGICHNPKIKAFYNRLISSGKKHKVAITACMRKLMIILNTMIKNDTCWNESGC

SEQ ID NO: 495947 - protein, 313 aa, unidentified
MDNKLFIGVDVSKEWLDIAIQSKPDVLRIGNTADDVAVWAAFLPANAFVAFEPTGGYERVLRTGLHKAGMAFARVHPNEVAAFRQRRGGKAKTDRLDARLLAEFAAVELPRRGLAPLVEGDDVLRELVARRRQLVDVLQAERCRAGLATAAIVKASLDAMVEAIARALDGIEKAIASHVAASPELARTAEVLQSLKGVGPVTVHTLLGDLPELGRLSGKEIAALVGLAPQTRESGKKAFRARTGHGRPNVRRVLFNAARCAIRWNPVMKAFYDRLVTANKRPGKVALTAVMRKMLVTLNAIARESQPWRHVKA

SEQ ID NO: 495948 - protein, 372 aa, unidentified
MPDVISLAPADVRMFVSLDVHKLSIVAATLPPTGGQPEIHRIETTEKAIRRFIAKLGGPAGLAVCYEAGPGGFALWRLVTSMGVACDVVAPSLIPVRAGDRVKTDRRDAKKLVTLYRGGLLRFVQPPTPETEGLRDLLRCRDDIRCARTAARHRVGKQLLRHGHVFREGKKAWTVKHQAWVHRQQLADPLAHEALVQMLIHLDGIDRQLAAIDAKLEHIAGQERWGWQVEKLRAFRGIATLTALGLIAEIGDFARFGHPRELASWLGITPSEYSSGEQQHRGHITRAGNHHARRLLVEAAWHYRHAPRRPASGPEPSDRAWQAQIRLFHRHRHLTAQGKRSTVVTVAVARELAAFLWAEMTAQPPREEQLAA

SEQ ID NO: 495949 - protein, 334 aa, unidentified
MNTIALIGIDLGKHSFHVHCQDHSGKALLRKKFTRTKLMEFLASCSPATVVMEACAGAHFMARRIADLGHEAKLISPQFVRPFVKSNKNDFIDAEAICEAASRPSMRFVQPRTEAQQAMRALHRVRESLVRDKVKTTNQMQAFLLEFGISMPKGIAVIKQLSTVLGEHELPPYLVQVLLRLQAHYHYLVKQITEIETALSQEIAQDDTGQRLMTIPGIGPITASVLSSQLGDGKQYAHSRDFAASTGLVPRQYSTGGKTTLLGISKRGNKTLRQLLVLCARTFILHIEHRKGKLADWVKQQLERKHSNIVACALANKLARIAWAITTQHTVFVA

SEQ ID NO: 495950 - protein, 341 aa, unidentified
MSAIGIDTHKDTLAACVVNGLGTPSAECTFDNDPAGHRALLDWAQASDPDAIIGVEGSASFGAPAARFLIAAGCSVREVPPQLSRRERIRTRRAGKSDPGDAFAIARVTLREPDLPPVRLADGSLDIQLLVGAREDVVTEMTRVRNRLHADLRVLVPGYGASATNLTTVRHQRTVARLLGRLVGVQAELARGRLKRLRALASEEHALARQIGARVVGHPLLTLPGAGPIVTATLVGEVGDIGRFRSADAFAALAGVAPIPASSGQTQRMRLNRGGNRQLNRALYTIALSQAFHHPPAKAYIARKRAEGKTWREALRALKRQLIRTVFRLLQAGAGSLELAA

SEQ ID NO: 495951 - protein, 419 aa, unidentified
MAFKILRKNCCGLDVHKTWIYACIGITDADGRTEYKQARFSSFSNGLRELADWLAKYSCADVCMESTGKYWIPVFNILEKTCWVTLAHPKYTKPQKGNKTDRKDAKWICDLYMCGMVKPSFIPPADIRQLRDLMRYRTKLTNMLTSEKNRAQNCLTVSNLKLDDVFSDVFGKSSRSIIQYILEHPGEQFDVAPFLDRRCKHSVEEVQAAVDGAVSREQAAKLRECLQHIDQLNEHRKNIEAEILRLAEPYPYQLELLRTVPGFSSAPLTAVALVSETGVDMSVFPSSKHLVSWAGCCPRNDQSSKTVKSTRISRAGYYLKPLLVQIANAVIKSDKYPECRERYRRIKARRGHKKAIIAVCRMLLTAIWNVLSKLVPYSAEGYLSDKLTEHSVVISKAQGLELLRKRGYIFKDDLPADSA

SEQ ID NO: 495952 - protein, 325 aa, unidentified
MKNIIVGIDISQKTLDLCIKEKEEFNHFTIDNNKKAIGAFFKHLPENNVVVAMENTGRYNWELLNVLESFNFQIYLLSPLHLKRSIGLSRGKNDIVDAFRICCFIEKNMEECKQWIPCKKSIKKIKILLTERASRSKLKRQLKAQKHDYRLMKDIGLDKKLINLNEKLIKNVEAQIKAIEKEIELIIVSDSELNQQKSFITSVPGVGKVLAWMLISKTEGFTSITDPRKMACYSGVVPFDYQSGTSIKRKPRVSNLADKTIKTTLHMAALSAVRRENDLGAYYLRKTAEGKNKMSVINAVRNKIIHRVFAVIKNQTFYQKDLVIS

SEQ ID NO: 495953 - protein, 368 aa, unidentified
MSEVTTAFVGLDVHKESVAIAVAEPGRAAPRFLGTTGPAVAEIEKALRHVGAPPELQIVYEAGPCGYGLARQLCARGYRCEVIAPSLIPRKPGDRIKTDRRDALALAHFARGGDLTPVMIPQEPDEAIRDLSRAREDAVRARLKARQQLKGMLLRHGRRYTGRTSWTAAHERFLSEVSWAHAAQHIAFVEYRTAVSEAQERVERLTAALREQVAEWRLQPVVGALMTLRGIELVAAVTLVAELGDLRRFAHPKQLMAFLGLVPSECSTGETRFLGSITKAGNSHARRALVEAAWAYRFPARIPRPLQIRSEAQPRVLREIAWRAQLRLCQRYRRLRARGLHHNKICIAIARELAGFMWDLARQVSVQA

SEQ ID NO: 495954 - protein, 366 aa, unidentified
MKKISTVQIFESEIFKEQRLTIGMDLGDRSSCYCVLDEAGRIILEQKVAMTPEAMKQAFAKIPRSLIALETGTHSPWVSRLFTELGYTVIVAHAQKVQLITKSNRKDDRHDARTLARLARIDPELLGPVRHRSAKAQIHLTVIRARAELVRARTSLVNAARGLVKSYGQRLPKCGTQQVSRELGVGLNAELREVLEPLLKEVESLNERIQEYEVRMEKIAKESYPQVELLKQVKGVGTQIALTYVLTLEDPHRFPKSREVGCFLGLCPGRRDSGESQPQMRISKEGDRYLRTMLVQGAHYILGPFGEDSDLRRWGLKLAARGGKNAKKRAVVAVARKLAVLLHRLWVSGEVYEPLRNSQKAMRAAA

SEQ ID NO: 495955 - protein, 354 aa, unidentified
MQHDAPNREIIIGIDTHKDTHAAVALNALGVRLGDTIVPVNRVGYRCIDAWARSFGTVTAFGIEGTGSYGAGLARALREAGHHVLEVNRPDRSTRRRNGKTDMLDAEAAARAVLSGQASAEPKTGTSTVEMIRHIKIARDAAVKAKTQAMQTLKSIIVLAPAELREQLESIRGPITLVRHLASMRPSPLTSPLSSAKTALRATARRWLALHQEIEGHDRDLDALVAATAPHLTTATGIANMTTAELLLLVGDNPERIRSEGAFAKLCGACPIPASSGRTNRHRLNRGGNRQANAALHRIVVTRMRLHQPTIDYVRRRTSEGRTKPEIMRCLKRYVAREVFGSLCRSRPPSPAGP

SEQ ID NO: 495956 - protein, 416 aa, unidentified
MNAVGIDVSSRKSTVAVLRPLGEVVCLPFDVTHDIAGLASLAEKLKALDGETRVVMEHTGRYYEAVEKALHEAGLFVCAVNPLLIKEYGANSLRRVKTDKADAVKIARYALDNWADLRDFTPMDAIRYDLKTLNRQFQLASKQRTASANNLIALLEQSFPGIRKCFDSPVRSDGTQKWVDFAHSFWHVDCVRKQPFPAFCERYRKWCKRHAYLFKLSNAEEVYALAKRAVVLTPKSKVVKVLVQEAANQLISISRSVEVYRAEMDRLAAMLPEYPVVMAMYGVGKSYGPQLMAEIGDVRRFERKQALVAFAGIDPMPNQSGDKNVRSNKSSKRGSPYLRKTLFNVIRTYLQCAPQDEPVFQFLNRKRAEGKPFYVYMLAAANKFLRRYYAKLRDFFASLDTLQPVAPIPTILKATL

SEQ ID NO: 495957 - protein, 317 aa, unidentified
MTTPSEAYVGIDVGKAWLDVALWGSDEVWRVSNDEAGVAKIMERVTVLDVRLIAVEATGGYEQLAVQAMLLNSLPVAVVNPTRVRALSKATGKLAKTDVIDARLIAEYAFKIQPEAMAPKEANEIRLNALVTRREQLVEMRTAEQNRLGTVHNSLQVDIREHIEWMSARIQELEVQIKELVDNLPEWRAQAERLDSIPGVGLITAVTVMAEMPELGQLDRQKIAALAGLAPFNRDSGQKRGKRRIFGGRKGIRRVLYMACLSATKCNPVIRSLFQRLMKKGKLFKVAITACMRKMLTIMNAMTRDQVNWRVPEPIPS

SEQ ID NO: 495958 - protein, 332 aa, unidentified
MKTQNENNVNVPAHAHYIGVDVAKATLDAHRFPQNTSKQFTNTPEGWKQFLQWIKDEPPTLVLCEATGGYEKNFVITLADADVPFRVVNPARVRDFAKSHGILAKTDTLDAKVLAKFAAERRLEPQKLQDETQRQLKELAGWRRQLVKAKTRHRNQLEHASNKMVIKGTKLLIKQIEQQIAKVEAELNQLIDNDPQLSTLNDILLSIPGIGQEVARTLIVELPDLGSGDPAKLCSLAGVVPFNCDSGLFRGKRRIYGGRAALRTVLYMAALSAVKCVKADNVFRQLYLRITATKPHKVGIVAVMHKMIIIAHSMVKNNEKWQNKMFKKITEN

SEQ ID NO: 495959 - protein, 344 aa, unidentified
MEHFAGLDVSVKETSVCIVDETGKVIREVKVASEPEALLAVLASPAYHFKRIGLEAGPLSQWLYSVLAEAGLPVICVETRHMRAVLKAQINKTDRNDARGMAHMMRVWLYRPVHVKTLRSQKLRMLLTHRKLLQSKAIAIDNDLRGTLRNFGLKVGMVGATKFEARIKELIQDLPDLAVLVEPLLVVRRVLREQLAILHRRLLAVVRDDAVCRRLMTVPGVGPVVALTYRATVDVPARFRKSKSVGAVFGLTCAKYQSGEIDRSGAISRCGDEMMRVMLYEAAQSMLRSTKWSWLKAWAMQIAKRRGMKKAIVALARRLAVIMHRIWVDGTEFRWSRAQATAEA

SEQ ID NO: 495960 - protein, 342 aa, unidentified
MDVMIGIDPHKGSHTAVVVNQDEVVIDETRVSATAGQLGELQEWASGYKDRCWAVESARGMGYLISQQLVGAGERVIDVPAMMASRVRLLGSGRSQKNDPNDARSVAIAALRHPSLAVVSVDDHTRVLGLLAKRHRDVARLKNKAACRLHALLVELTPGGLSTEMTVTKANALLGGVAVTDEVTRQRVVIATELVDDIERFEAQMRASKKRIRAAVAASGTSLTNIRGVGPIGAAIILGSVGDVARFPTPGHFASYNATAPIEASSGDKTRHRLNPRGNRKLNHALHIAAVTQLRYPNEGRDYYDKKRAEGKTSKEAIRALKRRISDVVYRHLIADAHHRIS

SEQ ID NO: 495961 - protein, 483 aa, unidentified
MKPQPEEKPKKATCRPTQGNWQQMNRKQRREMTRKIQSEELSLEVVHPNAAGIDIGNESHYVAVPPTRDRQPVRRFGCTTSELKEMAVWLKQCAIRTIAMQSTGVYWIAVYDILEEAGFEVYLVNARETKNLPGRKSDVQESQWLMKLHTYGLLRNSFRPSQEVRTMRTYWRQRNDLVRTAGRHIQRIQKAMTQMNIQLANVLSGVSGMTGQAIIKAILAGERDPHALAAFRDWRVKASEEEIARSLEGNWQEDLLFVLQQEQDGYEFCQKQMAECDQRLQQYLQQQADRSQGASLPEEKRKERLRKKKKGNAPQFDLRTELFRMTGADLTQIDGIDVTTAMTILSEAGCDMTKWKTENHFVSWLRLCPDNRISGDKIIGKGRLPTKSRASIALRMAASTLRVSNTYLGAQFRRLRAKLGAPIAIKAMAAKLARLVYRMLRYGMQFVDQGAEFYDAQHRKLQINYLKRKAANLGFQIIEASAA

SEQ ID NO: 495962 - protein, 373 aa, unidentified
MSHIIYCGVDFHARQQTVCCLKTETGELATQELKHDNKDELRKFYSQFGGQVIVGLEASGYTPWFEQLLEELGHEVWLGDAAEIRRRARRRQKNDRRDAELIVDLLLHNEFPRIHRPTPESREILRMLRYRHKLVKLRTIIKNSLQSLSIQSGLSLQARLFTGRGTEQLLAAPMSPMMSRQRKQWLELLNELNQRITETEWWLKQQAQKDPRISLLRTHPGLGLLSSLGVVHTLVPVSRFRNQKKVAAYGGFDPMERSSAEKKRYLGISKAGSRLLRFLLVEATQTAVRTDPELKRFYRRLEHRRGKPKAKVAVARKLLVRSFIMLRDQIDYAEFQRRAVAARLARDYARTNLPGHLIGQPASPASGPEERAD

SEQ ID NO: 495963 - protein, 342 aa, unidentified
MKETMIGVDLAKNVFQLHGTSMTGDVKYRKKLSRGQFSRFMSEQRPALVVMEACGSAHYWARELVKLGHAVKLIAPQYVRPFVKRQKNDAADAEAIVIAARQREMRFVEPKTADQQARAVLFRARERIVHQRTELVNALRAVLYEYGQVIPQGIGHIKRIEATIENAEIGLPELVQEECRDLLAQISEKTARIEEKTKKLADLSSQSETARRLQTMPGVGPLISLAVEAFAPAMESFRCGRDFAAWLGLVPRQFSSGGKERLGRVSKAGQADIRRLLLIGAMARVSWTSRKPPAPESWLSRMLAKKPRMLVAIALANKMARNIWAMLTKQKDYRDPALAVAA

SEQ ID NO: 495964 - protein, 379 aa, unidentified
MMPTSGAKPVKLLGAMKTKPTTNPVRLNLDKLVKRVLAEKSAQVKLGIDQHARDVVVSMQQDASMPQRAQKMHPDDLLGLVRGLVSGGVRVFACYEAGPCGYWLYRALRAAGAEAYVIAPQALGGARKQKTDQLDALALCDALDRYLRGNRKAFTVVTVPSEEAERKRVRSRVRNQLKQERTRLAAQGRSLMLSQGYHIEGSWWLKSHWENLKDTLPGWLIECLEELRGLLLKADEQEKSLRKELEADAQGAPRPKAIGPLTWVMLTRELCDWSRFKNRRQVAGYTGLCPGVDQSGTHHRDGSINRCGNPRVRALLIEAIWRLSIWQPDYAPVRKLAAGIAKGAARRKLAVAAARRLAIDLWRLATGKTTLEKLKLLPA

SEQ ID NO: 495965 - protein, 408 aa, unidentified
MNPLFVGIDVSSKNNVVCLMKPDGTKFSTFSVQNNLGGAKILSEKIVSALDKLQLSEVKIGLEATSIYGDSLVYALREDGRLGHYQRHIHVLNPKQVRKFKDAYPDLPKNDYVDAFVIADNLRFGRIASEVYMDDYRYRSLQTLTRARFDAVQNLTREKQRFANYLFLKCSGIAQDKDIPNTSATTLALMETFESVDELANCDLETLTAFVSTAGRGRFADPEATAKAVQAAARGSYRLPKTVNDSINQAMSVSISSMRALESQIKVLEKAIEQQFEIIPNTLTSIPGIGPVYSAGIIAEIGDIRRFESQASVAKYAGLVWTQHQSGDFEAQNTRMIKSGNRYLRYYLLEAANSVRRCDSEFRRYYDLKFHEVNKFQHKRALALTARKLVRVVFRLLKDNRLYIMPES

SEQ ID NO: 495966 - protein, 343 aa, unidentified
MSIVGGLDIHRKQITFDYADTETGEARRGQICPADREHLAKWLARFAGQDAHFALEGCTGWRYVAGEITAAGLTPHLADPAEAAHLRGPKRRAKTDRADARHQRVLLEQGRLPECWIPPSHVLECRALLETYLDLRKQRTGWVQRIHATLFHHGAPHIAGQRLGTAEGAAALRAAAAQCSPAGQLQLAIAAQMLSVYDERLHQVRRQLLDQARHIRGAAELTARLYGVGPITGLALTCWLGGAGRFSSSRKAVRFAGLDVTVRSSDGKGPPGRLSRQGPPVLRWCVYEAGKAHAHASAPGHAYYAQVKERIDGKRAAISQARKIIRQACHILTELGDDALTAC

SEQ ID NO: 495967 - protein, 326 aa, unidentified
MVIIGIDVSKAKLDCLWIRDLPGMKLKSKVQANTPAGHKALLAWTVKQTGEDVTRLHFVMEATGIYHEALAYALHSAGAQVSVVNPARVRDFAKSMGAQTKTDKKDSVVIARFGMTQSPRLWEPEPNEIRQLKALIARCDAVKQDIQRESNRMEKATVTDVSAEVRTSIETVLAQLKAEKKRLESLIDDHIDKHPGLKNDRALLESIPAVGPVIAQQMIAVIRSRSFNQATQCSAFLGLIPIEKQSGTSVYSPPRLSKCGDGRVRAKLYMAAIVATKYNPDIRCQYERLLKNGKSKKSAIGAAMRKLVQICFGVLKHQTPYQPQLV

SEQ ID NO: 495968 - protein, 425 aa, unidentified
MNTQSYGAFVGVDWADAEHAICLLDNDAPMERATVAQNAAALDEWVAGLRQRYDGRLVAVCLEQSRGALIYALMKYDGLVLFPINPKQLAKYREALYPSGAKDDPTDAELLARFVREHHPRLRAWKPDDALTRSLRLLTEARRDWVDERTAAGNRLQQHLKEVYPLALELMGKQAYGERFLTLLAKFPTQRELQRASPRKLVEYLTKLRCALGDPPADPRQDPRVIALRQAKPLVSDEAVLRNGHLAIKHLVGQLRQLNKTIKEYEQEIAELVEQHPDAKLFASFEGAGEALVPRLIAAFGTDRERYASAVDLQQLSGTAPIQKRSGKSCVVLARFACPKFLRQTFHEFAKCSLFSSHWAQAYHAMLRHKGHSYHSAIRALAFKWIRILFRCWQTRELYNDARHLKQLQLKKSPLLAFLPPQPEA

SEQ ID NO: 495969 - protein, 422 aa, unidentified
MSYCPVAGIDVSKQFSDMCILSPDNKIFAQEKIYHDETSINRANALLQKAERLFFSKPVIVMESTSHYHLILFQFFSEHGYDVIVVNPLQSNSMKDFSIRKRKTDRVDAFKLAMMYRTKTLRPSQIPQTATRALRQLCRHRAELLNDVSSYKNRLTALLDQTFPGYDKVFSDVGGVTSCAVLVRFPTPTILLVEEESELVEVIASASKSGYSFAKKKAGLLISAAQKAQTLGIHSCADETLIVCTIQMLRTLSESVLQIETAIDNLLAQIKEMRNNVSLLQSIPGVGSHSAALLLGEIGDISLFKKPKQLAAYFGLDPTERQSGSFRGTKNKLSKRGSPYARAALHMGVVNSICKRGKDSAANPVLLSYYEKKCKNKPAKVAQAASMHKLVFIVFAVLRDQKPFELKTPEQHAVEQGFVKAA

SEQ ID NO: 495970 - protein, 306 aa, unidentified
MLRPDGRHRTKKFANTTKGHDELVSWLKGHKIDHAHICIEATGTYMEPVAECLYDAGYIVSVINPALGKAFAQSEGLRNKTDTVDARMLAEFCRQKRPAAWEAPHPLERALRALVVRHQALTDMHTQELNRTETAREVQRPSIDAHLLWLEAELKRLEKQIKDLTDDDPDMKHRRKLLESIPGIGEKTSAVLLAYIGLKDRFAHARQFAAFAGLTPRRYESGSSVRGASRMSKAGHVSLRRALYMPAMVATSKTEWGRAFRDRLAANGKKGKVILGAMMRKLAQVAYGVLKSGVAFDASRHNPVAA

SEQ ID NO: 495971 - protein, 352 aa, unidentified
MSERYAPKRFIKPNQLSLMKKRYFMGIDVAKATFDFCLFSSNGSRLWKGHFSNNSTGIEEYLSQLQARPLKLKQIHFGLEATGVYGKALVGALHQAGLAVSVLNPAQVRFFALSVLRRTKNDSLDAEIIARFCLERKPPATRPLRSIEEQLKVLVHERDSRVAEQGRERNRAKQDPFQLELPKLVSRQRQKRLTQLKKEISQLNNAIFELIEADQSLGRQSQLLCSIPGIAQLTAAKLLAEFAGKEFASARQLAAYAGLSPAERRSGGTFYGQTHLSKIGNAFLRKALYMPAAVARRWCAALKPWVALLERRKLHDLAIRGAIMRKLLHIAFGVLKHQQPFNPALVFIPKTV

SEQ ID NO: 495972 - protein, 428 aa, unidentified
MNYNQNRKISQITEETLIIGVDIAKHKHVARAQDFRGIDLSKRLVFKSHLDGFQTLIKWGNELMKRHQKSKVIVGMEPTGHYWMTLAYYLKAHDIKVVTVNPMHVKKSKELDDNSPTKNDTKDAKVIAQLIKDGRYSEPTLPEDIYAELRQGIKLYDQLIQDRNAVKAKVHNWLDRYFPEFLTVFKDWEGNAALQVLRMSLLPQDIVVMKDEDILFEIKKVAKRAVGLKRIQRLKSAAKQSVGLTIGSRFAKEELRFLTEQYDDLSERIDRLAKELCEMVLTIPGAKEMSDIKGIGLMTVVGFFAEVGDLSQYDHPRQLLKLAGLNLRKNESGKHKGQTTITKRGRKRLRALLFRVAMPLAATNQAFKSLHEYYRHRTENPLTGKQALVALCSKLIRVLFIIGRRQCAFSEEKMIQDMPHLQNQLQAS

SEQ ID NO: 495973 - protein, 331 aa, unidentified
MKNRDYPFTQFVGVDVSKAKLDFAFDDGKASRQIKNTEKQIVDQLIANIADPQQTIVVMEATGGYENLLISLLARHHIAFAVVNPLRVKNFAKGISRDAKTDAIDAGVIARYGQVVQPSAQVVKSEESKKLRGLVERRRQLLDLIHQEGNRLQQTAQATQATDEELLGYLRQTLETLRKQLKTVDRRLAKCLDSNTENARRIAIMNEVKGLGPVTIGTVTIGTFVAELPELGQLNRGQIAKLVGVAPMNNDSGQRNGRRRIYGGRSYVRRVLYMATLVATRHNPRIKAFYQRLLAQGKLKKVALVAAMRKLITILNTLIKNDEPWSDEPRV

SEQ ID NO: 495974 - protein, 408 aa, unidentified
MRLFVGDDWAEDHHDVEVMDEAGRVLARKRLPEGAAGMAQLHGLVGGFLGEDADAAEVIVGIETDRGPWVAALAAAGYLVFAVNPLQAARFRERHGVSGAKSDTGDAHALADMVRTDSHQLRLAAGDSPEAEGIKVLARTHKTMIWERTREVQRLRHLLREYFPAALEAFGDLDAPDTLELLAKAPEPARAAKLTRAQVSAALKRAGRRNITERATAVLAALRGEQLGQPPALTAAYAAAARALIAVITALDEQVKVLEQQVRDHFGRHPDAEIILSQPGMGPVLGARVLAEFGDDPRRYADGKARRNYAATSPVTRASGKRKVVAARFVHNDRLVDALNAQAFSALTASPGARAFYDEQRAKGHGHNDALRRLANRLVGILHGCLKTRTLYDEDTAWGHRQQTQQAA

SEQ ID NO: 495975 - protein, 468 aa, unidentified
MGQKRSRSRQPSGKPAKHTSLLERINLDAAGIDCGSEAHYVAVPPERDPDSVRTFKAFTSDLHRLADWLEACKIKTVALESTGVYWIPIFEILEERGFEVVLVNSRHIKNVPGRKTDVLDCQWIQQLHSVGLLRGSFRPAAEITSLRAYLRHRDKLVQSAASHVQRMQKALVQMNLQLHNVISDITGLTGMRILRDIVAGVTDPMALAAHRDPRCRASKDEIVASLTGNFRAEHLFILRQHLELFDTFQRQIQMCDGEIESLLHKLAAKQSEPKTPVPSPRSKPRFYDNEPRFEIRDPLYRLAGADLTQIDAIGPYTALKIITEIGTDMSRWPTYKHFTSWLTLAPKNKITGGRLISSKTQPSANRVATVLRMCAMVVGRTSTAIGAYYRRLAYRIGKPKAITATARKLAVLVYCTLKGDMNYKDPGAQAYDEQHRARTLQNLRNRARQLGFGLVSVDTGELLQGPVS

SEQ ID NO: 495976 - protein, 426 aa, unidentified
MNQIHPPAEPSFAAVLGFDWGDKKHAWSLQPAGSDRRERGEIEHTPEAVESWVSMLSARFHGQPIAVALEQSRGALVFMLAKYAHLHLYPIHPRAAAQFRAALYPSGAKDDPVDGDLLLELVLLHRAHLRPLQPDTEQTRLVQHLVEARRKLVNEKTRQVQRLTDKLKLYFPQVLTWFEKVDSPLVGALLLRWPTLEELQKARPATLRSFLTQHNCRSQELIDERLKKIPQAIPAIRDAAVVQSAVGMTQILVELIAALRQGIDQLEKQIGQAAKAHPDFPIFESFPGAGPALAPRLLAAFGSLRDRYTAADDVQKYSGIAPVMERSGNSEWVHFRRACPKFLRQTFHEWAGHSIAFCEWARVYYDQQKRAGKDHHAAVRSLAFKWIRIAFRCWQDRVPYDEARYLESLRRHGSPLAAALAAKTQA

SEQ ID NO: 495977 - protein, 402 aa, unidentified
MNAVGIDVSKGKSMVAIMRPFGEIVSTPFEIKHTASDIRSLVELINSVEGESRIVMEHTGRYYEVLAHQLLEANLFVSAINPKLIKDFDNDSLRKVKSDKADAVKIARYALDKWQNLKQYNVMDELRNQLKTMNRQFGFYMKHKTAMKNNLIGILDQTYPGVNTYFDSPARSDGSQKWVDFASTYWHVDCVRKMSLNAFIDHYQNWCKRKKYNFSQSKAEEIYGKAKELVPVLPKDAITKLIIKQAVDQLNSASTTVESLRTLMNETASKLPEYPVVMAMKGVGTSLGPQLMAEIGDVSRFTHKSAITAFAGVDPGVNESGTYEQKSVPTSKRGSADLRKTLFQVMDVLIKTHPQDDPVYQFLDKKRAQGKPYYVYMTAGANKFLRIYYGRVKEYLSSLPES

SEQ ID NO: 495978 - protein, 285 aa, unidentified
MLTAEADKCKTKVVVNTAAGVQALLAWCAKHGAQPAQLHAILEPTGLYHEQAATALPQVRVSLVNPAQARDFAKALALRSKKNDALDSYVLARYGQTLSPALWHPAPLHARQLRALLTRREALSKDLLRELNRKEKSQFSPSAPLVDGSIDKAIAFLREQIKQIERAIDQHIDNHPDLKQDCELLNSIPAIGPQAGNAILAVMHNRHIDSAQSLAAYLGVVPVQRQSGSSLNSCARLSKAGPSQVRATLYMAALVGDPPQPHIRALYQRLLKAGKKSKRPRWARP

SEQ ID NO: 495979 - protein, 414 aa, unidentified
MTGQRQWYVGVDWASDSHHVLLTDADGRKIAERVFKHGGEGLAEMAAWLLATSGAAEASQIQVAIEVPHGPVVETLMERAFKVHVINPKQMDRFRNRYTLAGAKDDSRDAQVMASALRTDPRCFRLLAVTDPVVIELREWSRIAEDLSVERNRLSNRIREQLWRYFPAMLELENDLGAEWLLDLWETVPTPGKAAHSRETTIAKVLKRNRIRRFDAAHVLEVLRQPPVHVAAGTIEAASAHLATLIARIRLINRQLKDAHQRLDTLIARIPSQETEPGQQKQRDVEILASLPGVGRIVLATLLAEAFDALQRRDYAALRSLTGVAPVTKRSGKSCIVVRRQACHDRLANAMYHWARTAVQHDPKSSAKYAALRSRGHSHGRALRSVGDRLLNVACAMLKTSTPFNASLAAQKTS

SEQ ID NO: 495980 - protein, 315 aa, unidentified
MSRDDGIWVGIDVSKDSLDVGALPSGQVWSVPNDEAGVVQLLAEFSPAQPSLIVMEATGGYEMLAALGLSAAGIPVAVVNPRQARDFAKAMGRLAKTDKVDAAILALFAERIRPEPRPLADAEQAMLKALVNRRTQVVQMLVAEKNRLPSTIPAVKDHIKEHIDWLRQEQDQLDAELASYLQKTQVWTDNDRLLQSVPGVGIVTSLTLLAELPELGSLNRKQIASLVGVAPLNRDSGKMHARRSTWGGRSSVRATLYMATLVATQHNHQIKIFYERLCAAGKAKKVAIVACMRKLLVILNAMIRNQTPWHAAKTA

SEQ ID NO: 495981 - protein, 314 aa, unidentified
MPDVFVGIDVAKDFLDVAVRPSGEYWRCANREANIVELGARLCTLAPALVVMEATGGFEVPPAAALASVGLPVAVINPRQVRDFARSTGTLAKTDRLDAQMLARFAEAVRPEVRPLPNEMHRLLASLAARRRQLVEMLTAERNRRQAAPPVLRAELDEHIAWLAARLERLDGELNQLVQESPLWRAKDKLLRSVKGVGPVLSTTLLTDLPELGALDQKKIAALVGVAPRARDSGRLRGKRTCWGGRASVRGALYMGALVAARFNPVLRSLYQRLVQAGKPKKVALTACMHKLLVILNAIMRRQVGWDPELGLSS

SEQ ID NO: 495982 - protein, 438 aa, unidentified
MATKLVNLNAAGIDISSREHVVAVPEDRSKESVRTFPGFTRDLHHLAKWLKDCRIETIAMESTGIYWYDLYTILLDYGFEVYLVNAYHVKNVPGRKSDVSDARWLQELHTFGLLRGSFQPDNMTRSLRNYVRQRKNIIRQMTRETQRMQKALEQMNIKLNNVIRDLNGKTATKIIIKIIERERDPKILAQYRDWRIKASEETLIKSLEGNWREEQIFNLRLAYTHYLFLQDQLHQCDIESEKVIKKMSSPSFTNKAAKTQKSKNNPNFNVSQYLYQALGVEVTKIYGIKEITALTIFSETGIDLKEKFPTDKQFLSWLNVVPNNKITGGKVISSRVKRKKNNAGQAFRDAASALWRAQNPIGDYLRRKKAKSGGKQAVVATARKIAAIYYKMVTDKVEFDPKQITKNSKEYLIEKLKQLKKIKEKTENLLLEYQTVEI

SEQ ID NO: 495983 - protein, 414 aa, unidentified
MDVLYPRCAGLDVHKDTVVAAVRIAANGAATIEVRTFDTTTPGLLALSGWLAECGCTHVAMEATGVYWKPVWHILSDGDVTLILANAAHVKNVPGRKTDVADAAWLADLLAHGLVRASFVPEAPTQALRVLLRTRKQLVREQASHAQRIQKTLEDANLKLGSVLTQVMGKSGRAILGALIAGERDPDALLRLVQRGVKASPERLRAALTGRVTEHHRFLLRLHLRQIDALEAAIAEIDQEVDRDLDPFRQAVRLLRTIPGLSDLTAQVLVSEIGTDMSRFPTAGHLVSWAGLCPRNDESAGKRRSTRLRKGAPWLKTTLVQCAWAGTRKKGSYLQAQFQRLRHRRGPKKAVCAVAASILTAAYHMLRDGTFYQDLGPDHLRRATPEAQASRLARQITKLGFTCTIAPAEKLVSV

SEQ ID NO: 495984 - protein, 370 aa, unidentified
MKSIIYVGMDVHSTNYTLASFMFGNEQPFAVTQVDPDYKHILNYLKQVQKNYGGPCEFLCGYEAGCLGFTLYEQLKAHNVPCVILAPSKMPKVKNEIKTDKRDAMKIAKCLAYNDYSAVYVPTKEDHQVKEYIRMRDAHKTALKKVKQQILAFCLRNGFQFTAGKNYWTDKHMKWLRGLQMDEMLREILDEYLATYQASLDKLERFDKRIEELAAGTRYADKVKMLSCFIGIRTHTALSLIVETGDFRRFAKADQYASFLGLVPGEHSSACDKNYLGITKAGNSHLRRLLIESAQCLARGRVGYKSKVLKAKQYGNPAQVIAYADKANERLRRRFYHLTLKLKKKRNIAVAAVARELSCFIWGMMTERIS

SEQ ID NO: 495985 - protein, 380 aa, unidentified
MQEHPRTDPTATRPDQATLFVALELSRASWLVAIQAPGSDKISRHKLAAGASADLLELVGRQRATAEHRTGGEVRVMACYEAGRDGFWLHRLLVADGVESLVIDPASVAVNRRARRVKTDRIDAETLLRAMMAHARGERRVCSVVRVPTPEAEDARRLTREREALLEERVRHVNRVKSLCALQGVYDFEPLRPRAAERLERLTTGDGRPFPERLKAEVRRHLGRLGQVVRQIAEVEALRDESASPLAEGVARLVTLRGVGRHTASVLQAEILGRRFANRREVAQYAGLAPSPWASGGAQREQGIGKAGNPRVRAAMIELAWLWLRHQPGSALSRWFRERVGQARGLVRRVAIVAVARRLLVALWRYATAGVMPEGAVARG

SEQ ID NO: 495986 - protein, 407 aa, unidentified
MDVVHPKCAGLDVHQQTVVACARVVSGASVHHEVRTFGTTTQDLLALSDWLTAHGCTHVAMESSGVYWKPVWHVLGGHFELVLANAMHIRNIPGRKSDVSDATWIADLLAHGLIRGSFVPPEPIQELRDLTRTRKQLVREIAQHTLRVQKTLEHANIKLTACLADILGVSGRAILQALVEGERDPKRLADLASERVKASRAELVAALHGRVTPHHRFMLKLHLTQIEALEAAVREVEARLGDVLAPFRAAVDRLITMPGVSETVARVIVAEIGFDMTHFPTAGHLVSWAGLCPRLHESAGKRLSNRTRSSNPWLKTTLVQAAWSAARKKDTYLRAQFLRIKSRRGPKKAVLAVAASMLTAAYHMLKHDVDYRDLGADHFDRRDKAKLAKRLIARLHDLGLTVEVRAA

SEQ ID NO: 495987 - protein, 330 aa, unidentified
MKITHIVGMDVSKRTLDYHHHNGLEKSQTTTNDNKGYKALLRWLKSSVSKNAKDIMVVMEHTGYYTYQLEQFLFKSQISYCKKPALDIKRSCGMVRGKSDKADAKMISKYGWMRKEELTPSTPVNDSQLELQQLMAHRDKLVADRASYQSRLKELKAQLADKLATLIIKSSQNVLDILSAEIKQTEAAIEALIKKDEALNNNYALAKTVRGIGFATAVHFLIATENFTRFDNHRKFACYCGVAPFENSSGTSVRGKTKTSSLANRKLKSLLTMAAICAIQHDPELKEKYHQKLKEGKAKMCALNIIRAKLIERIFAVIKRQSPYILKTAA

SEQ ID NO: 495988 - protein, 420 aa, unidentified
MSNPLTTLYVGIDVSKDSNVVCCLSFEGNKLFTGSFKNNNDESQNLQSKIIEIQKNNSFDSIQIVLESTGVYSFHIGLFLSSSEMLNAANTTVFVVNPKMTKNYSKSYIDMTKSDPSDSFMLADFARCGRTKMLKPFRGKQRLALQRLTRYRKHLVDLLCQEKMYVLNNIFIKFSEFNNKSHDFKTFSDTFSTSAIEILTNYFSPEMIANTPVDKLADSLRKYSKNKFSDPEAIASKLQSAARASYRLDKIMYEPINACIASSFCLIRAYEKQIKDVEEQIGTLIKGLDNQNEYNSLISIPGIGPVYASGILSEIGSISDFNSDDALANFAGLTWKKTQSGSFDASDTPMQKNGNSYLRYYLIEATQNIISNIPSYKEYFDKKKSEVTTHAYPRAHVLTARKVLRLIYSLVSQNKLYQPK

SEQ ID NO: 495989 - protein, 348 aa, unidentified
MRFYTGQHRYYCGIDLHARTMYVCIQEHASGEVVLHRNLRCDPELFLKTIAPYRDDLVVATECIFCWYWLADLCAREGITFVLGHALYMKAIHGGKAKNDKIDSRKITVLLRAGALPQAYVYPPGMRATRDLLRRRLFFVRKRGELFAHIRITFHQYNLPIPGGQLLYQCNRAKVPDAFCDPIVRASVEADLALAGHYDGLIRSIERTILEQAKVDDLSTLILLQTIPGVGPILSLTLLYEIHDITRFPRVQDFVSYARLVKSQKSSAGKVLGTSGAKIGNAHLKWAFSEAAVLFLRKNPRGQKYLDRLRSKHGKGKALSILAARIGRASYFMLRRNTAFDPDRFMST

SEQ ID NO: 495990 - protein, 312 aa, unidentified
MIIGIDVSKDRLDVFVHPGGERMEIENHAAGHEVLREKLQEIRPGLIVMEATGGLEVPVAAVLAEAGLPVVVANPRQVRDFAKAKGRLAKTDCIDAEVLALFGEAVKPEIRALPDPALRELQRIMARRRQLIEMLTAEKNRRARAEGAVLDDIEAHVAWLQQRLKDLDKGLGATIKSSPVWREKENLLRSVPGIGPMVASSLLAELPELGKLNRRQIATLVGVAPLNHDSGKFRGRRAIWGGRKHVRTALYMAALVAARRNPVIRSFYERLRASGKVAKVALTACMRKLLTILNMMLRNRTPWQPLEMKAAR

SEQ ID NO: 495991 - protein, 460 aa, unidentified
MAQHDERMAERDAGMEGFPVLRATVAGIDVGSEQHWVCAPAQTGAGREVAVFAATTPGVTHLVSWVKDRGVTSIALESTGVYWIVPHEMLERAGLDVVLVDTRELGRVPGRPKSDRRDCEWMQRLHSCGLLRGAFRPTEAVCLLRTLVRDKGTLVAERSDWIRRMQKSLDQMNVRVHRAVADLDGATGMAILRAIVAGERDPQHLAALRDRRCRKSEAEIAEQLTGHWREDHLFSLEQSLKMHDAICERVAAYEQEILRQLARMAPADGRGGDVPPPSSPTKARMIKTRGEDPLRQALYRMSGVDLTAIDALGVETVSVVLSEYGADLARFPTERQFVSHVGLAPHQPTSGGKPVKQRKKPGSTRARVGAALRMAALSLRRSQTALGAYYRRLARRVGADVAVFATARKLAQWIYRVLRWGQAYVDEGAAAYEKRYHEARIKRLATTAHQLGYALVSVAE

SEQ ID NO: 495992 - protein, 349 aa, unidentified
MTQFSRIGLDTSKALFTLHCVDAAGKPLLRVNLRRAQLLGFFKRHPPTVVAMEACGGSHHWARKLAALGHEVRLIPPQYVKPYLKRGKNDRNDAEAICEAAGRPGMRFVPVKSVDQQAEAMVLKLRATLVEQRTRLINAMRGHAAEFGVISGRGTGKAAALLAVIAADTAIPPVAQEMLGLLGEQIDHLDCRIKALEAKLEAMHKANAISQLLATVPGIGPIIGLSFAIDVDPAAFASGRHLAAWLGLTPQEHSTGGKQRMGGISRAGNERLRALLVSGAMAVIRAAERAGSKLATEWLLKLLARRPRKVAAVALANKMARMIWAMMTTGEAYRVPASAATAHFSAAIS

SEQ ID NO: 495993 - protein, 391 aa, unidentified
MVCVGIDVAKDKHDCCILDSDGTIRADCITIPNNMDGFKQLLQTIRDCTKKSDKIKVGLEATGHYSYNIIGFLLNKDLATFILNPLHTNLYRKSLSLRKTKTDKIDSKTIAMMLLSDVSLKSYSDISYHNEDLKSLTRYRFSKVEERAKLKTSLSRLAQILFPELEKLVPTLHMTSIYQLLEEFPSASAIASAHLTRLTKLLSKASKGHYNRETAIKIREAAKNSIGSNMPAKSLELKHTIKLIRALTIDIGEIEAEISKMMDKIASPITTIPGIGNNMGAMIISEIGDFSRFSSPDKILAYAGYSPSTYQSGKLDNCYAHMEKRGSHYLRYALFQATQRVCHLDSTFSAYLAKKRAEGKHYYVAISHAVKKLVRVIFHIEKTKQAFLKAS

SEQ ID NO: 495994 - protein, 359 aa, unidentified
MQKYNRNAKIDKLFSATKNEKVHIGMDVHKKSVNVAVWATGGIVAEWVTKADYKAIVSALAPYKDRIARVVYEAGPTGFSLARMLTDAGVSINVIAPGMTPQMSIRSCKTDVMDAKKLAEYSFKEMLHPVNMPTEPEEADRQVLRLREQIVRKTRQIKQQIKSFLLQYGIAEPQGLGSWSRLSVAALREIPLCRELRFCLDLMLDELSHQQKQLKSITDELKRLSEENRYKVMHRILRSHPGVGIICSMSFILEVYRSGGRFADKYDVGKYTGLGPLVRSSGQTRQDCGILRTGRNAIRSTLVESAWRWVSRDPQAGEVYGRLVSNTGSGKKAIIGMARRLAVRLYTMLENGEFCRKGA

SEQ ID NO: 495995 - protein, 433 aa, unidentified
MMAVMIGVDPHKASHTAVAIGAAEETLAELRVRASESQTERLRAWAQAWPERTWAVEGAGGVGHLLAQQLLAAGERVLDVPPKLAARVRLLQAGDTNKNDPNDAFSVAVAALRSPGVREAGRDDHAMVLKIWSKRYKDLGRTRTQVACRLHQVLCELIPGGVAKQITAGQAAHILESITPADAVAAARCELAAEFTQDLRGIDAAIRDTRKKLTTAVQAAGTSLTGLFGVGPVITAAVIGDVRIVSRFPNRDHFAACNGTAPIEVSSGGRKVYRLSRRGNRRLNHAIHMAAVTQIRYRHSPGRAYYDKKLAEGKTPKEALRCLKRQISDAIYACLQADARRAAGAKSPGGQRGNDSLTSAAGSHPQHRLFGKATPGPATHPTTPADAAGDPASAAFPAWPPSRASGRPGPGPGKARPRSGARRASLTQPPASR

SEQ ID NO: 495996 - protein, 424 aa, unidentified
MEVIYPRCAGLDVHKDTVVACCRLAADGQIRNEVRTFQTTTRALMALRRWLQESECTHVVMESTGVYWKPVWHALERDPEAEGGFDCVLANPAHVRNVPGRKSDVSDAQWLADLLAHGLIAPSFVPERLTQQMRDLTRTHTQITRELGRHVQRIQRTLEDADIKLTGLLTDLTGTSGMAMLRALVHGERNPEVLAALAVGRAKQKRAELVEALNGHFREHHAFMVELHLKQVEALQEALRTLEAKLGEALKPLHNKESLLCTIHGIGHTSAPVILAEVGHDMSRFLGVGNLISWAGFCPKMNQSGPTRKNTQVKKGAPWLKAMLVQCAWAAINVKDSYLRARYFRLRARRGSKKAILAVAADMLRAAYFIPDMLRAAYFILKRNVPYQDLGADFYDRLDHSKATTSLVKRLRNLGYEVSLSPSS

SEQ ID NO: 495997 - protein, 430 aa, unidentified
MISWLGLRALVTMEVWLGGMPAFHHTVQKGGKSLSTILVGVDVSKEFSTAQGVDEKGEKLFYLQFAMDAQGFSELHKAMMHHTETVTEITVAMESTGCYHINLFSFLSSAGIRCVVINPLLITNFTRLSLRKTKTDKKDAQTIAQFLFSNRESLTTIVFSQDMQDLKDLARERESLTVLIAGMKNDIKRLLQGTFPELEKLSRPCGETMLHFLRKFPSARLVRAAKRRDIEKALICPEEKRKRVMVSVDDLISTAQTSVASASAAKELILSEKASTLLYLQEKKERITAMLIETCESLRIEELDIIRSIDGVNDITGSTFLAELGDINKFHSYKHLIAFAGLDPSIHQSGQYEGRSTISKRGNRHLRRVIFLITLCAVRSKNVFREYFLRRKQEGLPPKKAILATAHKLIRVMFAMLSNKSLFRKGVVVE

SEQ ID NO: 495998 - protein, 438 aa, unidentified
MSRQKAFRAASARPTGRAGFAKKGLIEMEVLYERVAGLDVGKASVTVCVRTPGTRRGSRHSVTRTFKTTTGSLAVMRDWLLEAGVTIAAMESTSTYWKPPFYCLEEAMTVWLLNAAHMKAVPGRKTDVRDAEWIAQLLEHGLLTPSFVPPPPIRHLRMLTRYRVQLMGDRTREMVRLEMMLEDASIKLSTVASSLKTVSARAILAAMIDGETDARVLAEMAKGRMRSKIPDLAQALEGHFTPDHAQLARSILDRLDRVDESLAELDQAIEAACEPWAHQIDLLQTIPGVGPRVAQTIVAETGADMSQFPTAAHLASWAGLSPSMYESAGKRSPAGRRRGNKWLTAMLVEAAGSVGRMHGKNYLATQHARLTRRRGMSRAQIAVAHSILVAAYFMLKRDEPYRDLGPEWLAQRNDEAHTRRLVAQLEKLGHTVQLDTVA

SEQ ID NO: 495999 - protein, 309 aa, unidentified
MKYPIGIDISYQTLDYHIQPICGEVTKAVIENSINSITQFLGSYSAANYFLVIEPTGTYGDKLVELAHQHGFEIRLANPKRSSKFMEVLDLLHKTDENAAMALCLMGQSKEFQLPRYMPQSETMKQRRQVQMTVNALAKQQRMLQNQIHAMEQRFRSSDISLTALKTTLQTVEHQLEILQQELQQLSDDEIEEFNYYAQSVKGIGEKSASLLMLYTNGLKYFEKKGQLSRFVGIVPSSHKSGTSVNKKGHITKSGPSILRACLYNAAKSAKQYNHACKALYERLRKNGKSHKVAMIAVINKLLQREFWI

SEQ ID NO: 496000 - protein, 365 aa, unidentified
MTIAASESPATASEVILGIDTHLDVHVAVALDGLGRRLGELNVPTTVKGYKKLLHWAEDFGPVCCAGVEGTGSYGAGLARYLKTAGISVMEVERPKRRHLRRNGKSDPIDAEAAARAVLANDTAGEPKSGDGQAEMIRTLRSARQSAVKARTQAANQLQALLVTAPENLRHRLRKLSTKNLVDTCARLRPGAAPSDVQTATKFALRSVARRYQLLSEEIAQLGEQLDRLVADAAPELIAPVGIGTDHAATLLSVAGDNPQRLKSEASFASLCGVSPIEASSGKVVRHRLNRGGDRDANRCLHLICVVRMRHDKRTREYVARRAAEGKSKREIMRCLKRYIAREIYRLLAPLAAASAPSAPRSQAT

SEQ ID NO: 496001 - protein, 402 aa, unidentified
MNALKRCRKERNRPMKKNSKNETMKSKRETKKVAELEAGWTRLDEREANTLVIGIDLGDRTSAYCVRTLGQQIVKEATVATTATALLEAFQGVRRQRVVIETGTHSRWVAQLLELMGHEVIVANARKLKLISENNQKSDKVDARLLSKLGCMDVDWLHPVYQRSQAAHSDLLLARARQALVDARTALINHVRGSVKSFGSRVEKCASERFVEVARGALPEALKPALSGVLATLEELNEQIYGYDCQIEHLCNTKYREAAKCLLQVNGVGPVTTLTFVLTIENKDRFEQSRDVGPYLGLVPKKRQSGQRDPQLGISKEGDEMLRKLLVNCAHHILGAKGQDSDLRRWGLELVRAVERKGKKGARKLAAAAVARKLAVLLHRLWVTGAAYEPLRNRGAQQAPAA

SEQ ID NO: 496002 - protein, 389 aa, unidentified
MKIYVGIDIAKLNHFAAAISSDGEIIIEPFKFTNDADGFQLLVSKLESFDKNSLIIGLESTAHYGDNLVRYLVTELYQVCVLNPIKTCQMRKNNIRKTKTDKVDTYVIAKTLMMQDNLRFVSFFDLDMMDLKALGRFRQKTIKQRTRLKIQLTTYVDQIFPEIQYFFKSGLHQHAVYALLKEAPSPKEIASMHMTHLANLLKVNSHGHFTKEQSKELRVLAQKSVGANDSAISIQITQTIQQIELLDSQLDKIEAEMTEIMKYTDSVIMTIPGIGYINGGMILGEIGDIHRFSNPNKLLAFAGLDPSVYQSGNFQAKTTRMSKRGSRVLRYALVNAAWNVVRNNATFKAYYDAKRAEGRSHYNVLGHCAGKLVRVIWKMLTDNVEFNLE

SEQ ID NO: 496003 - protein, 416 aa, unidentified
MKIVRPICCGMDVHKNIIVATIGITNKKTRITEYIQETFSTLNPDLLNLKQWLINHKCFDACMESTGKYWIPIFNILEDEINIYLTHPKYVKAIKGKKTDKKDSKWICDLFKHDLIKFSFIPPKEIRALREISRYRYKLVGMRSSERNRYQNCMTVSNIGIGSVFSDPFGKSAQAIMKEVLESDIIEDEKILKCIHGSCKNKDKILDSIKHCNIETDQRFKMNESMTHMEELQVHINNCEIEIMKRAAPMFDRFMHITQLPGISTLSAILIISEIGVDMKQFESDKQLTCWAGLAPANNESANKKKSVRISKAGQYLKPLLVQCALGAIKDKEGYFGIKYSRIKKRRGHKKAIIAIARMMLVSIYHMILTGGIFNPSDYESFKNPKPPIKQQVLTEESAIEFLKKSGFDVSKLTKP

SEQ ID NO: 496004 - protein, 405 aa, unidentified
MFVGIDWASTEHAVCVLDQAGKTVRAFGIPHSAAGFDDLVARLRRLGAPAGLPVAIERPDGRLVDRLLEAGHPVVPVRSNAIKAWREGEVVSGAKSDTGDAKVIAEYLRLRHHQLRTLTPFSDATRALRAVVRARGELVRQRVAAINQLTATLDAFWPGAKAVFPDVEREIALAFLERYPTPESAAGLGEQRMAAFLTRHRYCGRTPAAELLARLRAAPAGVAGGAEATARRDAVLAFVGVLRALNQAIRDLDRSVIARLGEHPDSKVFASLPRSGQVNAAQMLACWGDCRDAYDGPEAIAALAGIVPVTRQSGKHAAVSFRWACNKRFRNAMTTFAHNSRLASPWAAKLYADAIARGHDHPHATRILARAWVRVIWRCWVDQVPYDPVKHRAAQRLAEEAAAAA

SEQ ID NO: 496005 - protein, 548 aa, unidentified
MSRNNRKRRGRGTKCRKKTDDSLRRRVREIGGDRFGVLVVDSSKKNAEVWLTDFYGEPLWDESRTFPITRGHLNELVNLVKGNCREYGLKDLVVGIEQTGRYHRPVKRELERIWDVKTIHPFVTKQLRQPASPGVKTDGADLEAMTRAIISGYGDNQQTLPLLYAEWQLVNRAREDDVDRRRRLKQQCQERLNAFMPGYAALFKDLWKVPAALAIAELYGSAKRLTATDEEAVRKKLRSKGLRMMRRTINRLLAWAADAPSPDPGGALNRRIWSNDVRLIEHIGRDILRYERELASYLVQTPFVLLLGIPGINVVSASGYGSEAGPITHYTKPSHLNGRAGLFPSRYQSDETDCADGPMVGGRNARLRDAVMEIVTNLILHNDYFQGWSALRKQRGWPAKKIHVAVANRFNRIAFHMVAGRMVFDHPCIKKRHSVLKKVAVFSLAHGIKPETTMGLVAKAAGQLPDDAVEGELISLEEGLANLPSSEGVPAATLKEAMRLLPLLAVRINHGRKYTGGDDNQIMKETPYCVTVEMLAKTSMIPRGKTHN

SEQ ID NO: 496006 - protein, 489 aa, unidentified
MAKRTSSPPDPAQQRKGFRRRKAKAHAKAQAQQAAEARRVQGLPVTNSHAAGVDIGSWSHWVCVGADDAAHIREFPAHTDGLHALVAFLHEHQVTTVAMESTGIYWVPLYELLEAQGFEVLLVDPSYTKQVRGRPKTDRRDCQWIYRLHSVGLLAAAFRPEEKTCQLRAYLRQRANLIRYAAQHIQHMQKALEQMNVKLTEIISDITGRTGQDIIKAILRGVRDPAKLAKYRQSKCRASEAEIAQALTGTYRDEHLFALRQAYQACEFYQKQRDQLDAQIAQQLARMKQERALPPLKARARSAGRKPNEPRFDVRDALYYVVGIDLTEIEGIGAMTALTVISEIGAEVSKFATVKHFCSWLGLCPQTKKSGGRVLSSRTRPGVNRAAVAFQMAASSLHGSKGALGAFLRHKKAQLGAPKAITATAHKLARLVYLALKHGMTYVRQTQEEYQAKMREQQLKSLKKKAKQLGVAVIETPTTEAAAQMAPAT

SEQ ID NO: 496007 - protein, 338 aa, unidentified
MENLNYFIGIDVSKEHLDFYVSKDMRKGSSAKVGNSKKEISAYIKTLIAKKEIVMESSVFCMENTGIYNNQLLSVLLDYKANIWVETPVHLKRSLGLVRGKNDKIDAERIALYAYKNRDNVKLWQPERAIIVRLKNMLRTRERLMESIESLECPLREASRFDDKETVKLMRRSCKASVNALRNDIKKIDITIKEIIDSDEQIKSLFRIVSSVENVGPIIATAVIIYSNEFKKINDPKKFACYSGVAPFEHSSGKSIRGKTRVSFMANKYMKRLLHLAAIGAISRPGELRDYFDRKMAEGKNKMLVINAIRNKIILRIFTCVNQNKLFEKNIKNNLVLA

SEQ ID NO: 496008 - protein, 320 aa, unidentified
MKAVVGIDVAKAKFDVTLMEGAGQKQHKEFRNKATGFKKLDKWVKQRTTGVVHVCMESTSVYWEEVAEYLHQAGYEVSVVNPARIKGYALSQMRRSKTDPIDAAVIADFCRTQVPKQWTPPSAEQRKLRALVRHLQALKKSRTQQRNRLATCRDPEVAASLETILKAIETEMAQIEKRIEAFFDDHPELKQKRQLLQSIQGIGRKTATHLLAEMYDLADYDNAKAAAADAGITASHFSSGATVRRRSKMSRMGKASVRGCLYFPSLTAIKHNPLVKLLAERLEAKGKPKKVIQVAAMRKLMHLAYGVLKNGQPFDPAYAA

SEQ ID NO: 496009 - protein, 356 aa, unidentified
MSEGSWVGLDVHARSVVAGVIDHGSGEVRSLRLPPGGEATVAWLQALPPPVRVVYEAGPTGYRLARACADAGISCVVAAPSRIRAAADRVKTDRRDAERLARLLRLGEITPIRIPSPEEEAARDLVRAREDARGDLMRARHRLSKLLLRHGLVYDATAWTRAHDAWLRRQRFQGGPLAIVFDECYSRMLDAKTRRDALDNAITELAATPSYVDVVERLVCLRGVSTLTALALTVELGDWHRFRPESLGPFLGLTPSENSSGERRRQGAITKAGNSHVRRLLIEAAWHQRPPSRRSVTLERRRAGKPLAVQAQAERSGRRLHGRWHALEARGKPRTIIVVAVARELAGHCWALATME

SEQ ID NO: 496010 - protein, 387 aa, unidentified
MPSVTSATAVATTALANDITLFASLELSKSKWVVTINSPGSEKFSKHVVEGGDGAGLLDLLSRSRAKAEQRYGVRVKAIVIQEAGLDGFWIHRLLLANGIESQVVDAASIAVDRRHRRAKTDSIDGETLLRALMAWARGERRVCSMIRAPSPEDEDRRRLTRERGTLLKERIQHTNRIRALLSGQGVRDYDPLRRDRFERLEALRTGDGRELPPMLKAEIRRELDRIALAATQLAAVERARDALIRTDAEERNNPAAQLLKLKGMGPEFASLLWLESLFRSFGNRRQVAAYAGLAPSPWQSGGVERDQGISKSGNRRLRHTMIELAWFWLRHQPASALSCWFQARVGAGKGRVRRIAIVALARKLLVALWRYVTQGVVPEGAAFKAA

SEQ ID NO: 496011 - protein, 334 aa, unidentified
MSYQFVIGIDISKHSFDIAILLADSPENIFHNAFSNDENGFKDLMIFANETIPGFDITKALFCMEATGLYCNALLQFFQAQQANVWVENAVQIKRSLGVKRSKTDKVDSISIAKYAFKNADLVRLWKPSGVVLEKIKQLATLRERMVVTQKRLITPISELRDAGQAKMADLLFKSIKKSINAIEADLKKIEVKIMECLKEDASLHHVFSLITSVVGIGFVTAVNLIIHTQGFNIMCDSRKLACYCGVAPFPYQSGISIKGKTKVSHMANKKLKTNLHLAALSAIKCDPEIKTYYERKVLEGKPKMSVINAVRFKLLARVVAVVNNDKEYVKKTA

SEQ ID NO: 496012 - protein, 433 aa, unidentified
MPEKIPPTSIPEFAALVGLDWGDEKHALSLCAGSGGPIERTELDQTPEALAEWANNLRRRFPDGKIAICLEQSRGGLISALLGYEHLVLFPINPKMMARFREALYPSRSKDDPIDANLLLELILKHRDHLRAWQPDTVQTRQLDLLNQQRRHFVDMRTGLTNQMLAHLKAIFPQAVSLVGENLANRLATDFLLKWPTLQAVKKVKPATLRKFYYGHNSRAEALITKRLEQVKSAVALTSDVALLAAHSLGIQTLAAQLAALRPCIEKHDAQIAELFAAHPDGAIFASLPGAGAVLAPRLLASLGTDRGRFEQPVSVSCYTGIAPVTEKSGTSQRWVHVRWSCPKFTRQSWHEFANSSRKFCGWAQACYEEWIKKMDHHEAIRKLAYKWQRVVWRMWQDCKQYDDAHYVRALQKRGVALAATLLVPTLETGEQK

SEQ ID NO: 496013 - protein, 320 aa, unidentified
MRNAVGLDISKLTFDATAIVGNAEYSAKFDNDSKGLDQFSDRLKSLGCQNLHICMEATGNYYEEVADYFAQYYSVYVVNPLKISKYAESRFKRTKTGKQDAKLIAQYCRSAQESELVKRQKPTDEQYRLSRMTAAYAQIKSECAAMKNRHHAAKDEEAAKAYAQIIKAMNEQLEVLKEKIKEQTEKPNCKEGVKRLETIPAIGRMTAAVLFHHLTSSKFETSNKFAAFAGLSPQQKESGTSVRGKGKLTKFGNRKLRAVLFMPAMVAYRIRAFPGFIKRLEEKKKPKKVIIAALMRKLTVIAYHVHKKGGDYDPSRYKSA

SEQ ID NO: 496014 - protein, 433 aa, unidentified
MQEAEDEPLFCERVAGIDIGKATVMVTIRVPSDARKGGRQQETREFGTTRRELLALADWLRCWQVEKAGMEATSDYWKPVYFLLEREGFDCILYQASRVKALPGRPKTDKLDSVWLAKITERGSLDGSFVPPEEIRRLRTHTRYRRKLVQMRTAQKERCEKLLEDAHLKLSSVISDIHGVSGQDMLRAIAAGERNPKVLAQMARGVMRGKIARLEEALDCSFFTGEHAFILQMMLDSIDSLTAQIQVLDEKIAQMCQPYERQIEQLDGIPGFGITTAQDLIGEIGTDMSAFPTAGHLASWARQAPRVTESAGKRKGKNATGRGNPYIGGTLGEASISTGRTQTFLGEQYRRMCKRMPKKKAQGAIMRKQLVIAHALLSDPEAEYLELGPGYHERRAGTRRRAQSHLRSLERLGYKVTLQAIDPVTGEFLPTAS

SEQ ID NO: 496015 - protein, 341 aa, unidentified
MGEVSTIGLDIAKSVFQVHGVDAAGAVVIRKRISRAKVLEYFGELPPCLVGIEACPSAHHWGRELQGLGHTVRLIPPSYVKAYLKRGKNDANDAAAICEAVTRPSMRFVPIKTKEQQTALMLHRARQLLVRQRTMLSNALRGHLAELGIVSAKGRNGTAELLRIIADGRVSPAACGILKVLARQYGAIGTEIAFIDKSIMALHRGCEASRRLAEIPGIGPIGATALVAEIGDWKTFSSGRSVAAWIGLVPKQNTTGGKDRLGSITKQGNRYLRWLLVVGAMAVIRYARKHGTQARPWLGRLMERRATKVAAVALANKMARMAWAIMVRGERYKEPKLLLAA

SEQ ID NO: 496016 - protein, 450 aa, unidentified
MEQMKRIAYVSGITVRTDGEEIFNGRIPGQYQSLKKLFERYQGCRMKVAYEAGPFGFWLSDKLAEDGMEVLVVPPLLIPTESGNRVKTDKRDSRKLAKLLESNMLKRVYVLTPEEREHRDLLRTRRQIVDHRNDVARQIKSKLLFYGIASPFSTTTRWSLKYIEWLKTLRFDTDYLRESFDLLIDLYEYLTRKIVRINKKVVLLCRDKKYSDRIKLLCTAPGIGRLTAIEILVELQDISRFESAEELASYIGLTPSEYSTGERTRQGRITRCGNKRVRTYLVESTWMLIMKDPAIRLKYLKLKSTRGGKRATIAIAGKLLIRIRRMLLDNVPYRITAMAAYERRKVPTYGKKMERIPNAFELTAAPPCDPVRITLRRMRQFELHRIRIMSALPMGSDHEKEAGGYLLAKGSRFGHGPWKVVGLVLASKAKKPTRMRVQEGKKNRKISFRA

SEQ ID NO: 496017 - protein, 450 aa, unidentified
MEILYANCAGLDVHKKTVKACLLTRTSNGQPHKEFRTYLTTTEELLQLGDWLKEQGCTHVAFEATGVYWKPVFNLLEGSFELLVVNAQHIKAVPGRKTDIKDAEWIADLLQHGLLKTSYIPSGPQRALRDLTRYRVRLTEEKAREVNRVQKTLEDTNLKLGDVVSDIMGKASRLILQAIADGETDPGRLAALAVGRVHAPQERLEAALRGHITAHHRFLLAEHLTQIRHLEQAIERVTAEITRRFTPPPPEEASPSPKEEEATQERLPASASPQESVSSAQATLSWSAAVVLLCSIPGIGERAAMGILAEIGINMQQFPTAAHLASWAGVCPGNHESAGKRLSGKTRKGNPWLRCLLVQAAHSAAHQKQCYLAEQYRRLAKRRGAKRAAIAVAHSILVMIYHLLRNQTTYQEKGETFLEEQERQGAEKRLVRQLARLGYHVELQPMAQAG

SEQ ID NO: 496018 - protein, 412 aa, unidentified
MYYIGIDIAKRTHVAVIMHEDNSLRVKPFSFHNDKSGFKKLLIHLQTLCCDLSDIIIGMEATGLLFENLYRYLQSLDYNVVLLNPYQTAKFREMDTMKRVKNDNIDSVMIAALLKSGRFSEGYVSQEQLQSLRELYRHRNSIENQLKALKRQTSAILTVVFPELESVIRDPFNITGLALIEKYPTAKHYHHASVERILKTFRGIKGNNFNRAKAQALLDASKNSIYSGIASEARALNIRMNIAQIRLLKTQLDEILLTMQSLFTGTQVKQEDQEVMEELIDNLRTIPGIADKTILALLAECGNLDRFYAPKALIGFLGLYPTLSQSGDSSRNGRLAKRGASLAKKAIYLASIAAIRHNDEMRTIYMNYRSKGRAKKEAIIIVARKLLTIIYTIYTRNVPYDPQRVFVAKPNQ

SEQ ID NO: 496019 - protein, 348 aa, unidentified
MSKHSVPGSDVSGLLRRFAELRRKAAARTGQDFPIIVIQETGLDGFWIHRVLQSEGIESHVVDAASILTSRRRRRAKTDRIDGEILVRTLMAFKRGEPRVCSMVRAPTPEEEDRRRVSRERRTLVGERVRHANRIKGLLFAQGVFGYEPLRKGRRERLEALRTGDGRPLPVHLKAQIIRELDRLEVVLVQLKTVGAERDALLKQVTDAECSPPAMLMQLKGIGPETAAVLWSEGLFRQFDNRRQLAAYAGLAPTPWQSGSIDHEQGVSKAGNPRLRTTMVELAWLWLQNQPASALSLWFHERVRRLGGRMRKTTIVALARKLLIALWRYTIAGVVIEGAVMKPATTTI

SEQ ID NO: 496020 - protein, 418 aa, unidentified
MKSNKTEKVKIINEKTLIVALDIGKNVHYVYFRTPKNKDIKPFPIYNTGQSFKKFWEKLCRFKEEHMLDEVVIGFESTGPYAEPITNYLRKKPVNLVQVNPMHTKRIKELTGNSPNKTDKKDPRVIADVISLGHSLTVVIPEGAAAQLRRLSHARERAIGRRTAMNNQLQDLVFVIFPELGSIIKPSTKTGMYLIENYPDSESIASIGIENLSDIIRRVSRGKFDKDRAKELYNAAKQSIGITEGKESVILETSHLVSNIENENRYIESLEKQMVEHLEQIPYSHSILSIKGIGHVTAAGLIGEVGDFNKFNTITEITKLAGLDLFEISSGQFKGQRRISKRGRPMMRKLLFFAAINMVKSTGIMHKKYKQMLDRGMLKMKALIAITRKILSIIFAIVRNNTVYIENYTKQNHYKLAA

SEQ ID NO: 496021 - protein, 529 aa, unidentified
MAEWCLCARQLTWSREYAVTSLVARTGVSPFGKLLLEYTPSRARGPLVPILYPFPFFVEAAMTPRRQKNLRQLPSPEPLRLTHRHAAGIDIHSNVHWVAVPPEDAPPPPANHPANLPKQVRCFGTCTADLVTLADWLTQCGVKTIAMESTGIYWVVLFELLESRGFEVYLVEPRQSRHAPGRPKSDVLDCQWLQRLHSYGLLTASFRPAEQVVVLRSYLRQRQMLIRYAGQHVQHMQKALEQMNVKLTEVVNDVTGVTGMAIIQAILAGQRDPLELAKLRNDKCQRTQAEIARALYGNWRAEHLFALKQAVALYTFYRQQLQECDGQLQVYLGTFADQSKGQPCPRRPRRRTKSGNEPAFDLESALYHMAGVNLTVLEGIDPSTALVLLSEVGPDVSRFPTVKHFTSWLGLSPQHQSSAGKIRSRRVQRGACRAGRALRLAVQGCHHAKHALGAFYRRIQARAGGPKAIVATARKLAERVYRLLKYGMEYVCQKIDVYEAAYRARLVKGLARKAAELGYRLEPTTATGT

SEQ ID NO: 496022 - protein, 343 aa, unidentified
MITIGIDPHKRSLTAAALDPHSRLLGQLRLPATSQAGRQLLEWAAAWPQRRWAVEGASGLGRGIAQQLVAAGEPVVDVPAKLAARARLLGTSSARKTDLADAASVATAAIHHRRLRPVLLEDHTVILRLLSDRRDDLVAERTRILSRLHVLLADLAPGGAARELSATRAATLLRRVHPITVVDVERKRIARELLADVRRLDRQVKVASQAIRTAVHEHGTTLTEVFGVGPVLAAKLLGHAGDITRFPDRDHFASYTGTAPVEASSGDVRRHRLNRGGNRQLNTALHLIAVCQIRDSSPGQAYYHRKLAQAKTPEEARRSLKRHLSNVVYSHLVTDRRCHTRAC

SEQ ID NO: 496023 - protein, 385 aa, unidentified
MAPTRMPEAVIGLDVGKSSHWACVATRDGEVLLSAPVANREDDLDSLFGRFPDALVVVDQSRNIGALALARARAAGMSAAYLPGLAAHGAARLFAGDAKTDERDAMVIAKTALGIPDALLPVGDPGPTIAAARALAAQRNFLTCENTRNKNRLRSILLESCPAFEALVDLSDGPQLRLMASLGGAWSVADAGPRRAAALTRGAARGKIEALVRSTTSSTRPDASVVAAEDRAVKLLARRISENSAEIEAITAEISALLEGDDTYRCLLTVPGIGPKTASELAISIDIEDFPSHDRLASYCGLAPRNRQSGTSISSVTASRQGNKRLKNLLIFSCNCLTRTEGRWGDYYTRCRERGMSHGKALKALARKRLKVIYAVMRDRVPYAA

SEQ ID NO: 496024 - protein, 339 aa, unidentified
MQVSTLGIDLAKNVFVLHGVDHTGQTVLKKKLSRAKFAEFVIRLEPCLIGMEACSSSHHFARMFIRHGHQVRLMPPQYVKPYVKTNKTDATDAEAICEAVTRPNMRFVQVKTVDQQAVLALHTERDIIIRERVACTNSLRAMLSEFGFVMATGRKALKQGVPDILEDGENELSPFVRASALRQMAHIDALDDHLELIEQQLKSWAETQAACKRMTKVPGVGLLTATYLVASVGDGKQFSCAKQFSAWMGLTPREHSSGGKQRLGRISKRGDGYFRYLLVHGARAVASVIERHREDMRWLDGLLKRKNYNVAVVAQASKTARILWSMLVHETEYRPPAVA

SEQ ID NO: 496025 - protein, 372 aa, unidentified
MNYNTVYVGMDVHKESFSLCAYTIEAEKASHYQRTEADYKKVLNYLEFLRTIYGDDANFICGYEAGCLGYTLYHQLTANNVKCIILAPTTMLEQRSKKRIKTDKRDAEIIAKCLAQHNYSPVHIPTAKDEETKEFLRMRDDHKLALKKVKQQILAFCLRHNYRYDGNSHWTAAHLKWLKALILEALYKEILDEYLLTYQTLSDKLERLDKRIEELATQDEYKEAVKKLCCFIGVKTHTALSVLVEVGDFKRFASAQHFASYLGLVPGENSSGDDQNRLGITKAGNRHVRLLLTEASQCYARGQVGFKSKELKARQSGNTPAVIAYADKANERLRRRYYKMVLNKCKKHNVVKTAIARELACFIWGMMTYNIA

SEQ ID NO: 496026 - protein, 474 aa, unidentified
MDKKLSNKQEEVIKLLERQKIRDVKDLESYKLSECHPASAGIDLGSKELYLAIHPAIAAELGIAIVHRFETFTNDLLVCKDLLVACGIKTVAMESTSVYWTTIYFILQEAGIEVCLVNPKKFRMVPGRKTDIADCQWLQTLHLYGLLRGSFHPCQDIAMLRSYMRERDSIIKERSTFVQRMQKSLVKMNLLLHNVIDDITGKTGMKIITSILSGERNPKLLASFRDPHCKKSEEEIAEALTGYYKEDQLYLLKINFQSFSFFDKQLCDLDKQITKLLKRFPHKKEKKEKKPDNGKSKSRGKNDIRTTENLEEVLYHVLGTDLSTLPGIRANAILQIISEVGTDMSKFPDAHHFASYLGFVPHNKITGGYVISSKTDRIKNSAAQAFRKLIPSISQTKTALGAFYRRLAPRIGKAQAIIATCRKLAILFYNTLAFGKEYLEQGELKYQQKQEDWERRKLANLAKKYNCTLVALKM

SEQ ID NO: 496027 - protein, 383 aa, unidentified
MKTIRQCVGIDCSKDTLDVAISFLKEDFNAEVQATEVFKNNDQGFKRLMKWVKKLYVQELPCQMVVEATGVYHECLAYALVKNNMEVAVVLPNKVRNYCRSTDVRTITDKISAKQIAEFGLGKKLDNWTPPDKMFRQLRTLCRERSQLLHEKTSISNQKHAYDYSAFPYEGTEKRSKRRTKFLENQITEIEDEIRTILDAHPAIKEKVEKIGSIKGVGWLTVVTVVAETNGFNLIRNCRQLVCYAGYDIVVKDSGTSVRSKPRMSHKGNKHIRAALHFPALIAVRYNDTIKAFYKRLFERQKVKMKSYVAVQRKLLTLIYTLWKKDEYYDPAYHNKQSNNHKILEQPIEVALTEVDHVPSCDCVNLNAKIKNNFQLNHKINKT

SEQ ID NO: 496028 - protein, 351 aa, unidentified
MKTEQTASMKLFIGIDIHKRSWKVHLSTDLFSGKSFSMKPYPEELYKYVTKHYPDYDVTTAYEAGCCGYKAHRCFESYRWRSLVVNPADIFRKGKERFTKTDKIDAQLTSRELKDGHLSSIHVPDKEREELRSLFRRRNDLVKDYRRIKSLIKMQLLYYGVHIPEEHDNDHWSHKFRQWIDELEFDYSTGKESLKSKMRSFRFIDKELREVSNQLRAYCRKHYKQDYYLLRSIPGIGGIVACGILSELGDLRRFNSLKQLAGYVGIAPGVHQSGSNYKTIGMNPRAHRLMRSYFVEASWQAIRTDPVMQDYYRKHLGKDTKKIVIKVARKLLSRTLAVIKTKIPYEIGVIK

SEQ ID NO: 496029 - protein, 386 aa, unidentified
MGQKTFIPQEYEVFAGLDVAKKSISVTFSNHQQGFVRSLHMPYSVENLLHHVRKQFPDQKVAFVYEAGPTGYGLYDGLTAQEQKCLVVAPSMIPRAPGQRVKTNRLDSRALSENLRGGQLKSIHVPSPIYRELRHLTQLRDTLVSEVVGMKQRIQSLLLFEGIAFPLAPAGSRWSLKVKAQLRKLQCSRSVRFKLDQLLDNVEFSEQQVVKATQEIRKFCQNDPELAQCIKYLMSVCGIGWIVASQLLARIGDWRELKNVRQLAGFLGLGPSENSTGERTDRGSITRTGDGRLRSKLIQAAWSAIRQDAELRDFYISVCRRHTRQAGPRVAIVAVARKLSTRISAVLMKQRPYVVRQKVQSAPSNQEETSPQGTTRRLGEPGEKNS

SEQ ID NO: 496030 - protein, 409 aa, unidentified
MDVIHPKCAGLDVHKDSVVACARLGTGPTGAREVKTFGSATRDLLALSDWLTAHGCTHVAMEATGVYWKPVWHALEGSFELILANAMHVRNIPGRKTDVNDATWIADLLAHGLIRSSFVPAAPLHELRDLTRTRTQLVREKARHILRIQKTLETANLKLASVLADILGVTGRRLLDALAAGESDPDRLADLAHDRRLKASRAEFVEALHGRMTPHHCFMLALHLRQIDALDTAVRELEARLEDALGPFRPALARLTTIRGIGDTAAHVLIAEIGIDMSHFPTAGHLISWAGLCPRLHESAGKRRSTRTRHGNRWLKTTLVQAAWGAVRHHHGGYLRAQFVRLRSRRGPKKAIVAVAASILTAAYHVLRDGVDYRDLGADYFDRRDKAKLANRLIARLHDLGLRVEVRAA

SEQ ID NO: 496031 - protein, 367 aa, unidentified
MRAVFGIDVSKTSSEVAILVNGEKVHGYTILNDAIGFNRLLGDLKTVHNPEIIFEATGVYSRRLQAFLEEYSYAYTRLNPLEAKKQLDSLRVRKTDKIDAEKLAKSQLVHNRKPTYVQEEVYQHLRDLSRFYQNMTEDLVRTKNRLHKVLQVTFPELETLLSTPTGEQYWNLVMAFPCKEFVLSLSQSNLCEIVRQSTSKRISEKRIAYLTDKLIKLAKQSFCAVKKTSPMLEEVRYYAQELLRLSERRQVVLNDMVALAQPLPEYDILRSIPGIAETTATSIIGELGDIRRFQSSNQINAFIGIDLRHYESGNFLAKEHITKRGNPYASKILFKYIHNIASASHTNPCNIADFYEKRTRHLELFLN

SEQ ID NO: 496032 - protein, 385 aa, unidentified
MRSEATRAGETIVGGQVLYMALELSERTWKVLFASPAGRRRERSVAARDVAALVGEIAAAKRRLGLPAQARVVSCYEAGRDGFWLDRALRANGIDNLVVDSSSIEVARRARRAKTDRVDLVKLMGLLLRWVAGERKVWSVVRVPDTQAEDIRQLSRSIERLKGEHGRHVTRIKALLATQGLKLARIGGAGWGKRVGELRCWDGSALRPWLQRDLVLEGERLAVVAEQLAALKAERDRLVKEGREAAAVKARELARLGAIASESSFVFATELFGWRTFSNRRQLAGSVGLTGTPYNSGQSAREQGISKAGNKRMRTMLVEIAWCWLRYQPASALSRWWRERFANTGGRARRIAIVALARKLLVALWRYLERGVVPQGAHLKTRAAA

SEQ ID NO: 496033 - protein, 388 aa, unidentified
MKKNTIARLQTGSKSKVNQIRRMAAKQRLTVGLDLGDRSSRYCILNEAGEKASEDQLPTTKAGLDSVFAKMAPCRIALEVGTHSPWVSRHLAGMGHEVIVANPRKVRLITQSVKKNDRMDAEQLARLARVDPQLLAPIRHRGPEAQGDLAVIRARAELVDCRTALINTVRGLAKPMGERLKSCDADYVKESLADGLNEATQNAIRPLLKSVEEITKQIGVYDKKIQEIEKRYPETKLLKQVNGVGTLIALTFILTLEDAERFEHSRDVGPYLGLTRKQRDSGDSQPELGISKAGDVLLRRLLVQAAHCILRDGAPDSDLKAWGLTKVQAGAKTGSGKKGSKRRKKKAAVAVARKLAVLLHKLWVTGEVYDPQYNRKAVEAAKGKAKAA

SEQ ID NO: 496034 - protein, 449 aa, unidentified
MSKQGKAIGLPIINVRAAGIDIGSRIQVAAVPPELCDEPVQTFQSFTADIERMADWLISVGVTTVAMESTGVYWIPVYEILEDRGLAVILVNARDCKAVPGRKSDVNDAQWLQRLHACGLLRASFRPTRDIAALRAYMRIRDRHLEYAAAHMQHMQKALVLMNLQLHHAISDISGVTGLKIIRAIVAGERDPDVLASMRDVRCRESVKTIREAMVGNYQPEHVFALAQALALFETYQNRIADCDAQIECTLQLLNADKAKPDAALPAARSRTKQTNALKFDVRPLLHQLTGIDLTQIHGIGPSIALSLIAECGTDLSRWPTEKHFTSWLTLSPGCKISGGKVLSSHTRKSNNRIAARLRLVATAVGRTETALGAFYRRLAARIGKAKAVTATARKIAVLFYRAMRFGMRYEDPGADQYEQRYRDRVVKQLERRAAHFGFSLQPAAAGVS

SEQ ID NO: 496035 - protein, 389 aa, unidentified
MYYVGIDVSKYKHDCFIVTGDGVVVHDAFSFTNDRDGFQALLSALTPLGDHSEIRIGFEATAHYTLNLKLFLENAHYSFMEFNPVLISKFTKSQTLRRTKTDAIDCASIARWLMTVEYKPYPSGFYHIYSLKSLTRLRDSLVRQRSFYIVKITNVLDHTFPEFKPFFSNKFSKTALYLLENYGNAEKMSHMNSQSYENIRRISRGKFTPRKFLELKSLAANTVGESNEMFDSQLSSLLALYKATVKEIESLEKDITDLILEINPRSLSIPGVGPLSAAVIYAEFGDISRFSSPQKMLSFAGLEPSFYQSGTSAHGGHMVKRGSPYLRYTLMNLCIPLMKYNIVFAEYYAKKRSEGKHHRVACTHLAKKFIRILYKLEKDKTDFDPVKLR

SEQ ID NO: 496036 - protein, 340 aa, unidentified
MGYYVGLDVSLKSTHICVLAGERRVVWRGVSDTQIAMIAEHLARWSKQIVLVGLETGSLTPWLYHGLSDLGLPMVCMDARRASDALKARAEKTDKADARALAEMLASGWYSAVHVKSLESHQLKALLGARDQLVRVKRQLYGQVRGLLRPFGIKISQRVGAKSFDEAVRMACNKEDVLYIAVGALLDTLANVASQIAVLDKQVRTLAQKRKACWHLMSVPGVGPITALAFTAAIEDPHRFSSNRDVGAYLGLTPKRYQSGERDVSLSISRQGDEMVRHYLYEAANCLLTTVTGASALKSWGLKMVKRCGAKRARTAVARKLAVLLLRLWKQESHFEVQSA

SEQ ID NO: 496037 - protein, 410 aa, unidentified
MLYLAIDQHKAQITVNLRNEQGDVIYKGQVSTKHADIDDFFSTFAKKVRKHRGFMAIVEVCGFNDWLLEKLKKAKCNEIIVIQPDNSSNKKTDSRDADSLGALLWNNRKRFQGSQRPNGIRRIFPADPAEAQVRQLTNFRQFLVTQRTRIINKIKGIFNKHNMLQDAPTEIVKTKKFRKWVAEVQIPIVDRMEVDAHLEMWKLYDKQILETESELVKRVEANPKNMFKLKSIPGISAMGAIILLSRIGDIKRFKNPRSLANYFGLTPGCHNTGRTQCQGGITKTGSATARQVLNFAVNHVVRKDKAMQEWHKKLKSRRGVKTARVAVMRAVLVEIHATIIWHMLRWDKEYQFHYPCPREVPIVAKKRAGRRPEREVLEGMGNSNRAKIQKPLKRKNATRVCPVHSIQPSI

SEQ ID NO: 496038 - protein, 343 aa, unidentified
MDYFAGLDVSVKDTSVCIVDETGKIVREVKVSSEPDALLTVLRNPAYHFKRIGLEAGPLSQWLFSALAEADLPVICVEARHMRAVLKAQINKTDRNDARGIAQMIRVGLYRPVHVKTLRSQKLRMLLTHRKLLQSKAIAVDNDLRGTLRNFGLKVGVVGAARFEARIRELVEGFPDLAVLIEPLLVVRRVLREQLDILHRRLLAIVRDDEVCRRLMTVPGVGPVVALTYRATVDVPARFRKSKSVGAVFGLTCSRHQSGERDRPGAISRCGDEMMRTALYEAAQVMLMHSVKWSWLKEWAMKIARHRGRKKAIVALARRLAVIMHRIWVDGTEFCWTREAAAA

SEQ ID NO: 496039 - protein, 387 aa, unidentified
MARKRTLSTLDTSIAYEAVGLDLAKEDTAIAAFGPDHEGPYLIDRMPYDKLYELLADMAPTLVAMEPCSGAHQIAEQIQELGHEVMMISGRHVQAWVKDHCNGQKTDLNDAFAILNLAYDRWLTPIRGKTREECRLLALQASYRQLKGQRTKTMVHVEATLHAWGFPIRTGSFNQKALHELIDANREAFGDEVVETLHLMINRVHDLDHDIATVLKLLTEATQRDPRASLLRSIPGFGVLTTSRWCAVVGDIARFDTPKQTMAFIGLVPNNRITGHHTETSSGREARGQGRMSKRGDKMLRSLCILGAGALCLMVRNDRLPDCPFVASIKERLASPRPWFKVLVYVAAKLVRIATALLKYGETFSFEKAGISKAVLKQWELEQAKAA

SEQ ID NO: 496040 - protein, 319 aa, unidentified
MSEIVVRAGLDVSKDQLEAYVHPGGVRLSVTNDRAGHRQLLAWLAEQGVAIVGAEASGGYERDILERVAEGGLVALRLNPLRVRRFAEARGRLAKNDRADAQTIALFMVSCSDQRAVIPPDPARERLGEHLLVRVQTLDAIAALENQIEHLRDRSLRAALRARAEGLRRAVAKLDRRIAELIAAAPNLQAMATCLRSVPGVGPVLSATLLALLPELGKLTRRQIAALAGVAPFDDDSGNRNGQRRIHGGRAALRKVLYMAALVAKRRNPTIRSFALRLAGKKPKVIIAACMRKLITILNAVARDQVIWHNTQIVTCRHS

SEQ ID NO: 496041 - protein, 359 aa, unidentified
MNDATTKEPTVTVGLDLGDRYIQVCVLDEAGAILEESRLPNKRAALERRFSGSEPMRVVLEAGTHSPWVSRLLEEFGHDVLVANPRKLRLIYMNESKSDRVDAEYLARVGRLDPQLLAPLRHRSAQTQEDLAVLRSRTCLVRARTRLISHARGTVKSLGGRLPRCGADAFVKKAGLHIPEKLRPALLPVLATIAQLTEQIKGLDEAIKKTAGERYRETGLLDQVPGVGTLTAQCFLLTIEDPSRFPKARSVASYVGLRPRQAESGSLSPQLRITKAGDVELRSLLVTAAHYILGPFGPDSDLRRWGLALAVRGGKNGKKRAVVAVARKLAVLLLRLWQTGEVYEPFRNTNRRTAALAGT

SEQ ID NO: 496042 - protein, 339 aa, unidentified
MRLNAAIDLHSNNSVLVILDEKDRVVHEGRHPNDLKVILAQLSPYREDVQAIAVESTYNWYWLVDGLMEAGYDVKLVNTVAVKTCDGLKYTSDEHDAKHLAHLLNLGILPTGYIYPKKDRAVRDLLRKRSQLVRHRTAHILSVQNLTSRNRGNGMTMEKVYKLDDKGVAGICGGDASLALAMQSNLVVLRCLEEQVRTIERAVLKQARLKPQFKKLLTVDGIGEILGMTIMYEAGDMKRFEQVGHFASYSRCVTSSRWSNGKKKGTGNRKNGNKYLGWAFVEAAHHAVRYNERIRKFYQRKKARTNGIVALKAIAHKLARACYHVIKEQAVFDETKAFA

SEQ ID NO: 496043 - protein, 311 aa, unidentified
MQEVFVGVDIAKDWLDIFHPGSGLRRIDNTAAAARRFAKASAKDGVWVIFEASGGYDRLLRDALEAAQARFSRVNPRQARDFARAMGVVGKTDRVDARMLAEFGARLRPAATAAAAPERCALQALTTRRRQLVEIRKQELTRLPQTLDPAARADIRSLILILNARIRRIEGAMAAQVGATPDMAQAARRMQTVPGVGPIVAATLLAELPELGQLDRRRIAALAGLAPIARDSGKHLGKRRIGGGRPTVRAILYIAALHASRLSPPFKAFRDRLKAAGKPTKVTLVATAHKLLDILNAMLAASTDYKANTMP

SEQ ID NO: 496044 - protein, 458 aa, unidentified
MNGKRKKKAGNEQQDWKVNLEVVHPNAAGIDIGNASHYVAVPPDRDAEPVRQFACFTEALQQMAAWLKSCGIDTVAMQSTGVYWLPVYEILTEEGLQVFLVNARHTKNLPGRKTDVQECQWLLQLHTFGLLNNSFRPPEEICVLRAYWRQRAEHVASASTCIQRMQKVLTEMNVQLANVISDISGLTGLAIIQAILAGERDRYKLADLANFRIQASREEIARSLEGNWRKELLFILQQELNLYQTYQQQIAECDTALAAHLQTLEDKVEPGSQPPAAKANKRAGSNAPTSFDLRGELYRVSGTDLTQIDGINIMNAQTIIAEVGVDMSRFPSEAHFASFLGLCPDNQITGGKVLRRGTRHVENRAATAFRMAATSLWRSKTYLGAKFRRLRARLGAPKAITAMAHMLARLVYRMLRYGEQYVDKGMKYYEEKYREHEIRSIQKKAKDLGLVLTLSTAA

SEQ ID NO: 496045 - protein, 305 aa, unidentified
MISWVGIDISKSNLVVWVQPQNQGFDVANTSQGFDELIECLSRYQVGRVLLEATGGYERKVMAALQSANFNVLRINPRRARAFAVAMGKNAKTDPIDAAVLADFAEVLNAPCDKTVCAEREALRELVQLREHFVQQRDDNKRRLQQVQLPAAVATIKDHIRYLQTQIKLLDKSINQSMRDLDAEKAERLISVKGIGTVATASLLVYLPELGELDRREIAALAGIAPYNEDSGNHSGKRQISGGRARVRRALYMSCWVVIRHQADFKARYEALRERGKSAKVALIACMRILLIRLNAMLRDGTEWR

SEQ ID NO: 496046 - protein, 391 aa, unidentified
MAPVMIGIDPHKGSHTAVAIGADEEPLRQVRVRASAAQAQKLVAWAADWPERTWAVEGARGLGYLLAQQLVAAGERVLDIQPKLGARVRLLATGASGKNDPNDARSVAIAALRSTTAAEVAAAGHAAVLKVWSKRHRDLGRARNQLACRLHAVLCDLAPGGFSKEITAGQASGLLQRIRPSGAAAQARYDLASEFVEDLRRLDAQLRDTRSKLTAAVKESGTSLTEIFGVGPVIAATVIGATGQVSRFASRDRFAAYNGTAPIEVSSGNRRACRLSRRGNRRVNHAIHMAAVTQIRNKHSQGRAYFDRKLAEGKTRKEALRCLKRRISDAIYARLQDDARRTRQARTLTAREGNRGTTLTPARPAHTPITGSSDKPLPGLTPPYDPGQYPA

SEQ ID NO: 496047 - protein, 342 aa, unidentified
MPAATTTGPVFVGLDYHTLSVQVCALDRGGRVLLNQSCANDWRAIRDAVARFGTDVRAAIEACSGSADLAEELVTKAGWLVDLAHPGYVARMKGNPDKTDYSDAKMLADLERVGYLPKVWHAPAEVRELRRLVRYRQQLVGERRNVKLRIGALLRDNRVAAPEGVNPWTVAWLTWLTRDAALSEQTRWVMDRHLGRLKALAGDVKAAEQRLAQVTAEDALVVNLLTMKGIGLVTAATIRAEIGRFDRFRTGKQAARFCGLSPRNASSGQKQADAGLIKAGNPQLRVVLIEAAHRLVRYDARWKKLAADMKGRGKPGSVVAAAVANRWVRWLFHQVQPVKAAA

SEQ ID NO: 496048 - protein, 356 aa, unidentified
MQTQVTKKIDFSDKNLFIGLDVHKKSWSVTIVIDGMEHRTFTQPPDPLALNNYLQRMFPGGSYNSAYEAGFCGYGIHRDLNSLGIRNIVINAADTPTSQKDKLHKRDPTDSRKIARELEKGSLRGINVFDRELEELRSLNRTRFYLMRDLRRSKNRIKSFLMYYGVPILPEFDNNQWTLKFISWLKQVRMKTPGGQEAFFHLIQSYEHHRQQLLILSRMVRLRISHYDKELYSLLNKISGIGPLTASALITELGDINRFTHINHLGSYVGLIPRVRESGETTHAGGITFRCNSFLRTLLIESSWQAIRMDPALMQYYHRHVINSKGHKVIIKVARKLLNRIRYVMKNRQPYVTGVA

SEQ ID NO: 496049 - protein, 357 aa, unidentified
MKKIVVGIDISKEKIDASAIDVRDSQLGMVKLDYQVFENRPMGFRRMLAWARHLIKGVGLEDVLFCCETTGGYDRCLCDYVYAKGLDIWREGALQIKRSMGVRKGKDDKADSLMIAEYAMRHMDKAVMYETPSDTVRELKALFLYRHKLVQERTEKKVRAQHLKDTAAKSKSMKFIVRDAMKSVRAVDKSIKQCERQILELIEGDEELKKNYGHITSVHGIGIVNATAFIAYSNNFKGITTANKISSYWGCASFRDTSGTSVDKKAYVKCYSNSLLKAYLTEAAEHTFKESGIYRDYYLRLKAAGKPYGVIINNVRNKLIHLVYSLVTNDTDYEQNHEFLRVQKKRQKGNVSPIREY

SEQ ID NO: 496050 - protein, 424 aa, unidentified
MKVTYQTCCGVDVHKSFLVATIIKTTNGFEPSYQKKRFSTFNNSILQFKNWLLENNCYDVCMESTGKYWIPVFNLLEDDINVTIANPKWVKAVKGNKDDTKDSKWIGDLFRLGLVRGSYVPCKKIRILREYTRYRYKLVSCRSSEKNRYQNALTVCNVALDSVVSDIFGKSSTSIIDYLLEQSGTSINHEEIASKLLKRLKSKEDAVIESIEGYQMTDSQKYRMRLVRAHMDYITAEINDVDSMIENMISSDTDYQNAVQLLCTIPGVKHDSAVTIISEIGIDMSQFCSSKRLCCWSGLTPGSNESAGKKKSVRITRAGVYLKPALVQCAHAAVKSDKSPYYKKKYESLVKRRGKKRAIIAIARMILTAIYQMLSTGETWNPSDLYKIDMPQALVDKQKAKAIKQAKKLLLQEGILPLDEPIAS

SEQ ID NO: 496051 - protein, 346 aa, unidentified
MKITTIGIDLAKNVFQVHGVNEHGKVAVKKQLKREQMAAFFANLPPCLIGMEACGGAHHWARQLQRFGHTTKLMAPQFVKPYVKTNKNDAADAEAICEAVARPNMRFVPVKTTEQQAILSVHRARQNFVKARTALANEIRGLLSEFGLVIPQKIQTIGLRLPEILEDGDNGLPGTFKQLLQRLGEHLKELDRQVAELERDIQIWHRGNEASRRLEKIPGIGPITASALVATVGDAKNFSNGRQLAAWLGLVPRQNSSGGKATLLGISKRGDRYLRTLMIHGARAVLRFAQNKTDTTSMWLNEVQTRRHVNVVTVALANKNARIVWALLAHGSEFRAGYTSSESVAV

SEQ ID NO: 496052 - protein, 488 aa, unidentified
MKKNQKKRKEEVEKLLLKQKIRDIKQIEAYKLDICHPDSAGIDLGSAENYVALNPSIAAEMDLPIVHKFSTVTSGHEACRDLLLQCGIKNVCMESTGIYWINLHYILTQAGINVCLVNPKMFRMVPGRKTDILDCQWLQTLHMYGLCRGSFIPEEHIRQLRAYIRERETTIQDRSRYVQRMQKAMVQMNLMLVNVVNDITGKTGLAIIKSIIKGERDPKILAGMRDGRCKKSEAEIAEALKGIYKEDQMFLLKQNFSKFEFMNKLISELDLKIGGLLKTFPHAQLREPAAEQVDNSTEDNSEQADKKNKKKPRPSKNDLHAGIDLKKTLVEIAGVNLTTITGLQPHSILQIISEVGTDMSLFPTEKHFVAYLGYAPRNKITGGVIISSKTDRKRCHASQAFKKVIPSISKGNSALYSFYHRIAAKRGTAVAITATARKLAINFYNTIKFGKEYVEHGAELYKKKQEEREKQRLQTLAKKYGMELSPAA

SEQ ID NO: 496053 - protein, 399 aa, unidentified
MNEQLNVVCGADIHQRFLVATILCRDGREWTKRFLMNVNGLLDFKAWLMSYGCQKVAVESTGRFWIPVHMILDGTVDVIVANAYKIKHTTKKKTDLKDSEWLAELCLNDMIEPSRIFPKEDRELRNLTRAREAYIRDLSKEKSRVHHVLESCSIKLSSVISDVFGKSGMHILNGLMNGVSIEDILKGIPDKRVRDKKAEELREALMGKLEVSAIILIRQSLQIINQFNMRIEELDQEIRSRIASKPMDLKIAMSIPGIGIVSAYTILAEIGNYLDFKTPEQLAMWAGIVPSVYQSADKLITGSITKQGSKHLRWILVQVAHAISHKKGGKLKKFFLKIRAKKGHLVAIVALARKVLCILYHLLVNQEMYDEDGLAARKDALILSQTPMSIFAHARRMKT

SEQ ID NO: 496054 - protein, 338 aa, unidentified
MSIYAGLDVSDKTTHICVVDVDGKVLRRDVVASDPDVLAKWLNKHCTDLARVVLETGTLSTFLYHGLVERGVAIECICARHAKGVLSARVNKSDVHDAEGLAQLARTGWYKRVHMKASATHIDRAALRIRAQLITARTSMANQLRGLLKLFGLRMGTARTPGRRAERLSAFYAQRPDLKALFAPLIASMEAIEEQLRAYNRLLNDRAKADEVCARLMSVPGVGPITALTYTSTIEDPRRFARSDDVGAYAGLVPRRSQSGERDVSGHISKAGDPMLRKALYEAANVALTQVKRPFALQAWGRKMVEAKGAKRARTAVARKLAALLHSLWLNETEFRWA

SEQ ID NO: 496055 - protein, 432 aa, unidentified
MSDDSNSGHPKSFQDTFTLFMGFDWAQKKDHEAVAVDAAGKIVLDRSVSQTADGWSKLRDRLMARVGGDLAKVAVAVETSNGPAVEQLLAMGCQVYPMNPKAAQRYRDRKAPSGPKSDRLDAWSFADALRTDGHGWRVLRPDDPLTQELRLLCHDEVRLIQQRTAMISQLREALYQYYPAVLDAFDDWTCPGAWAFVERFPTPAKLERAGKRRWQKFLHTHKLYRPQTYERRMQIFSQAQDFCGTAAVTNAKSRLAVTLARQLRVLERQIQDYRKAIEELFAQHPDHDIFDSLPGAGPKLAPRLLTELGDDRERFEDAQALQCYSGTAPVTRSSGMSRRVKCRVACNKSLRHAVHLWADLSRKSCVWAETYYQQKKAKGMSHACALRCLGQRWLKILWKMWQTRTCYDEAFHTRNQVRHGSWIVTLRQGDPC

SEQ ID NO: 496056 - protein, 357 aa, unidentified
MIQTDARIVSIGLDVAKASFEAALATPAQLPAQPLASKPYARLFEGAAQLVQAVEAHPSMIELAQPLPRIVMEATGAYSRQLAEWLVALRPQWRVAVVNPRFIKAYAHSLGARNKTDRADARLIARYGLERQPVWFEPLAPALKALRALSRERDALVAQIVQTKNRAGETPDAPDVVVSAQRAVFQALDKQRRRIEAAMLELLVSDPTWGPLLERLQSIPGVGKITAMVVLAELGDLRRFSRSRQLSAFAGTNPQIIESGSSLRRRTRMCKMGSSRVRQALYLSAMAAIRTKRTNSLALTYKRLVAQGKPKLVALGAIMRKQLLLMRALMLNGTRFGDPVACAKPVESLCRKAAICP

SEQ ID NO: 496057 - protein, 454 aa, unidentified
MTGQRILLKFIAMRKGKLRLLRPNAAGIDIASEVHYVAVPPDRCENPVRNFGTFTVDIHSMAKWLKECNIDTVAMESTGIYWVQLLLILEEYGIEVFLVNARHIKNVSGRKSDVLDCQWIQELHSYGLLSASFQPDSITRELRTYLRHRKSLTESYSKEVLHMQKAFEQMNIKLHNVLTDLCGKTGQLIIQEIISGEFDPEKLIKHVDPSVKASREEIINSLKGIWREEHLFELKQAYELYLIFKKKIIECDTQIEKTLKKIENSIPKEKKEKTKRHVYSKNRLNFNGTQYLKNIIGVDVTKIFGISELTALDIVSETGIDMSKWKTHKHFTSWLNLAPNNRISGGKLLKPKKSRKKNKAGQAFLMASYALQRSDHWLGQYYRRMKARNGPLVATKATARKLAIIFYEMVKNKIEFNPMPAELYQQTYKEQKLKYIRKQASNLGFHLVALESVS

SEQ ID NO: 496058 - protein, 448 aa, unidentified
MATVNNAITTGQPFAAIIGLDWADQKHVWSMRTADGHRQRGELVNSPEAVEIWAAELALRFAGQPVAIGIEQSRGAVISMLSKYSHFVLFPVLSTSVSNYRKSFTPSGAKSDAKDSDLILDLLIKHPEQLPPLRPDTVETRSLQFLTEERRKLVNLHTSQVQTLTNWLKQVFPQVLHWFEDVSTPLVHDLLLRWPTLPDLQKVSSKTLLNFFHRHNCRSQERNQQRLAEIPHAVPATHDPALLKAGVLCIQNTVRLLTQMRTGISALENQIAEVFRSHPDRAIVESFPGAGAVLEPRLIAAVGTQRDRFPSAQSLAAFVGIAPVTEASGNSLWIHWRWACPKFIRQTFHEWANCSIKSCAWAREFYDQLRARGKSHHAAIRALAFKWIRIFFRCWRDRVPYDEQRYLRSRQARNAETPAPVPPAHGKAQPRFLFKTCGDFQKIAEISY

SEQ ID NO: 496059 - protein, 346 aa, unidentified
MKVSFCVGIDIAKDKFDVCIKELKADGHSVVKGSRSFSNSEAGFEELGVWVEKRTREVSSLVFVMEATGVYYENLAYWLEAHGFNVSVELANKVKNYARSLSVKTKTDKVDASVLASMGLERALALWHPMSLVYRELRDVSRLKLAYKRNLNALKSQLSAMESAHNKYDMVLSLQKEQIAFYENAIDKLDEELKEIAQRDPELYDRINKVCTIKGLQFNTVVAVICETNGFRLFHSIKQVVSYSGLDVKFNESGKHKGRTSISKKGNTRIREVIYMPALAAIQHNKPITQLHKRICEKNPTARKKGVIAGMRKLLVLIYTLWKKNEEYIENYGVTATVQTSGNEEN

SEQ ID NO: 496060 - protein, 379 aa, unidentified
MRTARDCGVYAGEEVLLVAMELSSTKWRLAMGARGRVRQVTLEPGAVEAFEEAISRGKAKLGVAAGAVVVSCYEAGRDGFWVHRWLALRGVRNVVVDSSSIEVSRRARQAKTDRMDAERLLNLLQRWYGGEAGALRTVRVPSVEEEDARVLHRERASWVEARKQAGNRLRGVLAAQGVRTEGSIGVWGKRLDELRTGDGRELPPQLRERVERRVGYWVGLNRTIREMEAAQRERLRRAGGEGAAVLVSLLMSLRGVGQQTAWLLVWELFGWRSYGNRRELAASVGLVGTPFDSGESRREQGISKSGNRRVRTALIELAWLWLRHQPDSALSQWFVQRFSGTARGRKVGIVALARKLLIALWQMTRTGEVPSGARLSRAA

SEQ ID NO: 496061 - protein, 391 aa, unidentified
MIYIGIDVAKDKHDCFITNSDSKVLFKAFTIFNNLDGFNDLYQKIESVMDDVTKVKVGLEATGHYSYNLLGYLLDNGLPTFVINPLHTNLYRKSLSLRKTKTDKVDSHTIASMIMSDVNLKSYSDTSYHNKELKSLTRYRFDKVKERAKLKTSVSRLVCILFPELEKLVPTLHMASVYALLSEFPSAKHVATAHLTRLTNLLSESSKGRYGKDTAITFRDSARASIGSNMPAKSLELKHTIKLIQELDSEIDEIENEIKIIMDEINSPILSIPGINYRMGAMIIAEIGDFNRFDSPDKILAYAGFSPSTYQSGQLDGAYAHMEKRGSRYLRYALYNATKYVCHWDPTFAAYLAKKRAEGKHYNVAISHAVKKLVRVIYHLEKTKQQYIKAA

SEQ ID NO: 496062 - protein, 337 aa, unidentified
MGLYCGIALHSNNHVVTVINEEDRRLYERRLPNDLAITKAALEPFRTQLVAVAVESTFNWYWLVDGLMDAGYQVRLVHTGAVVQYEGLKHTDDEHDAFWLAHLMRLGILPTGYIYPKSERGLRDLARQRMRLVQHRTSHITSVQSQVWRSTAVRLRSETIKGKGQQPWPELLDPDVALSVETGRAAIDALTAQIERLEELLLKRVGLSPQFQVLKTVTGTGPILALTIALEVGDIKRFPGVGEFASYCRCVDSRRLSNTKKKGEAHRKNGNPYLAWAFMEAAHFAIRNLPAAQRFYERKRRQRNALLAVKALAHKLARACYYILRDQVPFTPDRLFA

SEQ ID NO: 496063 - protein, 414 aa, unidentified
MPETAYALYVGIDWGTVTHQVAVLDAQRVLLGERAIAHEAVALHALTEWLTQLAGGAPARVAVALEVPRGAVVDTLLERGFHVFALNPKQLDRFRDRYTVAGAKDDRRDAFVLATALATDRPAFRALEPEDPLIIELREWSRVEDELREEWGRLASRLREQLHRFYPQALALCPAADEGWFWALVGLAPTPAAALRLRRAAVVTLLRTHRIRRLTADQVLAALQNPPLRVAPGTVQAASAHVALLIPRLELVDRQRRDCARRLERLLDALATTGEQQGHRDVTILRSLPGVGRVVAATMLAEASRLLAARDYHGLRTQAGVAPVTRQSGKRLLVGMRYACNPRLRNALYYWGFISVRYDAHSRQHYQLLRGRGHSHGRALRGVVDRLLTVLMAMLAAQTTYDPARRSAMLALAP

SEQ ID NO: 496064 - protein, 333 aa, unidentified
MEFKWTIGIDVSKKTFDVAYAANAVNAKQAHAVFANDLKGFKAFARWLKDQGVTLISSLICLENTGIYHRPLVAYLLAQKAFVWVETPVQIKWSMGIQRGKSDSVDAVRISTYAFRNQDKAVAYSPKDESIQQMADLMGLRTRLMTCIGSLKVPIQELKSMGLNNTAKLMAEASKKSISALEKEIKAVEQQLQVLIDGDEKLSTTFKYATSVRSIGFVAALQLLVYTHGFTRFENAKQLASFCGIAPFEYSSGTSVRGKTKVHPMANKQLKSTLHMCAVSAIRNSPEMKVYYERKVAEGKNKMLVINAIRNKLVQRVFACVRDKKEYVYEIAA

SEQ ID NO: 496065 - protein, 325 aa, unidentified
MTYVGIDISKSSFVAAFPQGKGYNTETFANDAKGIRKFIGKLSADTHHCVMEATGNYGLLLLYLLDKAGITASLVNPKKIKNYSRMIMSVTKTDDMDARLIAEFGEKMTPAPYKLPSETLMLLKQKKTVIRQLQKQLTATRNLQSSLEPLPVKDKKCLTSLKQTIAFTEKQIRHLEEELVQTAESVFEKQLKALTSIKGIGVTLATALIIATGGFSSFDNAKQLSRYIGICPTIEQSGSSINIRGHINRNGDANLRSMLYIAAWSASQHNKACKECYQRLRQRGKSGKLAMIAVANKLVRQAFAVATSNTSYIDGFVSTKPDTAV

SEQ ID NO: 496066 - protein, 404 aa, unidentified
MFYAGIDWADQKHDVQALDEAGRKLGSLRVAHTPEGLSQLNTFLQQITGPEQKEQMACIIETTHGLLIAYLLEAGWPVYPVNPRTVDRRRGASGAKTDAIDAYLLAKTGRADFADLRRLTPDSETVQELKALTRDQDALIQMQTRLVNQLTACLKDYYPAALDLFSKLQQRSTLIFLQTYPTPQAAACASSEQITLVLKNAGHPSAQKVAPKILQTLHEPHLTAKSITTRTKSRLMLALVSQLLPLVEQIAAYDKEIDTLFLTHPDHEIFQSLPRAGKRLAPRLLAEIGDDRARYADAASLQALAGTAPVVFASGNYSKVHRRLGCVKPLRNALHQFAWQSTLQEKWALAYYERKRAEGKSHSVAVRALSNIWARVLFAMLKSHKPYDPTTFEQAQRLHAHKAA

SEQ ID NO: 496067 - protein, 334 aa, unidentified
MQFSFYVGIDVSKNSLDFAVRDQQQVLFHTSVENNEAGLEQFEAQCQSNEIDLTESLLCCEHTGIYSQVLLTFATQHDIAFWLESSMRIKRSMGLQRGKSDKVDALRIAEYAYRHADQAVFWQPERKVLTHLKQLVAMRRRFITTKHALNVPIKEAASFQDKKLQKELKKLNQKPIEVLDKQTKEVEKRIRILIKEDDTLAHLFEIVTSVAGVGEVVFWEMVTSTNEFKFFTCPRKFACYSGVAPFEHSSGISIRGKNRVSHLANKQMKKLLHMAAMSVVAAEGELADYYHRKVAQGKAKMAVLNAVRNKIVHRVFACVRDDRKYEKNYTPKLV

SEQ ID NO: 496068 - protein, 400 aa, unidentified
MDERKGFSWFLGIDISKETFDACCISGQGEKRFSISTSMDRKGFEELIKQIASLSVPQESVLIGMESTACYHVNLYSFLISLGYAVIVINPLLISNFVKLQLRKTKTDKKDASVIAQFLLLNRDSLGRTVGSSDFTDIRDLSRQRESLVDQMTSDKIEIKRLLTMTFPELEHIACIFTKSMLRLLCQYPSAVSIRQAKRSKIARILIPGSYGKQTDASVERIVKAAETSIGTSSSAKEVILKQKVSLLMQLEQHLQELTDILTEQCKGKMRRDMDILTSMRGIGKKTAMNFLIEVGRDVKEFESHKKVIAMAGLDPALYQSGKIDRKGKITKRGNRHLRRVIWVMTTKVIQFNVRFKQYYLKRIQDGLPYKMAVLATAHKLIRIMFAMLTNETQFNESMN

SEQ ID NO: 496069 - protein, 377 aa, unidentified
MSNVAGIDISKGKSTVSVLRPFGEVVAKPFSVGHTGSELKELADYLKSLDGETRVVMEHTGRYYEPVARFLHEEGIFVSAVNPKLIKDYGNNTLRKVKTDKADARKIARYGLDNWAELRQHTLMDTIRTQLKTLNRQQGLYTKTKTMMKNNLIALLDQTYPGVNDLFDSPVREDGSQKWVDFATAFWHVDCVRNMSFAAFTERYRKWCKRNGYNFSQSRAIKIHTEAQDLIAMLPKDALTKTMVRQAADALNAGSKSLERLKAEMRSLASQLPEYPVVMAMRGVGDSLGPQLMAEIGDVTRFAHRGSITAFAGVDPGSDQSGTHEAKSPRTSKSGPPELRKALFLVMDCLLKTMPADDPVYRFMDKKRSEGLSLIHI

SEQ ID NO: 496070 - protein, 259 aa, unidentified
MELEHFSQNADPDCLASHVQKRYPGAKIKVAYEAGFSGFWACRRLQQAGIECIVINAADVPTSDKQKKQKNDTVDARKIAKELSKNNLDAVYVPTITEQNDRTLVRVREQLVEDQTRCKNRIRHLLHFNGLKVTDGIDKEKYWTLAFIKALEELDCAHSSLRITLNLLLAELKDLRKKVLEATAAVRKLAATNLYKEDIELLRSICGIGPTNAMVIRTELGNISRFKCFDHLCSYVGFIPSTDDSGDNKATRGITHPLQ

SEQ ID NO: 496071 - protein, 463 aa, unidentified
MAKKNTTSAKSKSKARKNILERINPNAAGIDVGANFHLVAIPEDRVQENVRKFGPFTSDLHRLADWLIEHHIETVAMESTGVYWIPVFQTLEQRGLEVKLVNAAHVKNLPGRKSDVSDCQWLQQLHSFGLLNGSFRPKDEVCVLRSFLRLRDTLVKDCSSHVLRMQKALTEMNIQIHRVLSDITGYSGMAIIRAILAGERDGLKLAQMKHPQVKASTEQIVKALEGDYRAEHLFALRTAVELYDAYQLKIMECENQIEQQLEHFDTKLDFQQVLEQSGALKTRSAQVRLELQRQAHLTSVCGVDLTRLPGLRTLAVEIIISETGLDMSCWKSEKHFCSWLKLCPDNRISGGKLLSSRPRKTKNRAAAIFRLAAQGAMQSKTAIGAFIRRIKARLGAPTAINAGAHKLARLFYRMLKFGAAYVEQGQIYYEQKYKERLLRNLHRRAKEFGFQLTPFEPATDLVS

SEQ ID NO: 496072 - protein, 470 aa, unidentified
MPDTPNQSHTAISIPQEAAATGTPTPRRFAAFIGIDWGDKKHAWALQVEGSAQVERGEILHTPEAIEEWAAELRRRFPTGRLAVALEQSRGPLVFALTKYENFTLYPIHPTSAADYRKIFRPSGAKSDGPDAAMHLDMLLRHRDKLRPLNPDTVETRMLQFLVEDRRQLVDQRTQISNRLVADLKSYYPQVLEWFEQPYAPVALDFLERWPTLDELQKARATTLHQFLKQHKCRDQAKNQTRVEAMRGAVAATHDTAVVTAGRWAVCAAVRLLRDLNRSIQEYDRKTEELAQAHPDFAIFDSLPGAGAALVPRLIAAFGTQRDRYESAAEIQKYSGIAPVTEDSGHQHWVHWRWSCPKFLRQSFHEWAAQSAQQCDWAAAYYQAQREGKNKSHHAAVRSLAYKWIRIVFRCWKDRRPYEDSRYELALIRRKQATPASPKPSPFELPIQWTSCGSFKKLALKTHNKRDKVY

SEQ ID NO: 496073 - protein, 354 aa, unidentified
MNKYSIDFFVGMDLGDLSNHICILNCDGAVLETMSIDNTVSGINMFFDRFALPQKVLVAIETGTHSPWISQVLRARGFRVLVGNARKLRLIWNSTNKNDDRDAQMLARIARFDPNLLSPVHHRSRSAHMDLALLKARDALVRCRTSLINFVRGTSKTAGVRLPSCSADAFAKSVIEQIPKDLLAAALPCINSIAELTRKIHHLDGQIEALCTEGYPETSALRDISGVGPLTALGYVLTLEDPNRFKKSRDVGPYLGLTPKRDQSGQSDKPLSITKAGNTYLRRLLVNASQYILGPFGPDCDLRRYGMRIASRGGKVAKRKAVVAVARKLAVMMHHLWRNKTGYDPFYQCYLKAA

SEQ ID NO: 496074 - protein, 342 aa, unidentified
MYYIGLDVHKKTISYCVKDASGQIHREGTIGATRNELDWWIKTLPQPWTAAMEATIFTGWIYDHLLPHAAQVKVAHPVMLRAIALAKKKNDRIDAGKIADCLRCDFLPECHMASTEIRDRRRTLRYRHLLVRQMVQMKNRISGLLLETGVSHNKQRLHKVGYFRELISKNEEVPESIRPLLRLSRETIVRCQKTDYALVSSLQRDPLLAERIQRLRTVPGVGPITALTWALEIGDVSRFRSIKHAISYCGLCGDEKSSADKQMRTPLSKQRNKHIQRVLVEAAKLAPRQDHDLAAVYEKEKQKGNANRATLAVARKMVAYLLAVDRAQRDFVASEKHGAAVA

SEQ ID NO: 496075 - protein, 356 aa, unidentified
MEYGAIDLHKQESQTRLVKENGEIGDYRIATTRERFTGLFWGRPRMRILLEASTESEWVAQHLESFGHEVIVADPNFTPMYSQRSRRIKTDRRDVAALAEACRRGYYRAAHRRSAAQRTVQCQLNIRRELTDSRTRAIALARAMTRGAGLRIRSGSSESFLTRLSALDLPSSIAATLSPLRNLITVLNEELTQADATFATLVADDPVVARLTTVPCIGPITASAYVAALDDASRFARAGQVTSYLGLVPGEYSSGEQQRRGRVVRSAHPPVQALLVQAAWRMSRSTDPRTAALRAWAQGIARRRGKKIAMVALARRIARILFAMWRDQAAYDDARIRLSRQVAAPRVDGATSAALR

SEQ ID NO: 496076 - protein, 339 aa, unidentified
MKLYGAFDLHSSNNYLAIIDEQDKRLFKKKLHNDPGIILGELERFRADITGLVVESTYNWYWLVDTLMAEGYQVHLANPSAIQKYKGLKYSDDNHDAFWLAHLLRLGILPEGYIYPKDERPIRDLLRKRGHLVQLRTSLINNLQDIITRNCGIKVSSNDIKRLREDLVSHYLADQEDLALSGSVSKDVIDYLAGKIRMIETAVQRKAMLRDPFHGLQTIPGIGKILSLTIMFETGAIERFPKVGNYSSYCRKVPVQWVSNSKSKGKGNKKNGNKYLAWAFSEAAEFCRRYDPHAKAFYNRKKAKKNFMVAHMALAGKLTRAAYYIIRDQVAYDPVKLFA

SEQ ID NO: 496077 - protein, 309 aa, unidentified
MTIASCFIGIDVSKGWLDCYIHPQARRYRLANDAKGHAALVELLERQGGLCVLEATGPYDRALRLHLHGAGQRFHRANPRKARQFARSAGFLAKTDRVDAMMLARYGAAMSLPDEEPCEPERQELRALMDRRDQLVEMRKSERIRLAEPHADWMKASLLQVIDMLDRQIAALQARMDALLASAHTLLQEEAILRSAPGIGPVTARVLLAHMPELGKRNRRAISALAGLAPIACDSGNLRGRRCIWGGRKRVRDALYMAALAACRSGPFQAIAKAMREKGKPAKLVLIAIARRLLVTLNAAIRDNKPVRT

SEQ ID NO: 496078 - protein, 368 aa, unidentified
MRQVILTEIFAKRKEPRMKEFIAFDSHKRYTLVELEDVGTTKTRQFRVEHAPGAIQGCLQGREKGTSVAVEATGNWYWIVDEIEQAGLQPKLVHPRKAKLMMGLINKTDKLDAHGLNQLQRNRTLPTVWIPPRELRDLRELTRTRMVLAAQRTRLKNRIQATLNKYGWILKDYSDPFGKKARVELNLCIDHLPSQTAYVTGVLMNQLDKLEEQIKAMEKRIRALAQETPAIKRLMTLPGIGWILAVVIALEIGEVLRFPSAEHLASYSGTTPRIHQSGDKTRYGRLRPDVNHYLRWAFIEAGHSVCLNQAVHPHRHVTRLYQRVRGRRGHSKAVGAVARHLAEATYHVWNTGEPYRDPALSKGQSREV

SEQ ID NO: 496079 - protein, 406 aa, unidentified
MFYLGIDVALNTHRLVILDANGERVSSGISFQNNTADFEKVLTKLKELFINPDNSIAGLEATGNNWENLYCFFTDKGFRVIVLNPHQTNKFREALRKKAKTDDIDAFVIAGLLRSNEFASSYVPEDKIQTLRELTKLRYEFIKDRKNYQRQTLALLNIIFPEYRKTALKNPFAIASIAIFKAFPTAKHLSKTLPKHIEKIVRSIKGNNFNIKEIENLISIAKTSVYSGRCQESRALTLNILLTQVENFDKSIRQLEEQTNQILSPESSDDINSFPGGNLLTIPGVGPKTLAAILSCVGESGQAFPDGVKLIGHIGFFPQIYESGETKRANKLSNKGPAYLRHALYIASVACIKHNLQLRKLYHDKLSQGKKPKQALICVAKKLAHLCLSMLHSGQDYNPARVFSYA

SEQ ID NO: 496080 - protein, 337 aa, unidentified
MTIHVGVDLHQRFCYCTAVKASGEVIAQRSVPNERESLQRFVRSLPGPVQVVVEACGFWPAFAKALGKEVARLVMVHPQRVKAIAAARLKNDKVDSATLAHLSRCDLLPEAWMADEATRQLRLQVRLRVTLGRQRSRLKNLLQGVLHQEGMRKPVSDVFGKRGRAWLAGLELSPAAHLVVHTYLPLIDELDRQIAAQERRLAALAAADPRARWLQTIPGIGAYSAMVILAEVGDVRRFASKRALASYAGLVPRVRESAGKRSYGAITRAGSETLRWIMLQVAQVAARHSPPARAYYQRLQRKKRPQVAKVALARKLLCAVWALLHHGVCYDEQVFAA

SEQ ID NO: 496081 - protein, 347 aa, unidentified
MRFYTRQHVHYCGIDLHARSLYVCILDQEGKTLVHRKLPCDREKLLETLAPYREDLAVAVECLFCWYWVADLCSEQGISFILGHALYMKAIHGGKTKNDRLDSYKIAALLRGGNLPYAYVYPRQMRATRDLLRRRLFFARKRGELLAHIQNTNTQYNLPALDERAGKTKDRGAIIEHFDDDTVQMSIAADVALLDSYDQVIRDMELYLLHEVRQDHNRDFFLLRSIPGIGEILSLTLLYEIHDLSRFPRVQDFLSYARLVKGTHESAGKTKKLAGGKMGNVHLKWAFSEAAALFLRGNSAGQKYFARLEKKHGKGKALSILAAKLGRAVYYMLLRSRPFELQRFVTT

SEQ ID NO: 496082 - protein, 339 aa, unidentified
MTNYIGMDAHPSICVFSVVDSKGVETAKFQTPTNGAALVEYIRSIKVTKQLVFEECELSAWLFEILHGEVDKLIVCNPARNVQYKRAKTDKLDAKNLALLLRGGYLTPIYHDGSKTEQLRLLISGYQDIVDTGVSLKNRYKSLFRKSGLPARGDKVYTDESLLKDLPRPDQRFVGHGLYRLIESTEAEREKYCAAIKSLNRRFREIKLLKDIPGIGEIQAAKILSQVITAERFKDKHKFWSYCGLVRYRQESAGKMCGNKRAWGNRVLKCVFKMAAKSALTGENEFRQLYDELREKGTNDRAARNAVSRKIAAIALSLLKHKSPYDKARVLSRDKEEAV

SEQ ID NO: 496083 - protein, 340 aa, unidentified
MGQVVTIGLDIAKSVFQVHGVDAEGVVVIRQKLTRARLLSFFAKLEPCLVGIEACGASHHWARELIKLGHEARLMPPSYVKPYLKRQKNDMADAEAICEAVTRPTMRFVPVKSPEQQGVMVLHRTRLILTRQRTQLSNAIRGHMAEFGLTAAIGREGLGKLIAVILDGDDDRLTKEARVCLAMLVDQLRLVNVQILENDRLIRTNARATEAGRRLMEIPGVGPLLASAMVAAVADPAAFKTGRNLAAWIGLVPRQNSSGGKERLGGITKQGDRYLRQLLVVGALAVVRYAQRNGTRRPWLVQLLARRTPKVAAVALANKNARMIWAIMTSGERYREPQPV

SEQ ID NO: 496084 - protein, 373 aa, unidentified
MQEFNKFIGLDVHKSTIAISIAPEDGGEVRYFGEIKNTKEALTNFANKISQGSLKLSFCYEAGGCGYEVYRLLRNIGHDCMVVAPSLIPRKAGQRVKTDRRDSLNLARLHRAGELTGVWVPDAMNEALRDLTRAREDMKHLQRQAKQRLIAFLLRHGWTYSGKSNWTKDHFNWLETVKFQHAAQQIVFQEYVDTVKYCGKRVESVTQQIEICSRESACWPVIESLMALKGIDLITAATIMAEIGDLTRFDSAPKLMSYLGLVPSEHSSGSSVRRGGITKTGNSHVRRVLVEAAWTYRFPARKTAHTQKRAKLTSDAVQEISWNAQKRLCQRYKELNANGKIKVQTCTAIARELAGFVWAIGQTVPLKQSANAQ

SEQ ID NO: 496085 - protein, 369 aa, unidentified
MKNGSTLRVGLDVHKESIAVAYAGEEGTEAVYVGEIGTRQCDIDAVIRKLQSKGAELMFVYEAGPCGYWLYRYLTGKGLTCFVVAPSLIPRKAGDRVKTDRRDAVMLARLARSGDLTPVYVPAVGDEAIRDLSRAREDALHDLNAARFRLKAFLLRNDIRYSGRANWSAEHVRWLARLVLPTPAQQIVFQEYVRTVSERTELLRRLESALLEQAKTWRLAPVVEALQALRGVQFTVAITTVAELGDLTRFDSPRQVMNYLGLTPSEYSSGERRRQGGITKMGNGHARRVLVEAAKAYRHRAKVSEQIQARQQHLPKAICDIAWRAQVRLCGRYKKLALRGKHANTIAAAIARELAGFMWAIAKAQATAA

SEQ ID NO: 496086 - protein, 400 aa, unidentified
MKVTFQTCCGVDVHKSFLVATIIKTSSGIEPSYQKKRFSTFNNSILEFKKWLLENECLYVCMESTGKYWIPVFNLLEDEINVTIANPKWVKSVKGNKDDTKDSKWIGDLFRLGLVRGSYIPCKKIRILREFTRYRYKLVSCRSSEKNRYQNALTVCNVALDSVVSDIFGKSSTSIIDYLLEQSGTSIDHEVIASKLLKHLKAKEDAVIESIEGYQMTDSQKYRMHLVRAHMDYVTAATNDVDSEIESLIAFDPDYENAVELLCTIPGVKYDSAITIISEIGIDMSQFCSSKRLCCWAGLTPGSNESAGKKKSDKSPYYKKKYESLVKRRGKKRAIIAIARMILTAIFQMLTTGETWNPCDLYKIDMPEALLEKQKQKAIKQAQKLLIREGLLPPTEPIAS

SEQ ID NO: 496087 - protein, 313 aa, unidentified
MISLGLDPHPGTHTVAALDENGASLAHLTVPNTPDGLIQLHEFGARFFSRRWAVEGAGNHFIAAFVAELLAASESVFSIPPSLTSQYRARRGRKKSDVIDAENVARALLANPKLPELHAVDYQRELQELTRTQRRLSDQLKASRGALQELTVESPVREVLQPVICILVDQLKVLERQIRLMVNNLMPGLLKVQGVGPIVAGVILAEAGDPKRFASANHFASYCGAAPVERGSRQNCRMQVNPGGNRRLNWALHIVAMVRLRMDGGRSKTFLEKCKLHGKSRRSALRALKTYIARELFSLLKHQIGANIASLPA

SEQ ID NO: 496088 - protein, 377 aa, unidentified
MKRIKFVGLDVHAETIAVAVAEQEGEIRSLGMIPNREESVRKVVKKLGPVEQLRFCYEAGVTGYALYWQLTRLGAKCEVVAPTLVPVKAGDRVKTDRRDALKLARNYRAGELTAVWVPDAEHEALRDLVRAREAAKKDQLRARHRLSKFLLRHGRRPPVGVALWTVKYLEWVKRDVHFAVKAQEATLLDYLHEVEHMAARIVRLDSAIEEAVKVAPAKMRAVIEGLQALRGIAKISAVTIVAELGEVTRFSKARELMGYAGIVASENSSGERQRRGSITKTGNAHLRRVVVEAAWAYRHRPAIGFTLRKRQEGLSEEVKEMAWKAQHRLHARYGKLMAKGKNKGVVVTAIGRELLGFIWAIGVQVEAQQKESLRQAA

SEQ ID NO: 496089 - protein, 355 aa, unidentified
MDSTKYIGMDVHKETISIAVLNSSGKLVMETIIETKASTVLEFVQGLRGSLHVTFEEGTWAAWLYDLLKPHVTEVLVCDPRKNALLKTGNKSDRIDARKLAELLYLNKLKPVYHGEHGVRTLKELSRSYLTISGDLARVMTRLQALYRSWAIACAGKQVYAPRYRSQWLGKISEAGVRRRAEFYYQPLDALRALRQQVRRELLAESGKHKASKLLCQIPSIGPIRAALLIAILQTPHRFRTKRQLWAYGGLGIETHSSADHRYVEGQLRPSKRPVSLRGLNRNHNHELKNIFKGAAIIAATKAGPFQEFYAALVAKGIRPEMARLTLARKIAAITLIVWKKGVSFDAQHLKPQTD

SEQ ID NO: 496090 - protein, 438 aa, unidentified
MSNKVIFNLDELFISVGIDVGADFSWMSIALPNQQFVGKPYKILHNSIDSLTTAVSKIKEAEELYSLESRIFLESTGIYHYPLFCYLRDKGFNCSVINPIITKNSTNINIRKVHNDRFDSKKAALVGLKPNLKVSLMPSDLALNCRNLCREYYDLMDNRSAYVNKLQGELRMAFPQYLGIFSKVTINTSLTLLGTYTSPSAFLEADKQEIIDIIKSTARFGLTYAQNKYNAIIQAATDANQFGYIIESNIKRIRLYISFIRKYDEEINDILESLHKLVDSNEDTKFVKQVHLIETFKGAGFLSAATIMGEIGDFSAFSKPKQLFAYFGLDPAVKQSGKFEGTKVQMSKRGSSIARRVIHTLSLQSISISRNGKAKNPVLREYYLQKCDSKPKLVAMGAVSHKVCNMIFAILRDNKPFEIITPQEHIKQYNAAKCDIAA

SEQ ID NO: 496091 - protein, 334 aa, unidentified
MENIALIGIDLGKNSFHIHCQDRRGKAVYRKKFTRPKLIEFLATCPATIIAMEACGGSHFMARKLEKLGHFPKLISPQFVRPFVKSNKNDFVDAEVICEAASRPSMRFVQPRTESQQAMRALHRVRESLVQDKVKTTNQMHAFLLEFGISVPRGAAVISRLSTILEDNSLPLYLSQLLLKLQQHYQYLVEQIKDLESQLKRKLDEDEIGQRLLSIPCVGTLTASTISTEIGDGKQYASSRDFAAATGLVPRQYSTGGRTTLLGISKRGNKKIRTLLVQCARVFIQKLEHQSGKLADWVRDLLCRKSNFVVTCALANKLARIAGALTARQQTYVA

SEQ ID NO: 496092 - protein, 397 aa, unidentified
MYIVGIDIAKRKHEAAVIDGEGTVIIKPFSFTNNCSGYNRLLAMLAKAKLPLDEVSFAMEATGHYWLALFTRLQKEGFRVQVINPVQTNSIRSFYIRQAKTDPRDALLIAEVIRFGHFSESTLHPENIYELRELCRGRHAIVSMQADVKRKVVALLDQVFPEYETAFTNLFGDTSMAILQTCPTPKELSEMPLEELCHLIEVSSRKRFRMVKAQELQELARNSFGFAMAGDVFSTMIRLYAKHLVFLKQQVQEMDRKIAEIMDTLDTPITTITGIGPTLGAYILSEIGDISRFSSAAKLAAYAGIDPTMRQSGEYNGVRNRMSKRGSPYLRHAIWLAASSAVLHDPALKLYFQKKRDEGKPYMASVGHACRKMVSIIYAVMRDNKAYTPYIPNEISA

SEQ ID NO: 496093 - protein, 350 aa, unidentified
MDNAWAGIDAGKEFHWARVVGIEGETLLSRKVENDEADLRKLIGEVLPLAEEITWATDQPGGTAALLLALLWERNQKVIYIPGLTVDRARDTYRGESKTDAQDAYVIADQARMRGDLSELQANEGELAELQLLISRRRDLVTDRSRTITRLREALLALFPALERTLDLNNSSALTLVAHYQTPTALRRAGYKRVATYLKNRGIKGADTLAKKALAAAESQSAVLPAQDVASAIVAELAREALVLKQRIERVDEELKHRFFIRPEASILTSLPGMGPVLGAEFLVAAGDLSAFSSADQLGRLRRASAGRPRLRQTGGQRPQDARRQQGSQTGLLPVGVRQFAYFACLQGLL

SEQ ID NO: 496094 - protein, 343 aa, unidentified
MQGVTTIGLDIAKSVFQVHGVDALGKMVIRRQLKRRYVLAFFQKLSPCLVGIEACASSHHWSRELKALGHNVRLMPPAYVKPYVKRQKNDAADAEAICEAVSRANMRFVATKTPEQQSCLMLHRTRHLFIRQQTAVINAIRSHLAEFGVVAPVGRRGVEELLDVVVDSNENRVPAVARACVGALGAQLRMLKAQILAFDRQIMAWHRSNETSKRLDEIPGVGPALATALVASVADPKAFRSGRNFSAWVGLVPKQHSSGGKDKLGSISKQGDRYLRSLFTAGALAVIRYAKIHGTKHRPWLTALLSRRPSKVAAIALANKIARMAWAMMAKGERYKEPAALAA

SEQ ID NO: 496095 - protein, 343 aa, unidentified
MLTITTIGLDIAKSVFQVHGVDAGGQAIIRRQLKRRYVLTFFQKLLPCLVGIEACASAHHWSRELQALGHTVRLMPPAYVKPYVKRQKNDATDAEAICEAVTRANMRFVPTKTPEQQSGLVLHRTRHLFIRQQTSVINAIRAHLAEFGIVAPVGRRGVEELLNVVADPNDRRVPEIARACLSALGAQLRKMKEQILEFDRLIRAWHRSNEMSMRLEEAPGVGPVLATALVAAVADPKSFRSGRNFSAWIGMVPKQHSSGGKNRLGNISKQGDRYLRGLFVAGALSVIRYAKIHGTKHRPWLTALLARRPTKVAAIALANKIARMVWAMMARGERYKEPVALAR

SEQ ID NO: 496096 - protein, 372 aa, unidentified
MTTTIDTRDVCCAALELSKTSWVCAFSAPGDSKATVHKIRPGDVNRLIDILNSSKEKAQCHLGRQLQIVLCYEVGYDGFWLARVLIARGIRTVVFDPASFLMPRRGRRAKTDRLDAEGMTRTLRTWLSGVQIPSVEQEDAKRIERERKYLVEERISIVGRIKGLLALHGIWLSGKRVGKGLRERLDTMRTGDGRPLAPFLRREIERMLRRYDFVSQQIEEVVADRKEALADNSGRFPQAEKVRRLTTLDAVGETTATVLVAEVYHRSFETRRHVASFVGLAPSPYRSGDTDRDRGISKAGTKLARQTLVELAWFWLRYQPNSWLSLWWHERFGDKGMRGRKVGIVALARKLAIALWRFVEEGVVPEGATLKV

SEQ ID NO: 496097 - protein, 440 aa, unidentified
MNEVNGIRLEEFRQLRREIRGSEEYLLVGIDVAKDKHHAFFGTATGKTLFKRLVFENNLEGFRRLLAQAEAMKVQNGLKRVVFGMEPTGNYHKPLGEHLIRCGHRVVLVSGVAAHEKRKTLDGRWDPNDTRDAANVADLVSQGKCLFYDFPVGALQDLRNLLSLKRRWKRIEQGHRVRVRNHLVAKYFPELDRYYDQSESTALAIVRWCLDPSEIAGLAYGEFTQRVSSRGRRSSQESRLETIWKMAVDSVGCKAGPAVEFEARIMVEGLKQVRERIREIDEKIQEICGQFPGYEYLLTIPGFGPDVSSKVLGAIGDPFRFRNGRQVLKMAGLDLSAERSGKTSANAIPVISKKGKGDLRYALYQAAFIASTRNVEFIRYYTDQLRGREREPGIKTKMRVKLSAKLLLIAWTLMKKGMPFQPGFLRGAAASFSAAEGRKP

SEQ ID NO: 496098 - protein, 343 aa, unidentified
MDIVVLGIDLGKNSCSLAGLDTSGRVVLRRRMRRSSVESFINGLGRSTVAMEACCGAHHLGRVFAAQGHSVRLMSPEYVRPYVKAQKNDELDAEAIAEAATRPTMRFVAVKSQYQSDVQALHRARERLVSERTALINHLRALLLERGIVAPQGRRKLQEELAVFADEDGIEALSPRIRLLIEDLRSEWRALDERIAAFDAEFVRMAREDEAVRRLTTIPGIGTINATALAAAVGNARAFRRGRDMAAWLGLTPRQMTTGGKPRLLGISKRGNRYLRKNLIHGARAVLPYLVERETPLGRWARGLLARAHKNVVVVALANKLARIAWAVLARGCTYEAAGEAAA

SEQ ID NO: 496099 - protein, 339 aa, unidentified
MFYSGIDQHKRDSFITTYGPDGEVVNQKRVPNTLMLIKRYFSELPGPHKAVVESTGSWYWLADLLENLGIDLSLAHATRLKAISEAKVKTNKIDSDVLAMLLYADIIPEAHMIRPEMRGRRDLMRTRLRLVEKSTSCKNSIERLLEKFNLHDVTELDELYRLLAACHEAQIELLQDQIKTLEAALHPDLIPNEDVQRLLSIPGIGKVNAFTIYTEIDGIERFPSPSQFFSYCRLVPGAANTGTRTRHRSGSKQGNRYLKLAFGHAAVRAMQYYPEIRAYYRTKRRKKPERVARTLVALEIARIVYHVLSRQEDFNGLFKGQPLSRTKQSRWPRLASPSA

SEQ ID NO: 496100 - protein, 402 aa, unidentified
MYNAVGIDVSKGKSTVAVLQPAGVIIRKPFNVNHTSSELDELAKYIGSLEGETRVVLECTGRYHEPVVKTLSEAGLFVSAVNPHLIKNFGNNSIRKVKSDPADAKKIARYTLDNWIELRQYSSMDNTRTQLKTLNSQFSFFMKQKVAAKANLIALLDNTYPGVNKLFDSPVRDDGSEKWVDYAYSFWHVDCVRKIGLKTFTERYQAFCKKHHYNFQPAKPAELFLASKDLIAVFPKEASYKLLIQQSIQQLNLASSHVEELRSKMNELASTLPEYATVMGMYGVGKTFGPQLIAEIGDISNFSHREALTAFAGVDPGVDQSGTHNSKSNKASKCGSNRLRKTLFQIMSTLLQTAPEDDKIYQFLVKKRAEGKPYYVYMTAGANKFLRIYYGKVKECIRNLEQ

SEQ ID NO: 496101 - protein, 395 aa, unidentified
MSEQGRVVIGMDPHKRSVTIEVMTADEGVVGGGRFATDVEGYRQLLSYVASWSERVWAIEGCRGIGRHIAHRLIADDQEVVDVPPKLSARARVFSTGQGRKTDATDAHSVALVGVRMAGLRPVVADADLDVLRLLVDRRRQMGAEHTRKVSQLHALLLELIPGGAKKSLTAAQARKLLTALRPRDVTGKTRKRVAAELVGDLERIYARKRAADKELRELVAATGTGLLDLHGIGPQGAARLLVEVGDITRFPDRNHFASWTGTAPIDASSGDHVRHRLSRGGNRQINRALHMMATVQLRNATDGRHYYDHKKATGKSSMEAMRCLKRRLSDTVYRTMLSDVAHHAAHRAGTGPGGQRGNDSDSSAAGSQPQHRLFGQATPGPVNDQPKPALPKVS

SEQ ID NO: 496102 - protein, 421 aa, unidentified
MKTIMLLNDRTRAGQPETRWDIAVDVGQKALDWYGEAAGKAHQGHIANRSEAILACLEQLKAEALRLGFSGVRIICEPTGGYERRMLRAARQLGCATALVNGEAVNKMQVVESNDTGKSDTKDPRTILLLAKWNKTLTDRPLADEWLLLRELNARYDRLERDSTRCKNRIHKLLLSVFPDLSFKKDWLFDSRAAEAVVELYGLNAAALIADGRERCTSKLRRRHLGPKTIGRLWADAQRTMLIPADPAWLALLADDVRALFAELAVLRTRRLATREHMIALVERLHARGATRLQAHPDLISPFMLARVLAETGPLQDFSNFRQLWRYGGLNLRPHQSGAMQGQPRQAKRGRARLRHVLAQAILKRVVHGQLYGEYYHRKRDAGMGGGKAMTAVARKFLKLLYGLEHSETAFNPQRVFQPAA

SEQ ID NO: 496103 - protein, 327 aa, unidentified
MRYLGMDVAKAKLDCLLLNENGDKGKSKSVANSRTGIADFLVWIGKQHISPNELHVVMEGTGVYHEQAALALADAGVTVSIANPAQVKNFGRGLAVRTKTDGVDSLVLARYGALLKPAAWIPPAPEARMLQALLARREAIAQDLQRERNRQEKADATDTPELIRKSLEDSIGFLVKQLTQLQQDIDDHIDKHPNLEKDMSLLQSIPGVGPQVGGNMLSVLNSHHFESAEQLAAYLGLVPVERQSGSSVLGRARLSKAGPARIRAVLYMAAVVAKSCNPHVKAVYDRLLARGKTKMSALGAAMRKLVHLCFGVIKTQQPYQYDYSKNA

SEQ ID NO: 496104 - protein, 366 aa, unidentified
MLIIGVDYHPSFQQMAFLDQETGECDERRLNRGDGEAEKYFRDLKQRGVSVRVGLEATGYSRWFERLLAELGFEVWIGDAAEIKKLRVRKQKTDREDARLMRKLLLENRFPRIWVPSPENRDVRQLLLHRHRLVGMRTRVMNQLQAIAMNEGLRRKSGLWSKKGRARLESLSLAPWASRRRQELLDLLDRLSPMIDELSKAIEQEAERRPEVQLLMTHPGVGPITALAFVLIIGTPERFHCGRQIASYLGVIPCEDSSADHWRLGHISKQGNALMRFLLVEAAQTVARCESEWRQHYFHLLLRRGRAIAKVALARKLAVRLFWMWRKGQDYQQVKKFGSDAGQLETPNGVKSITVKLMERPAPSMA

SEQ ID NO: 496105 - protein, 370 aa, unidentified
MLDTTTFVGLDVHARSIKAVSLDVMTGEVRAATFGYDAGAVAEWVRSVDPGARCVYESGVTGFDLQKRLSGLGVDCVVGAVSKMIKPSADRRRKNDRNDAEFLARMLSVGNVVEVWVPDDECEAARDLTRALEDARDDLSRSKQRLSKFLLRHGLVFDERTPTGRRKGNWTRAHWSWIESIRFAEGADNEALAYYVDAVRRAAEEKARLEGLVEAEARKPRWRKRVDSLRCLKGVDTATAADLVFEAGEFSRFGNARSFAAWVGLTPSEHSSGESDRRGAITKAGNKHLRKALVEAAWHYLTCSGRPKDLARGQAPDRVARRHAAKGVRRPVERREALLARGVHNNKANVATARELACWVWAVGLMAEEA

SEQ ID NO: 496106 - protein, 413 aa, unidentified
MTEEIFGWFVGVDWGSEKHQVCILDQHGTIVGERNFPHGGAGLAELGDWLLSVAGTATAVAVGIEVPHGPVVDSLIDRGFVVHAINPKQLDRLRDRFSVAGAKDDRRDGYVLADSVRTDRRLFRGLHVADPRLVALRAWSRLAEELTEERVRLGNRVHHELWRYYPEMTKLTDDIAASWFLELWTIAPTPAKARQLRKARVGQLLKQHRIRRIDAETVIRTLREPAIKVADGVAEAASVHMRSLIARLHVVNRELREAERQLDKICAEIGAAEAASGDGLQRQDVMILKSMPGIGRINLAALLSEGSGPLSRRDYPALRTLCGAAPVTRRSGKSQVVIMRYAAHVRLRNTVYHWARVASQHDPTSKSRYAALRQRGHSHGRALRGVADRLLGLACVLLQRQTPFDPQYGHPAT

SEQ ID NO: 496107 - protein, 321 aa, unidentified
METINFEQVINRGYGIDVHKKTVVATIDGEGLKRSTREDATFTSSLTELKDWLLENGITHVAMESTGVYWKPVYHILEPSGIKVWIVNARHVKNVPGHKTDKKDSDWLCKLLLAGLLKPSYIPPKEQRELRDLTRYRKKLIQDIASNKNRIIRILEDCNVKLSSVLSDTSGVLSNKLINKLCDGKPITMSDIDEVYHKKIAATKQELWEACNGIVSEHHIYLLQTIRVNSRHIESLIHELNGKIKKMLLPYENALELLQEIPGLSRKTVEDLIAEIGLDMEVFPTEEHLCSWAGISPGNNESAGKKKVDGQLTGINKQNPH

SEQ ID NO: 496108 - protein, 358 aa, unidentified
MLNLRKELNFEGQNIYVGIDVHKKSWSVAVVSESLLLKKFRQDPFPDALHKFLITNYPGAVYHSVYEAGFCGFWIHYRFTELGINNIVVNPCDVPTMSKEKLRKTDAVDCYKLARGLRAGDLQGIYVPDAQNLEIRSLIRLRRSIVKDSTREKNRIKALLHFYGIQIPEQFNSPQSYWSRCFIKWLQQIELSTEYGRKTLDMHLDKHLYLRGLLLRETRAIRELSCGEAFKEPLRLLMSIPGVGITTAISFLTEIDDISRFRNADQLAAYVGLIPMCHSSGEKENNGDITVRKQTILRCSIVEASWKAISKDPALTMAYERYCKRMNANKAIVKIARKLVNRIFFVLKRKQEYVPCIV

SEQ ID NO: 496109 - protein, 323 aa, unidentified
MIIIGCDYHPGFQQIAFVDTETGDYGEQRLAHSEGAEKFYRDLAAQGKKVRVGMEASGHARWFERLLAEVNFELWIGDASEIARKRERKQKTDRQDAQHILQLLMENRFPKIWVPSGANRDLRQLLWHRHRMVQARTRIMNQLQAVALNEGLRCKKKLWRENGRKQLEAFRLAPWASRRREDLLQLLDRLNPTIGDLTQAIEQEVEKCPEAGRLRTHPGVGALTALAFVLIIGRTERFQCGKQIAAYLGLVPLEDSSGNRRRLGHITKQGSSILRFLLVEAAQVTARSIPEWRNKYVYLTMRRGRKIAKVAMARRLAIALYWM

SEQ ID NO: 496110 - protein, 397 aa, unidentified
MYIVGIDIAKRKHEAAVIDGEGAVIIKPFSFTNNCSGYNRLLAMLTKAKLPLDEVSFAMEATGHYWLALFTRLQKEGFRVQVINPVQTNSIRSFYIRQAKTDPRDALLIAEVIRFGHFSESTLHPENIYELRELCHGRHAIVSMQADVKRKVIALLDQVFPEYETAFTNMFSDTSMAILQNCPTPKELSEMPLEELCHLIEVSSRKRFRMVKAQELQELARNSFGFAMAGDVFSTMIRLYAKHLVFLKQQVQEMDRKIAEIMDTLDTPITTITGIGPTLGAYILSEIGDISRFSSAAKLAAYAGIDPTMRQSGEYNGVRNRMSKRGSPYLRHAIWLAASSAVLHDPALKLYFQKKRDEGKPYMASVGHACRKMVSIIYAVMRDNKAYTPYIPNEISA

SEQ ID NO: 496111 - protein, 345 aa, unidentified
MVILKQVLGVDVAQKELVVSLGKMFSDFSIEIYAHNIFKNSEKGMDELLQWVKKLTLDDSKVFYVMEATGVYHERFAYFLDENSCDLSIVMPNKISNYMRTLDIKTVTDKSCSAAITQFGLERKLTLWKKPNKIYKNLKQLTRERDQIVEARAVIKNQLHAEKSEVYPIKNTIKRCEAHIKFLNKQESQILKEIEGVKDQEIKNKIAKITTIPGVGVLTATIILAETNGFELIKNKKQLTSYAGLDIKEKQSGTSIKGKPKISKKGNKSIRRAMHFPALSAIRHDENYKKIYANLVSRSGIKMKGVVAVQRKILELIYVIYKNDTNYDIDYEKKKREQHAMDTLA

SEQ ID NO: 496112 - protein, 334 aa, unidentified
MENIALIGIDLGKNSFHIHCQDHRGKAVYRKKFNRPKLIEFLATCPATTIAMEACGGSHFMARKLAELGHFPKLISPQFVRPFVKSNKNDFVDAEAICEAASRPSMRFVQPRTESQQAMRALHRVRESLVQDKVKTTNQMHAFLLEFGISVPRGAAVISRLSTLLEDSSLPLYLSQLLLKLQQHYHYLVEQIKDLESQLKRKLDEDEVGQRLLSIPCVGTLTASTISTEIGDGKQYASSRDFAAATGLVPRQYSTGGRTTLLGISKRGNKKIRTLLVQCARVFIQKLEHQSGKLADWVRELLCRKSNFVVTCALANKLARIARALTARQQTYEA

SEQ ID NO: 496113 - protein, 340 aa, unidentified
MNFTTYGLDIAKRVFQLYWVTHESGEIHNCKFSKQELLEFFAQREAGLIAIEACGSAHWWRRKLMALGHEVKLIHAKFVRPFVQGNKTDAADAKAIWTTVRQPGMRMVAGKTEDQQALLALHRMRLSLIKFRTMQVNQLRGLLYEFGVTLKGGRQAGLSEIQQRMTELEGIVPGVLFEAVKEQLNRLDEIEADVKNIERRIKDWQKQQAACRKIAEIPGVGMLTATALVATMGEADSFKSGREFAAFVGLVPRQSGTGGKIKLLGISKRGDTYLRTLLIHGARAVMFNAKDKGAWSEALLQRRPTNVAIVAMANKMARTAWAILAHDREYQKGYVSQVLT

SEQ ID NO: 496114 - protein, 364 aa, unidentified
MRWSPSTSSHGLEPCLIYSINVKVKTIAQNKIIGIDLAKSIFFLFEINHKGKNISRKKLPRSKLLNYIAQQNECTISMEACSSAHYWAREFSKLGHQVMLFPPQHVKSQPHKQKNDYNDAEAIAEITLYQRHHPVPHKSIEQQDIQSVIKMRKLLITERTRLINQVRGLLSEYGIIIPKGKTAFGKAIPSILEDAENQLSSMLRELIYHQHERYNYINEQVSWFDNKLNHTIEHFDNAKLLTSIPGFGPLTSQAVAVWMGSGQQFKTGRDASAAMGLVPKQNSTGGKTTLLVITKQGNTYIRSLLVHGARAALRRAKFKSDKLSLWAVDIEKRRGANRAAVALANKLMRIAWAVISKSEEYKPA

SEQ ID NO: 496115 - protein, 321 aa, unidentified
MSTTNPRRARPVVGIDVSKARLDVCLLPEGETFAVANDQEGIESLLQRLREAHPELVVLEASGKYERPAAAAIAACGVAVAVVNPRQARDFAKSTGRLAKTDRIDAEILARFAAAVGPRPSVLPGEEARALQAILARRRQIVEMLVAEKNRLRVAPSSVAKRIRAHVEWLQKELEHTDGELDEAVEASTVWKENEALLRSVPGVGPVLARTLLAELPELGTLPHKRLSSLVGVAPFNRDSGAFRGKREVWGGRASVRAALYMGALVATRHNPVLKEFYGRLLAAGKPKKVALVACMRKLLSILNAVLRDRAPYHPTHLLTP

SEQ ID NO: 496116 - protein, 344 aa, unidentified
MDHFAGLDVSVKETSVCILDDAGKIVKEVKVASEPQALLKVLGNPAYHFKRIGLEAGPLSQWLFSALAEAELPVICVETRHMQAVLKAQINKTDRNDARGIAQMMRVGVYRPVHVKTLRSQKLRMLLTHRKLLQSKAIAIENDLRGTLRNFGLKVGMVGKVRFEGRIQELVETIPDLAILVEPLLVVRRALREQIIILHRRLLAIVRDDEVCRRLMTTPGVGPVVALTYRATVDVPARFRKSKSVGAVFGLTSSRYQSGEIDWSGRISRCGDEMMRVMLYEAAQSMLHSKKWSWLKAWAMQIARRRGMKKAIVALARRLAVIMHRIWIDGTEFRWTREPTAAAA

SEQ ID NO: 496117 - protein, 386 aa, unidentified
MHKLNDLSRSLTPLDSYGTLIAVVEMSQLSWLVAGIVPGVERLPLKKLKVDECTLLKLLHRWREEAEKAGHRIQRICVALEAGRDGFWLARWLRARDIEAHVIHASSVAVSREHRRAKTDRLDTELLKRAFLGWLRGERDHCKMVVIPTIKDEDAKRPNRERESLVGEQNRIINRMKATLTRLGIRGFNPKLKKAAERLEGLRTAEGEPIPPNTLAELHRDMVRRRLVSDQIRQIEDARLERLKQAPSAGPHAMVRLLARVIGIGIETADMLVQEVLRRNMRDRRAVARYAGLTGSPDESGTNRREKGLARSGNARVRRGMIQLAWRFLMFQKNSVLVQWFRTRTENARGTRKPMIVALARKLLIALWRLVQEGVVPEGIVLRPAQ

SEQ ID NO: 496118 - protein, 438 aa, unidentified
MSNKVFFNLDDLFISVGIDVGADFSWMSIALPNQQFVGKPYKILHNSIDSLTTAVSKIKEAEELYSLESRIFLESTGIYHYPLFCYLRDKGFNCSVINPIITKNSTNINIRKVHNDRFDSKKAALVGLKPDLKVSLMPSDLALNCRNLCREYYDLIDNRSAYVNKLQGELRMVFPQYLGIFSKVTINTSLTLLETYTSPSAFLKADKQEIIDIIKSTARFGLTYAQNKYNAIIQAATDANQFGYIIDSNIKRIRLYISFIRKYDEEINNILESLHELVDANEDADFVKQIHLIETFKGAGFLSAVSIMGEIGDFSAFSKPKQLFAYFGLDPAVKQSGKFEGTKVQMSKRGSAIARRVIHTLTLQSISISRNGEAKNPVLREYYLKKCDSKPKLVAMGTVSHKVCNMIFAILRDNKPFKIIAPQEHIKQYNAAKCDIAA

SEQ ID NO: 496119 - protein, 389 aa, unidentified
MIYVGIDVAKDKHDCSILGTDAEELYPVFTITNNREGFDELFEAIAETGADISEIKVGLEATGHYSYNLLGSLLDAGLTTYVINPLHTNLYRKGQSLRKTKTDKVDARSIAMMLITDRTLKPYSSTSYHNEELKSLSRYRFELVRRRARLKTAVSRLINILFPELENLVPTIHMSSIYALLIEMPGASQIAACHMTHLKHLLYTASKGHYGDEMADIIREAARSSIGSITPAKSLELKHTIKQIQALDTDIAEIESSIDVIMDSIGTPITTIPGLKNRMGAMIIAEVGDFSRFDNADKILAYAGLSPSTYQSGQLESSYSHMEKRGSRYLRYAIINATKFVCMYTPEFRNYLSKKRAEGKHYNVAISHAAKKLVRTIYRMEMTGEAYRG

SEQ ID NO: 496120 - protein, 366 aa, unidentified
MEKGITVVGLDAHKVAVNVCMLVPGGAAPVVWECPNEKAAVRRMVRKVQHQAPGEVRMCYEAGPCGYALQRWIKDGGAECVVVAPSLIPRKPGDRIKTDRRDARKLAELFRAGLLTEVHPPTQEDEAVRDLCRAREDAHEDMVRARHRVSKFVLRRGWSWQGGKRAWSQGHRLWLRSLRFEHREDQVVLDDYLLALEQVEARLRALDDQIEQVSQEERFAPVVGRLRAFRGIDTLTAMTLIAELHDFMRFDSARGLMAFLGLVPSEHSSGGKEQRGQITKAGNGHVRRLLIEAAWHYRHRPSVASLKKRREGVPTAVIALADKAMTRLHRRFNRFLERGKARPKIAVAIARELTGFVWAAMRFRTA

SEQ ID NO: 496121 - protein, 342 aa, unidentified
MQISTIGLDIAKNVFQVHGIDAAEKVVVRKRLRRRQVLEFFKALPPCLIGMEACATAHYWARELTKLGHRVRLMPAKDVKAYVKRNKNDTADAEAICEAVRRPTMRFVQIKSAEQQGRLMLHRTRDLLMRQRTQVINALRAHLAELGIVAAQGREGIKELLNIVASEHDARLPVDAHTSLVVLAAALRAMQTLIGSIEKRIMAQQRGNEASQRLESIPGIGVIGATAIAATVPDPKVFRSGRDFAAWIGIVPREDSTGGKQKLGPISKQGDRYLRRILVVGACAVLRYARHRPEKYPWLTQLLARKPFKVVAVALANKMARTAWALLAKGGTYRAPALAAAA

SEQ ID NO: 496122 - protein, 368 aa, unidentified
MSNNVLYVGLDVHKNSIDVALAEAGGEIRHYGSIGGELKDLEKVIRKLHSKGSELHFAYEAGPCGYQIFRFLKDKNYPCLVAAPALIPRRPGDRIKCDRRDALNLARLFRAGELTAVRVPDADDEAMRDLTRAREDAISVERRAKQRTAAFLLRHGRRYPGKTTWSRGHWSWLLQQVLEHPAQQIVLQEYLDAVRVAGVRVQRLTDQIRELVPQWRRAPFVKAYQALRGVSLIVATTVVAEVGDLSRFHNPKELMAYLGLVPSEHSSGASVRRGRITKTGNGHARRVLVEAAWAYRLRARVSRTLFKRQEDLPESIRQIAWKAQVRLCARYRRLLAQGKSKQTIVTAIARELAAFIWAIGQAVVPVTA

SEQ ID NO: 496123 - protein, 408 aa, unidentified
MEQIHDRVAGLDVHRDSVTACFRQAGPRGGVVREKDRFATTTIGLRGLAGWLADRGVGLVAMEATGVYWKPVFYALEDQFTLWLCNARNVKKVPGRKTDLSDAEWLADVAAHGMVRPSFVPPPPIRELRELTRYRKTQIDARVSEIQRLEKVLQDAGIKLTSVASKVLTQSGRAMIEALIAGERDGAVLAELAKGKMRPKISELTEALTGHFGDHHAVAAHRILGHLDFLDTTISALSVEIDARTASFESVYNLLLPVPGFERSTIDVIIAETGADMGRFPSAGDLASWAGLCPGNYESAGKRRRVGTTQGNQWLRRALIQAAHAAARTKGSYFGAQYRQIAKRRGPNKAAVAVAHSLIDLIWHLLRTGETFQDLGDDYFRCRHDPERQARRLVSQLEELGFTVTIAA

SEQ ID NO: 496124 - protein, 310 aa, unidentified
MNTVGIDIAKLHFDLHLLPEGTAARYDNNAQGIQDCRLFLAQAKPERILLEATGGYETALVLELQAVGMPIVVINPRRVRDYARAAGQLAKTDRIDARILAEFAATSLVVVRELPDAQTRQRRALVARRDQLVDLHVAESNRLEHARDAFIQKSLRAILTAIEKQIAGVDRQLAKLIAADETLQRKVEILDSAPGIATASAAMLVTQLPELGKVNRHQITALVGLAPLNRDSGQFRGKRMTGGGRGKVRTALYMPTLAAIRCNPKIRTFYNRLVQNGKPKMAALIAAMRKLLTILNTLVKNNQTWDANLT

SEQ ID NO: 496125 - protein, 394 aa, unidentified
MKLVGIDIGKHKHFVSIVDKLTGEIILQPVAFSNNAQGFEFLISQIAIYPVDSVLIGMEDTGHYHFALLRFLLQKNYNVALINPKTTDLNRRIDGGITKNDKLDTLNICDILSSNKLKKPYRLTSSKKFDLYEQKQLTRLHHSLKEQINVLSNRLQKCLDLVFPEYNTLFKSRYTKVYMSILKQFGSAKAIAHADIRTLRKCFEMTGRGNRISLTAEKLQESAKTSVGISSLTDEMQIKHLIAHIELLNDQLKEIDKKIEEFSTDLNSPIISVPGISHFSGTSILAEYGDIFNYSKPSKIIKAAGVAPFHYESSQYEAKHSAITKQGSSYLRKTLYQVIVPVIRFNKVFRDYYDLKRSQGKSHRCAQGHCIRKLLRVIYHLVTTNQQFDASLLR

SEQ ID NO: 496126 - protein, 352 aa, unidentified
MAKRTRVVIGGVDTHGRTHHAAVVDQHGRLRADAEFPAHTDGYRQLLGWLRRHGQLLSVGVEGTGTYGAGLTRFLLGHGVQVLEADRPDRKTRRQRGKSDPIDAEAAARAVLAGTATALPKRRDGIVEAIRVLRSVRAGAVKARTAAINQLKGVVVTAPALVREPLDGQSTAQQVAACARLRPDPEQLADPAQATKAALRALALRILALEQEIKVADQRLGELVPKAAPRTLGLLAIGVEHAGQLLVTAGDNPERLRGEAAFAHLCGAAPIPASSGRTQRHRLHRGGDRNANCALHLAVVVRMRYCLRTRAYVERRTKEGLSKPEIMRCLKRYLAREVYHAIQADFAALNAT

SEQ ID NO: 496127 - protein, 402 aa, unidentified
MNAVGIDVSKGKSMVAIMRPFGEIVYIPFAIKHTTSDINSLVELINSVEGESRIVMEHTGRYYEVLAHQLSEANLFVSTINPKLIKDFDNDSLRKVKSDKADAVKIARYALDKWQNLKQYSVMDELRNQLKTMNRQFGFYIKHKTAMKNNLIGILDQTYPGVNTYFDSPARSDGSQKWVDFASTYWHVDCVRKMSLNAFIDHYQNWCKRKKYNFSQSKAEEIYGKAKELVPVLPKDAITKLIIKQAVDQLNSASTTVESLRTLMNETASKLPEYPVVMAMKGVGTSLGPQLMAEIGDVSRFTHKSAITAFAGVDPGVNESGTYEQKSVPTSKRGSADLRKTLFQVMDVLIKTHPQDDPVYQFLDKKRAQGKPYYVYMTAGANKFLRIYYGRVKEYLSSLPES

SEQ ID NO: 496128 - protein, 394 aa, unidentified
MRFVGIDIGAERHTVAVVDAAGTIVVAPTAFEEDAAGYQVLHELLGAAADTLIVLEATGHYWQNLFAVLTGAGFGVALLNPLRTHRFAGEDLARTKTDAIDALQLARFAAQKRPAVTRLPDAATRELRELVRLRDRWVGELGDHVRQLHRLVDLGFPEFTRCVRQLDSALATTLLRAYPTAVAFRGVRRGRLAALCYDGRHTVGRRLAEALLAAAAASVGQHHGAAYALQVRALCADIDVLRRRLRQLEGDIETLLTQHDVGTLLTTIDGIGTQTAARLVAELGDPAAFRDAGALAAYVGVVPALRHSGKHTPLRAGLTPIGHARLRRALWMPTLVAVQRNPWLRAYYQRLRARGKLPKVALIAAMRKLLIAVYYVAKHRRPFIPRVPAATAST

SEQ ID NO: 496129 - protein, 324 aa, unidentified
MIDGILGIDVCKNTLDVSISSYTKVRTKSFTNSPDGWRHLLDWLIAQKIQRVHACLESTGRYSLGIACALYEADHVVSIINPAQIRDFVRTKLGRNKTDGVDASHIREYCELFKPSPWAPPSEAHRRLGELQTIRSGIIAGLTEWKNRKNSGIVDAEAQALADATISHFTSQLGAVDKAIALTIDNDCDLRSKRDLLLSISGVGETLAGVVLAELPGPDVLRSSAEVVAYAGLNPRQHQSGTSIDRATRISKIGNAVLRAALYMPALSAMRYNSAIVALVTRLKSRGRLKPKQIVVAAMRKLLVLCFGVLKTGRPFDAAIAMGG

SEQ ID NO: 496130 - protein, 460 aa, unidentified
MNPKRSKSRNSSKMPMVHPNAAAIDVGATMHMAAVRADRAPEPVRSFGTFTADLHRLVYWFTECGVETVVMESTSVYWIPIFELLDARGFTVFLVNARDAKHVPGRKTDVSDAQWLQRLHSFGLLRASFRPKGQIAELRAYVRQRERLLEYAASHIQHMQKALTEMNLQLHHVVADITGATGLRIIRAILAGERDPEALACLRHYSCHSSAETIAKALTGSYRAEHLFALEQALALYDAYHEKASACDVRIEAVLKELSIHRGHGHGSAPRASRRRNRTDQANALAFDVREALFALLGKDITTIDGLGPYLSLKLIAECGDDLSSWPSAKHFTSWLGLAPSNKVSGGKMLSSRTRRSGGRAAALLRLAAVTVGRTDTALGAFYRRLSARIGKAKAVTATARKIAVLFYNAVRYGMDYVDPGASSYETRYRTRVVNNLHRRAKAFGFVLQPLEPKVGAAVS

SEQ ID NO: 496131 - protein, 451 aa, unidentified
MAKTKKRKQRKLDRSLPAMRPNAGGIDIGATEIFVAVPADRDTESVRSFPTFTEDLHALADWLQQCRVDTVAMESTGVYWIPLFQILEARNIEVHLVNAQHVHHVPGRKSDVLDCQWLQYLHSVGLLRASFRPEQAVCEIRSLMRHRENLVQMACVHVQHMHKSLDQMNLQIHHVISDITGVTGLAIVDAIVAGITDPKELAKLRDHRIKASIATVKKSLVGDYRPEHIFTLKQSVTAYRQSQQLIADCDREIQQRVQTFETKDDHPSPANDSSSATTPPPSSFDLRNHLKRIFGVDLTLIPGFDSLRVETIFSETGADLSSKFPNDDRFCSWVNLCPKDGTSAGRRIRGPKMKTENRVNQEFRMAAQCLHNNKSYLGDYYRSQRARYGALKAIKNTAHKLARIFYHVVTTRQPYDETVFAKLEARNQKRRLHNLQTRARQMGYTLVEAHA

SEQ ID NO: 496132 - protein, 317 aa, unidentified
MYCIGIDVSKQELVTYDGERRRAFPNTADLEELAAFLEEKDAEVTVVFEPTSTYSRPLELLCRTRKVRCWCLNPRVIPHLREVSQGRSKTDRTDAELLWQYGQDHGPGQLLGEDNLGRTLKACLSYVQAQKARVACQELLEALSHDPTTPTGLIEDLREETKRLKAREKRELAHAQTLIKKDERAREGFANLLEIPGIGRAAATVLVALFRKIPGTNRKEIVALVGMDPAEHRSGSSVHGRARIEGRGDGFVRKTLYEATLAAVRYNPTVRALYRRLKEKGKPEKVARVAAARKLLLIAHAVYYSGQSYHVPEPSGG

SEQ ID NO: 496133 - protein, 347 aa, unidentified
MRIIGCDYHPSWQQISWVDTLTGETEERKLDHASGEAEKFYRQLAGPAVIGMESTGNCQWFVEMATTAGHEVWIGDAAKIRASEVRQQKNDRRDAALILKLLMEGRFPRIWTPSGEQKDLRQLLIHRHKLVRIRVQVKNELQHLAMNQGVTRAGKLWSKAGEKVLRELPLKPWASRRRQDLFKIKEMLNGQIDLLDQAVMEAAQKNEKARLLMTQPGVGLITSMAFVLTMGDVSRFPRGKQVASYLGLIPREYSSGGHQRFGPISKQGNGFLRMLLVEAAQVAVRCDPQMRQEYLHRCHRNKAKGIAKVAAARKLAIRLYWMLRTNQAYPEVVRVESSPRVPVVGAS

SEQ ID NO: 496134 - protein, 370 aa, unidentified
MLDTTTFVGLDVHARSIKAVSLDVMTGEVRCATFGYDAGAVAEWVRSVDPKAKCVYESGVTGFDLQKRLSGLGVDCVVGAVSKMIKPSADRRRKNDRNDAEFLARMLSVGNVVEVWVPDDECEAARDLTRALEDARDDLSRSKQRLSKFLLRHGLVFDERTPTGRRKGNWTRAHWSWIESIRFAEGADNDVLAYYVDAVRRAAEEKARLEGLVEAEARKPRWRRRVDSLRCLKGVDTATAADLVFEAGEFSRFRNARSFAAWVGLTPSEHSSGESDRRGAITKAGNKHLRKALVEAAWHYLTCSGRPKDLAKGQAPDRVARRHAVKGVRRLVERREALLARGVHNNKANVATARELACWVWAVGLMAEEA

SEQ ID NO: 496135 - protein, 338 aa, unidentified
MALYCGIDLHSRDCWLAILDDGLKVVQEAKVGNDMEALLKVLEPYREDMKGVAVESTFNWYWLVDGLADAGYRMHLTNTWAVKQWEGLKYSDDRHDARWLAHLLALGILPEGYIYPKHERPVRDLLRRRSFLVKKRTSFLLAMRGAFECRTGMRTTSNEVKHWTCEEVESHLDDPLAALGITCLLEPMRALNDQIRIIEKETLKRARLRDEFAPLLTVWGIGKILALTTMYEVGEIARFKKVGNFASYCRLVKSARLSAGKRKGSGNPRNGNPYLSWTFSEAAHYAVRYYPPAKKYFQRKMSKTNGIIAIRALAHKLARAAYYVMKDQVEFDPDKIFG

SEQ ID NO: 496136 - protein, 377 aa, unidentified
MDKIINKCIKEANIDSTSLSRKYDHYIALDWSKRNMAIARMTEHSVKAKVTDVPSDIKELKVYLKNLSGTKILAIEESTSTQWLYVELYDYVNKIFICDPYRNKLLSDGPKNDPIDARKLCLLLRNGLLKEVFHSTDKIFELRKYVSAYNDIVKSGVRLKNQHSAFLAQEGKDKKCKDKSSSQTTGFIMNVLEESIEQYEKNRKQYWELFGKLCRKEQALKNLQTIPGVGNILAVQILAAVIDAKRFPKAGGYLAYCGLVKHMAVSGGRIYGKRNPRYNRTLKSAYKTAASVAIQGSGPIREYYDYLLGKGIAENNARNAVARYIAKASIGILKHNQPFNPYLWRAKKKQIVLADAGSSGDQIKDNKKRKLKKMAIK

SEQ ID NO: 496137 - protein, 371 aa, unidentified
MKKPNKRTPSVVSTPTTAPAPAGGCTLGLDLGDRSHYVCVLDAQGQLIHEGTLANDRVALALLLTHYPAATVALEAGTHSPWISRFLTGLGAKVIVANPRKLHAISRHERKCDRRDAAMLARLARADVALLHPLAHGTAQAQHDLLGLKLRDSLVRTRVNLINTVRFTLKSLGHTVSNPSSASFHKNILTAVPADCLPVVRPVLAVLALLTEKIKALERGLVSRGKKDYPVTQRLQQIAGVGPLTALGFVLKIGDPARFGRSRDVGPYLGLCPGRDQSGGTDKQLRISKCGDGLLRRLLVSAAHYILGPFGPACALRAYGQHLQGTSAREKKRAVVAVARKLAVLLLSLWKHGTDYEPRVPAPVPLVLVAA

SEQ ID NO: 496138 - protein, 354 aa, unidentified
MEEYKRSGQEGKAVFVGVDLHRFKWHVTVRTEDQELFSGTLPGHWEALRRLLDRYRGDSIQVVYEAGYFGFWLHDRVVAYGADCIVTPPSLLPQEYGNRVKTDRRDSRKLAHLMAKGMLKRVWVPALEERYHRQVIRRRRQLIGDRVRTQNRIKSELRFYGVELVEPRGPWPRVYVERLWCIRFGNRWIQESFERLLEEYDFLTGQIAKQTQLLRELSETPHYRERVEILRSVPGIGLIAAMELLVELQDVGRFRRAEQLAAYVGLTPSQYSSAEKIRMGRITGAGKNGLRAILVEASWKLIAKDGVMREKYERIKARSGAKRAIVAIARTLLLRLRRILLDGCPYGLGVIGSV

SEQ ID NO: 496139 - protein, 457 aa, unidentified
MDTLHRVCAGLDVHKDTVVACVRRLDDRGRAHQEVKTFGTTTSDLLQLLDWLLQHQVPLVAMESTGVYWKPVFNLLEGPVEVLLVNPEHIKKVPGRKTDVKDCEWIAQLLQHGLLKASFVPPRPLRELRDLTRQRTQLVGEKASVSNRIQKVLEDANIKLGSVASDVLGVSGRDMLRSIVAGVDSAEALANLARGRLRDKLPQLRKALTGRVTEHHRFLLGMHLDHLTHLETLIGRLDQRIDKEMEKDRPPEPPPEPKPPGVSAEAASAEKPGSPAGIEGSKASAPPGSGGLGLWQSLGLLVTIPGINRRTAEVVLAEIGTDMSRFATAQQLASWAGLCPGNNESAGKRRSGRTTHGDKWLRSILVQAAWAASHTKATYLSSHYRRLARRRGKKKALVAVAHTLLVMCYEVLKKGEAYQELGADYLDKLEPDRRTKNLVRQLEKLGHKVTLEPQTAA

SEQ ID NO: 496140 - protein, 425 aa, unidentified
MRLRTEQAPGPPDHGQESNPVRTKRYTRFCGIDVAKRKHVACVIDRDDEFVVRSQSFNNDAEGYQGLLNRLQDAGRRNQLLVGMEATGHYWYALRDFLAGKGYEVVVLNPIQTKQQARKHIRVRKTDKIEARHIARLLRNGEHKVTLVPDDFAMTCRQLTRLRYKLIGQGADIKRLLWSRLHPVWPEYETLLANPFCKTGRQLLMTAPTPVDVLTLGQQAITELIRKTSRGKYGLAKAEEIWQAAQQTVGTRRGLDGARVSIRSLLTQIEALTPIRKRLEADIEALANRLPGYIFTLPGANRLSAVSLFGETDPIETFSSGAQLVAFAGLDTTVFQTGQYEAPRRRITKRGSPFLRHTLWRMAHRACYQEGDLRDYWLRRRGDGLHHLAAVTATAIKLCHVTWRILTDHRDYLPKAPTARKSRRC

SEQ ID NO: 496141 - protein, 306 aa, unidentified
MQIICGVDVAKAWLDAWAMEHHQRFPNTAEGVEQLLAFCRDHDAELVAMEASGGVEQAAFLQLWKRGMPCAIANPRAVRSFADAMGFLEKTDRIDAAMIAGYAAARKLVATPPPSEQQRELMALTARLRQVTSDLSIQKQRLHTTADPKALASLKEVISLFNRQLKTLAAEIAALISADPVWAVLDKTIRSVKGVADRAVTYILADLPEIGTLSNKAITKLVGLAPLANDSGKRTGQRSIRGGRATVRTVLFLVADIARKYDPDLSGFRDRLIAQGKSKMVVRIALARKLLVRLNAKVRDARLAIA

SEQ ID NO: 496142 - protein, 341 aa, unidentified
MDTVSLIGIDLGKHCFHLHAQDGSGRMVLRKKLTRNQMFTLLSNFPSCTVVMEACAGAHWIARRLQTLGHEAKLISPHFVKPFRQGNKNDFADAQAICEAASRPSMRFVSPRNEAQQVVSALHRVREALVRNRTGTINQIHAFLLEFGISLPRGMAVMRRLPAVLEAQALPPRLVAVLERLQAHFKYLDEQIGQLEHELLTQLHEDERSERLLEIPGIGPITASVLMSELGDARQYGSARQFAASIGLVPRQYSTGGKPTLLGISKRGDKGLRRLLVQCARVIMLRIERRTDSLGVWVRSLLARRHSNVVACALANKLARIAWAILAKGTHYRSAPTALPA

SEQ ID NO: 496143 - protein, 437 aa, unidentified
MKKTLEIVHPNAAGIDIGSRGFFVDAGDEEIKVFPTFTEGCHGVRDYLLLKNITTVAMESTGVYWVILHAVLEEAGIEVYLVNGRDAKNVPGRKSDVKDCQWLRQLHSYGLLRKSFIPEESIRTLRNYVRLRQDHIRATSTQIRLMQKALTLMNIRLTEVISDITGASGIKMIEAILQGERRPEVLAMLCHPKILENKKDDLLKSLEGVYSEDHLFALSQAYQTLRYYYQLIEECDKAMEKHLQKITASKNDVEIKNKRKPIRNHPPQIEDLSKSLLKMTEGKDPTTIAGITDYSFLLILSEVGTDLSQWKTEKHFVSWLKLCPQRNTSGKMMRKVNSLHHNKASLMFRNIAQGMINTKHVAIGSFARRIKAKRGSGVAIKAVARKLACYYYRVMTKGEIFVEKGIELYEERFKEQKKRYLIRQARLLNMKLVELDL

SEQ ID NO: 496144 - protein, 383 aa, unidentified
MAQVNDLSRSLTAFDPISTLVVVVEMSKASWLVSGAVPGVERQPLKKLEPDATALLRLIERWRSAGWPISRIALAYEAGRDGFWLARWLIARGIEAHVIHSASVAVSRDRKRAKTDRLDAAMLMRVFLGWLRGERGHCGMVVIPTMEEEAARRPSRERESLVNERSRITNRMKSALARLGIRGFKPHLRKAPERLADLRTAEGTGLPANVIEEFRRDMARLALVREQISSIEKTRAERLERAPDTGPHAMVRLLARVIGIGIETADMLVREILSRKLRDRRAVARYAGLTGSPDESGLKRREKGLAKAGNARVRRGLIQLAWRFLMFQKDSALARWYRTRTEGPSGARKTTMIVALARKLLIALWRLVTTGEVPDGVELRPAA

SEQ ID NO: 496145 - protein, 356 aa, unidentified
MAIAIGIDVHKKTSTFFAYGEDGEPLEEFNKRFKRVASNRDGYTEVLVWLGNTDCDFLMENSTKTHDVYWILQGLGYKNLYVAHSVDLKRITKSSKKTDHFDAEKLATYMRVKQQNIDQFRTCYICTPEDMRIRRLCRIAKQELFDMGRIRRRIRSHLLLTGREWMGGLNTKWECEALMNEDDPGLRHLGRQLNECRLRRDAAEEAVVKAIKGNEKMFPIYEKLKEIPNFGDITAAYLAAVIVDIDRFENPKKLAAYLGIVPRMRDSGETENHCGLTRSGDPAARWLLIQATFRLVNSSAPDSQLKAFFAEKNGGSIEERKEADTSGLLKRPALVATANKLIHIIFALLTHPDRHW

SEQ ID NO: 496146 - protein, 373 aa, unidentified
MAEVITAVGLDAHKVWIKIAVLLPGESKPVEWQVENEKASVRRMVRKVQRLAPGEVRFCYEAGPCGYALQRWIREQGIACVVVAPSLIPRKPGDRIKTDRRDARKLAQLFRAGLLTEVHPPSPEDEAVRDLCRAREDAHEDLVRCRHRLSKMLLRRGWTWHGTQKAWSRGHRLWLRSLKLENQADQVVLEEYLLAIDQVEQRLRSLEQRIDEASQLPAYAEAVAALRCFRGIDTITAMSLVAELHDFLRFDSPRGLMAFLGLVPSEHSSGDRDRRGGITKAGNRHARRLLIEASWHYRHFPNPSGLKKRRQGQPTEVIALADKAMQRLYRRYTRMIEKGKPTPKIVVAIARELAGFIWAALRPLALRALPNAA

SEQ ID NO: 496147 - protein, 331 aa, unidentified
MSYFIGIDVSKEKLDCACLRNKEQKKARVMECSNNALGFKLLVEWSENTTSLSIKELSFLIEPTSIYHERLVAYLYALDATVFMANTGRVRKFAEGIGVLSKNDIIDANVLARYGLMATKLIAWKPVPKEITELQSLINRISALEKELQREKNRQEKMNECNDAHPIEKRSITKSIRRLEKEIKSFQIHIRNHVNETESIKKDFDLMVSIPGIGEKTALIVLLILRSRNFQSASEVASYVGLNPIEKRSGKSEYRKPRLSKAGNSDWRKALYFPAMVAVRKNPDVQALYDRLLAAGKTKMCALGAAMRKLIHICFGILKHQRPYQVQLQST

SEQ ID NO: 496148 - protein, 313 aa, unidentified
MKQVQSNVFIGVDVSKNSLDVAVGPSGESMRFANSEDGIALLADFIKPLAPTLVLFEATGGWEMNAVRHLAAKRLPLVVINPRQVRDFAKATGQLAKTDAIDARILARFGEAVKPEVRPLKPLELQKLDALNTRRRQIVEMLTAEQNRMVSAPEWIRPDIEEHIAILKKRLAAINRDLNKLIRKSPLWREKDQILQSFPGVGPVMAMTIIADLPELGTLNRREIAALVGVAPLNCDSGMYKGKRKIWGGRAAIRSVLYMCTLTAIRHNPVIRDFYQRLKRAGKLPKVAITACMRKILVILNAMMRSGTCWQTT

SEQ ID NO: 496149 - protein, 436 aa, unidentified
MRGCRCSMIMGFTKPIEHFNLQRKKVITMNTLYVGIDVSSKSNVVYLMLPNGDKHSNFSIANSHEGSTQLVKRIHSALASHSLDTVLIGLEATSVYGDNLVYFLREDATLAPFNRKIHVLNPKQVKKFHDAYNDLPKNDYVDSFVIADCLRFGRINKEVYMGDYRYKALQNLTRARFFAVQNLIKEKQRFMNVLFKKYSTMTQEKVFSDAFSTTALAVYDEFESAEALANMDLQELTDFIMEKGKNRFPDPNAVAKAIQKAARSSYRLPKTVNDSVNQVLSISITSMKALESQIKEFDKAIAAQMELLPNVLISIPGIGPVYSAGIMAEIGDINRFDSQAALAKYAGLAWKQHQSGGFEAEVTRLIPSGNRFLKYYLCEAAFSLVRCDKEYSDFYHLKYKEVNRCQHKRALALTARKFVRLVFRLLKDNRLYCPAK

SEQ ID NO: 496150 - protein, 416 aa, unidentified
MTFKIVRFICGSMDVHKNLIVATIGTTDKQTLTTEYIQQSFSTFYSDLIRLKEWFISHDCHNVCMESTGKYWIPVYNVLETELNICLTHPKYVKAIKGKKTDKRDSKWICDLYKCDLVKHSFIPKKEIREMREIARYRCKLVYMRSSERNRYQNCLTVSNISLASAVSDPFGKTATNIMKELMQSEVIEDDKILKLIHKNCKDKDKILDSLQGYHIESDQRFKMDTVMNHIEYLDKQIQACEAELIKRAYPLRDYFQHITHIKGISALSAILIVSEIGTDMNQFESDKQLVNWAGLSPANNESANKKKSVRISKAGQYLKPLLVQCALSSIKDKNSYFGIKYCRIKKRRGHKKAIIAIARMMLVCIYHMILTGEEFNPCDYESLTNPKPKKEPIMTVESALQFLKDSNFDFSSIQL

SEQ ID NO: 496151 - protein, 355 aa, unidentified
MTHGIAMTIGVDLGDRFSHLCALSAEGEVIREERIRSNRAAFEKRFRELGKARVVMEVGTHSPWVSRCLKALGHEVIVADARRLEAISKNPRKNDRNDAHLLARLARDPALLSPVSHASEAVCADRAVMRAREALVRARTMLVNTLRGVVKSFGERLPTCSARSFHRRVKESVPAILKPAAEPLLAELVSLEAAIRAYDERIATLARERYPVVERLRAITGVGPLTSLAFVLAIENPNRFQSSRDAGAFFGLTPRQDQSGERDPQLGITKAGSPYVRCLVVCAAQYILGPFGPPCDLKRWGSALAERGGKNAKKRAVIAVARKLAVLMHRLWVSGEAYDPDYSTRASAAGECSAA

SEQ ID NO: 496152 - protein, 311 aa, unidentified
MQEIQNIGVDVAKDELVVWVSGSTHTVANQAPAITAWLHTLRGPARLAVESTGQYHQLLIQLAHQHGLICYVLNPRDIYLYAKALGMRGKTDRSDAQVISRYLQEHQAHLHTWKPATAAEREITQLLGRRAKLVVYRDSITTSLEGLDGLEQAQHGLTEQFTVLFEAIDRRLRELLRSEPDLWQASQCLQSIPSVGPLGAAMLVSLFARIAFTNLNAVVAYSGLDPRPHDSGKKRGRRRLSKRGPPALRRQLYMMAFSGSRTAVFKPYYQALRARGLSSTEAFVILARRILRIAFAVWRTRQPFNGLLNQA

SEQ ID NO: 496153 - protein, 317 aa, unidentified
MTEQQKPFVGIDVSKARLDIAVRPSRAFWQCTNAPESFPELVARLRTLDPTLIVLEASGGLETAVTAALAEADLPVVVINPRQVRDFAKATGALAKTDALDAHVLAHFAEAVRPEVRALPSGQLAELDAMADRRAQLVKMQSAEQNRLASAPTCVRADIKAHLDWLAERIDNSNKELRRLIENTPAWRAEDDLLQSMNSVGPVLSAVLISAVPELGTLSNRRISKLIGLAPLNRDSGKHRGKRTIFGGRAQVRAALYMPTRNAVRFNPVIKALYDRLKAAGKPEKVVMTACMHKLLVILNSMVKTNTHWHPPGVAQA

SEQ ID NO: 496154 - protein, 454 aa, unidentified
MFTIKHKIMAKPVKEKQVKQLALIRPHCAAIDVGSMLMMVAYSDAEGNQHLLESGAYTTELEQLTVTLKQAGVKEVAMEATGVYWMVIYELLEQHDFKVTLVNARHFKNTEAQKTDVKDCEWLHQLHAHGLLRSSHIAGEAFRELRSYIHERNLLQQNKSDTLNRIHKLLTQMNIKVQHLISDIEGVAGMKLLRAIADGIKDPEALMLLIKDSKLKADEASLHQSLNGLYKEQYITILNQTLKAYDFFMAQMKAYETLIEQVLQKMLPGQQEAATPKKGLVRKNQYSINLKEYLQRIVGVDLTRVDGLNEISILEIIAVTGLDMNKWPTAEHFASWLKLSPSPKISGGKVIGYERKPTRNKATQMFRLAAQAMWQNKGALGYLYRKLAAIKGAKKAIKAVARKIALIFYNMIKHQTEFNSDRLQIDTRRQTAKKISILQKEAAKYGYVLQSLNA

SEQ ID NO: 496155 - protein, 430 aa, unidentified
MKSNTQNAKIEAITEKTLVLGIDVGSETHYARAFDYRGVEYSKKPFKFSNTEAGFVTFKEWILDLKERHEKDKVVPGMEPTGHYWFNLGKFLQDNEMKPVLVNPHHVKKSKELDDNNPTKNDRKDPKVIAGLVREGRYMIPYLPDGVYADLRTASNIRFQLQAELTRIQNRISRWFNIYFPEYKTVYGKPDAKSGMLILKAAPLPEDILTLGIDGVNQIWRDAKLRAVGKARAKTLIEAAEHSVGSKEGAVSARMEIRMLLEDYESRNIRLQEVMGLIEGLVNQIPMAEKLLEIKGVGIKTVSGFLAEVGDIRRFNDPKELQKLAGLALVENSSGKHKGKTTISRRGRKRLRYLLFEVAMSLVAKNPEFRELHNYYTTRRLNPLKKMQSLMAIAAKLLRVFYAILTKGVGYDPKKMVNDIRRPAAYAQAA

SEQ ID NO: 496156 - protein, 323 aa, unidentified
MTETLAQAYVGIDVSKAKLDVALLRGEKYHDKVVPNTPAGLKTLLTWLARQGVAEGHVCMEATGSYWELAAETLSDAGLPVSVVNPALISAHAKSLGLRSKTDRIDARTQAHFCREKRPALWRPPTRAERTLRALVLRHQALVEIQTQEKNRLESARAEVRASLQAHLDWLAQELERIEQAIREHIDQDPTLRDQQRLLATIPGLGERTIATLLAFRIRERFASARQLAAFAGLSPALHESGASVRGRPRLSKIGHAFLRRALYMPAMVTLYRTQWGGVFRQRLQNNGKPPKLIIGAMMRKLLQVAYGVVKSGKPFEPALHGA

SEQ ID NO: 496157 - protein, 345 aa, unidentified
METMYYIGLDVHKRTISYCVKDVSGRVYAEDSVPATRFDLDRWMKTLPQPWTAAMEATVFTGWIYDHLRPHAAALKVAHPLMLRAIAAAKKKNDRIDAKKICDCLRCDFLPECYMASTTIRERRRTLRYRNLLVRQMVQMKNKIGMLLMEAGVSYNKQKLHKAGYFRELLATNPDINEGLCSLLRVCRETVVRLQRTESALVRSLERDSLLVDRVERLMTIPAVGPITALTWALEVGDVQRFSSIKKAISYCGLCGAEKSSGSTVQRTPLSKQRNKHLQTTLIEAAKMAPRYSPQLAMLYDQEKQKGHANRATLAVARKLVAYLMAVDRGQRNFQVVETSTCIAA

SEQ ID NO: 496158 - protein, 412 aa, unidentified
MITNKGEWSTIYQKQRLAYCGIDIHKDTHTAVVIDCWMKILGEVTFENRPRKFDSFVHDVKKISGDLTIIFGLEDTRGLGRNLAIYLTGHQFMVKHVNPAYTSSARLSAPTVFKNDSYDAFCVARTLRDMIDKLPDANHQDIFWTIRQLIKRRDSLSKGSVKIQNQLHGQLLCAFPSYRKFFTLVDCKTALYFWEHYPSYQHIKGLTPEELGAELRKIGGNSCSTNKAQKILSNIEADGDMKREYQSERDFIVKSIVKEIRYKQQEIIDVDRELQKVMAQTGYNLESMPGISLNTASHIVSEIGDINRFSNADKLARFAGVAPVSFSSAGKGKEQRSRQGNRVLNAILYFLAVQLIWSKGGRPRNPMFYEYFHRKVSEGKKKSQALVCIQRRLINIIYGMMKNKREYRPVKD

SEQ ID NO: 496159 - protein, 345 aa, unidentified
MDQVVTIGLDIGKSVFQVHGADASGAAVLRQRLTRSKLLLFFSKLPRCLVGIEACATSHYWARELMALGHEVRLMPAQYVKPYVKRGKNDLADAEAICEAVTRPTMRFVAVKSPEQQSAMMLHRVRLILMRQRTQVSNAIRSHLAEFGIVSPIGRGGVERLLQVVTDTDDARVPAEARACLEMLAAQLRLVKAQILENDRQITARARETDVGRRLMAIPGIGPLLSSAFVATVADPAVFKSGRSFAAWVGLVPRQNSSAGKERLGGITKAGNRYLRQMLVVGAMAVIRYAERHGTRRPWLVQLLARKTTKLAAVALANKTARIVWALMTSGERYDELRARQTTAV

SEQ ID NO: 496160 - protein, 399 aa, unidentified
MEYDEIGVFLGLDVGKSHHHGHGLTPAGKKVFDKQLPNTEPKLRDVFEKLKTKFGAVLVIVDQPASIGALPLTVARDTGCKVAYLPGLSMRRIADLYPGEAKTDARDAAVIADAARTMPHTLRSLELTDEITAELTVLVGFDQDLAAEATRTSNRIRGLLTQFHPSLERVLGPRLDHQAVTWLLERYGSPAALRKAGRRRLVEVIRPKAPRMATRLIDDVFDALDEQTVVVPGTGTLDIVIPSLARSLGAVHEQRRATEAQISALLEAHPLSKVLTSLPGVGVRTAATLLVTVGDGTGFPTAAHLASYAGLAPTTKSSGTSIHGEHAPRGGNRVLKRAMFLSAFAALHDTASRTYYDKCRARGKTHTQALLRLARQRINVLFAMLRDGTFYEPRTPRLA

SEQ ID NO: 496161 - protein, 439 aa, unidentified
MFSRSEERSLNKKGKQTPMKSAQTILHVGLDVHKDSIAVALAAQDGSLRRYGEIPGHIEAVDKLLKRLDRADQQIRLCYEAGPFGFVLCRHLRRKGYVCEVVAPSLIPKRAGDRVKTDARDAEQLARLFRAGELTAVRVPDEADEALRDLIRGRLSAVFEQHRARHRLKGFLLRLGFRYPGKTSWTPAHMNYLSKLKMSHPAQQIVLEEYIQAVQSATERLDRLTTQVHAQLPGWKWEPVVRALMCLRGVSVINGMTLVAEIGDIDRFESPRQLMSFLGLTPSEHTSGDKRHQGAITKAGNGACRRALVEAAHHYRIPPRISPTLRQRQHGQPEQVRQIAWKAQQRLYSRQRTLSLRRKKSVVVVTAVARELCGFVWAICRALKHPHPKAPTRTSEGSARVYVLKPDLKFKSGAGRSRLASSAAAPPARARKGPTSLAS

SEQ ID NO: 496162 - protein, 344 aa, unidentified
MEAVVTIGLDIAKSVFQVHGVDETGVVVVRRRLTRAKVLAFFEKLPACLVGLEACATAHYWGRELRRLGHDARLMPPSYVKPYVKRQKNDAADAEAICEAVTRASMRFVEIKTPEQQSIMTLHRVRQMLMRQRIQVSNAIRGHMGEFGRVAPIGRSGLGQLIGIAADPNEINLPEEVRAAVTMLALQLRVVNEQILELDRRVRASARATDVGRRLMEVPGVGPVLASAIVATVPDPRTFKSGRNLAAWIGLVPRQNSSGGKERLGGITKQGDRYLRQMLVVGALAVIRYAQRHGTRRPWLVQLLARRTTKIAAVALANKTARMIWAIMTTGERYREPSPASAAA

SEQ ID NO: 496163 - protein, 356 aa, unidentified
MSQKLSSATAVIGIDIGKNSFHIVGHDQRGVIVLRQKWSRGQVEARLANLPPCLIGMEACVGAHHLSRKLQMLGHDARLMPAKYVRPYSKGQKNDFRDAEAIAEAVQRPTMKFVATKTADQLDLQALHRVRERLVGQRTGVINQIRAFLLERGIAVRQGLRSLRSELPGILATRTDVLAPRMLHIIEDLAGDWRRLDARIEDLSSEIEALARQDKGCERLMSVPGIGPIISSAMVAAIGAGDAFSKGRDFGAWLGLVPKQFSTGDRTILGSISKRGNRYLRSLFVQAAWVVLVKIGPKNWDRYGLKSWIEAAKKRLHHNVLAIALANKLARIAWAVLHKGRAFECVKTNEVTSRPA

SEQ ID NO: 496164 - protein, 344 aa, unidentified
MQIAVLGIDLGKNSCSVVGLDSTGAVIKRRRMRPENLVAFTETLPACIVAMEACCGAHHLGRTMSSQGHQVRLMSPEYVRPYVKAQKNDDRDAEAIAEAATRPTMRFVELKSESQLDVQTLHRARDRLVGERTALINQLRAVLLERGVTIPQGRRKLEQHLDAMMASDDDHSLSPRVRRLIDDMRAEWLELDRRIAAFDNEFAAYARSDADARRLATIPGIGVLNATALLAAIGDGQTFARGRDLAAWLGLVPRQVTTGGKPRLVGITKRGNKYLRKLLIHGARAALPSLATSATPLGGWLRALMQRVHKNAAVVALANKLARIVWVVLRRGEEFNAAGVTATT

SEQ ID NO: 496165 - protein, 374 aa, unidentified
MSSNVCHQIIYLAIELSSSSWVIAYRVPRNDKAKLHRLEAGDGAGLLAFIAGLRHRLDPSDDASTLVVSCFEAGRDGFWLHRLLTAHGVINHVVEPTSILVTRGARRAKTDRLDAVGLLRVLAAKFAGDPGACRTVVVPSVEEEDAKRPHREREFLVQERVRIENRIAALLATQGVRERPSLRSWDADMRALRTGDGRPLPTHLVAELNRLRRRLSLTLEMIRELDAVREQALEAQHDSASRTVKALCTIRGIGVNFASVLTREVFYRTFDNRRQIASYLGLAPTPFQSGGMDRDRRINRAGNSRARKTLVQLAWLWLRYQPESSHAAWFRDRVGSLQGRIRRITIVALARKLLIAIWRFVTLGLAPEGAIIAA

SEQ ID NO: 496166 - protein, 364 aa, unidentified
MLIIGCDYHPGFQQIACADTDTGELSEHRLAHREEAEAFYRELKPRNLSARVGMESSGHSRWFERLLGELQFELWIGDPAEIRTKRVRKQKTDRQDAQLLLRLMLEDRFPRIWVPDAENRDLRQLLWHRHRLVQMRTRVMNQLHVVPLNEGLRRKKALWRPAGRKELESIPLAPWARRRRQDLLDVLDQLTPKIQDLTHALEEEVEKRPVTRLLMTHPGVGPLTALGYELVIGMPERFHCGKQLASYIGLVPQENSSGDRRRLGHISKQGNVLLRFLLVEAAQVTVRSQPEWRSKFFHLAMRRGRKIAKVAMARKLAVHLYWMWRQGLDCGQMQKLGSHAGEPGHRDGVQSITDVMIGHPAPSK

SEQ ID NO: 496167 - protein, 345 aa, unidentified
MKIIGCDFHPSFQQIAICDLETGEFQDRKLSHGDGQAERFYRELGEPALIGIEATGNSQWFLDLVQRLGHEIRVGDAAKIRASYVRKQKTDKRDAGHILKLLLEKRFPQLWRPSAAMRDQRQLLRHRDKLVEIRTKVKNSLQHLAMNRGMQKKSRLWTRQGMEQFQQLAMPGWAGTRREDLLQLLQELNGQIEPLDQAVKQAAEQHPQAQLLMTQPGVGPVTALAFVLTIGDVARFAGSKQLTSYLGLVPSEHSSGSKRRLGAITKQGNCFLRKLLVEAAQTTVRKDEDFRKEYQHRCHHCPKAVAKVAAARKLAVRLYWMLRSNVGYPEIVHIESNPRVPLGDV

SEQ ID NO: 496168 - protein, 416 aa, unidentified
MNAVGIDVSSRKSTVAVLRPLGEVVCLPFDVTHDIAGLASLAEKLKALDGETRVVMEHTGRYYEAVEKALHEAGLFVCAVNPLLIKEYGANSLRRVKTDKADAVKIARYALDNWADLRDFTPMDAIRYDFKTLNRQFQLASKQRTASANNLIALLEQSFPGIRKCFDSPVRSDGTQKWVDFAHSFWHVDCVRKQPFAAFCERYRKWCKRHAYLFKQSNAEEVYALAKRAVVLTPKSKVVKVLVQEAANQLSSISRSVEVYRAEMDRLAAMLPEYPVVMAMYGVGKSYGPQLMAEIGDVRRFERKQALIAFAGIDPMPNQSGDKNVRSNKSSKRGSPYLRKTLFNVIRTYLQCAPQDEPVFQFLNRKRAEGKPFYVYMLAAANKFLRRYYAKLRDYFASLDTLQPVAPIPTILKATL

SEQ ID NO: 496169 - protein, 377 aa, unidentified
MREKLRFLGMDVHAETIAVAVAEPDGEVRSLGTIANREDSIRKFIRKLGSPEQLRACYEAGPTGFVLYWQLTQLGVKCDVVAPSLVPKKPGDKVKTDRRDALKLARSHRSDDLTAVWIPDEASEALRDLVRAREAAKRDQLRAQHRLTKFLLRTGRRPPLGVKVWTERHAEWLQQVRYAHPAQEATLLDCLHEVQHMAERVKRLEKSIVEVIQLAPASMQEVIRGLQALRGIAHLSAVTIAVELGNITSRFEHARDLMGYSGAFPDENSSGKRIRRGGITKSGNAHLRRIVVESAWSYRHRPAIGARLRRRQEGLPAEITEIAWKAQNRLHKRYMTLMARGKDQRKTMTAVARELLGFIWAIGIKAEAMACKQQMAA

SEQ ID NO: 496170 - protein, 347 aa, unidentified
MKKSNTISIDLAKSVFQIAVINPQGKIVSNKPIKRHKLLKWIAQQPPSKIVMEACGSSNYWGRQFQEFEHQVKLIAAQHVKPFVKTNKNDAIDVIAIFEASDRPNMTFVGIKNLQEQDMQSILRVRKGLMDRKVKLMNQARGLLAEYGVIFPTGAARLKAGFMALMSGENQTQDVTSCLIGLVEEWYQELIALESAIDKKDKTIQQMTRQSEVAQRLMKIEGIGPLTAMTMISTVGSQATEFKNGRAMAAFLGLTPKQHSSGGKTKLGRISRHGDKHLRTLLVNGATSVMKVVEKKTDPKSQWVKKLGQRMHKNKAKLALANKMARIAWVILARGETYKPQLASTVN

SEQ ID NO: 496171 - protein, 423 aa, unidentified
MDVIHDRVAGLDVHKDTVVACVRVMSGAKVERTCRTFGTTTVALGQLRDWLDGNGCTEVAMEATGVYWKPVWNILSDGRFELTLANAAHIKAVPGRKTDMNDAMWIADLVACGLIRPSYVPGERQAELRSLLRTRKQLCREQASHVQRIQKTLEEANIKLASVISDILGVNGRRLIEAMIAGVRNPHRLAGLADRRLKASPKQLYDALHGRLTDHHRFLLRLHLGQYDTLGTAIGQIDRQVDTAVATLDAEAAAGQASFRALIALLSTIPGVSTLAATTILAEIGRDMSRFLSAGHLVAWAGLCPGQNESAGKRKSARLRKGAPWLKTMLVQCAWAAKRKKDSYYQAQFYRLSARRGPQKAICAVAAAILTAIYHMLKDGTVHHDLGANHFDRRPAQVRVKHLVAHLTKLGYQVQLQPLPEAA

SEQ ID NO: 496172 - protein, 379 aa, unidentified
MKKCSRYLGLDVHGREIMAAVVEEDGKERYLGVIPNRPESVRDLINRLGAKEQLRAVYEAGPTGYGLYWELERMGVSCEVAAPTLIPTKAGDRVKTNRRDALKLARYHRSGDLSYVWIPDEDLEALRDLIRAREAGKRDEKRARLRLKSFLLRHGLRAPKGVRAWTAKYRAWLEAMTFERAALTGTFQDYLHEVHHHELRVKRLEASIEEAVEQAPEQFREVVGALQSLRGVGKTTAIGVTAEVGSFSRFPHPQQLMGYSGTVPSEQSTGDKHRRGSITKTGNSHLRRLVGESAWSYRHRPSLRYALKKRQEGQAAEVVEISWKAQVRLCGRFHRLVARGKTKQKVVTAVARELLGFMWAIGVEVERRRTNTTAQEKLG

SEQ ID NO: 496173 - protein, 312 aa, unidentified
MTSEGFIGIDVSKRWLEVSVYGQAENHKIGNDADGLARLVEEMKALQPQLIVFEATGGYESRAVKALSEAGFAVAVANPTRVRRFAEALGILAKTDKIDAQVIAHFASVTQPAANGRLTDLEEQLAAFVERRRQLLVELVAEKNRLSTCPACVRDGIKEHIAWMEAGVDELEAKIQACILQNPDWRARAEIIGSVPGVGPVTASTLVAELPELGQLCHKKVSALVGVAPFNKDSGPKRGKRRIAGGRSGVRRTLFMAALSATKHNPVIRAFYESLLKRGKEKKVALIACMRKLLVFINAMVKKGEPWRFSPA

SEQ ID NO: 496174 - protein, 407 aa, unidentified
MIFIGIDWSKTKHDIGYMDDSGRRISHQVIPHSQIGFQQFHEQCEKLGLERDTCQIGIETSYNLLVDELWSYGYDNIYVIPPSVVKSSRGRFGSSGARNDKGDAFLLADLVRTDRLRLHPWKPDTLLTRQMRVKVRALYQLTHQITAATNQLRAVLQRYYPGVLQIFGDLTAQTALTFIQEYPTPASSAKLYREEFYAFLCRQRYPNPHRLASRLPELKNPMLKTCPDTVAIYQDAAVLHAQLLLQLVRTKLKTQRELTVLFKSHPDADTFTSLPGTGAFLAPALLVKFGDHRERFPAPASVQALAGTCPVTDSSGNRHRIYFRRGCDREFRHYVQQWAKASTERHRSQFADAYWHELLDRGFSKHHAYRCLANRWLAIAWRLWQDRTVYDEAITYSSGYAVPVLTA

SEQ ID NO: 496175 - protein, 341 aa, unidentified
MTSVTTVSETRSEVFVGLDYHTNGVQVCVLNGAGATLGNHACANESGRVREYAEGFGRVRGAAIEACSGSADLAEELKQRHGWDVNLAHPGYVAAMKASPDKHDPGDAHTLADLQRLGYLPKVWLAPRAVRELRTLVRYRQQLVNERRTAKLRLTALLRERRLIGPERRWTKAWLAWLEHAADLGEHGNWVRDRHLASLRRLAQDIRAVEERLSDATRDDPVVSRLRDQPGIGDVTAWVLRAEIADFGRFRSGKQLARFCGLTPCNASSGRRTADAGLIRAARPQLRATLIELGHRLRRTVPRWRSLSQRLQQRGKPGSVIAAAVANRYVRKLYHDMLRAV

SEQ ID NO: 496176 - protein, 340 aa, unidentified
MGDKTSRYRVLNGEGEVLLEGACPTTKKGVTQLFGAMAHCRVAIEVGTHSPWVSRELKKLGHEVIVANARQVKLISQSSRKNDKLDAQMLARLARMDPALLRPIRHRSEEAQKDLMTIRIWAALPEARTGLVNAARGLTKAAGERLASCDADQMNVGKLEELPADLRDSLKPLVAEVESLTGKIKECDRKVEQIARDRYPETKLLRQVSGVGPLIALTFILTIEDKERFEKSRDVGCYVGLRPKQSESGERQPELRITKEGDVYLRKLLVQGAHGVMAERAPDTDLKRWGKELAGRGGKNAKKRAIVAVARKLAVLLHHLWVTGEVYEPLRNGHAMAKAA

SEQ ID NO: 496177 - protein, 364 aa, unidentified
MKKISTAKTKSQATKKKVTVGIDLGDRSSRYCVLDEEGEVIAEGSAPTTKAGIGKVLGTMSRCRMAMETGCHSPWVSRQLYAFGHEVIVAKPRNVRLIGENTRKEDRLDARTLARLARIDPNLLSPVRHRGAEAQAHLAVIRARQVLVRMRTALVNAARGLTKSFGERLRKCGTAQVGPLLAAELSPEIRAAVAPLLAEVEALNQRITAYDRQIEQLAQEHYPEVARLQQVNGVGTLIALTFVLTVDDPNRFRRSRDVGCYLGLRPGRRNCGKSQPQMHISKEGDSCVRTLLVQGAHYILGPFGRDCDLRRWGLKLAERGGKNAKKRAITAVARKLAVLLHKLWVSGEVYDPLRNSNQVAAHAA

SEQ ID NO: 496178 - protein, 417 aa, unidentified
MLMLKIVFPICCGIDVHKTFVVATIAATDRKNITAYKTKRFSTFTTDLRSLALWLSDNQCVDVCMESTGKYWIPVYNILEPSCRITLAHPKYVKAIRGKKTDKKDSIWIADLHKHGLVPGSFIPPADIREIRDLLRYRSKLVSFVSSEKNRVQDSLTVSNIMLASVVSDTFGKSSSAILRHLLKHPDDQDFDFRPLLHGSMLKKQDEIALAIDGTINEVQANKIALCLRHMDSIKSYIAQIEATAMRLAAPYSAAMELIRSVPGISQLAALIIVSEIGADMSVFHSSKHLCSWAGLAPCNDQSAGKKKSVRISRAGAYIKPLLVQCANAAIKDKSFPHYRARYEAIKLRRGHKRAIIAIARMMLTAIYCMLSTGELFNPALYEKANCKPGFVASTEEHAVKLLQRLGYSVFKLPESA

SEQ ID NO: 496179 - protein, 361 aa, unidentified
MLDPRETPGRTTVGGVDTHKDLHVAAVVDDHDVTLGSACFAATRHGYKQMLTWMRSFGQLRRVGIEATGTYGAGLLRYLQAAGVEVLEVTAPDRQDRRRRGKDDDLDAQNAAHAAFAGRRTATPKSRDGMIESLRVLKACRKTAVAARRVALQMIHNTIVSAPDELRETLRKLTRMQLVRMLAAWRPDLSDYRSVVSAYRITLKSLGRRHLELHDEIGDLDRMIGAIVAELAPTLLARNSIGCESAAQLLLVAGDNPERLRSEASFAALCGVSPVPASSGKVTRHRLNRGGDRAANSALHIIAVGRLRTDKRTKDYVARRVAEGHSKLEAIRCVKRYIAREVFGLIRHQQQSAVRQAQITA

SEQ ID NO: 496180 - protein, 398 aa, unidentified
MVCGVDISKKSFNFCIVDNNLNKLKEGKFNLLRDDLNKFIQIVNGFNNIVVIVESTGIYHINFVSFLLGNGIKIKIINPKIIKRFIDYYFANNSSKTDKKDAYSIAVFGIKNPEIVNKSNSSIPNTIKMIARELESLSHQKASIKTKIKAHLTILFPELENNFDIFRKSILNILVKFPSAKKISIANSNQIQSIINNANSTGKKVKFNAHDIINLAKNSIASSNKGLEIALTNYINQLFIIENTISELEKELINEAENHFKDDIDIISSIKGISITSASKIMAEIENIEKFENFKKLIKFTGTDPVIKQSGNFKLNKSISKQGNPHLRNFLYQAANGVIKHNPIFYNYFKKKKSQLNSFKKAVIATLNKLIRVIFGILKNKSKFDTNFHKNNLNLNFA

SEQ ID NO: 496181 - protein, 343 aa, unidentified
MKYVGVDLHKQVISLCVVVQKGSQRSVVQRQRLACQNSAAIDEFFRSLGQFQVVVEATASYEWFVQLVEPLADRVLLAHPRKLRVIAESTRKTDKLDAQVLAEFLALDMIPQAHRPTPRVRQHRALVRQRQFIQRRITSAKAKIRHILARYNADVKYLFTVEGQAYLAAQKLLAQDRFVVDQLLVDLTHYDQQRRAADRQLSEFALAATIAEQEARAVLASIPCVGTVTMDVVLAELGDLRRFRSQKQVAAYAGLAPKVRESADRRKEGGITKEGSGLLRWALIQTAWRMVTKTRRWGLAYEKLKSRKGAKRAIVAIARRILGLMFSLLRRGERYSLGTEILV

SEQ ID NO: 496182 - protein, 347 aa, unidentified
MLVVGVDAHKRTHTAVVVDGLGRQVGQRTVKALTADHLELLRWAERLGAERLWAVEDCRHVSRRLERDLLVAGERIVRVPPQLMAGARRQVRAAGKSDPIDALAVARAALREPDLPVAGLDGAAREVRLLVDHRDDLVGERTRIINRLRWHLHELDPSWDPPAGSLDRYCTLDRIAVRLNQHDGTVARIAGDLTVRARALTVDINRLEREITALITPLAPTLLAVCGVGALTAAKIVGEVADVHRFRSKDAFARHTGTAPQPAWSGQSDRHRLSRGGNRQLNAALHRVTITQGRYHPDAVAYLARRRTGGDTKAEARRALKRRLSDVIYRCLVADTALVDQALATAA

SEQ ID NO: 496183 - protein, 423 aa, unidentified
MSYRIAGIDVHKKMLAVVVADVEVHGEYQFERIRYGSNPEPLRLLAAWLIEHEVEELVMESTAQYWKPVWGALERYWKPSCQKREGAGPMSGTLHLAQARSNRGRRGRKKDFPDAERLVKRLVANELILSFVPDAEQRLWRTVTRRKYQLTRNKVRLQNQLEALLEEAHIKLSSLVSDLLGVSARRMLKAIADGGTDPAALAALADKKLRATQAQLCDALGACTELQPVYRRLLKMFLEELHLIEQQIGQLDQEMAALLSQHPESVQRLSEIPGLGVDSAQQIIAEVGATAATFPSGKHLSSWVGACPGDEESAEVSQSHRSPKGNRHMRRILNQAANAAVKAKGTIFEIVYRRLVTRLGHNQTIGAIAHRLCRLIWIILHQGVRYEERGPSVNTKSKRQRTSRMIRELRNLGYRVEPLGTPA

SEQ ID NO: 496184 - protein, 348 aa, unidentified
MRFYTKQHKYYCGIDLHARPMYICILDQEGKTVFHRNRKASPEAFLKAIEPYREDIVVAVECMFVWYWLADVCAKEKIPFVLGHALYMKAIHGGKSKNDKIDSKKIATLLRGGNIPMAYVYPRKMRSTRDLLRRRNHLMRKRSELLAHIQNTNSQYNLPEFGKKLAYKTNREGVAEHFPDPSVRKSIEVDLQLLNFYDQLLNGLELYIVKKAKVDDVYSWYRLRSIPGVGKILSLVLLYEIHDINRFPTVQDFVSYCPLVKCPRESAGKKFGTKNSKIGNGHLKWAFSEAACLFLRGNEQAQHYHARLVSKYGKGKALSILAHKIGRAVYFMLKRKEPFSMNVFFQQA

SEQ ID NO: 496185 - protein, 339 aa, unidentified
MLHVGVDLHKRFSQVAILDEDGVMHERRIEHRGGQMEEFLGSLEAGSRVAVEATGNWHWFVDQAEAAGHQVVLSHPKQTKAIAHARLKNDRVDAERLASLLRAELLPTVWIPPRELRQAKELLRHRVLLRRIRLSVHNQLAALLRKRNLQPPARLGSQVGQAYLRQVELNPEADWIRRNGQALLAWLQERISELDQDFTRRVEADPVGRRLRTIPGVGVQTAYALVSVVGEIGRFPSAKHLASYVGLAPRLHASADRVRPGRISKEGDRWLRFLLVEAALQAARQAGPLRAYYHRLARHKGKAKARVALARKLVGVIYQVWKQGRTYPELVGGSQAGEP

SEQ ID NO: 496186 - protein, 348 aa, unidentified
MKIIGCDFHPSYQQFAMVDMETGEASEGRLGHEQGEARRFYEAFRGQPVRVGMEAMGNSQWFEQMLAEMGHQLWLGDAAEIRRLVVRQQKTDKRDAQHILTLLCDGRFPRIWVPSVEMRDVRQLLRHRQKLVEMRSQVKNQLQHLALNQGVRRRGKLWSREGRAVLAGLPLKGWTAQRRKELLAMLEQFDRQVAEKDRAVRVEAERRPEVRLLMTHPGVGPVVGLAYVLTIGPPSRFPRGKQVASYLGLIPRERSSGGRQKLGSISKQGNTMMRALLVEAAQTASRFDEELRRDYCRLKARKHSALAKVMVARKLAVRMYWMLRERQEYPQCLVARKQGSPSHSVVAG

SEQ ID NO: 496187 - protein, 392 aa, unidentified
MDSTRTRVVVGMDPHKRSVTIEVMAGDETVHGGGRFATDHAGYQALLHYARTWPDRVWAIEGCNGIGHHIAMRLLADGEEVVDVPPKLSARTRVFATGQGRKTDATDAHSVALVGTRMTGLRPVVNDEQLAVLRILVDRRRSLGEDHTRMIAQLHQLLLELIPGGAKKDLSAAQAKTLLAKVRPRDAVGKTRRRVATELISDLERIYARKKAANKELTALLAETGTSLTELPGIGPSGAARLLVEVGDITRFPNRDHFASWNGTAPIDASSGDQVRHRLSRAGNRQINRVLHIMATVQLRNPGPGRAYYDRRKTEGKTSMEAMRSLKRRLSDIVYRHLVDDAVTHKVTSPGGQRGNDSDSSATGSHPHTGSSDQPLPGPVTTKPRTPLPAAS

SEQ ID NO: 496188 - protein, 402 aa, unidentified
MNCVGIDVSKGKSMIAVMRPFGEVVISPFEVQHTASELSELAKLLKSLDGETRVVMESTGNYHTPVAWLLHDAGLYVSVVNAMLVHDYGNNSLRRAKTDKKDAVKLANYGLDHWLTLPRYVPEEDTRLLLKNCYRQYQQYSKVQTMLKNNLISLLDAIFPEVNRLFNSSPRADGSEKWVDFVSTFWHCQCVSTLSLKSFSARYLKWCRKHGYYFSQEKAFEIHSKAQSCIGVMPRNETTKLLVQQAIVQLKATSAALAALKQEMQSLAASLPEYPVVMEMFGVGSTLGPQLMAEIGDVRRFHSKKALVAFAGIDAPPCQSGKMDIHSRSISKRGSAALRRTLFLVMGVYLQSAPLDEPVYQFMDKKRSEGKPYKVYMMASANKFLRIYYASVTAYLNTLARI

SEQ ID NO: 496189 - protein, 348 aa, unidentified
MQISVLGIDLGKNSCSVVGLDEAGRIVLRRRLSRARVIELSSQLPACVMAMEACCGAHHLGRILAAHGHRVRLMSPEYVQPYVKAQKNDERDAEAIAEAATRPTMRFVDLKSEEQLDMQSLHRARSRLVGERTALINQLRAVLLERGIIVAQGRRRLAQYLSQALDGDEAAPLQLSSRIRLLIEDMRAQWRELDRRVAEFDGEFVAAARSEAAARRLSTIPGIGAINATALVAAVGDARSFARARDLAAWLGLVPRQATTGGRPRLLGITKRGNKYLRTLLIHGARAALPSLLTVESPLGNWLRGLSARAHRNTVIVALASKLARIAWAVLRSSTSYNAAIGRSLIAA

SEQ ID NO: 496190 - protein, 325 aa, unidentified
MRHDSTSKTDVAAPVAGIDVGKHRLHLAFADGGGVEEHANDAAGHRTLIEALRRRGALRVGMESTASYSATVAEALREAGFIVNVFQPRQVKAFAQFKLKRAKSDKIDAPIIAQCTALSEPQATPDPRLADLCQHLTVVEQIADDVRREKTRLEHANNPAIRAVHREEIKRLTLRRREALRALVAMVRQHADLAEKMALIRSIDGIGELGALTLVLRMPELGSLSREEAAALLGVAPFTRESGQFKGERHIAGGRARARRTLFAAAQAACGRWNKALVELYQRLIAKGLHHRAAVIACTRKLVIYANAVLKRGKPWTKNPEPTPA

SEQ ID NO: 496191 - protein, 337 aa, unidentified
MKYSGIDLHSNNCVVVVSDEADRVLVRRRVPNDAAAILALLAGHREELVGVVVESTYNWYWLVDALQTAGYRVHLANTAAIKRYEGLKHSGDEDDAAYLAQLLRLEILPSGYICPPAARAVRDLARKRMQLVRSRTAQVLSVENMLSRETGAGMRSYAVQRLTARGVESFGFHQDVGRAMCANVAVIKTLNREIDKLEQRLRQCVGLRPEFRLLTSVPGIGQTLATLIMLEVGTIERFAAVGNFASYARCVDSARISNGKKKGQGNVKNGNAYLAWAFVEAANFTRRYCVEAQRFYDRKKARTNSVVATKALAHKLARACYHMLKENQPFDVKRCFA

SEQ ID NO: 496192 - protein, 412 aa, unidentified
MQVLYARCAGLDVHQETVVACVLVTRPLGKVQRQVRTFRTMTADLVALSKWLCEQQVEQVAMESTGVFWWPIYNILEEGGHSLLLVNPQHTKALPGRKTDVKDSEWLADLLRHGLLRGSFIPPATIRELREVTRYRKTLVQERAQESTRLQKVLESANIKLAVVATDILGVSGQAMLHALADGEDDAAALANLARGKLIKKLDALRAALEGRVKPHHRLLIRAILRHISYLTSTIDHLDAEIAAALAPLEGTALLLRTIPAIGPTAAAAILAEIGTDMSRFPSAKHLASWAGLCPGNRQSGGKRLSGVTTHGNVWLRGILGEVAWAAIRKKGTSFGARYRRLARRVGKQKAVVAVMHHLLVVIYQVLATGRPYQELGPDYFRPGDPHRRQRRLVQGLEALGYSVTLAPKDAA

SEQ ID NO: 496193 - protein, 338 aa, unidentified
MKLFGAIDLHSNNNVTVLIDERDEVVYRKRLPNDLRLIIEQLSPYQSTLEGIVVESTYNWYWLVDGLMEKGHRVHRANTAAIQQYEGLKYTDDDSDARWLAHLLRLKVLPQGYIYPKEERAVRDLLRKRSQLVHQKTANLLSVQNLYTRNTGSSISANRIKKLPSQEVDGLFTLGDVGLAVKANLSVMRCLEAEIKSLEEVVKERVKLKPAFRYLLTVSGIGPTLALTIMLETGDIRRFPRVGNFASYCRCVGSEKISNGKRKGKGNTKNGNKYLSWAFVEAANFAIRYEPLIARFYQRKKAKTHGVVAIKAVAHKLSRACYYVMRDEVPFDVGRAFA

SEQ ID NO: 496194 - protein, 309 aa, unidentified
MDAIVVGIDVSKDRLDVHVRPTGTALSYSRDAAGIEALIGALGPVAAQIIAVEATGGFETVVVASLAAAGLPVVVVNPAQVRAFAAAIGRRAKTDPIDAAVIAHFAEATKPAVRPLPDAATQALADLVTRRRQIIAMIVSEGQREKRASPRARKSIVRLLKTLRAELSDLDAEIDETVRGSPLWREKEDLLASVPGVGPVTVRTVLAELPELGSLDRRKIAALVGLAPFTRQSGKWRGKSFIGGGRASVRAVLFMAAMTAMRHNPVLRAFHHRLRTAGKPKMVALIAVARKLLTILNAILRDKTKWQTA

SEQ ID NO: 496195 - protein, 429 aa, unidentified
MNDFEDTKRERFCQIIGEISGSDEYLVVGIDVAKDKHHAFIGTATGKTLYRRLIFENSKSGFVRLLEQVELVRSMNGLKKIIFAYEPTGNYHKPLGSYLAGNGFDIALVSGRSVKNNRETLDERWDKNDLKDAANVADLASRGRCQYYDRPLEGIIELRDLLSLRRRLKKDEHAIRVRIRNTILAKYFPELDKFFNTGKGEILSVVKWCPNPAKIAVMPFDRFFRMVTKRERGIAQKLRLRKIHESAGESIGCPMGEAAEFEAKLLVDKLDQVRQDIGEVEKRIKEIGEGFAEYRYLLTIPGFGPYISSVVLSAIANPFRFDNASQVLKLSGYDLCAARSGQSSEKAVPVISKRGNSELRYALYQAARVASAMNIYFKAYFTGLLQGRQRERGIHTKMIVKLAAKMLVIAWAIMKRKEAFNPSRLNTCR

SEQ ID NO: 496196 - protein, 412 aa, unidentified
MGYRIAGIDVHKKVLMVVVLEVEAGQVQTDPRRRRFGATASELNRLRLWLEGQGVQEAVMESTAQYWKPVWMELEPHMELQLAQAFSNRAPRGRKRDFKDAERLVRRRLADELILSFVPEPEQRAWRTMTRMKTQLARDRVRLHSQLEGLLEEMRIKLSSVVSDLLGASGLRILRALSEGQTDAAKLASLGSCQLQCGQDQLIDALSGTPSAMHRQLLGLYLERLQVIDAQMDKLNQMIAQAMKEHEDAVVRLAQVPGFGVDSAQQIIAEVGPQASTFDSAAQLTSWAGTCPGREESAEQNHSSRSAKGNKYLRRVLTEVAQAAVKTKGGHYQIVFRRLLPRLGYKQALWAVVHRLCRLVWKILHDRVNYIEQGLQRDPRANKQRARTLARALRRLGYNVNIQPIQPNTASA

SEQ ID NO: 496197 - protein, 342 aa, unidentified
MEEVTIIGIDLAKNVFQLHGAAADGSVVFRKKLTRLQFQRFMAAQPPCMVAMEACPGSHYWAREMAKFDHAMKVISPQYVTPYVKRQKNDATDAEAIAEAATRPHMRFVEPKSAEQQARAVVFRVRQKAIAQRIELVNALRSHLYEFGYIAPVGLQNLPKLAAVLEDETSDLPAAARTACCGVLRQIEGLGVEIAALDAQIAELSKESPWAKLLQTMPGVGPITAMAVEAFAPPMETFRRGRDFTAWLGLVPRQNSSGGKSRLGKVSKAGQHDIRRLLIVGAMAAMVGACRRGIPEDTWLGKLMLRKPRILVAIALANKMARRIWAMLTKGESYRDPALAAA

SEQ ID NO: 496198 - protein, 347 aa, unidentified
MRFYNNSHPYYCGIDLHARLLYVCIIDSKGEVVAHKKIAASKDDLLLILEPYIGNVIVGVECMHCWYWVSDWCAELGIDFILGHALYMKAIHGGKTKNDKVDSFKIATLLRGGNFPIAYDYPSEMRAARDLLRRRMKIVRHGAMLKGHVVNTNSQYNLPATELNLKNISARQKLREQYQDPIVQRNIDLDMALLDCYAKELAQVEWFIEKQAKNHNPVYLELLKTVPGIGKILSLTILYEIGDISRFESVQKFASYSRLVKCKAESAGKTYGTNGNKIGNAHLKWAFSEAAVLYLRGNDKARNYLNRLQKRMSKAKALSALAHKLGRCVYFMLKNKTVFDEQRFLKG

SEQ ID NO: 496199 - protein, 379 aa, unidentified
MEVFIKNCAGLDVHSETIVACVLKGRHENEVYQEIETFPTLTKDLFRLLKWLESHEVTHIAMESTGVYWKPVFNILEDFFDITLANAQRIKNVPGRKTDVSDAEWIAKLLRHGLIEKSFVPPVEIRELRDLTRLRKKWIGHLTSEKNRIQKVLESSNVKLSTVISDVFGVSGRKLLNRLIEQGYVDEADVKKNIHGRLAPKKQLITDSLFGTLNEHQIFLIRQSWRHIEYLESLVLEIEERINQLLQNYHEELQLLMTIPGIKKDTAAVIIAEIGVNMNQFPTSQHLASWAGVSPGNHESAGKRKSTRSIKGNPHIKSAMCEAAWAVSRSRNRWLANKYWSLAARRGKKKALVAISHRMLRIIYSMLLNKEPYKEPQLV

SEQ ID NO: 496200 - protein, 385 aa, unidentified
MVHAHYSLGLDVDKASFKACLKVKEDSNKSLVKATKTFSNTIQGFKELDQWIKKHKKLQDDQLKIIMEATGVYHEHLAWYFHQLNYLVHIILPLRAKRYMQSLGLKSKTDKIDAQGLADMGMQQELEQWKPCSKNLLLLRSLTRQVEMLQESRTAFRNQLESATHLANCDKMVIQNLKSLITKIEKDIKKLKARIEQFIKEDPALQSKYKLVEPIKGLGILTFATIAAETGGFELFENQKQLVSYAGYDVVENQSGKRVGKTRISKKGNTHIRRIMHMASFNMVTYKVNPFHQLYDRVYDRTKIKMKGYVAIQRKLLCMIYALWKSDTVFDPGYVTKTTSGNHDPKTLFSVGPSGPEIKVATDIAMATLDELPCNQSPEALFSVS

SEQ ID NO: 496201 - protein, 348 aa, unidentified
MRSQNAVATVYGIDLGKTYFHVVGTDSTGKPVRRAKLTRNNIFEFFANVPMAIIGMEACPGSQWLARKLLALGHVVKIIPAQFVKPYVKSNKNDTIDAAAIAEAVTRPTMRFVPIKHTEQVDLQALHRSRDLSVSSRTRLISQMRDFCLEYGLPIRISPAAFKSAIPGIISDDTNDLTPAMRRLLESLWQDFRILDDRVAAVTAEIAAIANQSDLARRLETVPGIGPLTATAIVSAVGGGKQFRTARDLAAWLGLTPAQYSTGGKTTLLGISKRGNSYVRRLLIHGARSCVMHLDRTRDRLGAWLVGLESRMHANKVVVALANKLARIAWVILNKPGALYERRDPRFA

SEQ ID NO: 496202 - protein, 343 aa, unidentified
MQIRSVGIDLGKTTFHLVALGTSGKVLVKKKFSQKQLLAFTANMQTSLIGLEACSGAHFLGRALRQQGHDVRLIAAQFVKPFVKSNKNDYVDAEAIAEAVERKNMRFVPIKTDDQLDLQAIHRVRDRLVSRRTAVINQIRAFLLERGMVFAQKPAKLKAAMADVLENAENALPPMMRSLIGMLWDEWKTVEQQIDELTDRLEQIAASDAGCCRIRQIPGIGPIVATAIVAAIGNGAAFRKGRDFAAWLGLVPRQYSTGGKAKLLGISKRGNIYLRKVLIHGARAAAMRIKRDRFTIGAWMNALEARAPRNVLVVAMANKLARIAWAVLSTGEDYRPAASATAA

SEQ ID NO: 496203 - protein, 356 aa, unidentified
MELLAYSAGVDISADDFDACIEGVYDTRATKVIATRKFKNTAVGFKQFDKWLFRKAKQKTLLQVGMEATGRYHEGLAYYLFAAGYRISVILPNKIKHFAYSVNQYSKNDALDASLIAAYVSKHVPGAWQPISESMRDLRELSRERQALIKQRTQTKNRLKALKAGYAPLKKTVARLTEQVDFLNRQLKQVDAEMAQITERDETLSDNFNLLVSIPHIGAVSAYTIMAETDCFNLFVNRNQLIKYAGLDVIEKQSGSSVRGRTKISKRGNAHLRSAPYAGLNAIMRTQSVFVDTYTAALERGMHPKQARTAVVRQLLRVAFGVVKSGRPYCEADHRNRSAKEVGEHSGSPTVTDSVA

SEQ ID NO: 496204 - protein, 412 aa, unidentified
MLFVGDDWARDHHDVELLDEHGKKLAAKRLPEGLAGVSELHALIAQHLPEQWADLPPGEAAARVKIGIESDHGVWVQALIAAGYEVFAINPFSVKQYRARHSTSGAKSDAADAHLLAEIVRLDRAHHRPVAADSDQVEAIKLAARTHQTMIWERSRHVLRLRSVLVEFFPAALEAFPDLDAPDVLELLAAAPDPDTAARLSLSRIVAALRRARRRNVQERAQHIQQVLRASELRQSPPVQHTYAAIVTVQVRLISTLNEQVDALAAVVDHHFGLHPDADVYASLPGLGVILGARVLGEFGDAPDRYLDARARKNYAGSSPITRASGKKRLVQARYARNKRMADALRQWAFCSMRGSPGARAYYDELKDRKIGHQAALRQLANRWVGILHGCLKTHTLYDEDTAWSHHQTAAA

SEQ ID NO: 496205 - protein, 385 aa, unidentified
MENYSGKTKQYEIFSESREVTTVRFSCFIGVDLHKTTVTLRAVDPSVKVISSLRTHTKCVKKIEDWLNELPRPKWMAVEAVSFTEWFIDRYRDCVDRIDIADATELARRRGKRRKTDRNDALDIAVRLVRGDCPLGFIADESLMYLRKLGRHWRQLSKILTRAKQCMRSIFDAANIRGPSISGATAQTWILGHGDLLKDVQRESLANFIDIISLIERQRETLRRKIIFANRSEEFSARIFMLKSIPGIDEIWACIITAEVGPFDRFPNADTIEFWAGLTRDNKESAGRTQSGGITKAGSATLRWALCQAAMALCRSDVRQDAIKQRLVKRIGKVKANVAMGRRLLRIIYAMMRDGTLYERSEPTDRLRRSIKKANYVKRNKREVA

SEQ ID NO: 496206 - protein, 345 aa, unidentified
MTIVKTRAITGGVDTHADVHVAAALDPIGGLLGVQEFPATAAGYAGLLGWLGGFGTVALVGIEGTGSYGAGLARHVTTAGVRVVEVDRSDRQDRRRQGKSDPLDAVSAARAAQSGRARGAPKGRDGAVEAIRALMVAKRSARSERVQTINQARALVLTGPDDLRARFARHTAASLVSGLASLRPRPGDVVGYATRIALRELGRRAEFLDGQLGRLDELIAPLVAARAPALLALHGVGPDTAALLLVAAGDHPGRLRSEAAWAHLCAVAPIPASSGKVTRYRLNPGGDRQANHALWRIVLTRMSAHPPTLTYVERRTKEGLSKKEIIRCLKRYVAREVYRHLRAAG

SEQ ID NO: 496207 - protein, 350 aa, unidentified
MAHFVGLDVSVQETSVCVVDEAGKVLCEQKVPSEPDDIVTLLTSVGVDYGRVGIEAGPLSQWLVNGMAEAGLPVICVETRHMKSLLKAQQVNKSDRHDARGIAEMMRVGLFKPVHVKTLASQEKRMLLTARKLVQRKMLDVDADLRGTLRNFGLKVGVVGNAGFETRVRELVEGLPRLAVIVEPLLTIRRVMRQEFTRLHKMLLDVVRHDPVCRRLMTAPGVGAVVALTYRATVDQPQRFVHSRAVGAHVGLTPRRHQSGEIDYDGGISKSGDTMLRTMLYEAAQILLTQSRSWSWLKAWGMRVAQRRGQRRAIVAVARRLAVILHRMWTDGTDFRWGSEPPQRSPDRPR

SEQ ID NO: 496208 - protein, 376 aa, unidentified
MTKGTRFVGLDVHAATIAVAVAEPTGEVRGMGTIPNEPEAIQKLMRRLGPAEQLRVCYEAGPCGYTLYWQLTRAGISCVVIAPTLIPVKAGDRVKTDRRDAEKLARSFRSGDLTPVWVPDAAHEALRDLVRAREAAKKDQLRARHRLQKFLLRHGQRPPAGTAAWTEKYRRWLSTVRFDAPAQEATRADYVAEVEHARERIGRLEGALDEAVEATPAAMRAVIDALQALRGIAKLAAVTIVAEVGRLSRFQRPRQLMGYSGAVASEHSSGPRVRRGAITKTGNAHLRRIVVEAAWSYRHRPAIGPTLRQRQAGQSAEVTAIAWKAQERLHRRYHRLLARGKMKPQVVTAIARELLGFIWAIGVAVEGQPQPDGRAA

SEQ ID NO: 496209 - protein, 343 aa, unidentified
MEHFAGLDVSVKATSVCIVDDTGRIVREVKIASEPDVLLQELTNLAYHFKRIGLEAGPLSQWLFSALAEAGLPVICVETRHMKAMLKAQINKTDRNDARGIAQMMRAGLYRPVHVKTLRSQKLRMLLTHRKLLQSNAVAIENDLRATLRNFGLKVGVAGKVKFEARIKELVENLPDLAVLVEPLLIVRRTLREQIGVLQRRLLAIVRDDDVCRRLMTVPGVGPVVALTYRVTVDVPARFRKSKAVGAVFGLTPSKHQSGESSRTGGISRCGDEMMRVMLYEAAQVMLVRSVKWSWLKAWAMQLARRRGMKKAIVALARRLAVILHRIWVDGTEFRWTQETAAA

SEQ ID NO: 496210 - protein, 320 aa, unidentified
MSDRLAVGIDADSKSLVVARHGTKGSTRIPNSASAIGKWLSGLPTRSRIGVEATNRYHERVVQAAQMAGHVVFVLNPRDIKHYAKGVACRGKTDSGDAQVIARYIAKEADNLHEHVARSPAQERLHVLLQQRDSLVRSKTKLNLSLGSGASESALFGGIFSSLKEAIALLDQEIQRLCRTGEQHDLYRRIMTIPGIGPTVAAFVTHHITRWPLASSDAWIACTGLDPRPNESGARIGRRRLSKRGSAGLRQILYMAAMGLTRSKGGKPLYNAIRERGHSSTASFNILARKLAKIAWGVFKSGRDFDPAMLKVGQACFQQA

SEQ ID NO: 496211 - protein, 487 aa, unidentified
MRSIFRRRNADVEALFQGAGLASKVMCVAFDYAKKTHTAVICDGTGRQLRGVFNVENNRKGLDCLLSIVAGLCRKHKIQREHIFFGGEDCGPYAFNFIHALVTRGFLVVGVNTKQAKDERENSKASTDLIDTVGVAGSMIKMRGRTIGVATEDVHGLKRLRRQRGALLKAHSASAHRTHRVIEELFPGFLDQQASGIAPFSRASLWLMQDRFSAAQIHARKRPTLVRKFREFTINDPEGAADKLKTLAEVVLPPADAMVPALQRSLAEELRLYEALNSAIHDLDTDIAKQLARTPGAMLTTVPGIGLRWAPGLYVELGDPIRRRNVHSMAALGGIVPGLKQSGGPEKSAVVGHRRKACSSFLKHVLMSTAVSISQYGHEDMRQSYQTDKAMGRDARTRMAQKVLRITLHIIDHQIFFLPPSLHNGGTRNQIRAYYAEMWPKVLVKWRDRGAIQEAVAEGAPLRQWRDMAQEMYDLELSLKSPQSRRK

SEQ ID NO: 496212 - protein, 355 aa, unidentified
MYGLKHQKEKRSMDHFAGLDVSVKKTSVCIVDDTGKIVREVKVASEPEALLAVLKNPAYQFKRIGLEAGPLSQWLYSALAEAGMPVICVETRHMRAVLKAQINKTDRNDARGMAQMMRVGLYRPVHVKTLRSQKLRMLLTHRQLLLSKAIAIENDLRGTLRNFGLKVGMVGKVKFEARIRELVETLPDLAVLVEPMLIVRRVLREQIVILHRRLLAVVRDDEVCQRLMTTPGVGPVVSLTYRATVDIPARFRKSKSVGAVFGLTCAKYQSGEVDWDGRISRCGDEMMRTMLYEAAQAMLRSKKWSWLKAWAMQIARRRGIKKAIVALARRLAVILHRIWVDGTEFRWTREQAVAA

SEQ ID NO: 496213 - protein, 357 aa, unidentified
MRIIGCDLHTRQETMAMLDTETGEVLEKTLQHEGEKVREFYSALPRPVQVGIEATGSMLWFLNLMEELGIDSQVGHPAKIRAAEPRKQKHDRRDADLLLKLLMENRFPSIWMPSKELRDLRALLCHRHQWVRTRTRVQNALQAMALTNGLRRGKSLWSQEGQHAIASLPLGPHAAHRRTALQALYRELDADINALDKRVLEQALERPEARRLMTHPGVGPVTALATDVFLGDPVRFEDAKALASYVGMIPSEYSSAGRQRLGGLSKQGNPLLRFLWCEAAVHAVRRDPLLQRFYRRKLVQKGMGKARVAVARKLGIRLYIMLRDQIDYEEFCRRGQMRQKNGAARAGIPEVGYGPSL

SEQ ID NO: 496214 - protein, 366 aa, unidentified
MTSVAPAAERIYLGMDVSRDKIAVAVLRPGQDVPAVEVISNDSEMVRRLIGKFADRSVLAACYEAGPGGYELYRLLATAGVACDVVAPALIPKAAADRVKTDRRDCVRLALSHRAGMLTAIRVPSEPEEAVRDLVRTRADLVDDRKRMMQRIGALLQRHGRVWRAPRWTCQHRAWLDRQSFTEPALEAALRTYLAALDARDAELAVLERQLRGCWASVDPLAPMVRQLGCYRGIAELTALTLAAEVADFRRFASAPAFMGFTGLTPSEYSSGARTRRGGITKAGPQLVRGALVEAAWSYRHRPAIGATLRRRQAGCAAETLARSWKAQQRLHATYAKLTRRGKIPSVAVTATARELAGFVWAEMTS

SEQ ID NO: 496215 - protein, 369 aa, unidentified
MKNAITEANRKPCAARKAKRRELTIGLDLGDKTSRYCILDPDGEVLVERSTATTKRGLTQAFASLSASRIALEVGTHSPWVKRLLESWNHEVVVANAHRVKLITSSTRKDDRLDARTLARLARIDPHLLSPIRHRSEKAQSHLVMIRARAGLVESRSKLISSLRGLVKSFGERLPSCDADQMSVERLATLTAPLQAALQPMVSVVESLTRQIREYDQKIAQIARTEYPETARLRQVTGVGELIALSYVLTLDDPNRFRRSRDVGPYLGFRPKRRDSGASRPQLRITKEGDAYLRKLLVQGAHYILGWRGPDTDLRRWGLKLAAHGGKNAKKRAVIAVARKLAVLLHRLWITGEAYEPLRHSQAAATIAA

SEQ ID NO: 496216 - protein, 333 aa, unidentified
MMYVGLDVHKRVCYGTVMDEKGKVVKQDKFTNDLEALDKFMEGLDMVTVAMEAGYCWQPLYDRLLESGHHVKLAHPLKVKAIAQAKVKTDKIDSETLTHLLRADLLPESYVPPRDIRELREVVRRRAFLVGMRTMLKNRVQAELAKRGIKPRVPLWTREGRALLDGLGLEAVDQVIPVMDVLDRQIGEISRGMRRMCGEDPNARLLTTIPGVGYYIALLLVAEIGDVRRFPDAEKLCSYAGLVPSVRRSGGTTKHGGITHEGSRWIRWALIQAVHVHIRFDTELTTFYRRLAVSKPRQVAVTATARKMLKVVYWMLRNRESYRPWPGGVPREV

SEQ ID NO: 496217 - protein, 408 aa, unidentified
MYYVGIDWADQKHDIAMVDATGNIIFEKVSIKKSYCGFERLLDMLRRQSSNPIDFKIGIETSHNLLVDFLLDLGYEVYVLNPGSMKAIRQQYRPSGAKDDAFDALVLAIALLHNQYCWRHLDIGTKPVREVRILVRDHLYMIKMRTAITNTLTAALKMYYPEYFGFFSNVCGQSSLAFLQAYPSFENAQALAFDELKKFFNEQKAYKVQGQKIYNILHQPHIHVPQPLRKAKELRAQNCIHALLTLNEDIKLYEQQLQRLVKQHADGVRFMTFPGVGFIGAARLLALFGDNRKLYSHVSQLQGLAGICPVTEQTGNSIIIHFRRACNKFHRYAITQIAKSSLKHAEWPRAYFQKRRAKGNSFNHALRCLANIELRILFAMWKNKTDYDESTFLAQKASHQIKTELNQL

SEQ ID NO: 496218 - protein, 377 aa, unidentified
MKRIKFVGLDVHAETIAVAVAEQDGEIRSLGVIPNREDSVRKLVRKLGAVEELRFCYEAGPTGYVLYWQLSKLGAKCEVVAPTLVPVKAGDRVKTDRRDALKLARNYRAGELTPVWVPDAAHEALRDVVRAREAAKKDQLRARHRLGKFLLRQGRRPPTGVKVWTLKYLEWVKREVHFEQLAQEDTLLDYLHEVEHAAARIARLDGAIERAVKCAPPRMRAVIDALQALRGIAHVSAVTVVAELGELSRFSRASQLMGYAGLVAREDSSGKRTRRGAITKTGNAHLRRIVVEAAWSYRYRPSVGASLRKRQEPVGEEVKEIAWKAQHRLHERYRQLLARGKNKGVLVTAVGRELLGFIWAIGTTVETAHKESLQRVA

SEQ ID NO: 496219 - protein, 350 aa, unidentified
MEHIAIDLGGRESQICVRNGEGRIVLEERRETRRLGAFLWRRERSRVIVETCAEAFAVADKALAQGHEVRVVPSTLVRGLGVGARGIKTDVRDARALSEASCRMDLPSVHIPSQVSRRRKSQCGMREALVGARTQMINTVRGWLRTQGRRVRTGAAETFPKRVREQQEQEHARPLARYVERQLETVELLSRQIAEADAELLEEAKQDETCRRLMTVPGVGPVTALRYVAALDERSRFETAHQVESYTGLVPGENSSSENRRRTSLTKAGAPALRWALIQAAWTMRRCRPEDPAVLWCMEVERRRGKRIAATALARKIAGILFALWRDGTTYDPNRGARRPSEPTHRETSN

SEQ ID NO: 496220 - protein, 358 aa, unidentified
MRFYTRQHRHYCGIDLHVKTMYVCILDAAGQVLVHRNVPSTPEAFLEIVAPYREDLAVAAECMFTWYWVADLCAAEDIPFVLGHALAMKAIHGSKAKNDKIDSQKIAALLRGGLLPQAYVYPAAMRSTRDLLRRRLHLVRKRGQLLAHIQNTRAQDQLPEFGRRLAYPANRAGVSEHFPDPSVRKSIDVDLALLERYDDLITDLELTIVREAKRHDADAFHRLRSVPGIGKVLAWTMLYEIHDITRFDRVQEFASYARLVKCTHQSAGKTYGTGGAKMGNVHLKWAFSEAAVLYLRHAPGGKKLLAEIEKETRERQSPFHSRSQDRACGVLPVVARHGVLHGEVSRGIAEKRAGEPDG

SEQ ID NO: 496221 - protein, 353 aa, unidentified
MKDYYVGMDVHKASIVIAVQNAAGKVVMQSIIETKAQTVRDFIKGLHGPVHLTFEEGVHAAWLYDLTRPLVAEVVVCDPRKNKLLLSGNKSDRVDAQKLAHLLRAGLLQAVYHGEQGTRSLKELAHSYDSLVQDCTRVMNRLRAMYRGRAIECPEQSIYDSAGRAQWLAQLDDKGARLRAENMYKQLDALAALRDEARAQMVNEAAAHPASRILQRVPMIGPVRAAQIIATVNTPHRFRTKRQFWAYCGLAVVTKASAEYGFTKGELQKKAKKNSTRGLTNNFNRRLKEVFKSAAVTAGVRGQFKPYYEGLLAKEMSPEAARLTLARKIAATTLAVWKKGEAFDPQRITQQAA

SEQ ID NO: 496222 - protein, 351 aa, unidentified
MNINHYIGFDVHKKSVSYCVKTADGKIIEEGKLRATHRVLREWAQKRTEPWHGAMEATLFSSWIYDALKPFAAELQMGNPLMMKAIGAAKKKNDQLDARKIADLVRCNLLPVCYVAAPEMRDLRRLLRYRNLVVGQAVQMKNRMSGLLMEVGAEYNKQRLHGAKYFSELLEQLEEVPESVKDLLRLSRGALEVFETTQRQLLDRLQKEPMLVKRVKLLRSIGGVGEVTALSWALEVCDPWRFPSIGDAVSYCGLTSALDASADKQQRGPISKQRNAHLQTVLIEAAKLAPRWNKQLAELHERELKRGHRNRATLEVARKLVAYLLAVDKSGKPFEVRKQPAAKTGEETKVA

SEQ ID NO: 496223 - protein, 365 aa, unidentified
MAEITRALVARVGVDLSKRVFQVHAVDRSGRVVQARAMPPDRFYAWCAELPAGCLVAMEACGGAHHVARRLQLLGLDARLIAGHFVSPYRMAGKRGKNDANDAAAICEAAGRPHMRFVPVKTVEQQGQLSVHRLREGYKEERTALINRIRGLLAEFGLVFPRSPEALRAVLAEVIEDAGNELPGVARLALQRAHLHWIDIELQMAWCDQRIASHVRSDERAKKASTLLGVGPTTASAVVASVGDFKQFANARQFCAWMGLVPSQNSTGGKARLGRITKRGDDYLRTLLIQGAKSAVMSAGKRSDRISQWLVQLKERVGWQKAVVALANKNARILWAVLTGDVAFDPDHVPQPPAARSGLEPQPAA

SEQ ID NO: 496224 - protein, 351 aa, unidentified
MKTQQTACPKLFIGIDIHKRSWKVHCSTDLSGGRTFSMPPDPGKLFEYVERHYPDYDVSTAYEAGCCGYSAHRCFESYGWTSLEVNPADIHRKGKEKHTKTDRIDAQLISRELKDGRLEGIHVPDVEREELRSLFRRRNDLVKDFRRIKSYIKMQLLYFGIKEPEEFDNDHWSHKYRKWLDGIVFENPTAKAMLESRMRFFRFVDQELRDVSTQLRRYCKTYHKKDYMLLRSIPGIGGIVACGILCELGDLRRFNNVKHLAGYVGLAPGVHQSGSNYKTLGITPRAHRLVRSYFVEASWQAIRADPVMQAYYRKHQGRNVKSIIVKVARKLLSRTLAVIKTETPYCIGVLE

SEQ ID NO: 496225 - protein, 329 aa, unidentified
MEAFQPVVGLDVSKATLAVCHQVGTRIQHLEVANTPAGFRQLVRCGGATSLYVLEATGPYYLAVAYHLVGAGAQVAVLNPLVVKRFIQMHLGKGKSDRKDAQWLLRYGQQQATPRWQPEEAVLVECRQLEQATELLIRQKTMVHNALEALQAQPVVSPAVLQQLRQTLRQLTEQVEQLETKLLATVEQRYASEMQLLCSIPGIGRKTAALLLLFAGGFTSFQNHRQLIAKAGLCPREFSSGTSVRGKARITKMGGSLIRSKLFMCSWSARKANGACRALYDRLVAKGKNGKLALIAVCNKLLKQAYAIVTSGIPYQADFSRKSLLSPCF

SEQ ID NO: 496226 - protein, 397 aa, unidentified
MPTMTQPVAQPQRHAQRQAQRRAQFESQFESQFEPRPVLGAGRVTGGVDTHKDTHTAAVLDPTGRLLGHRQFPTTPAGYALLLGWLRAHGEVDKVGVEGTGVYGAGLALYLRVAGVELVEVDRPDRKTRRRQGKSDPVDAEAAARAAQAGRASGIPKDHAGAVEALRALRVTRRSAVTARAQAQTQMKSLLVTAPDPLRSQLREMGERQLVAHCATRRPDRRPERGALADPTTATRIALRALARRHQQLSAEIGELDALIAPLVTQINPALCALLGVGPDVAGQLLVTAGDNPARLRSEAAFAMLCGAAPLPASSGRTQRHRLNRGGDRQANCALYRIVLCRLRWDPRTRAYAQRRTAEGMSRKEIIRCLKRYVAREVYTALLNPLPSSVPASTCAA

SEQ ID NO: 496227 - protein, 367 aa, unidentified
MSSIAHRGFVHLGMDVSKDSIAVAVLAPDRDTAEFDKIFHDTDSVRRLVKRLGKPKEIWACYEAGPTGYDLQRLLTSMGVRCDVVAPSLIPKGSGDRVKTDRRDARRLAGLHRAGELTPVAIPTPAQEGVRDLCRTRGDMVQDLTRARNRLSGFLLRHSVVWRGGSKWTERHRRWLATLSFDDPAIATTFSHYLATVKLRDTALEAVEADLVPWCTKDPFGDQVPRLAAYRGVTRIGGLCLAAEVFDWRRFPKARPFMSFTGLVPGENSTGLTQRRGSITRAGNAHLRGQLCEAAWAYQHSPNVGAGIRERQQGAPPETVARSWAAQIRLSRRFRQLAAHKNVRSVVAAAIARELAGFLWAEMVAEV

SEQ ID NO: 496228 - protein, 340 aa, unidentified
MELYTAFDLHANNTYVAVIDHEGKRVTKKKLPNDSRIILDFLSPHREQIIGIVVESTYNWYWIVDTLVDAGYKVHLANTAAIKKYKGLKHSDDKEDAFWLAEMLRLDILPEGYIYPKEGRAIRDLLRKRGHLVKLRTSLILSLQNIIVRNCGVKVDGNDVKRLKEDRVTPLLKEDEDLALSGKVTKESIDFLTSKIRAIEYTVECKVRLKDPYEKLLTIPGIGKVLGLTIMLETGSIDRFQKVGNYVSYCRKVSSRWTSNEKAKGSGNKKNGNKYLAWAFSEAAELARRYDPLSRAYYNRKMQKTNFMIAHNALAHKLARAAYHVMKDHVPFIPEKLFAT

SEQ ID NO: 496229 - protein, 418 aa, unidentified
MSKADLTIGKIQNKENTMNAVGIDVSKNKSTIAILRPFGETVAKPFDVKHTSSDITYLISQLKSLNGDTRIVMEHTGRYYEPMAQWLSDAGLFVSAINPKLIKDFGNNTLRKVKTDKADAIKIARYTLDNWCELKPYNNTDELRRQLKNMNRQFDFYMKQKTAMKNNLIALLDETFPGINTFFDSPARNDGSQKWVDFVTIFWHVDCVRRHSISSFSERYQSWCKKKKYNFQSQKPNDIYEFSHDLIATLSKDNVTKLLIQQAVDQLNIASKNVESLRLLMNQTAAKLPEYPIVLDMAGVGTTLGPQLIAEIGDLSRFSHKGALTAYAGVDPGANQSGDYEQQSVRTSKRGAPQLRKTLFLIMDSLMKLAPPDDPVYGFMMKKRAQGKDYYVYMTAGANKFLRIYYGRVNEYLSSLTS

SEQ ID NO: 496230 - protein, 372 aa, unidentified
MQQTIIYVGLDVDDTQYHGSALDKNTGEVIHFKCRPTLNGLLGQLEKLRQYFPGSTLTLCYEASYIGFTLQRDLTDKGYACVVVAPTSIPSPRSKQIKTDRIDASQLAQFYANGLLTLVSVPEREQEQDRDLIRSRQHLVQQRTELRTHVQALLRRNGLHYKEQTGNKTHWTKYHYCWLARTVEAATGSLKANLELLLRQLKGLNALLVDYTQQIEALANTPRYQKPVQALTCYKGIKNLFALTMITEIGDIKRFPHPRQLVSWIGMDIREYSSGGKHNRFGITKQGNRYLRTAFIEANQRGYRTARITKDIKARRAHTAPELIDIADRCLRRLNKKGNRLLIGGKHPNKVKVACAREMVGFVWESLNKVAA

SEQ ID NO: 496231 - protein, 358 aa, unidentified
MEKLIRVGMDTSKSVFVLHGVDAAEKVVLRKKLRRQQVIEFFGKLKPTKIGLEACGAAHYWARELEALAHEVVLLPPQYVKPYVKRGKNDAADAEAICEAMSRPTMRFVPVKTAEQQAALMLAGTRDRLIRMRTQLTNAIRGYAAEFGLTAAKGLDKIEPLLARLTAATELPKLAKELFAAHAREYAQLKVEIQKIEAKLMAWHKHNELSRRLVEVPAIGPIGAALVVMKVPDPHAFRSGRDFSAWIGLTPKDHSTAGKTRLGVITRAGDETLRRTLILGATAVIQQVRRGRGHPSPWLIDLLKRKPPKLAAVALANKTARIVWKLMISGERYNPMRLRDTRSPSARCGSEPTAITQA

SEQ ID NO: 496232 - protein, 329 aa, unidentified
MKIQHIMGADLSKKSIDLICHLQSAHIQIENTVPGFKDLMEWFRQQKINPSETMIVMEHTGFYSYGFENFLHQHQIAFCKVNPLAIKRSIGLVRGKTDKLDAKRIAAYGYEKKDRLVMDVPASDGLKRLQMLHSTRDRLVRQRASLICAIKEYRHIGISEKDTIMQTQLQLIKNFDKQIEKLMAEIESTINKETPLKQNFNLLQSIKGVGKILALTVIIKTHNFTRFANARKFACFCGTAPFEHSSGTSIRKRSRVSHLADKQMKSLLDLSAKSAIQYDKELREYYLKRTEGGKSKMSTINVVRNKILYRMFAVIKRQTPFSENYLQVA

SEQ ID NO: 496233 - protein, 387 aa, unidentified
MIYYVGIDISKYKHDFCIISNAGELIVENSSFQNNKIGFQCLLEHLKPYNKSDIHIAFEATGHYSLNLELFLINNGYTYIKTNPLIIHQFLKARSLRRTKTDKADSITIAKYLMSVPYKPNSDLLYNIFTLKSLCRARENLIKERSKFAVLLTNELDKSFPELKPFFNNMISSTLLYILEKYTNTKHISAMKDYESIRKLSHGKFTYAKFAQLKELAKNSVGFHNENTDLLISTYVSIYNDFNNKINPIEKQISTIVKVLNPRMLSIPGIGEISAATILSEYGDIKNFSNPNKMLAFAGLDPSINQSGTLESNGKMVKHGSGHLRYAIMNSAMAILRFSPEFYDYYLKKRSEGKCHRVALSHVCKKLIRVIYSLEKNDIDFNPSLLK

SEQ ID NO: 496234 - protein, 368 aa, unidentified
MSNIKFIGMDVHKKTITVAIADDGRNGQVRSYGTLANNINALDKFCRKMVSTASQLHFVYEAGPCGYGIYRHLTHKGFDCKVIAPSMIPRKSGDRIKTDRRDARMLARLHRAGELTAVYVPDDQDEAMRDLSRSREDAVIAARKAKQRLKAFLLRNGLTYSGRSQWSKAYFNWLADIGMPHPAQQVALQEYISSVHETLNRVDRLTEQIRQMVPDWRLAPPVSALQSARGISLITAVTLLTEIGDLSRFNKPAQLMAYLGLVPSEYSTGDAIKRGGITKTGNSHARKALIEASWAYRMQPRVSRILLKRQQGLPDQVCRIAWKAQLRLCARFRRLAAKGKNKQVVVTAIARELSAFLWAIAKQVQPIV

SEQ ID NO: 496235 - protein, 366 aa, unidentified
MEKYKFVGLDVHKATIAVSVAEANGGEVRYFGEVANTPEAVVKLVRQLKKGEATPTFCYEAGPCGYVLYRQLKGLGLECLVVAPSLIPTKAGDRVKTDRRDSLNLARLYRAGELTAVWVPDGAQEALRDLTRAREDMKHFEKQAKQRLLAFLLRHGKCYGGETNWTKMHFRWFESVKFEHPAQQIVFQEYVDTVMAMTKRVEGFDGQIRTAAAESVFWPVIEGLMALRGVSLLAATIVVAEIGDLRRFASAPQLMAYLGVVPSEYSSGPTKTRGAITKTGNGHVRRVLVEAAWTYRHPARKTEYLQRRAKHAPERIQEIAWDAQKRLCGRYRLLEAKGKLKQKVCTAIARELAGFIWAIGQVLPQQ

SEQ ID NO: 496236 - protein, 423 aa, unidentified
MKNSAAKKRKQVPSGYLVVGVDPHKKKHAVVFMTQDFTTHSKFKFDNSREGFEMVLERAKAEMLKTGCRGAIFAIETGAHHWRNLAYFLDERGIPLRLINQFTLKRRREGKDLNHRKNDYRDSEVAAQLLCTGEFNTARLPQGVYAELRGAYGSYRRLVKERTRIVNLVKSLLDGLFPEFTQVFKNPCGQTATTVLLTRAVPRDIAGITKAEFINAIRAAHHGRIIETKLRALHCAAKTSVGIEAGARSISLEIAFLIEKHRLIQKQLGQINGAFVKMVDETKEGKYLLSITGLNYVSVAGILAELGSFSSYQNAKQLIKMAGSNPTESESGGKRHSHTPISKQGRPVLRHCVWTAVFPMLHFNSDFRDWARKLRERPAGANPLNGREIVVAAVNKLLRLSFALVKKQTFYQIPVPQPIGVPT

SEQ ID NO: 496237 - protein, 413 aa, unidentified
MYIVGIDIAKKSHQAAIMKPDGTLVGRSFRFTNTKQGFEFLMDKLAAVDSSLENFEFGMEATGHYWLNLYTWLADNHATVHVINPLQSDALRNLYIRKTKTDSVDAKIIAQVIRIGQYSETKLADDRMLMMRDLCRQRFFLVDMVANLKRKIIVMMDRIFPEYQGFFSDTFGKSSTAILKHCTTPEEITLFGEDNLAQLLQVASNGKFGLKKAQELISLARNSFAARLSSKTLSLLVKQMMDQMELLQNQIGILEKHISSHFKSFGTKITQIPGIGPVLGASILSEIGDISRFANPKKLCAYAGIDPSVKQSGQFLGNENHMSKRGSGYLRRCLWMASFVSVNHCREITIVYKSQVSKGKTHFQSMGFVCHKLLNIIYTVLKNDIDYSPMLCVNPAITARTSRRIARAALKAR

SEQ ID NO: 496238 - protein, 412 aa, unidentified
MEVLHARCCGIDIHKKSITVCVPIREAGRKEQKHLREFGTTTSEILSCADWLRSLGVTHVAMESTGVYWRPVWNLLEGQFDLLLANATHMRNVPGPKTDIKDSEWIAQLLQHGLLKPSFVPHTGLRDLRELSRDRTSLVAERSRLKNRIQKILEEANIKLGSVASDVLGKSGRAMLTAMVEGQENPQQLADLALGQLRLKIPQLVEALRGRVRGVHRFRLKQQLERVDFIDAQIAQLEAEIEKQNAPFDEAVSLLAEIPGFDRTTAWSVIAEIGIDMNQFPSADDLASWAGVCPGNNESGGKRLSGKTRKGSRWLQQKLCQSAWCASRCKHSYFAAFFQRIAAHQGRKRAIVAVSHSLLVVCYYLLKRKCHFQDLGVNYFDQLNHEKLTRYFVKRLTRLGHRVTLEPCSAAA

SEQ ID NO: 496239 - protein, 333 aa, unidentified
MNKIINYVGIDMAKASFMAAFNETDEPWQFENINHGINSFFNHLKQLGFNQAETILGVESTGSYHLKLSVACQSNSYQIKVINPLIVKKYNQTTLRRVKNDRKDALLIRYCLSQGYGYPFNTTQDEFILEALIRQRNSLTNTKIQIHRQDQDIQLKQSAIKTKINSIYKDIEKTIDKKIKTIEKQLKDFDQPVQALLKTIPGVGPITAASFVSEITNIQRFKQPKHLTAYIGIDPRVYQSGESIKGKGYITKRGNKILRTILFNAASVAVLHNNMFQRFFQKKRSEGKPYRVALVATMRKMAHVIHAVWSNNSPYQDNYRQYHLSTREGLTGI

SEQ ID NO: 496240 - protein, 324 aa, unidentified
MMTPALGIDVSKDRLDVEIAACGKPRSKYFANSPDGWRHLIAWLKELKIKRVHACLEATGRYSLGIALALWEAGHIVSIVNPAQIRDLARTKLGRNKTDAVDAGHIREYAELFKPQPWTPPSPAMQRLGELQTIRAGIVSSLTEWKNRCGSGLADDTALALVKATITHFAAQLAEVDKAIAGTIDNDPDLSAKRDLLLTISGVGEVLAGLVLSELPGTDVLRSSAQAVAYVGLNPRSHRSGSSIDRPTRISKIGNATLRSALYMPALSAMQHNPVVAALAKRLKAQGRLRGKQIAVAAMRKLLVLCFGVLKSGKPFDPALAMPN

SEQ ID NO: 496241 - protein, 316 aa, unidentified
MISPQSFVGIDVSAKHLDVAVLPAGAHFTVAYTDSGIASLISRLRDLNPQIVVLEATGGYEIPVAYSMSEAHLPVVIMNPKVLRHFAKSTGKLAKTDKLDARVLAHYAQAIQPAVRPLKDPEQAELGILMSRRRQLRDMIVMEENRRRTTTPRVRGNIDQHLGYLRQLLKDLDRDIHDAIRRTPLWHEKSEILQSFNGIGPKVSASLIADLSELGTVRRTQISALAGIAPMNRDSGQWRGKRTIQGGRPAVRQALYMAALVASRRNPVIREFYQRLRQAGKPPKVALTACMRKILVILNAMLKNGTYWNPQLPIAA

SEQ ID NO: 496242 - protein, 311 aa, unidentified
MSEFIGIDVSKARLDVAAHGGSGFAVENTEADVGRLCEQLKALAPELVVMEASGGYERLCVAALAAAGLPVALVNPRQVREFARATGVLAKTDRLDARVLAHFAAVVRPPVRPLPDEQHQVLEELLARRRQMVAALVAEKNRLGLARTRLVKRTVREAAATYERLLGLIDRELDDLIKASPLWREKEDLLRSFKGIGPVSARTLLAELPELGLLNRKQIAALVGVAPIARESGSWHGRRSIWGGRGQVRAVLYMATVTAMRANVQIRTFYLRLRQAGKPGKVALVACMRKLLTILNAMVRTHTRWQQPSVA

SEQ ID NO: 496243 - protein, 351 aa, unidentified
MEAYAGQQYIGIDLHRRRSVVVRTTDTGEVLEAVQITNSPLALAEVMTQAGEHPEVVLEATYGWYWAVDLLQGLECEPGVHLAHPLGVKAFEYRRYKDDFRDSVDLADLLRMGRLPEAWIAPPAVRELRELVRHRAKLVAMRSNCKAQIHAVLAKCGVSVPMSDLFGVGGIELLNGLELPKPYMARIASLRRVIDLLDFEIDIFGKLVHGQLARDPGYTAVQTIPGIGPVLGAVLVAEIGDVHRFGTAEQLGCWAGMTPKHHESDTKVRRGRITKQGSRLVRWAVVESVQTLPKHAVLGRFRDQVAARRGTNIGVVAAARRQLEYVYYALRDHHVRGLHPRPTARPAAAVS

SEQ ID NO: 496244 - protein, 343 aa, unidentified
MNSTTIAVDVAKAVFEVAVSEHAGQVRERHRFSRERFRRYLGEQPPATILMEACGSAHYWGREAQTRGHRVVLLPPHAVRPYVVRNKTDRTDAKALLEATRNDEVRPVPVKSETQQALAALHRLRSAWLATRTARINIVRGLLREFGVVIPNGARHVVPALGLLEDADVGVPSLLRPALAEAAREIRELEGWIRTVEHQLEAVAEQTPVVSRLCSIPGVGLLTATVLVAAVGDVQRFPSGRHFASYLGLTPRERSTGQRRQLGAISKRGDAYLRMLLIHGARAVLCHAKTKTAPAPDRLRAWALHLERFRGHNKAAVALANKLARIAWAVWKYDTDFAAAPAA

SEQ ID NO: 496245 - protein, 344 aa, unidentified
MVEYVGLDVSKEETAFCVMDKDGKVLARGKVATDPEALFEALKEHCLCPERIVMETGTLCHWLARKLRALGLPVKLIDARQAHAVMKLQHNKTDANDAELLAEIARTGFCRPVAVKSEDAQGDRILLKARSHLVGQRRALENTMRGLLASLGHRFPKGVGKFAYRVRAILKEHPELGAAIEPLLGARAALEVSLGRLDEEVMACVKADPACRLLMSVPGVGAVTALAFAATIDDPSRFSKSRAVGAYVGLTTRRYQSGEMDYSGRISKHGDAMLRALLYEAANSMLTVVRRAHPLKDWARRIRKRSGHKKACVALARKLAVILHRMLVSGEAFRWPPRKEKATA

SEQ ID NO: 496246 - protein, 352 aa, unidentified
MKENTETHWVGMDVSKATFDVALACSGQHFPRTPLRTLPWKSFARTEAGVAQFLAWLGEQLPEEEFPQIRGVMEATGNYSIELTAWLVQQHPGLAPAIENPARTKAYIDSLGQRNRTDGMAARGLAFYGAERHPAPYEPLTPECLELRTLSRCRDTLVNERTAMKNRAHERCSSSLVRTIRKRRLKQLDRDIAKLEQEMKRIVDETPTLKSDFGLLVSIPGVGPITAMVVLAEVGDLRRFKRARQLSAYVGVSPRVWESGTSVHHKTRLCKQGNPRVRQALFLSAMAAVNTKSPNCLNETYRRLCLADKPGKAALGAVMRKQLVLMRALLISGKPYDPLWKTQRPNQPALAT

SEQ ID NO: 496247 - protein, 367 aa, unidentified
MGWMAPLRHLGAKMPVGQKPPANREPSMNEITTVGLDLAKNVFQVHGVDAEGTTVLRKQLRRAQVLAFFSRLPRCLVGMEACATAHYWARELRTLGHEVRLMPAQYVKAYVKRNKNDAADAEAICEAVARPTMRFVPAKTAEQQAAVLLHRGRERLVRQRTMLVNALRAHLAEFGVIAPQGLRNVGRLIAIIRDEKDARLPGLARQVLQVLAVQIEQLEAAIAALEKQLMGWHKSNPVSQRLATIPGIGPIIATAIAAMVAEPSGFRSGREFAAWLGLVPRQNSTGGKNRLGGISKRGNQYLRRLLINGASANLLRSKATNADPWVIGLRRRRPSLVVAVALANKTARIAWAVMHRQENYQRMATAA

SEQ ID NO: 496248 - protein, 343 aa, unidentified
MEHYVGLDVSLKQTSICVVNQAGSVLREGVVDSDPDAIGAFVRSNAPGVVRIGLETGPTATWLWTELKRLGLPVICIDARHAKAVLKMQINKSDRNDAAGIARIMQTGWFKEVRVKDIDSHSVRALLASRALLVKIKRDLENQIRGLLKNLGLVIGRAKFNVFAMRAEELIEDRPELIAAVRPLLEARKAIEQQVGDLDRKVLKLARYDAEVRRFMTVPGVGPITALCFKATIDDPTRFKRSRSVGAYVGLTTRRHASGEVDWSGRISKCGDAMLRTYLFEAANVLLTRVPKWSALKAWGMRLAKRNGLRKAKVAVARKLAVILHRMWIDGTEFNWSKKEVAA

SEQ ID NO: 496249 - protein, 342 aa, unidentified
MDTIKTLGIDLAKKYFQLHGVDANGKAVLRKKLNRKELAAFIVQLPRCLILMEACASSHYWGRKFIDMGHEVRLIAAQFVKPFQKSQKNDSNDALAIVECGMRPTMRFVAIKETWQQDIQILHCTRRRAVSARTAIINQVKGLLLEYGVVIDEKGGKFRMSAAHAIENADNELTSSIRLVIHENLREYDFLMQQIHIFDREIKIISERSEDCQRLQTIPGVGRLGATAFVASIGNARSFKNGRHVGAFLGLVPRQNSTGGRAKLLSITKRGDPELRAILIHGARANLVAIKNRKVPSKDKFSIWALGLLEKKGWAKASVAVANKMARIMWHTMAYKENYQAM

SEQ ID NO: 496250 - protein, 374 aa, unidentified
MVLAGRATRCGEAPVKVQRTSIGLDVHARSVVACGLDGDTGEVFQRRLCPDHREVLEWISGLPAPVAVTYEAGPTGFGLARFLLAAGIMCLVAAPSKLQRPAGDRVKTDARDAAHLARLLHLGQITEVTIPTVVQEAARDLARARDDCRTDLMGARHRVSKLLLRQGIVYYGGQAWTGKHELWLRGQRFDNPALSMAFEAALDAMVACVHRRDRLDAAIIVMADESEFTPVVRGLGCLRGISTLTAFGLAVEIGDWHRLTGRSIGAYLGLVPCEYSSGESRVQGGLTKTGNGHARRLLVEAAWHHRPHYRPSRDLRRRWEAAPAAAQERAHAANHRLHTRWAGFDQRKKRPVIANAAIARELAGWCWSLAVMHD

SEQ ID NO: 496251 - protein, 372 aa, unidentified
MSLRGVRDLEPLARRTAPVPPLATTAGELWDRRRSHARPNSRQTSIARTRQVTVAKMICGVDVSSFSLEACIGPQGPARSFPNTPEGSAELLAFCRQHGVELVAMEATGGYEKQSFSLLWAHGLPVALLNPRAVRRFAEGMGLLEKTDRIDAGVIAWFAAVKRIPACAPVSAEQQRLKALVTRLRQLTELQAAQRNQRLLVRETTVLASFRELLALVASQIRTLETAIAALIAADPLWQKLDQAFRSIKGVADCTVARLMAEMPEIGSASNKAVSKLAGLAPLARDSGKSQGQRTVRGGRRDVRAILFVVAGVVRRYDADFAAFHQRLSAAGKPKKVIRIALAHKLLVRLNAKAREVRNEFARRTSPPVALS

SEQ ID NO: 496252 - protein, 341 aa, unidentified
MTIVRIGVDLAKNVFALHGIDEHGKTVLARTVRRNQLLETLAAVPPCVVAMEACSGAHHWARQVTAFGHTPRLLAPKFVSPYRLSGKAGKNDAHDAAAICEAAGRPHMRFVPVKSLEQQAILSLHRVRQGFVEERTATINRLRGLLSEFGIVLPLKADTVRRQAAAAIETLPALAQGACDDLRAHLRTLDERIDDYDRQLKLAAREDARALQLMQLRGVGPIGASALVATVGSGHEFRNGRQLAAWLGMVPRQASSGGKARLGHITKAGDAYLRTVLILGARAVLAAAPGKTDRISRWALAVQERRGYMRAVVAIAAKNARLAWAMLKHGENFRVHEPKAT

SEQ ID NO: 496253 - protein, 409 aa, unidentified
MRFYGGHDWGFSEHQLCVVDEAGTVLLNQKYPESRQGLGDLFEALQGFRRQGELVVCIEAIRGRIPERYHAEGLALCPVSPNALVPERNRYTTSRSKSDRQDALCLANLVRIDSARLDEVRPDSPETEIVRKLKAERDDLLSDRLRKRSKLEALLRQVFPASIGLFADLDGAISRSFLSDFPSWKDAESLTVRRLRAWLKKHRYSGRQSAESLLEACAEGAAGLVSDAELASCRRQVARMIDALDHVHGQIKEVEAELAEALKAHPDTALFKSFPMVADLTAAGLISLFGDDRSRFSKADGLAAISGVVPVTIASGKSHRVCFRRACNRSARQTLVTFAQLSKRQSEWAKKKYEQRREKGQRHPAATRAGARDWLRVIYSCWKNRTLYDPTLHRAAVRLLEEAKTAAAG

SEQ ID NO: 496254 - protein, 423 aa, unidentified
MRFIGLDVHRDFCEVAIAEAGAVRSAGRVKTEPAALLLFAQSLGADDQVALEATGNALGIARIIEPHVRRVVLANPKAVKGITRAGAKTDRIDARTLAQLLAGGFLPAVWLPDEQTRVLRRRISARAQLVRQRTRAKNQVHATLVRNLKGRPPVSDLFGVRGRRWLADQELPADEQETVAACLRQIAFLDGEIGQVERALAEQVLASAEMRRLLTLPGVNFVTAAALLAAVGAIGRFPTARQLVSYLGLDPRVNQSGSEPARHGRISKQGPGETRHVLVEAAWHASRTPGPLRAFHQRVAGRRGRNVATVAVARKLAVVAWHMLSRGEDYAFARPSLTREKLRRLELMTGAERQKGKRISVWVTREQHQLDKELAAQAELAYRRLAQDWQPANRGTGAAPGRASRRPSSGQAARQETAPPPAL

SEQ ID NO: 496255 - protein, 361 aa, unidentified
MRIIGCDLHARQQTLAMLDTETGEVVNLTLMHEGNAVREFYSQLPRPVLVGIEATGSMHWFLNLMEELGIECRVGHPATIRAAEPRKQKHDRRDADLILKLLAENRFPAIWLPTKELLDLRALVLHRHQWVRIRTRIQNALQAMALANGLRRGPSLWSYDGQAKIAFLPLMPHASYRRSMLQEMYGKMEEEIENLTREVAEQAEQRCGARLLMTHPGVGPVTALATDVFLGDPKRFTDGKALGSYVGLIPREYSSGERQRFGGVTKQGSPLLRFLWCEAGAHAVRRDPELKRFYRRKLVQKGLGKARGAVARKLGIRLWIMLRDEIDYQEFCRRGQKQQSGTACAEVLEVGNGANRHRPID

SEQ ID NO: 496256 - protein, 354 aa, unidentified
MQSQTITVPKLFIGMDIHKKSWSVHLRTDLFDHKGFSMPPDPSKLVDYVTNHFGDHEVALTYEAGCCGFTAARYFLNMGWTVKVVNPNDVPRSDKQLYQKTDKLDCRNLCRQLQQDQLHGIYIPTEPEEQLKSLLRQRNQVVKQLRKAKSQIKGLLLFHGIRVPEEFDNPNWSKDFMQWLQDIKWAYATGAACMNSKLRILAVLKSEYLQTSNELRAWCHKHHKTDYYLLKSIPGIGGLLAAAILAELGDIRRFNNEREFSNCIGVVPGIHQSSESDNKMGLTPRCKALLRSYLIESAWVAIRIDPEIQAYYRKHAGRNPKNVIVKVAHKMCRRILSVVKSGTPYQMNYSKVKN

SEQ ID NO: 496257 - protein, 320 aa, unidentified
MNSKDILGIDIAKEKFDVALIINDQQKHKVFGNNEKGFSDLKKWLDKYEAKNIHACMESTGIYGKALALNLYNQKHIVSIVNPFKIKAFGQSKLTRNKTDKADAKTIAEFCVQMKPQAWEPKQAHIEELGALTKRLADLTNMVGQEKNRLESSPKSTSELIELTIKHLKDQIEVIKKKIKEHIENHEDLRQKRDLLATIPGVGEATIAQMLTFLDCPEKFESAKKVAAYLGLTPRHFESGSTVHGKTRLSKIGDAELRKSLYFPAITAIRYNPIIKAFYDHLLRAGKCKMVAICAAMRKLVHIIYGVLKSNRPFDANIAN

SEQ ID NO: 496258 - protein, 319 aa, unidentified
MAATAQDRKMFVGIDVSKSRLDVHIHPSGEAFTVAQDAEGLEQLVARLKDLDLAVIAIEATGGFEAMAVAALAAAFLPVVVVNPRQVHNFAKALGLNAKTDLLDAFVIARFAEATKPEIRALPDADTLALADLLARRRQIVQMITAEKNRAMRNISNAAVQKSIGRILKALELELARLDDDIDKMVRGSPLWREKEDLLASVPGVGKVIARTLLAEMPELGTLNNKQVAAPAGLAPWTRQSGQWRGKSMIGGGRSVCRTVLFIAALSATRHNPDLKAFSQRLLNAGKAKMVVLIAVARKLLTILNAIIRQSTPWQPKTV

SEQ ID NO: 496259 - protein, 343 aa, unidentified
MKLSYVGVDLAKNVFQLHGVDRSGKAVWRRRLRRHQWLAALMKAADTSCVIGMEACTGAHHWARQLQAHGYTVKLIPPQFVKPYVKSNKNDAHDAAAICEAMSRPHMRFVAVKSVAQQDIQATHRIRTELREQRNAKSNQIRGLLAEYGLVAPQTLLALRAAIPDWLEDAENGLTDYFRSLLHSLWGDLLALDERIKELDQKIEQLANGNEVTRRLQRLRGVGPMTATALVATVGTGEQYRKGRQMAAALGLTPRQNSSGDKQRLLGISKRGDAYLRTLLIHGARAVVSQARQRDDQLSRWVTDIAKRSHPNVAAVALANKTARMAWAMLRNKTDYDPGLATR

SEQ ID NO: 496260 - protein, 341 aa, unidentified
MEQATTIGLDIAKNVFQLHGADAAGHVLFRKRITRAKLLSFLAAQTRCVVAMEACAGAHYWAREIAKLGHHVRLIAPAYVKPFIKRQKNDAADAEAICEAAQRPSMRFVPVKTEEQQANGIVFRARDLLVRQRTQCVNALRGHLMEYGYVFPKGISHVETLVAVVEDLQSSLPDSVRVILKLLVDTFTALEAQIAVLDAEIRQRSKSDPTACRLMTIPGVGPIASTAITALVPAAEGFPAGRHFAAWLGLTPLQKSTGGKQKLGAVSKRGERTVRRLLIIGASAVVRQASRRGAPKGSWLAQMLARKPKMLVTVALANKMARISWALLVKGGTYRTPTAAA

SEQ ID NO: 496261 - protein, 337 aa, unidentified
MKFCGIDLHSNNSVLVVSDAEDRIVLQRRLPNDLEAILAALAPYRGELEGVVVESTYNWYWLVDGLMDAGYRMHLAHVAAIKRYEGLKHSGDAADAAYLAQLLRLGLLPEGYIYPREQRSARDLARKRIQLVRCCTAQVVSIENLVARHTGARPGCAQVKRMTADQVSAFRLPPDVALALKANLAICETLQQQIAILEKRLAECVKLRADYRLLKTVPGIGQTLATVIMLETGTVKRFAGVGQFSSYCRCVDSVRQSNGRKKGEGNTRNGNAYLAWAFIEAANFALRQCPPAQRFYERKQRATNRIVALKAVAHKLARACYYMLRDQQPFDVTRCFA

SEQ ID NO: 496262 - protein, 349 aa, unidentified
MSVDPAYKVARSGARAAETRWKDKTVIDGILGIDVSKNTLDVSISSCTKVRTKSFANTSDGWHHLLDWLVAQEIRRVHACLESTGRYSLGIACALYEAGHIVSIINPAQVRDFVRTKLGRNKTDGIDASRIREYCELFKPLPWAPPSEAHRRLSELQTIRSGIIAGLTEWKNRKNSGIVDAEAQALADATILHFTSQIGAVDKAIALAIENDSDLRSKRDLLLSISGVGDTLAGVVLAELPGPDVLHSSGEVVAYAGLNPRQHQSGTSVDRATRISKIGNAVLRAALYMPALSAMRYNPAIVALVTRLKSRGRLKPKQIVVAAMRKLLVLCFGVLKTGKPFDPAIAMGC

SEQ ID NO: 496263 - protein, 347 aa, unidentified
MQNTSELYIGIDVHKKSWSVNLRTDLFDHKTFSMSPDSSGLVRYVNNHFEGYQVKCCYEACCCGYSAFRQLSEVGWEVMVVNPADVPIVNKQQQHKSDKVDCRHLCKQLQAGQLRGIYVPDEKQEQLRSLFRQRSNLTMALRTIKCHIKGELLYYSIEVPKEYDNNNWCKSFIAWIEKLEWKYETGKESLQSKLRQLHFSYYEWLGVSNTLRSYVRKHYKKDYYLLRSVPGIGPLTAIGILAELGDIRRFRNLDRLASYVGLIPSVYSSGEVLQTKGLTPRSKRLLRSYLIEAAWTAVRRDMVLQEYYRSHSGKPANKIIVKVARKLLSRIWHVIKNEVYYQSGVKQ

SEQ ID NO: 496264 - protein, 351 aa, unidentified
MDKQKIEIILGVDTHLDKHVAVLIDGRGKYLAELSVDTTVLGYQTLLSWTHSFGDVKRAGVEGTGTYGAGLTHFLIEQEIDVFEINRPDRSMRRSRGKSDPTDAESAARTVLSGSATAIPKSHSGAAEAMRIVSVARRSAVKARTQTINQLRGLLISAPDKIRTKLWRSKPADCVEACAYLRTLGESNWMITLATTLRLLAKRWLYLNDELKALDKTLEQLTHQAAKRMRQQYGVGPQTAAILLSVAGDNPERLRSEAALASLCGVNPLEASSGKKIRHRLNRGGNRAANNALWTIAMVRMRSDPRTQLYVARRTAEGKSSKEIHRCLKRYIIRELYPIIMADLNEASLVF

SEQ ID NO: 496265 - protein, 345 aa, unidentified
MANDIQFSSVCGIDIAKSVMQVYKISSDGVVSNKAVKRADFLNEFRNIPPALIGMEACGGSQHWARELQSLGHTVRLMPPKLVKPYVTGLKNDKNDARGIYTALVMGVREVPVKSAAIRDLALLQTMRAKRQREKVAKINHIRGILTEYGLVMGKSLNAFLAKARPLIVELKERADVSPYIVSELLALFQEVKEAMEKIKELETNIDSIAKTLKQYDLFRSAPGVGSITAATMLVLLCNPAVFKNGREFAAYIGLAPKSTGSGGKNVVTHIPKKYECNNEVRALLVQCAHAICRGKHKSDWVSSILARKPKKVAVIAVANKLARQLWIMAKKGEKFERRLVLAAV

SEQ ID NO: 496266 - protein, 389 aa, unidentified
MKIYVGIDIAKLNHFAAAISSDGEIIIEPFKFSNDADGFQLLVSKLESFDKNSLIIGLESTAHYGDNLVRYLVTELYQVCVLNPIKTCQMRKNNVRKTKTDKVDTYVIAKTLMMQDNLRFVSFFDLDMMDLKALGRFRQKTIKQRTRLKIQLTTYVDQVFPEIQYFFKSGLHQHAVYALLKEAPSPKEIASMHMTHLANLLKVNSHGHFTKEQAKELRVLAQKSVGANDSAISIQITQTIQQIELLDSQLEKIEAEMTDIMKFNDSVIMTIPGIGYINGGMILGEIGDIHRFSNPNKLLAFAGLDPSVYQSGNFQAKTTRMSKRGSRVLRYALVNAAWNVVRNNATFKAYYDAKRAEGRSHYNALGHCAGKLVRVIWKMLTGEVEFNLE

SEQ ID NO: 496267 - protein, 430 aa, unidentified
MKNSVARKLRQVPAGYLRVGVDPHKKRHAAVTMTEDFVIHSKFKFDNSRRGFEEALERAKADMVKTDCHGIIFAIETGGHYWRNFAYFLDNNGIPFHLINQFTLKRRREGKELNRRKNDYRDAEVAAQLLSSGEFTETKLLHGVYAELRAAYNAYRRLVKERTRITNLLKDLLDGLFPEFTQVFKDPCRPTALSVLSTACVVPSIIAGMTEKEFIATVEAHHHGRRLMRKKLGALHSIARTSIGIEAGAPSVSMEISFLVEKLGLITQHIRTVEGSLITLVDETEEAKYLLSIRGLNYIAVAGLLAELGCFKWYRSAKQMIKMAGSNPTESESAGKRGTHTPMSKKGRPVLRYCAWTSVIPMLRFNPDFRAWAKQRRERPVHANPLNGREVVGAALNRLLRLAFTLVKNQTFYQIPKPTAVLKRQLVAAI

SEQ ID NO: 496268 - protein, 513 aa, unidentified
MSEGTAVPPFSRLSPRLLFKHSAWHMRHIPLTQNFHPQPLAPARKADWVHAHCARFRSPYVAQDKPFASGFKNPHRIGGDIMLKINYMSTLFVGIDVSSKTNTVYAMDFEENKYLSSSFGNNQPGADKLVNMISDCMHKHKNLDTLLIVLESTSVYSVHISNFLSTSEVLMPYKPYVFCVNPKTTANYRKSYIGMEKTDPTDAYLIADFGRVGRTKKLEPWRGGQFIALKRLTRHRTHLSECIAREKAYMVSNLYLKFSELQLLEGDDKPFGNLYGATSSAVLTEFLSPQEIIDMPEEELLAFLAEKSRNRISDISKTSELLRKAASDSYRLDKCMYEPLNVSLASSFNCIHAYQKEVRLIEQAIEKCINGMNPNALIILQSIPGIGPVWASGILSEIGDITAFHSSDALAKYAGFYWPKGDSGDFVSEDNQMSKAGNPYLRYYLGEAANSVRKHIPEYADFYARKYAEVTKHQHKRALALTSRKFVRLVFGLLAKNQLYTGEKLDVELNTKS

SEQ ID NO: 496269 - protein, 411 aa, unidentified
MQVIYERCCGLDVHKRTITACRLRWLGSEWQKEIRQFGTMTKDLLALSDWVVKEVCTQVAMESTGVYWKPVYNILEGQVELLVVNAQHLKAVPGRKTDVRDAEWIAELLAHGLLRGSFVPPPSVRELRELTRYRSSVVRDRARTVNRLQKVLEAANIKLASVVSDIDGVSARLMLEGLVAGQRDTEQLASLAKGRLKEKHGQLVEALSCRLQPHQSFLIAEHLAQIDYLEGAIERLSGQIEEKLRPFEQQIGWLDTIPGINRRTAEVLWAETGGDMGRFASARHLASWAGMCPGNNESAGKRRSGRTRKGSPWLRHCLVEAAHGAAHTKNKYLRSQYHRIAARRGKKKALLAVGHSILVIAYHLLTRKQAYADLGANYFDERDRQAVTKRCVNRLQKLGYEISLEKLQMAA

SEQ ID NO: 496270 - protein, 409 aa, unidentified
MRVIGMDIHRTFAEAVMIDGDRLIRLGRVNMSRDHLAAFAAKLTSEDHLVIEATGNAQAVAEAVGPFVGRVIIANPRQVHLIAKARIKTDVIDATVLARLYASGFLPEVWVPDQNTLKLRRQVTRRNQIVRQRVRLKTMIQSILHAHLVPQCPHADILGPKGRTWLLAQQLPEDESVAIERHIREYDRLTDDLRVVERDLARDALSSAETKRLMTIPGIDMVVAVGLLAAIGPIERFTSPGRLVAFLGLNPSVHQSGNSPARHGRITKQGPCHARTMLVEAAWQAVRGPGPLRAFYERVRGRRGTHVAAVAVARKITVIVWHLLTRSEDYAWVRPALHAKKLRDLELRAGYPARRGQRGAGYAYNLTRSRREERQRGEQAEAAYKRLTQGWTKRGNRRPPADASTEERQ

SEQ ID NO: 496271 - protein, 415 aa, unidentified
MDRLIERCSMLDVHKSQITACVRVPDDAGGRRQEIREFAATTLGLLTLADWLRSWAVTVVGMEATGVYWRPVFYLLEDEFECRLYNAAHLRHVPGRKSDVQDAEWGCQLVEHGLVRPSLVPERPLRELRDLVRYRKAKIQERTREVQRVEKTLQDAGIKLSSVASEVLGKSARTMLDALISGTHDPEVLAELAKGALRKKIPALREALQGRFTGHHALLIGQMLAQIDFLDETIATLSERVEELTRPFSREIELLDTIPGVDKRAAEMILAEIGPDMSRFPTEHHLASWAGMCPGQRESGGKKHSAATRKGSKWLRGTLTESAKAVVRTKGTYLSARYHRIKSRRGHAKATIATGHKILTAAYHVLNQGVPYNELGEEFFYRKDTENTERHRRRLIKQLERLGHQVTLEPLPEPA

SEQ ID NO: 496272 - protein, 345 aa, unidentified
MTNIVKQAAGIDVAQNELVVSLGRMNHDTGIDIFAFKTFPNSAKGFTELVTWVNKMAIKEMKVRYVMEATGVYHEKLAYYLSDQQQEVSIVLPNKISNYFRTLDIKTITDKTASQAICRFGLERKLEIWQKPKKIFKDLKQLTRERDQLITDRTVLKNQLHAEQAEAFPNESSIKRVTKRIHLIDKQELEIRAEIAELVKKDMELVKKIDTITTIPGVGKLTAVIVLAETNGFELIKSKKQLVSYSGLDVKLKDSGTSVKGKPKISKKGNRHLRKAMYMPALAAMRFNEHHKAVFARLVSKHGIKMKAAVAVQRKILELIYVIYKTDKAFNKNYTNIQIETVQKS

SEQ ID NO: 496273 - protein, 334 aa, unidentified
MENIALIGIDLGKNSFHIHCQDHRGKAVYRKKFTRPKLIEFLATCPATTIAMEACGGSHFMARKLEELGHFPKLISPQFVRPFVKSNKNDFVDAEAICEAASRPSMRFVQPRTESQQAMRALHRVRESLVQDKVKTTNQMHAFLLEFGISVPRGAAVISRLSTLLEDNSLPLYLSQLLLKLQQHYHYLVEQIKDLESQLKRKLDEDEVGQRLLSIPCVGTLTASTISTEIGDGKQYASSRDFAAATGLVPRQYSTGGRTTLLGISKRGNKKIRTLLVQCARVFIQKLEHQSGKLADWVRELLCRKSNFVVTCALANKLARIAWALTARQQTYEA

SEQ ID NO: 496274 - protein, 435 aa, unidentified
MCCIDDIRLEQFRQLKKEIRGSDQYLIIGIDVAKEKHRAFFGTAQGKTLLKNVIFDNTIEGFEKLDAYVERVKVQYSLPKVVFGIEPTANYHKPLAEHLLKCGLMVVLVGGTAVKNNRQLLNGRWDKNDDKDSANVADLIAQGKCMFYEYPLMTLRNVRILNALKRRLKKREHGISAYIRNHILAQYFPELDKYYGPSETLAVVRECLDPSVIAGMEYDDFCRTVAPGKMTLARERRVGAIWRTAVDSVGCTMGEAAFHEAQIAVDSLKQVRQEIKAIEDKLEDACLEFPEYTYLLSIPGFGPDVSAKVLGAIGDPHRFTSGKQVLRLAGFDLCAKRSGKTSNRATPIISKQGKADLRCALYQAAFIASLKSKDFIPYFTNKLVGRAKEKGIGTKMRVKLAAKLLIIAWTLMKKKECFDPKYLKLKYREERKTAA

SEQ ID NO: 496275 - protein, 387 aa, unidentified
MYFVGIDISKFKHDCAIVDELGDVITPSWSFQNDREGFSLLKELLDALDGEKKIGLEATGHYGQNLKLFLENNDFSFMEFNPLLINRFVHSKSLRKTKTDSIDALMIAQYLMTVEYKPYPPSFYTLEKLKSLTRFRDSLIRQRSKQLVELTNILDKVFPEFKSFFKGRFSATALYILFHYASPEKISNMNSKSYEPLRRLSRGRFSMVDFVELKTLARNTVGSTCDYLLQEMEITIDIYNQLQSKVEEIELQIHNCVRGLTPPMLTIPGIGVASAAVILSEFGDLSKFNSPSKLLSFAGMEPGYFQSGTSESTGKMVKHGSSHLRYAMMNCAQTVINNEPTFAAYYAKKRAEGKEHRVALTHVAKKLLRVIYTLQTKELSYNPDLVR

SEQ ID NO: 496276 - protein, 441 aa, unidentified
MTKEEVISDGEPQWAAFIAIDWADREHIWKLQAAESGSYEQGKLEQTPEAIEAWASPLATRFGGRPIAVALEQSRGAVVFALTKYCHLHLYPVHPSTLAHFRQAMVPSGSKNDPGDTGLLLELLLHHRSRLRRLKPDTEQTRELQFLVEVRRKLVDDRTCFSNRLTAQLKLYYPQVLTWFYKVTSPVSCDFLMRWPTLQALQKAAPRAIYNFYRRHNCREEEDRLQPIRQAVPATHDQAVIRASVLMVQATVRLIQALKRDIELCDERIEELTKSHPDFAIFDSLPGAGNALIPRLIAAMGTQRERFANASEIQSYTGVAPVVKQSGNMRSIRCRQAYPRFLRQTFHEWAGHSIQTSEWARSYYDELLSRGKRHHAAVRSLAYKWIRILFRCWKDRVTYAETFHQSALARRATPTPSTQSPAVDLQWKKVAGFLKISAASS

SEQ ID NO: 496277 - protein, 343 aa, unidentified
MEQYAGIDVSLESVSVCVVDATGRIVREAKVACEPEALIAWFGKLGVSMARIGLEAGPLSQWLYARMQEAGLRVELLETRHVRDAFKAMTVKTDRTDARGIAQLMRLGWFRSVHCKSLPAQELRAILTARKLVQSKRHDVEMSLRGILRGFGLKVGQTPPRNFEARVRELVDGHPTLLVVADAMLLARAVLIEQLGKLQKRLVSLARQDMRARLLMSTPGVGVLVALTYAAAIDDPARFRSSKAVGAHFGLTPKKYQSGETDVTGRISKIGDASVRTALYEAANVILTRPVRGSVLKSWAMRVARRAGMRKAKVALARKLAVVLHRMLVTGSAFVAGKAAAKA

SEQ ID NO: 496278 - protein, 311 aa, unidentified
MSFKIIKNNCCGLDVHKTWIFACIGITDSNNRTEYKQARFSSFTKGLNELCDWLAKYNCNDVCMESTGKYWIPVFNILEQRSLWVTLSHPKYTKPMKGNKTDRKDAKWICDLYMCGMVKPSFIPPADIRELRDLVRYRFKLTCMITGEKNRAQNCLTVSNLKLDDVFSDVFGKSSRSITEQILQHPGETFDVAPFVNSRCKTPIVEIQAAIDGAISKEQAVKLRQCLDHIDELNKHISEVEQEILRLSDKYEVALNLIRTVPGFDKNPLTAIQVLSEIGGDMSVFPTAKHLVSWAGCCPRNDQSNPKNQIN

SEQ ID NO: 496279 - protein, 373 aa, unidentified
MRVRKTLRSRKPKLPKHLEHINPHAAGIDVGSRSHFVAVPPGSCEHPVREFTGFTDDLHRMADWLLECGVTTVAMESTGVYWIPVFEILESRGLEVRLVTARHVKNVPGRKSDVLDCQWLQQLHSYGLLEGAFRPSEEVCTLRGYVRQRGNLVRYAAAHIQHMQKALSQMNLHLSTVIKDISGVSGMRIIRAIVGGERDPVSLARLRDGRCKSSESTIARSLHGNWRCEHLFSLKQALELYEVYQAQIAACDREILEQLARFEGSSGSGGAPPVDLNEALLRISGADLTAIDGSDTLNALKIIAEVGTDMSRWKSAKHFASWLGLCPGTKISGGKRLSTKTKRIVNRAAVALRISAVSLKRSKSALGAYLRRQ

SEQ ID NO: 496280 - protein, 312 aa, unidentified
MFIGIDVAKAELVVASRPSGERWVERNDEAGVKALVRRLAERSPQLVVLEASGGYEVPCVAALAAAGIPVVVVNPRQVRDFAKATGQLAKTDAIDAGVLALFGERIRPAVVPIPDDATRELEALLTRRRQLLEMLQAEKNRLGLVLGQGRRPVKKSLKQHITYLERELAITDTDLGAMIRESPVWREREDLLRSVPGIGPIVAHTLLAELPELGQLNRRQIAKLVGVAPLNRDSGTLRGHRSVQAGRASVRAALYMAALVATRWNTVIQRFYRRLLTAGKPKKLALVACMRKLLAILNHLVRTGQHWNPAAA

SEQ ID NO: 496281 - protein, 343 aa, unidentified
MQAVTTIGLDIAKSVFQIHGVDAAGNVIVRRQLKRRYVLPFFQRLPPCLIGIEACASSHHWSRELKALGHTVRLMPAAYVKPYVKRQKNDAADAEAICEAVTRANMRFVATKTLEQQSCLMLHRTRHLFIRQQTAVINAIRAHLAEFGIVAPVGRNGVEDLLNIVADCGDKRLPDVARACIAALGAQLRMLKARILEFDRLIVAWHRSNEASKRLDDIPGVGPALATALVASVADPKAFRSGRDFSAWIGLVPKQHSSGGKDKLGSISKQGDRYLRSLFTAGALAVIRYAKIHGTKHRPWLTALLARRPTKVAAIALANKIARMAWAMMARGDRYKEPVALAA

SEQ ID NO: 496282 - protein, 520 aa, unidentified
MATSRTRRRSSPRRPSASVGKPRGVLHPRVQLVGPEHFGIVCFDCAKARSKFLLADFYGRVLIPPTTVGHNRPDLDAAVAQVRHAFASHQLQDGLVAIERTGRYHRLVQRTFAAAGFETRILHPFVTKQYRQPVDPGTKTDDTDLAAIHRATVTGCALLEATRDEAWTTLQLVIRHRRDLVGKGAALNCQIRDHLDAALPGYAACFDKLWESQIPWHLLRHFPTAEQLRTAGLTTLCHSLRQAGIRFQQRTVQAVLDWAEQAAPGDVAASQHRRIALALYDDRQRKTQEIHALERDIAGRLVQTPYVLLLSFPGINVVSAADYGGEAGPMEHYANPKSITGRAGLRPSRYQSDAVDKANGPLVRNCNRALRAAILGIADNLIVCNHHFQHLARQWARQGKDPRDIRVRVADRFCRISFQMVAGRQVFRHPCIQGRHYILDKLMAFHRAHDTPMPEVLQDLQAAIGHLSPREHAAEARPLHEELQRIQQGRRRGPQLLGDILPIVLARLGVGAVQSTESGE

SEQ ID NO: 496283 - protein, 402 aa, unidentified
MNCVGIDVSKGKSMIAVMRPFGEVVVSPFEVRHTASELSELARLLKNLDGETRVVMESTGNYHAPVAWLLHGAGLYVSVVNAMLVHDYGNNSLRRGKTDKKDAVKLANYGLDHWLTLPRYVPDEDTRLMLKTCYRQYQQYSKVQTMLKNNLISLLDTAFPDANRLFTSPPRADGSEKWVDFVATFWHCECVCGLSKKAFTAKYQKWCRKHGYNFSQDKALDIYASACGRFGVMPKTNTAKLLVEQAISQLQTTSAALAALKQEMQSLAASLPEYPVVMEMFGVGPTLGPQLIAEIGDVRRFHSKKALVAFAGIDAPPYQSGQIDVRSRSISKRGSASLRRTLFLVMGVLLQCAPMDEPVYQFMNKKRSEGKPYRVYMMASANKFLRIYYASVKTYLDSLEHN

SEQ ID NO: 496284 - protein, 544 aa, unidentified
MVAARLVLFGPSLSMTSASREVLIGGGPALRKGPALPRWRVCMFSQAEPSLGLKFRLKEYVMSQRKMSTFERLNSGRMNRKQRRELARRVAASDPGLSIVHPHAAGIDVGNSSHFAAVPADRDPLPVREFGFWTAELHKMAEWLVACRIDTVALQSTGVYWIPVYDILEQHGLRVVLVNGQHTQNVPGRKTDVQECQWLMKLHTYGLLRDSFRLAQNLEGVRTVWRVRGRHVEEAARSVQHMQKALTKMNVQLANVISDVSGLTGQAIVGAILQGQRDPYKLAELSDPHIQASQEEIARSLEGTWREDVLFELQQAVDSYQFAHTQIRQCDAKLKAYLTSLQSRVLPQPVVPAESKPLQPKTRKTRKQGANAPPMDLTAELVRICGVDLTSIDGINIISAMTIISEVGPDLHQFQDEDHFTSWLGLTGNENLSGGKRVKGPKRKVKNRLADVLRMGATSLLNSDSYLGARYRQLRRNAKIPAVAVKAMARHLAVLVYRLLTKGQAWVDRGAQLYQQQRQERELIMLREKARKQGLQLVPLAPAN

SEQ ID NO: 496285 - protein, 362 aa, unidentified
MKKGIREMESEWKQRPERTVGIDLGDRFSRYCVLNRDGEVLEEGQVRTGAEGFRRHWEGELRQRIVMETGTHSPWISRLLQSFGHQVIVANARKLRAISQNESKNDRQDAEMLARLGYCDPKLLAPIRHRSAERQRDLNLLRARDTLVRARTMLINATRGLVKSAGGRLPAAASDYFVARVAAAVPAELEAATQPLLHQIAALSAAIRRLDQAIEKLGERYPEIVRLRTVPGVGPVIAAAYVLTLDGVDAVERSRSVGAFLGLRPRQSQSGNSDPEHNISKTGNQYLRRLLVQAAHYTLGRFGPDSALRRWGLKLAAGGKRAKQRAVVAVARKLAVLLHHLWRTGQDYRNFPEAAAVAGSAV

SEQ ID NO: 496286 - protein, 330 aa, unidentified
MERQYIGVDLHKQFFQACAMSQTGERIWEQRFPRTEGGVLLFRARCEAPTAVAVEACGPTWAFVDALGPTIGTVCVVDPRKTRLKAGFAAKTDRLDARRLADALRRASVVSVYVPPPAIRELREVCRGRHHLVRLRTRLAQMIRALLLRSGVADVPVRRVFSPRGLEWLETVTLPPAAAASLAQYRRILMAIQVEAAAANAAVTARAASDSIAQALDAIVGIGPVLALTIRGEVGDIARFARGAELASYAGLVPRVDASADRYWSGRITREGSPWLRWALVEAALHGIRRPDALGRWARQLAVRKGAFKARVALARRLCDDIVAAWPRPA

SEQ ID NO: 496287 - protein, 453 aa, unidentified
MSLPVINPHAAGLDVGSEKIHASIAGAEARVFGACTEDLHALRDWLKENGVTTVAMEATGIYWLSVYEVLEAAGLAVVVVNGAHVKNLPGRKSDMADAPWISTLHMHGLLRGGFVPPAQIRRLRDYQRQRADLITMGAAHVQHMQKALDRMNVKVHDVISSLIGVSGLKMVRAILEGERDAEQLAALCDAQILKKKKDRLLKALVGNWQAEHLFALRQGLEGWEFYQRQIQACDEQMAGVLQQLAGTPPVPGGETAAPLAAHKEARHNAPQEMPRLHEWLMQTFGGTDLSTLPSLSDYTVLQLLSEVGRDMSRWPTVKHFTAWLGLAPGSRQSGKRRRREVRHGGRAGQVFRVAARSLARARNSWLGAFYRRLAAVKGGKMANKAAARKVAELFYLALTKGMKYVEQGIQSYEARYLAQRLQGVQRQARQLGLTVFSHSLTQALQSQDPEVHG

SEQ ID NO: 496288 - protein, 415 aa, unidentified
MNDPKRWYAGVDWASESHLVWLADKDGRRLGERSFKHAGDGMAEMVGWLLKTSGAADPGQIDAAIEVPHGPVVETLIERGFNVWVLNPKQMDRFRDRYSVAGAKDDSRDAQVMASALRTDPDCFRRLAASDPIVVELREWSRIAEDLTAERTSLVNRLRQQLWRYFPAFLELEADLSAAWAIELWQAVPTPQAAKRVRKGSIEAILKRHRIRRLSTDQVLDILRQRPLTVAPGTVEAARAHCATLIARLRLINRQIADAHHQLDTLTAKVGATEDDSSGQNKQRDAVILASLPGIGRINLATLLAEASEALQRRDYHALRALTGVAPVTRRSGKSCTISRRYAHHSRLANAVYHWARTAAQHDAISRNKYASLRARGHNHARALRSVADRLLNVACSMLRSGTIFNPSLPRPNPA

SEQ ID NO: 496289 - protein, 367 aa, unidentified
MVLIACMRKRSDRQCRPESNYHEEAPMNVLYYIGLDIHKKTIAYCIKKIDGTLIREGTVVAERKALSKWLSELPGPWCGAMESTIFTGWVYDFLMPYAVDLKVAHPAMLKAITTAKKKNDRADAEKIADLLRVNLLPECHMMPEALRELRRVLRYRNMIVSAAVKMKNKMSGLLMEVGAIYDKKRLHGKKYFGALLERVEDVPDSVKELLKMSRNGFEVFNDIQKKLVTALRKNKLIRERVQRLMSIPGIGELTALTWVLEIGDVSRFSSSRQAISYCGLCSGQHESAGKEQRGPISKKRNKHLQTKLIEAAKLAPHWNPQLALLHEKELARGNKNRATIVVARKLVEYMLAVDRRGTDFESLHEAV

SEQ ID NO: 496290 - protein, 411 aa, unidentified
MEIVHARCCGLDVHKKSVVACVLISQPDGLIERQVRTFKTMTGDLLALADWLSCLGVTHVALESTGVYWRPVFNVLEDDSRTLLLVNPQHMRAVPGKKTDVRDSEWLADLLRHGLLRGSFIPPAPIRAVRELTRYRKTLVQARTDEINRLQKTLEGANIKLASVASDVLGMSSRAMLTALLDGERDPDVMADLAQGRLRNKLPELRQALAGRIQPHHMILVGQILAHIDFLEQAIAQMQTEIERCLPPFEEALELLQSIPAIKAVAGAAILAEIGTDMSRFPSAGHLASWAGLCPSNKQSAGKRMKGPVNRGNVWLRAIMGEVAWNAVKMRDTYFHAQFQRVARRRGRQKAVIAVAHSLLIVIYHVLRTGRPYSELGGNYFDQLDATRVERHHVHRLEQLGYTVTLTPSAA

SEQ ID NO: 496291 - protein, 410 aa, unidentified
MEVMFDRVAGLDVGKETLTVCVRSPGPKGRRRAETRTFKTMFGSLRVMRDWLVEAGVSIAAMESTSTYWKPPFYCLEEVMEVWLLNAAHMKAVPGRKSDVRDAEWIAQLLEHGLLAPSFVPPPDIRRLRMLTRYRTQLMGDRAREIVRLELMLEDASIKLSSVASSLKTVSARSMLGAMIEGETNPLTLANLAKGRMRRKIPDLAQALTGTFDAHHAQLARSMLRRLELVELALAELNAVIATACQPWQHQIELLQTIPGVGETVAQVIVAETGADMTRFPSAAHLAAWAGLAPAMHESAGRQTPAGKRHGNKWLTAMLVEAAGSVGRMHGKNYLAAQHARLTRRRGMGRAQVAVAHSMLISAYWMLKRDEPYHDLGADWHRRRSDEAHTRRLVAQLEHLGHTVIIDPAA

SEQ ID NO: 496292 - protein, 331 aa, unidentified
MFIGVDVSKETLDLVPTIDSNPLFHVQVRNDEKGIGQFYKKLTKTVKASSDQWLFIMEHTGVYCNPLLEFAAKKGLAVWLESAAKIKVYHALERGKNDALDAQRIAEYAFAKKDKIRLLQAPRKVLVRLKFLIKLRERLIMSKKRLLDPLREEQRFCDKQWAREHEKLLKPVIAKLEKQIKQVEQEIQQLIDGDDNLKKLYGLITSVSGVGQIVAINTLVVTNEFKQIVNPKQMACNCGVVPFKYDSGKSVRSKAKVSHRANKPMKVLFHLAAMSAISSDGELRDYYQRKVEEGKNKMAIINAVRNKIIHRIFACVRDRRKYEKNYTHILA

SEQ ID NO: 496293 - protein, 410 aa, unidentified
MRVVLLGDDWAEDHHDVELQDEAGTVLARRRLPEGVAGIRRLHELIGEHSGGEQASPRVVVGIETDHGPWVQALLAAGYEVFAINPMSVARYRERHSVSGAKSDPGDAHVLADLVRTDAQRHRPIAADSELAVAVKVLARAHQSICWMRGQQANTLRSTLREFYPGALEAFEELTSRDALAVLALAPTPAQGRALSRARIETALRRAGRRRYLAARGEAILTALRNEQLTQPPLVAQAFGASVTALVAVLTSSVNAAVELEGQLEASFGQHPDAEIIRSQPGLGTVLGARVLAEFGDDPHRYLDAKARRNYAGTSPITKASGKSHVVLARHKTNKRLRDALRQQAFAALNTSPGARAYYDAHRAAGDGHDKALRALANRLVGILHGCLRHHTPYDETTAWAHRTDRATAA

SEQ ID NO: 496294 - protein, 424 aa, unidentified
MDSKDQNSWEQHRYYMGLDWAKQEHAIAVVDGNGLIMAETTIKHTVEGWHRLREKLVDLAGPDLSLVAATIETNRGPVVERLLELGCTVYPINPNAAQCYRSRKAPSGSKTDRLDALSFADALRTDGHGWRPLNPEDPKTQELRLLCRDEMSLIEQRTTLVNQLQQALHEYYPAALEAFDDWTSPSSWAFVERFPTPQALKKAGKRHWEKFLHTHRLYRPETYQKRLEIFAGATEFCGSHAVTNAKSMLAVSLAKQLRLLEQQLKAYREHIDKLFQEHPDYTIFDSLPGIGEKLGPRLLSECGEDRDRFEDHEALQCYAGTAPVSFQSGQINRVRSRYACNKNLRTAVHLWANLSRKKCAWAQVYYHQKRLEGKSHACALRCLGQRWLKILWKMWQTKTPYDEQMHTRNQIKHGSWVLALTASK

SEQ ID NO: 496295 - protein, 316 aa, unidentified
MSQFNVFVGIDVSKDYLDVHVLPEGQSWRVGNNEAGCAQLSERLSDMCGPVLVVMEATNVFWRLAATALGSTGLSAAVVNPRQVRDFAKATGQLAKTDAIDAQVLALFAQRIEPPVRALPNEQCQVAAELLARRAQLMGMRVAEKNRLATARAAKVRKDITATIAFLEKRIGALDEEIDQWLKSTPIDQSRANLLKSFSGIGEHTARSLLITLPELGSLSAKQIGALAGLAPFARDSGKKNGQRQIRGGRSTVRAAMYMPAIAAIRCNAVIRALYQRLIAAGKHHYVAITACMRKMLVILNAMLKSNQPWKNPQEV

SEQ ID NO: 496296 - protein, 364 aa, unidentified
MKQYVGLDVSQRETSVCVVDEVGQVLFEGKAKSDPGALTALLRKRAPQAERIGFETGAMASWLWHELRRVDLPVVCIDARHAHAALSVRMNKSDRNDARGLAELVRVGWYREVKVKSEESQKIRAILIARSRLVAIRRDIENQVRSLIKEYGLLFPRAIGLKFRNQVCELLGEDHQLLGVIAPLLSIHEQICKQQSKFDDEVRQLAKSDETTRRLMTVPGVGVVTALAFRHTIDDPSRFRSASSVGAYLGLTPRRNQSGETDINGKISRWGDRLLRTYLYGAATVLLYRTKKWSSLKAWGMKLANRIGMRKAKVAIARKIAIVLHCIWVDGGFSPLTALLPEKASSRSKKLESSAVTVNDSHLD

SEQ ID NO: 496297 - protein, 390 aa, unidentified
MLTDTMDKGSIVDTSFGEASVASRAERRGRREIGRVLVHETATKRDPRRHCGINPNSRRNRRPTGPMSSYSQDWEKTMDEILFIGIDVAKDTFHVASCPATINISLPNTSTGTKQLIKTLQPHSISLIVLEATGGYERPIVAELLEATFKVVVASPRQVRDFARGIGEFAKTDPIDAAVLARFAQVVQPKPKPPSSPQTDELADLVRRRRQLTDLRVQESNRSQLALHPKVRKSVRKMIKTLDYQIAELDELIEQNIKSDDGFRGKDEILRSTPGVGPQTSAMLLSLLPELGQLNRQEIAALVGVAPYDFASGRFAGKSRIWGGRKEVRSVLYMASLTAMRCNSTIRRFADRLREQGKVFKVVITACMRKLLIILNTMMRNQTLWRTEKI

SEQ ID NO: 496298 - protein, 415 aa, unidentified
MDEGKMKCAGIDWAKDENALCVIDEVGRVLSERRFAHEEDGLAELCGSLVEHGVGRVAIERPEGVLVERVLEAGVVVIPIHPNQLKAARPRFRASGYRAKSDSFDAFCLAELARADNHRFRALTLDSDQTKALRALTRSREDLVGRRVALANRLRVELEAFWPGAAIMFKEIDSAISLAFLKRYPSPKEASKLAEKRLLGFLQRNRYCGRKSASELLGRLRKKAPQGRAGEAEMEARREAVLALVAALETLVGRIKRLEGRIAQAVRAHPDGEVFLSLFLGSKSTLTAACLLAEIGDRRERYPTNEAMAADAGMSPVAIESGKRKVAGFRRACDKRLRKALATLAESTRHHNRWAKDIYRRARERGCDHAHAIRILGRAWVRVIFRMWQDGMPYDPARHGGFKRLRSAEGLPQGV

SEQ ID NO: 496299 - protein, 311 aa, unidentified
MTNKIKRKTIVNVGVDVGKASLDIVIHEKKLHWQEENTEPGIKRILKRLSYYQVERLVMEATGRYEFNLAEAAYNKGLPVCIAKPLSVRRYAGAVEQLAKTDKIDAAIIAEYGAVCKPRVNPRKSKNLIAIKNLLVRRRQLVNLRTQEMNRKGIMGKDLEVSCKRIIRTLDTEIERMEKRLSQHVEQQSEWSEKHSLLKSAPGVGDTLIYTLLADLPELGSLNNREISALVGVAPINRDSGRMRGKRRIQGGRASIRTVLYMATLSATQCNPVIKAFYKKLVAQGKHKKIALTACMRKFITILNTMVKKLL

SEQ ID NO: 496300 - protein, 362 aa, unidentified
MENVTTVGVDLSKHFMHTVFMNKNGKVLKSKKYTKNSFDEFIKDLPPNATICAEACGGAHHFGRELQKHNFNVKLVPPHRAKAYMDRNKNDFNDAIGIGEASGRERMKFVPIKSEYIQGVQSLHNAREQLKSTHTQYMNSIRGMLLEFGVTISQGVSPFNKYIRESYYKDERIHYYARKSVDSLIEALYKVEEELDKMDKEIKKVAKENATSQRLMTIPGIGEKTATALITVSGKPSVFKNGRSFSTSLGLTPRQKTTGDKPKLMKISKKGNAYVRCLLIICARSLMIKANKTFISAITQRSEYKSNDRMSLWIRKLLARNVHTNKVCVAIANKLARISYRILVGDVKFDANLSNGGSFLMQ

SEQ ID NO: 496301 - protein, 332 aa, unidentified
MSFKIYVGIDVSKLCLDVFIREKQVHKQFKNDSKGFALLIQWMGKQVQEPIKSILFCFEHTGLYSLPLALFFEEKQIHYSMIPALEIKRSLGVTRGKNDFIDSKRIAEFAYRFKDKVSVTKLPAEAITKVHSLLTLRDRLSRSLGSYVCSKNEFARALGNEYLPELLSSYDKMILAIKAEIKQLEKSIKAIINENTELRTSLELVTSVKGIGFIIASYLIVYTHNFTRFDNWRKFACYSGIAPFDYQSGTSVRGKTQVSSIANMQVKRLLHLGAICAIHTDIELRDYYQRRLSEGKTRMTVINVIRNKLIARIFAVVKRGTPFVDIKKYIAQ

SEQ ID NO: 496302 - protein, 347 aa, unidentified
MTIVEAPPGITGGVDTHLDKHVAAALDPLGRLVGTESFDADAAGYKALLVWLKDFGEVTKVGVEGTGSYGVGLARFLRRKGIEVVEVNRPNRQSRRNQGKSDPLDAVEAARAAISGRASGVGKTKDGPVEAIRVLVVAKRSARQARVKAIVQMRHLGFTAPDQLHSRLKGLSVTALVAEGAKLRATKSADTVTAATKASLSSLAHRIQGLDLEIAELDEKIKSLLLATAPDLMARFGVGPDTAASLLVAAGDNPERLHSEAAWAHLCGVSPVPADSGKNAGHLRRHTGGDRQANSALWRIAMVRIAHDPETTQYFERRVKEGRTKRDVIRILQRYIAREVYRYLPRG

SEQ ID NO: 496303 - protein, 391 aa, unidentified
MEARTVNNLLPAASHDDAVGCLVAIELSKKSWIVAVNTPLSDKISRHTLKAGDGKELLDLCERIRTRVARETKRRVEIVSCYEAGYDGFWLHRLLEAHGIRNYVIDPASLQVDRRARRAKTDHVDVERLLRSLMAYLRGEPKVWSVVCVPSVAEEDDRRLNRERGRLINERIQHVNRIKGLLAIHGIYDYQPLRRDRMLRLERLRTAADGQTLPPRLKAEILRELQRLELVLGMIKTIEAERDAIASPKTETEHTNAKKIQDLAKIKSIGPEFATTLIGEVLYRSFDNRKQLASYVGLTPAHFQSGAMCRDQGISKAGNAKARTVMIELAWLWLRYQPDSPLSVWFRGRVGKLKGRIRRITIVAVARKLLIALWRYLETGLVPDAAALKLR

SEQ ID NO: 496304 - protein, 422 aa, unidentified
MMTDTAGTRTRDRSDDGPWVVAGVDTHKDTHHVAVLNAATGAGLGDMRVPATPAGHDQLHDFVRSRGRIRMIGIEGTGSYGAGLARALRAAGAPIREVIRPKRPHRRRGKSDPIDAYAAAGRALAEADALPVAKTGTGPCEQIRVLLVERRSAMKARVAAHRQITALLTTAPDAVRTRFARLSGGELIGALARTRPAPDADTPASATARTLRRLARRHRILTDEITDIDTELRALTARAAPTMLATKGYGVITTAALLVTAGDNPDRIRSEASFAALCGAAPIPASSGRTNRHRLNRGGDRRANWALHQIALVRLSGDPRTKAYAARLTATGKSRKEILRCLKRAIAREAWHLLTHPQPAPRTDDLRRLRHERGLTLTQAAHHLNTHPARISELERGTRPDTTLTAAYRQWLSTQQPQTHTT

SEQ ID NO: 496305 - protein, 312 aa, unidentified
MTASQDVFVGIDISKDRLDVHVRPLGVGFSVSNEAAGHAALIARLRPLRSKRIVLEATGGYERALWLALSEAGLVAAVVNPRQVREFARAAGRLAKSDRLDAAVIAHFAETFVPRPGKPDPVADRLGEHVLYRRSLQEEIVALEHQRRRLETPALRERADRRHAALRAEVKEIEREMRAIVDGDPGKKALFACLTALKGVGLVLACTLIANMRELGSLTRHQAAALIGVAPLNHDSGARRGYRAIAGGRRRVRNVLYVATLSAVRSNPVIREFYRRLSADGKPAKVALVACMRKMLVMLNGRVRDHLATATA

SEQ ID NO: 496306 - protein, 374 aa, unidentified
MKNVCGLDVHKDSVFMCILKENGDKTEEKFGVLTPELDRLRDLLISHSVGEIAMESTSVYWIPIWRVLCSDFNVKLVNPYFIKQLPGRKTDIKDAQWIATVLQKELIKGSFIPEPIIQELRLYERRIFYLNRNMQRAEQAIDLILQRCNIRLSNYVSDIGGKSMQKVIDALIQGRTEPEGLLALVHKRTRNKQGDDVIKAALTGIVSKADRNMLKLSREETLMYERQIEECYEQMREICKSYFDQEITLLQTIPGIREDAAMRIIAEIGVDMKAFLTASAIVGWAGLKPRNEESAGKIKGRKTLHGNKYLRVLLIQCAWAACRTKESRFFYKYHTLSKRMNHNKALLANTRKLLVIIWNILKKKQIYVSNMGEA

SEQ ID NO: 496307 - protein, 445 aa, unidentified
MDRVSTIGLDIAKSVFQVHGVDDAGVVVIKKRVSRAKVLDFFGGLSPCLIGIEACPSAHHWSRALQALGHTVRLMPPNYVKAYLKRSKNDANDAAAICEAVTRPSMRFVPIKTKEQQTGLMLHRTRQLLVRQRTMLSNAIRGHMAELGIISAKGRNGTAELLKVIANTEDDRIPPIARFCLEVLARRYVIVTAEIGAIDKRIYAWHRSSEHSRRLEEIPGIGPIVATALVAEIGDWKQFRSGRNLAAWIGLVPRQHSTGGKERLGSITKQGNRYLRWLLVAGAMAVIRYARQHGTKRAWLTRIMARRPVKVAAVALANKIARMAWAVMARGERFSGPKQTWGRREFRRRRLEPHPGLRSRTERALHQPAGTRTPRRRSARRSRRSDRPYQRGAALIARSENRRARRTDRCNSRRRGHCARHDRRLRPGIPRSMERRTRGHQRTGV

SEQ ID NO: 496308 - protein, 375 aa, unidentified
MGKNTRFVGLDVHAETIAVAVAEGRNQVRSLGTIANRPEALRRLLGKLGKLTELRVCYEAGPTGYALYWQLTQLGVQCEVIAPSLVPMKSGDRIKTDRRDAERLARSYQAGDLTPVWVPDSKHEALRDLVRAREAAKEDQLRAKHRLLKYLLRYGQRPADDCKSWTAAWWQWVRALQLSHAEQNTTLVELVLEVDHQGQRIERFDAAIDRAVDAAPEQLRAIVDALQALRGVAKVTAVTLATEFGCFSRFEKAGQVMSYTGMVPSEHSSGPKTRRGAITKTGNSHLRRVLVESAWHYRHRPRLCKRQKDMQPALSPKIATIAWAAQERLHRRYWALSSKSKPSAKIVTALARELAGFVWAIGVETERAFKVARAA

SEQ ID NO: 496309 - protein, 397 aa, unidentified
MSYYVGCDWASTAHQICVIDAHGQIVWQDSASHTAEGFAALRRRLQRFGVPADVPVAIERPSGLVVDLLLEWGYRVVSIQPNALKASRSRYRISGAKSDASDAFILADLLRTDGHRFRAMPPVADETRVRTRDDLVTTRVGLGNQLRAVLEAFWPGAAQVFADIDSPIALAFLERYPTPENAEHLGEKRLAAFLGRNAYCGRRTARELLERLRSAPTVTVGEANTEACGDAVRSLVAVLVPLVPQIQKLTSAIAQAMRVHPDGAVLMSFPRVGCTNAAQILAELGQERLRFPSAEQLAAEAGVVPVTLESGKHRGVSFRWACNKRLRRAVTIFADNSRRASPWAAQVYQRALARGCDHPHAIRILARAWLRVLWRCWQSSTPYQLSHHGSAQRLSVA

SEQ ID NO: 496310 - protein, 319 aa, unidentified
MAQNDLVVAGIDVAKDKVDVCIRSPSLKRTFVNAIEDRRELTSWLRRNKVGKAVMEASGGYERAWAKVLRNAKIEVRIVDPKRVRSFAQSAGRLAKNDTIDAEMIAWFAETFGEVPGQTYDAAREQLHQMVHARQALKDMQSKLTSQGEHAAPAAVQRIQARIAKTIAVELVTIEAEITALIQATPHFAGLAEIIESVPGIGRVTSAALIAAMPELGKASDKIVAALLGVAPYDDDSGRRRGERQIRGGRRRIRNVFYMACLGAATQHNPVLKAFYDRLVAKGKLKKVALTACMRKLISILNVMIARREKWDAKRYAVN

SEQ ID NO: 496311 - protein, 474 aa, unidentified
MHTQILAAFLRKPPLYELQHVGALQKKQTDTEQENPMNEDAKNIPSLSPQATEGTELPPGECAALIGLDWGDKKHALALVARGSCAIETLELEHSAESLHGWLDQLKERFSGQRVAVAVEASKGAIVSALLEHPWLLIYPVHPNTSRRFSTAFTPSGAKDDGPDARTLLDILRFHRGRLRALLPHDAQTRRLSLLVEARRTVVDRRTMLSNQLTSLLKNYYPQALALTGDLRYSPLALDFLDRWPELESLQRARPQTLRSFYYVHQVRRPEVVEQRIELARTARPLTTDRALCEVSIIEMAVLVAEIRLLNKHLAQLNKSVAADFTAHPEAHLFGSLPGAATVMAPRLSVLFGVDRERWLSPAELQTYYGIAPVIEKSGSKKWVHWRWNAPVFARQTLVEWAGNTVKYSPWAKAFYHQQKQRQKGHSAILRSLAFKWLRILWRCWRDRVPYDEALYLAQLQKRNPSLFALIQTT

SEQ ID NO: 496312 - protein, 357 aa, unidentified
MGKSIIDTSSVTRVGLDLAKRVFRIHAVDATGSVVIARPVNRRTLLKFFDALPRCVVAMEACASAHYWGRQLLELGFAVRLIAPAHVKPYVRRNKNDAADAAAICEAAGRPGQRFVPVRSVENQAALMRHRARELMVGQRTAALNALRGHLSEIGVVAAQGVQNAYALKRLACDGVDDDGEIVVPDCVRLALLPLVRQIDALDEAIETIDKELQASAKADETARRLMTIPGVGPVTASALLATVQNFGAFSSGREFAAFLGLTPREHSSGGKPRLGRITKMGDRYLRKLLVVGACSALAARKGHNDALRRWASGLLERKTVQYKFKLTAVALANKLARIVYALATKGGHYDDRPVAA

SEQ ID NO: 496313 - protein, 425 aa, unidentified
MSEKIVVGIDVSKAFNDICILSPNNDVIKRMKISNDIIGMNLLISVLEKVEDEYEDRAVVIMEATAHYHQILANFFRKHNYEVIVINPIQSGALKNINIRKIKSDKTDAYNIALLYRIKNYNETITHSDTVNSIKKLCRQHKELTDEIVEHINRLIAFLDISFPDYKKVFPDLQGKTPLSLLEKYPTVQDVLSPENKQDMIQLIKENSHKSYSYAEAKYEKLLHAAEKSIEVCIVNLSSAVLIQTTVSVIFSLQEALKAINDEIKRLSLLDEKFHKEIVLLQSIPGVGEYTACVVLSELGDVSNFSKPKELVAFFGLDPGVSQSGTYNRKNNKISKRGSPHVRLILHMLAKSNVYPNRNREYLNPVMRAYFEKKIAEKPYKVVMCAIMRKMVQIIFAVLRNQKSFELRTPEEHQKLIRENSKLVA

SEQ ID NO: 496314 - protein, 607 aa, unidentified
MCDSKTVQPLRHLGIGIDTARYGHHVSFLREDRKPAAPPLVVTESRDGYEQLQQQLESLHQKHSHAHFHVRIDAAGQYAVNLESFLRSLTLPMSVSVGEPKRNRDYHRAVSPKRKADATESLAMARFGVVERPDQTPPTPPEFAVLRRVASRLQAEVRQTTRLTNQLHNLMAGAFPELASLTSELNAKWVLKLLSKYPTAPRIAAARLSSLIKIPHLRKETAEKIHPAAQHSVGTFNGDVAEELIRQQVWQLEQSQAAQEKLKNLLLEAYDALPTSGHVHLESIPGIGKLTAAALVATIVSIDRFETADKLVGYFGVFPEEATSGVNKYGQPLAPGKMRMCKKGNDLVRGLLWNCAKAAIRYNPAVWPLYRRLVQRGMRGDVALGHAMRKLLHLAFAVWSSGKPFDPNHYPWEQDQAGDDPTPSSAQVTEPLPNENQAAGRTEQSSEGKAVTAATANVKPTSPPVNTPSSEADAATLTPLVDFAYLRGQVSMQQVLIHLGLMGRMRRSAGRGDQFRGPCPIHDQHAQRSRCFSVNLGKNAFQCFHAGCAAKGNILDLWATVHDLPLREAAIHLARTFHVPLHPEQTEKGNPLENPSNQPQHQGEQKP

SEQ ID NO: 496315 - protein, 335 aa, unidentified
MKALSKPERLVGSKSRIEHKEGSNNMDQFVGIDVSKAWLDGEAVPQSRPMRHGNDSAGIATLVSALVADPPALAVLEATGGFETEVASALAAAGVPTVVVNPKQVRDFAKAMGILAKSDRLDARVLALFGQRIRPQVRPLPSPEQRDLAELLDRRAQLVSMRAQERTRLATALAVAKPSLREHIQWLDARIGELEIDLTARLRTSAAWKVKVDLLKPVPGVGKVLLFTLLARLPELGHLNRCDIAALAGLAPFADDSGERRGQRFIRGGRSEVRKALYMATLSATQHNPQIKAFFARLTAAGKPFKVAMTACMRKLLTILNAMLKTNQPWQPRAA

SEQ ID NO: 496316 - protein, 441 aa, unidentified
MPRRIGLDVHREFAQIAVWEDGLVRQAGQVATTPEALRTLADSLLATDEVAIEATCNTHAIVRLIAPRVARVVISNPMKTRAIAEAKVKTDKVDAEVLCQLLAADYLPAVWMADERTQALRRQVARRAHIVKQRTRLKNQVQSILHRNLVPRPPVADLFGIKGRCWLANQALPPDEELTVEALLRQLDFHGQELRIIDAELGRVALEREEVKRLMTIPGVDATVALSIVAAVGDFHRFPRPEQLVSYLGLNPRVRQSGGAPASHGRITKHGRAHARGMLVEAAWVAVKTPGPLRAFYERIRSRRGMQIAVVATARKLAVLCWHLIIKGEDYAFQRTSLTQQKLRKLELRAGMPSRRGQKGKAAGYSLKEVRRRERELAEQAEQAYRQLVADWQAKAPKSKPGVAAANGTRVSRPSAGQAARQASVPEPALRSGVDHALTEA

SEQ ID NO: 496317 - protein, 417 aa, unidentified
MSRTPSASSPEEVSIKYVCGIDIGSQTCSGCITRPDKSVVLKSITFANAREGWQVWEQKLSQLDGKPGQILIGMEATSRYGENLYYELEKRGYVLRLLHPRQTHQFHEQRGLRAKTDRLDAMTIARVLLRREARSGYVPSEQVATYWELVRLHTQLGDEAAAYQNEIQALVVVLFPEFTQVFADPCLPNALAVLKIDPSAQDIAAAGVEPITQVLRAQTPARYGRPTARKLVEFASHTGSSGRALSGRSISLRILCDQLEQTQANLARLEAEIERLLTTDPGVKGLQQIPEFGLKTIAVLRVELGDVQRFERVDEVIAYGGMDIEIKESGKWKGKAKLSKRGSGLLRRMLYLAALRSIHLEGSAFGAYYQRLVARGLKKGSALMAVMRKMLTVAAHLLMHEEEDYDPCKVSVGTVGS

SEQ ID NO: 496318 - protein, 322 aa, unidentified
MNPKNYGGIDVAKKNFVIGIYGQDKTKTEANMPKGHAKAVEYLQKHNVDLVVLESTGGLEVPLANALHAADIRVVIANPQRTHQYAASFSLGKTDHLDAKMLADYAQALDSRKMADDMCYAPPSEEALALEALVKRRSQLVEMRKMEKNRLEQTHASQKASVVAMIKHLGELIAALDKEIDQSNRGGFNGKGEILSEMKGVGRITCATLLSMLPELGKVPHKRAALLVGVVPPPRQSGEKERKSGCVGGRMVVRNALYMAALTATRSEPKIKAFYEKLMSRGKAFKVALNACMHKLLRILNARMRDYLASLKETEESELQGA

SEQ ID NO: 496319 - protein, 342 aa, unidentified
MDHSAGLDVSVKETSVCIVDDTGRIVREVKVASEPEDLLRVLANPIYHFKRIGLEAGPLSQWLYSALAEAGLPVICVETRHMRAVLKAQINKTDRNDARGIAQMMRAGLYRPVHVKTLRSQKLRMLLTHRKLLQSKAIAIDNDLRGTLRNFGLKVGMVGTVKFEARIKELVENIPDLAVLVEPLLIVRRVLREQFVIQHRRLLAIVRDDEVCRRLMTVPGVGPVVSLTYRATVDVPARFHKSKSVGAVFGLTCAKYQSGEVEWSGRISRCGDEMMRVMLYEAAQSMLRSKKWSWLKAWAMQIARRRGMKKAIVALARRLAVIMHRIWVDGTEFRWTREVAAA

SEQ ID NO: 496320 - protein, 429 aa, unidentified
MNISTSIAEADSKYVWSVGIDWADEKHDISQRCWADGRYQTFQIGADPVSVRTWLEELKELAGPQGRIVVGFEQNRGSLFEMLREQKDWLDLCPLNPLTLSRYRQSFYTSGAKDDPLDSQLIEELVRKHLDRLRLYEPPEPVLRQLDLLCQLRRKAVDSAVGLENQLRSHLKVYYPLAVELHEDLSSTLTLHFLKRWPTLQSLKRAKAQTLRSFYYQHHSRSQSLIEERLQKIARAEAVTEDCTLIDPLVLSVQGLVNQLLAHKASEAAFDKAVQKLALKHPDYEIFNSLPGAGPQMTPRLMVAFGSNRSALTEPSQMQKKSGIAPVLDRSSQSQRIHRRWCRPKFLCQTFHEFAAYSIPHCTWAKAYYEQLMARGKSHHTAVRALAFKWIRIIFRLWQDHTTYDEERYLRDLQKRHSPLSQKIQLQPL

SEQ ID NO: 496321 - protein, 404 aa, unidentified
MQDATARFGSVDWATRGHAACVVDAAGQIVDQFTVEHTALGLATLVRHFQQQQVRRVAIERPDGPVVEALLAADLEVVVVSSRAVKALRTRYGLAGNKADRSDAYVLADCLRTDGHRWPALQTDTLQTLALRAAVRARKDLVATRVATANQLRAHLQVVFPAAVGVFAEIDSAIALRFLERFPSQDKATWLSDRRLAAWLQANAYCGRRPATELLQRLRTAAPGVRGPAADALVVVTLSLVRVLRTLVAEIAELETHIREQLALHPDGPIFQSLPRAGTVRAAALLAEIGDCRARFPSSETLAALAGAVPSTRASGQHHVVTFRWACDKKLREALVDFAQDTVRASPWAEQLYRRHRQQRKTHPHAARILTRAWISVLWRCWQDRQPYDPARHRALQRVIAPGG

SEQ ID NO: 496322 - protein, 396 aa, unidentified
MMILAMDLGKFKTVCCFYDTETHKYRFETIQTRRNHVEHLFSLENVDLVVMEACGPSGWISDICHQKNLRTIVCSTNDEAWFWKNTKRKTDRDDALKLAKMAMMNALTPVHVPKPEIREQRAIIKYRKGLDQRINRIKNTIRSLFVNHGIEIDTGKRAWCLGRERIDGYRKSIADCAADELWKGELDLELDQLDDLTEKMEAVEDRLEQFAKANPNIQRVMTIPGVGRKTAEALVAAIDDPHRFKNARHLSSYLGMTPKQYQSGETDRSGRISKRGPRLLRTMLLECAWASIRYNAWSKLTFARIHGGSTTRRKKAGIALARKLGVIAWAMMRDETDWDSTKLLPELKPEEVKLKVKRPEVRPAGELHAEKPKRPCGRAAKPKKRRGSPRRSPVKT

SEQ ID NO: 496323 - protein, 347 aa, unidentified
MKNTVIGIDISKKSTDWCLMRGTDVVSYHRVDNEIAAIESQLQELMDSYLIDRCELMVCAEHTGHYIYPLTIACQNKHVDLWLESGYNIKCEARKERGKSDKEDSRRIAEYGYKNRQDARYYSVPTQELAALESLLAERADYVTEKAKIEGQLHDQKDYTDPSVYKAKAKRLGKLIRQYDKLISETERELERLMSENETMGHQAALLETIPGVGRQTAMKMIAATKGFTLFENGRQFCCYAGTAPFEYTSGTSIRSKHRVSQRANKSLKAMLHLCALAVARRCKPNHFSDYYQRKVAEGKSPMSVLNAIRSKLVLTMFAIIRTDQPYSPQIVHNYVEKFSLKPIAIS

SEQ ID NO: 496324 - protein, 415 aa, unidentified
MSKSNVTPTPEPASLRYVVGIDIGNQSCAMCCLTPEKRQVFKPTTFANTRAGFDGLFEKLASLKSDPTSILVGLEATSRYGENLSQALLKAGYRLCLLHPAQVHAFAQQRGLRAKTDQLDAGTIARVLLSGEARFGYLPDDQVGTYRELLRLQQQLSEDGVRYKNELHALLVVLFPEFVQVFADPTRHTALAVLKRYPSAQAIVEAGVDALARLLHELAPHHYGRSTAQALFALAQTSIASGVAMMARSKSLSIVCDQLEHTLINLAQLEQEIDQLLSNDPQAKRLLAVAEFGPLTVAVLRAELGDVQRFSRMDQVVAYVGLDIQVKQSGKWKGQSKLSKRGSGRVRRLLYLAALRSLHEKCSPFRDYYQRLIGRGVRKGTALVAVMRKMIIVAVHLLKTQDCYDASKVGLQWVR

SEQ ID NO: 496325 - protein, 372 aa, unidentified
MTASVIYVGMDVHKDSIAIAVAPEGREPAQGLATIANDWAKLRKLLNSLVKNGEVLYVCYEAGPTGFGLCRKLREAGINCIVVAPSLVPGKAGDRVKTDRRDARKLAHFLRSGDLTEVHVPEEAVEAIRDLERARDDAKCAERVARHQLSKFLLRNDRQYGEGRAWTKKHMDWVRKQTFTYPAQQHVLEDYVKTVEDLGERVERLTKAMEQLVEGTVLAPLVSALQAFRGISLVSAVTIAAEVGDLKRFQTPQQFMSYVGLVPSEDSTGKRQRRGSITRCGNGHLRRIVVEAAWHYRHFPRLSQELRRRNQGVAQGVRTVAWKAQKRLNERMFHLLKAGKCAQKVVVAMARELAGFIWAVGQQETLLEVKSP

SEQ ID NO: 496326 - protein, 334 aa, unidentified
MKKRYFMGIDVAKATLDFCLLSKNATLLWRGQLPNESPAIVQFLARLEARGYKLAQIHFCCESTGVYGQRLVEALHQSALALSVINPAQSKFFAISVLRRTKNDKVDAQIIARFCRERQPLATRPLRPIEAQLKLLVHERESRVNEQNRERNRAKTDPHQIALPKLIEQQRKSRLKQLAKEIAQFDAAIDSLIASDESLKNQSRLLCSIPGIAKVTAAKLLSELAGKEFHSARQLAAYAGLTPQECRSGYSSYGKTVLCKIGNRFLRKALFLPAAVARRWCKALQPWITQLQSRKLHELAIRGALMRKLLHIAFGVLANQQPFNPLLVSIPKNP

SEQ ID NO: 496327 - protein, 386 aa, unidentified
MQASNVCTPTVGHVGTIFVAIELSQKSWLMTIHSPDRDRISRHKLTGGDHVGLLGLLETIRTRASHKLGSAPAIVSCYEAGYDGFWLHRLLTAAGIRSHVFDPASIAVEQRGRRAKTDRIDGELLLRTLMAYCRGEPRVVRIVRPPSPEQEDARRETRERDRLVQEQGGHTNRIKALLRLLGMAVGNPRRRDWLAWLMRQRDWQGQAVAPQIKAEIEREHARLMLVREQLAALEQRSAQAQPTPAAAEMARRRGILFQLKGLGPAFSGTLAAEVFYKDFDNHRQVGAYVGLAPSPWKSGGIDREQGISKAGNPRARLAAVELAWLWLRHQPNSALTHWFLARTANASKRVKRIAIVALARKLMVALWRYLTTGLVPDGAVLKPVEA

SEQ ID NO: 496328 - protein, 370 aa, unidentified
MSCNTDHPDHDDTAARAHHAAILVSLELSRRTWLATSLSPDSEKLSKHVLPAGDGKTLLELLAGLKAKAERRTQRTLAVVTIHEAGLDGFWLHRLLERNGIDSHVVEPASIAVPRRHRRAKTDAIDGAMLIRTLAAWSRGEPRVCVMVRPPSPEAEDRRRLGRERDRLLKERIEHTNRIKGLLFGQGIVDYAPLGKDRRERLDALETGDGRPLPASLKAELRRELDRLELVCSQMAAVERERDRLIETLAAGEAQPVVALARLQGIGRTTATRLWLEGLFRRFDNRRQIAAYAGLAPSPWQSGGTDREQGIAKSGNPRLRTTMVELAWFWLRHQPGSALSAWFRKRVGDTRGRVRRVAIVALARKLLVTC

SEQ ID NO: 496329 - protein, 331 aa, unidentified
MSEVVVGLDVHLKKTQVTVMKNDLIGEIVKRERVDNSKAGLRKSLEAVPKGTKVALESVGLCWPWIDFLEELGYEVLLANPVKVKLRAEDIKNDKLDSKTLAELVRMNWLPTCYVPPAELRWLRNLLRHRAYRTRLSTSVRNRSKSEFRKRDIELDVNLGTLKGRKAAFGLDVFEVNQNMELLDLIARQSKEVEALLYEKYGKIRPVELLMSIPGIGFLSALTLYAEICDITRFSNAEKLAHYAGLVPRVRQFGEHTCMGKESKGDKWLKGILIEASWAHVRFCPEGHLAGVYFDACKRKKSKTDAIKVVARKLVNVVWAVWTYEKEFMVK

SEQ ID NO: 496330 - protein, 379 aa, unidentified
MVPKPKPEREAPEAVAERYWIGLDLGDQTSSYCVLDQTGEVTARGTVKTREADLIRVLGVYQGNQLAMEVGTHSAWVSRTLEGAGLQVLVANARKLRLITQSQHKNDEKDAEDLARLLRADPKLLSPIVHRSQEAQKDLTRIRARAGIVQARTKLINMARGLAKSMGKRLGRCAAEKMGVQQVEQWEPEMAELLRPVLTLIEACTLTIETYDEKIAENSEEKYPDTKRLRQVPGVGALTATAFVLTLDDKHRIGKSRQMGPVLGLTPARRQSSASDPELRISKEGDRYLRSLLVQCAQWMLSRRGPDCELKRFGQRVAGIDPQNPVTKKDNKSRKRKKIAVVAMARKLGVLLHRLWVSGEPYHPFYATKTNRAGNRRVA

SEQ ID NO: 496331 - protein, 384 aa, unidentified
MAQMALQTNDSGLAGVLYMALELSKSTWKVGFEYQGKRRIKNVKGGEVGGLRQALEEAMQKLGVPEGAVVRCCYEAGRDGFWLHRLLEGWGVENVVVDPASIEVSRQARRTKTDRVDLLSLLSKLRQYHAGEFGVWKVVKVPSEQDEEGRLLHRELERLKKERTGHVLRIKALLFAQGVRVEQVGGKKWAGYLMGLTRHDGRALPADLMAQVRRESERLAMVQEQIQAIEKEQERRVREAAEVGGVMAMVQALRQFKGIGSVAAWVFVMEFFGWRQFKNGKEVGALAGLTGTPYASGQMQREQGISKAGNRRVRALAVEIAWLWLRHQPDSALSRWYAERFAGTSKRHKRVGIVAVARKLLVALWRYLQTGEVPTGARLKPAKA

SEQ ID NO: 496332 - protein, 316 aa, unidentified
MAEEWYVGIDVSKAELVVAVRPGGERMTLANDRAGIKRLVERLGELKPKLVVVEATGGLQRQVVAGLWMAGIAVAAVNPSWVRNFAKGSGVRAKTDRKDAELLALFAERERPEARPPANAETQALQELVMRREQLVEMLVAEKQRLTRASGTMRKELRHHIAYLEGSIKEIEEDLDKTVRRSDAWRRKSEIVRSVPGFGKGFCAMVLAKVPELGTLNRKQIGALVGVAPMPDDSGSRHGRRMIAGGRFEVRNKLYMCAMVAARANPVLKQFYERLVARGKPKKLALAAVMRKLIVTLNAMFKTNSVWRPPCPDLSV

SEQ ID NO: 496333 - protein, 348 aa, unidentified
MSEGYDGRQYVGIDLHRRRSVLVRMTDGGETLETVRIVNDRDRLAAVMARAGERPEVVLEATYGWYWAADVLEEAGAEVHLAHPLGVKAYSYRRVKNDQRDAADLADLLRMGRLPEAWIAPPEIRELREITRYRHKLVKARTSVKDQVHGVLAKLGIPVTHSDIFGVHGQAWLDELKVPQPYAGKVASLRQLAGELSAEITLLDTVLGDLLAGHEGYAAIQQLPGIGPVLAAVIVAEIGDIRRFPGPGQLCSWAGLTPRHYESDTKVIRGHVTKQGSRVLRWAVTEAIQRQPAGSRPRQVKDAIIARRGKEAKNIAKVAAARELLTLVFYGLRDGRVRRLDKPRQETA

SEQ ID NO: 496334 - protein, 335 aa, unidentified
MLFAAVDIHKHLFQAVILDPVSGEVEEARFPATRERLRGWAEELLDREVVVAVEATTGWRWVVRELQALGLDVRLADPGQAKALQGRRRRAKTDRLDARWLALLLSRAMLPEAWIPPEDIQQLRDLTRLRKTLIEERTRWAQRLHAFLLHEGWPCSRSRLLTKAGRAWVRALQLGPHGGAQRERLLRRIESLDTEIADIDRELRVFARADSRCRALEQLYGIGPILAVILVAEIGDVLRFRRAAQVVRLAGLDPVVTEPADSRRRGHLAKAGSPHLRWALVEAAIHARRVNHLDYELHRQVAQRAGATPARLTAARKIGRRAFHVLRELELANAA

SEQ ID NO: 496335 - protein, 402 aa, unidentified
MYNAVGIDVSKGKSTVAVLQPAGVIIRKPFNVNHTSSELDELAKYIGSLEGETRVVLECTGRYHEPVVKTLSEAGLFVSAVNPHLIKNFGNNSIRKVKSDPADAKKIARYTLDNWIELRQYSSMDNTRTKLKTLNSQFSFFMKQKVAAKANLIALLDNTYPGVNKLFDSPVRDDGSEKCVDYAYSFWHVDCVRKIGLKTFTERYQAFCKKHHYNFQPAKPAELFLASKDLIAVFPKEASYKLLIQQSIQQLNLASSHVEELRSKMNELASTLPEYATVMGMYGVGKTFGPQLIAEIGDISNFSHREALTAFAGVDPGVDQSGTHNSKSNKASKCGSNRLRKTLFQIMSTLLQTAPEDDKVYQFLVKKRAEGKPYYVYMTAGANKFLRIYYGKVKECIRNLEQ

SEQ ID NO: 496336 - protein, 346 aa, unidentified
MYYIGLDVHKKTISYCVKHGGGEVYAEGVVNASRGALDGWLKTLPQPWTGAMEATMFTGWIYDYLRPHAAALKVGHPLMLRAIACSKKKNDRVDAGKIADLLRCDLLPESYMAPSALRERRRALRYRNLLVRQNVQMKNKLAGLLMETGVTYNKEKLHQKRYFAELLSHNAEVEENAKPLLKIGRETIERLSQAERALVRTLERDPLLAARLQRLISIPGVGIVTALSWALEMGEVSRFASLKHAVSYCGLCSGENSSAGMQKRSPISKQRNKHLQTVLIEAAKLAPRWNSDLALLYEKEKQRGNRNRATLAVARKIVAYLLAVDRREQPFQGGKKEKAPLAQTAA

SEQ ID NO: 496337 - protein, 430 aa, unidentified
MSVGRSGGHEPLFAAFVGIDWADQKHVWSLQTADSQKRESGELEHAPEAVEVWVAQLCQRFAQGPIAVALEQSRGALVFMLSKYERLHLFPVPSTMAGNMQEALYPSGAKDDPRDADLLLDLLLKHRDKLRRLSPDTEATRRVQNLVEERRKLVDEKTEQINRLTSHLKIYFPQMLDWFDRLDREAACALLERWPTLEELQKVPPAKLRTFYCKHHCRDQEVIERRIVGIRQAVPAIRDRAVIEAKSAVVKVITQLIRILVQGIAELDRKIEEEAAAHPDFFIFNSLPGAGPALAPRLLSAFGSQRARYGSAQEVQAYSGIAPVIERSGKKKWVHFRWAAPKFLRQSFHEWAGRSITRSQWARSYYEQQRQRGKGHHAAVRALAFKWIRIAFRCWKDSVAYDESRYQATLVRRASPLSASMVASTLAKTL

SEQ ID NO: 496338 - protein, 458 aa, unidentified
MKRRGRPRRKRVRMQVVNPNAAGIDIGSEVHYVAVPPDRDPQPVRSFKCFTADLNALADWLDECGIETVAMESTSVYWIPLYQILETRGFEVILVNARHVKNVPGRKTDVLDCQWLGQLHTYGLLRGSFRPEDHICVLRSYIRQRDNLIKSAGAHIQRMQKALEQMNIQLHKVITDITGVTGTRIIEAILDGEHDPIKLAQLKHPGVKSSHETIAKSLEGDWREEHLFSLRQEFELYGIFRDKIIECDQKIEACLNSFENKVDPDQKPLPKYKHGRKKAQGNQSTLDLRNPLYRMIGVDLIAIDGFDVLTIQSIISEVGLDMTPWPTEKHFCSWLGLCPNNKVTGGRVKDSRSKKVVNRASCAFRMAAQAAGKSHSALGGYYRRMKIRLGPSKAVTATAHKLARIFYRMLRYGTDYVDPGLHYYEQKYRQRVLNNLKKRARLLGYELIQNQELSPAVS

SEQ ID NO: 496339 - protein, 321 aa, unidentified
MNTEKFVGIDVAQATLDYASRPEGTVGQVANAPSGIATLVELLQSVLPTLVVVEATGGLERPLVMALSAAQIPVVIINPRRARDFAKAMGYLAKTDRIDAAGLAELGERLRPPVRPLPDAAAQELVALVTRRQQLVNLHTAETNRLPTALPFLQEGIRAHLVWLEEAIAKVEHEISTRIDGHTQWRRTADIVDSAPGVGPTTAATLVAALPELGELTGKQIAALVGVAPLAHDSGKRHAQRHIQAGRSAVRAVLYMATLTATRCNPVIRAFYARLLKAGKLKKVALTACMRKFLVILNAMVKHGAYWDPSAASTSQSVPTN

SEQ ID NO: 496340 - protein, 358 aa, unidentified
MDGSKEQPKVTAGLGIGDKYSYLCLIDTQSGEVVEEGRLRTTPEALKRRFASERPLRIAIEAGTHSPWASRVLEGYGHEVLVANARKLRLIYSNKRKTDEVDAENLARLARLDPKLLYPLKYRGEECQAHMAIIRSREALVGARTQLVNHVRGPVKSFGARLPKCPALSFQNKAPEHIPEELRPALGPVLETIGSLTRRIREYDRQLEAISRETYPETELLRQVEGVGPLTALTFVLTLEDLYRFEKSRSVGAYLGLVPATDRSGDRDPQRRISNEGDEMLRKLLVSGAHYILGPFGSDSDLRRHGEKVASRGGKNAKKRAVVAVARKLAVLLHTLWISGEVYEPLRNTHRCSGGQAA

SEQ ID NO: 496341 - protein, 329 aa, unidentified
MTAKMINTNEGYVVGIDVAKPKLDVALRLPEGKWRNKVVVNSASGFKALVEWLTKQGASSAHICMEATGIYWEGVAEYLSDAGFAVSVVNPAQIKAHAGASGVRTKTDVVDAKVIGDFCFRHAPALWQAPSPAIRTLRALVARREALVSLRTEESNRLLVAHESVRESIQKILEHLDEQIAMIEKQIKQDIDNDPTLREQRQLLESIPGLGKVTIPTLVSRYGGPLRFEKAKQAVAYAGLDIAHHESGTSVRGRPRMSKTGPSKLRRALYMPAVVCMSHTAWGKAFTKRLVEAGKPKMLILGALMRKLVEMAYAILKSGKPFNPALHGA

SEQ ID NO: 496342 - protein, 339 aa, unidentified
MVGIDMGKSEFAYCVMDHNFRIHAQGQIANQTDAIDLFCQQLVAQLRIGHIGELFLCVEHTGSYNQPLIRHWVGLGGRLDVIPATKVSQLLAGPQGWSDKNDSIDARRLAEFGIRFSDKLTEHQLTPKALKAIQLFHRQRERLLKAKVSIQGALQEARLFEDPQLIQQAIDIQADLVRQLKQVIKQIDQQLLHIINQDPQLRQWFQLMTSVEGVGPVIAREIIIATQGFTKFQLNQAKQFARYIGVVPLEWSSGSSLNKRKRTSKKAYKHLKPLLTAGARSLIRTSGQLAQYYHRKRAEGKDYLWVINAMRNKIILRVFAVVRNQTMYQKNLNLNLAKP

SEQ ID NO: 496343 - protein, 387 aa, unidentified
MIYYIGIDISKFKHDFCIISNAGEVIVENSSFENNKKGFQYFLNQLKPYEKSSVRIAFEATGHYSSNLELFLTNQEYSFMKINPLVVHQFLKVRSLRRTKTDKADSLAMANYLMSVPYIPNSRVLYHINSLKSLCRTRELLIKERSKFAVLLTNELDKSFPEIKAFFNNTLSTTLLFILEKYKNAYHISLMKDYDSLRKVSHGRFTYAKFVKLKELAKNSVGYYDDNSDLLISTYISIYNDFNNQIDPIDKQISTIIKELNPRMLSIPGLGEISAASILSEYGDITKFSSPNKMLAFAGLEPSVIQSGTLESNGKMVKHGSGHLRYFIMNTAMIILRYSPTFYDYYLKKRSEGKCHRVALSHVCKKLIRVIYSLEKYNQNFNPSLLK

SEQ ID NO: 496344 - protein, 466 aa, unidentified
MVFIHHQKQSMKKETKMEIIHPNAAGIDVGSRSHFVAIGQGKEDVQEFGVYNEDLAALTQWLLDNDITHAAMESTGTYWQTLFSTLQEAGIVVTLCNGKFTKNIKGKKTDVIDCQWIQKLHTIGLLSSSFLPDEMTEQLRTYCRHRLNLVDIAADCTRKMQKYLRLLNIRLDIVVRDVTGLTGLSIIESICNGETNPQILASLRNGNCKKSEAEIAKALQSNKRPDYLFALSQELHLYKQYQQQIAVCDIEIEKMIQRQIQTDENRKALQTTAKPHKRLNKNAPKNFDLNQLAYQYFDGIDLMGIEGIGHSTVIALMSEVGNDGIKKFDSPKQFASWLRLSPNTKKTGGKVISSHLPKGSNRLKIALRNAANAIGNLKDTHLSNFFKRISFRRGRAAAVSATARKLAVIIWNMIVKHMPYKPPTDYLFLDQKRKMAVLNRIKKQINKFEINPGDLGFADASLSATP

SEQ ID NO: 496345 - protein, 343 aa, unidentified
MMYIGLDVHKRFSRMGCFDPATGEVHDLGSVSNDASALQEALEKLPSPKTVVLEAGRSSYHMAGLLESMAEEVWIVDPGEVRRLQHTVSKTDRRDAAALAWWAAKGVLKPQWRPDTQTMDLRELTRGKSALTRMSTQVRTMIRMLLARHGHDCPHRDLMGERGQLWLEEVELGGHAGEMLAGLREILVVVHAKGHDFERMVDQTSREHPMARRLRTIPGIGPFLSLALAVEIRDINRFPGPTQLRGYSGLVPAVYQSGDKDARGPLTKAGNKWLRYAAVLGAQRIGQMKEPDPRLKRIFLSVAFRHGRNPGKIAVARRLLDLIYHMLKKEQDYRAPRVREAAA

SEQ ID NO: 496346 - protein, 403 aa, unidentified
MTSCSYFAGIDWASRAHSVCVLDAAGRVGLRLDLPHDKEGIQRLIRQLKSFRGIAVAIERPSGVLVDALIEAGLRVVPIHPNVLKASRARYHGAGKSDPGDAYMLADLLRTDGHRFRPLEPQTDEIRALRALVRIRDDLVAERVALANQLRSLLESFWPGAIDIFSEIDSPIALAFVARYPTPQSAAHLGEKRLASFLAQHSYCGRRSPAALLERLRGAATGCSGELEAQAKGELVRSLAAILERLVVELAKLTARIEYSVANLADGQIVMSFPRAGRICAAQILAELGSVRERFPSEAQLAAEAGVCPVTYASGKHRSVVFRFACNHRLRRAIACLADNSRHGNPWAANVYHRARSRGCDHPHAIRILARAWVRVLWRAWFTRTPYQPHLHRSAASLNMAKG

SEQ ID NO: 496347 - protein, 390 aa, unidentified
MQVKADRPEAPSAIRSDLGAIFVSLELSRSIWLITSLSPGAGEKMSKHSVPAGDIGALLARFSEMKQKAFARTGKSFPIIVIQEAGLDGFWIHRVLQKEGIESHVVDPASIATSRRRRRAKTDRIDGEALLRALLAYKRGEPRVCAMVKAPTPEEEDRRRLCRERKVLTTERVQHVNRIKGLLFCQGVSGYEPLRRNRRQRLDELKTGDGRLLPDHLKAQISRELDRLELLLEQIKAVEAERNALFAVAKAAAPTAAPVALLLDLKGIGPEFAAVLWMEAFFRSFANRKQIAAYAGLAPTPWQSGSIDREQGVSKAGNPRLRTTLIQLAWLWLRHQPQSALAIWFKERVMCNGGRFKKTTIVALARKLLVALWKYVTAGVVIEGAVMKTV

SEQ ID NO: 496348 - protein, 320 aa, unidentified
MMETPQVSFKQVVSRGCGLDVHKEVVVATIDGEGLKKQTREFSTVTSSLKELRDWLLENGITHVAMESTGVFWKPVYNVLEPAGIKVWVVNAAHVKNVPGHKTDKKDSAWLCKLLLAGLLKPSFIPAKEQRELRDLTRYRKKLIQSKASNKNRIIRILEDGNIKLSSVLSSTSGAVGTKLIDKICEGKGITMQDIDEVYHKKLEASKEEIYEACQGFITTHHVYMLQIIRQEMDNMQRTIESLDQRIKEVLSPYENALELLKKVPGISSKSAEDLVAEIGLDMNVFPTEKHLASWAGMSPGNNESAGKKKADAQPMGTNK

SEQ ID NO: 496349 - protein, 455 aa, unidentified
MQGCLTFFLSGCSDSFYLKGWVPLSQFLNDFVVGIDVSSEFSIVAMLAPTGELIRKPFRIDHNPAGFHKLLDILKKEEERLNRKPIYFVESTGIFHLPLFFFLKSNDLKGFVLNPLCVHSTKNFDLRKVKNDNKDAEAIARLAKYQDIKVSMMPEPQILALRMMTREYYAVSDMLTEMKNRLCTDLYLLFPGFLDVFSGPFGKTALAVLGSYPSPRALREADTDVLTRLISKTSRKSSEWASNKVALLRNCAQLASSMPHEFSLLDIKIKFHIDGIEHMQASLKGLEAQIKTMIGSKEFPAEARRNIELLDEIPGIGFLTAATLIAEIGDFSLFNSPKALTAFFGLDPSVNQSGKFNGDRNKISKRGTRIGRRILFTVAMASIRTTRNGKEINPVLREFYTSKCVSKKKKVALVAVMHKLLHYIFAVLRDQKPFEIRRPDDHQTWRITKPQPAAA

SEQ ID NO: 496350 - protein, 321 aa, unidentified
MIESKCVVGIDVSKAALDVAFGLDGVVQQFPNTPKGHLQLARALSKRGPSRVIMEATGGYERRVLRRLTDLKLPAIRVNPRQVRDFARATGILAKTDQIDAKVLVRFGASVQPEHRPLPSPAQERLSCLQTRRSQVVALHTAEINRLQQATDRVVKRTIQAVIDTLDKQIALIQAESAQVIAEHERLERIYTILTSVPGVGPVTAAVLMGQMPELGVLSRQAVAALAGLAPFNRDSGTQRGQRHIRGGRAPVRTVLYMATLSAAQCNPVIAEDFKRLIAAGKPHKVAMAACMRKLLTILNALVRDNLLWGEKTQPNSHPKC

SEQ ID NO: 496351 - protein, 418 aa, unidentified
MTKKLDTTFIQIVHPVCCGLDVHKKKISACLITMDEQGKEQYEIKEFGTFTNDLLEMKKWLTDNNCPVLAMESTGVYWRPVHNVIEGFMEVILVNARHIKNVPGRKTDISDCKWLAGLLRHGLLKGSFIPPKEIRQWRELTRLRRTYTESLSDYKRRVHKLFETANIKIDSVVSDLFGVTGRNLIFLLCNESKLNLAAIKENAKRGLKAKSKELHRSIQGFFEDHHRFQLIGMMEIIENFEKKIAEITERLDCLTSGHQDLLDRLDEIPGINKKSAQSIVSEIGVTLDEFICMAALASWAGLCPGNNESAGKRKSGRTSVRSHPFKTVLIEVAWAAVKKKGSYYRAKYFKLKARRGPKKAIVAIAHRISKAIYNIIKNGDTFKDLGEDYLTAQTRQRTINNIKQRAKQLGYELIPCMN

SEQ ID NO: 496352 - protein, 341 aa, unidentified
MEHPKVVVGIDVGAETFAAAALHSAGESGDIKGLIPNTAEGYDELAVWMQEGGITKEKAVICLEATGVYGEALCYHLIGRGYRVAVESPLKVKRAFAQSAHKNDTVDARQIAEYGHRFYDELHWWNPQSEVMEQIHMLLSAREQFVSQRIANINALKTMQRKVVKTATGMKAYEQAIKQLTENIQEIEREIKRLMKEDDSFHRLIKTLTSTPGIGMLLATSLAVTTNGFLRTDNHKRIASYVGISPIEHTSGTSVYRKPRSRCFGPSRLRKLLYLAAMSVATHNPEFRRYYLRKVAEGKPKRLVLNNISNKLLKVVCALVRTETEYIPNYKSVNPMFLKSA

SEQ ID NO: 496353 - protein, 393 aa, unidentified
MLDHPFDEPTAIHTQFGAIFVSLELSRSTWLITSLSPGKGEKMSKHSVTADDIAALLARFSELKRKATMRTGTSYPIIVIQEAGLDGFWIHRVLQGQGIESHVVDAASIAAPRRRRRAKTDKIDGEALLRALLAYKRGEPRVCAMVVAPTPEEEDRRRVCRERQTLIGERVAHVNRIKGLLFSQGSSNYEPLRRDRRARLEALRTGDGRALPVHLKAQISRELDRLELLLEQIKAVEAERNALLASLSQAAGEATEAPRPVAMLTAVKGIGAEFAAVIWSEGLCRQFSNRRQVAAYAGLAATPWRSGAIAHEQGVSRSGNPRLRTKMIQLAWLWLRHQPQSALARWFHEQGQRGRKGWRKGAIVALARKLLVALWKYVSAGVVIEGAVTKGAA

SEQ ID NO: 496354 - protein, 339 aa, unidentified
MTIQSEKIVPELQSLFAGIDVGAEELILLIRKNGTSYKAQKFANTPVDRARLVKKLVNLPGIAVCLEATGVYHFDLSIALHDAGVALMVVNPKSSHNFAKVLMKNSKTDAVDAETLAQYAERMDFVAWARPSDEKIALRSFARRIDALTRQKAAAKNQLHALSASKENPEAVLRDVNLSISQLEKRIDCLSKEALVLIKKHADLERVFKLLTSVKGIAQTSAIALMGELLLLPQGLSHREWVKFAGLDPRAFDSGKSVHRKTRISKAGNRHIRSALYMPALSAKQHDPYVKAYFQHLVDNGKLPLQALCAVMRKLLHAIHGMLKYDKQFDNTRFYAIPA

SEQ ID NO: 496355 - protein, 342 aa, unidentified
MEYYVGLDVSLKQTSICVVDQAGLVVREGVVGSDPEAISVFVRSKAPGAVRIGLETGPTSTWLWTELKRLDLPVICIDARHAKAVLKMQINKNDRNDAIGIARIMQTGWFKEVHVKDIDSHSVRALLASRALLVKIKRDLENHVRGLLKNLGLVIGRATFNVFAARAEELIEDRPDLVAAVRPLLEARNAVEQQVSELDRKVMKLARGDAQVQRFMTVPGVGPITALAFKATIDDPARFARSRSVGAYVGLTSRRHASGEIDWSGRISKCGDAMLRSYLFEAAGVLLTRVPKWSTVKAWGTRLAKRNGLRKAKVAVARKLAVILHRMWIDGTEFNWSKEVAA

SEQ ID NO: 496356 - protein, 316 aa, unidentified
MQPTSLFVGIDISKDRLDTALRPSGERWTSTNDARGISTLCRRLHKRTPTLIVLEATGGLEMPLAGALAAAGLPVVVVNPRQVRDFAKAMGQLAKTDTLDAAVLAHFAEAVRPPVRPLPDAATQALDALLTRRRQLLVMRTAEQHRLGSAPPPVRKEIQAHLAWLDRRVAALDDELGRTIRESPVWREQEQLLQSVPGVGPVLARTLLASLPELGTLHRKQIAALVGVAPFNRDSGSKRGRRSVCGGRASVRAVLYMATVAASRCNPVIKAFYARLRAAGKPTTVALTACMHKLLLILHAMVKHQTPWRENIALTS

SEQ ID NO: 496357 - protein, 393 aa, unidentified
MICVGIDVAKDKHDCFILSSEGEVLADVFTIQNNAEGFDMLLQTIRRCARPEDKIKVGLEATGHYSYNILGFLLDKGLDTYVINPLHTNLYRKSLSLRKTKTDRVDARTIAAMLMSDVDLKSYTDTAYHNEELKSLTRYRFDKVRERAKLKQSVSRLVTILFPELEKLVSSLHSASVYALLSEFPGAKQISSTHMTHLKAVLKNASQGRYGQEMAETIRNAARSSVGSVMPAKSLELQHTIRLIRELDAEIEDIETAIQAIVDEMQSPITTIPGMGVRMGAVILAEIGDFSRFDSPDKILAYAGMSPSTYQSGQLSLSGAYSHMEKRGSRYLRYALYNATKHVCHWDPTFAAYLAKKRAEGKHYNVALSHAAKKLVRLIFAMEKSQRPYCAAA

SEQ ID NO: 496358 - protein, 343 aa, unidentified
MNITTTGLDLAKSVFHVVCFNNQFKEVKKRMLRRSQVLHFFTQLPSCRVAMEACASSHYWGRELRALGHDVKLIPPQHVKPYLRGNKNDYNDARAIAEASTRPGMPFVAIKSTEEQDMQAIHRMRSQCIRDRTALSNSTRGLLGEFGIALPKGLATLRKSIHGILEDADNGLSDRFRKLLARRYDQFVALDDHIAFYTNELEILSQQDDACQRLQTIPGFGPVISSAFRSVIGDGRAYDRGRDASASLGLVPRQHSSGGKNVLLGISKRGDRYLRSQLVHGARAVVIQAARKDDPLSKWINRIREERGWNKAVVATANKMARIGWAILRHNTIYQHASEPSIH

SEQ ID NO: 496359 - protein, 369 aa, unidentified
MQNTIVHYEGAASLEAVATKVQPRGAQIKIGLDMHARVYVAVAQYDHLLPKAARRLSPVEFVPWVQALLGRGHSVHVVYEACGFGFSLYRELIAAGAHCYVIAPCKLDEQRSGVKTDPRDATMLCQRLSRYLEGNTRELAVIRVPTEEQEQARYVSRQRTQLVCHRQKLEAQGRSLLISHALPAPAHWWKEQTWRRLGQHLPAWITTRLQMARPALLSLQQQINALTSELEASASSTLPRGIGKLTSVVLTREICDWHRFNNRRAISSYTGLCPGERSSGSKRVPGSVTKRGNPRVRAALVECAWRMVRFQPQYPPVKNRLAVLVKGSRAIGAVRKKAIVAVARRLAVDLWRLHTGRCTAEQLGLNISN

SEQ ID NO: 496360 - protein, 409 aa, unidentified
MARKPSKQRFTVVHPDCAAIDVGSREHFVAVDPRHENAVQSFTSFTDDLYKLTDWLDSLGIKVVAMESTGVYWIPIYEILSERGFEVYLVNARATRQITGRKSDVLDCQWIWQLMTHGLLRGAFRPSDPTCCVRSLVRQRAFKVKDQAQTLNRMQKALSQMNIQLANVISDISGVTGMRILRAITAGERDPVRLAELTDARIKAGKDTIARSLHGNWRREHLHALAQELAAYDFLEQQIAECDDVIGKALGQLPVLEHVPQPSRKVLRSPHRTSAQQAALHQALWQVLGVDLTAIPTIGVDTALVLAGEIGADLSRFPSSQHFCSWLGLAPPTRISGGRQLSGGGPKVINRAAQALKQAASNARNDKGFIGASHRARLTRMDTMLCHQSHCASTGAAGLHTAHQEADLC

SEQ ID NO: 496361 - protein, 325 aa, unidentified
MSEVWVGIDVSKEGLDVAVRPGNEAWSSNNNPAGIKALTGKLKKLSPQRIVLEATGGHEYELALQLGKAGLAVAVVNPRQVRDFARAVGRLAKTDPIDAKILAHFAEAVKPTCRRVKDQRLDELDQLVTRHRQLVEMIVAERNRRMSLRGDAQNDIDVTVRFLKGRLKQVDERLKTLIDKNPEWNRKAVLLNSVPGVGPVLISSMIAELPELGTINRKQIASLVGVAPFNNDSGKSCGKRHIWGGRAHLRALLYMSVVAGLRFNPTIRNFYQHLCKSGKPAKVALVACMRKLLLQLNAIVKSAKAWNACPFPAVPLEVCCSSSGA

SEQ ID NO: 496362 - protein, 359 aa, unidentified
MCTITIGVDLAKQVFSVCSVDAAGRVQDRRELRREAFRQWLPSVPAGTIVAMEACSGAHHWARRCQDSGLRPRLMAAQFVAPFRKSRTAKNDRNDAEAIATAARQGNMRFVPVKTVDQQVRLSWHRVREGYKADALATSNRLRGLLAEFGAVIPQSDSALRRALADLDALALPSALVELLRDVDAHWQQLQIRIAEADRRIQSHAKADEACTRLRAIIGVGPITADAVVATIGSAQDFKNGRQFAAWLGLVPMQHSSGGRSRLGRISCRGDGYLRTLLIQGARSSLQRAKAVPWEKASPEQRWTQDLERRLPFGKVLVAIANKHARQLWAMLARGEHYDAEAWLKHPMVQRPAKKRAAE

SEQ ID NO: 496363 - protein, 348 aa, unidentified
MGMLAHQVDHVIGVDTHRDSLTAAVTDTTGAVMAQTTLLADAFGYRRLLAFAKQNAPGKRVWAIEGTGSFGSGFCTYLLEEGEWVVEIDRPARPATRNGAKSDELDAARAAREALSRAHLAQPRRRGDREALRVLMATRESAVVARTKAINLLKGILVSAPESLRNSFRNVSTDHQLTRCARLRVSVTRSEEHRCTVMALRAAAKRALVLQAEAHDMEAEIERIVARLAPRLLAEPGVGPICAAQILCSWSHPGRIRSEAAFAAIAGVAPIPASSGSTVRYRLNRGGDRQLNRALHTIVLSRIGHHEETKAYVARRTAEGRTPREIRRCLKRHLARRLFKLLESSVAA

SEQ ID NO: 496364 - protein, 307 aa, unidentified
MEPKQWVGIDVSGKRLEVFVRPIQRILKVANSPAGLATLVSELLGIDPALIVIEATAYWHLAAVAALSGAGLPVAVINPRQARNFARATGQLAKTDPIDARLLAHFAEAIHPPVRVLPDEQTQELAEWVQRRHQLVEMLTAERNRLRAMSGSARADIETHIDWLEKRLVRLDEELERLIADNPVWKDLSALLCSVPGVGSVVSATLIANLPELGSLSHKQIAALVAPLNRDSGQTRGHRTTWGGRAPVRTMLYLACVVGIRFNPIIRRFYQRLKQAGKPSKVALVACMRKLLVSLNAMVKTQTQWQS

SEQ ID NO: 496365 - protein, 408 aa, unidentified
MDLTPLHKRVIALDVHQAKITACSVVEHDDGRVEVTKQDFGAFKRDRRALAQWALQIRPEVVVMESTGVYWKSPFAALEAVGITAWVVNARHVKAVPGRKTDMADAQWLATLARAGLLRASFIPPLLMRQLRLVARQRQKLVGMCSAEKNRLLKVLVDAGIRINVVVADIHGASARAMVKALIADKPMHEVLDCKGRLRASREELFEALSTEQFSDVHRFVAEEILQHIEQIEQRIARLDARLLQGLKAYEPQLRLLQTIPGIDLQGAAMLLVEIGADMSIFGSTARLASWVGICPGNNESAGKRKSGRIRRGNAWVRRLLCEFAQAAARTRCALKAKFDSLAIRKGHKKSVVALGHKMLRTIYAMLSTGSHYQDKTVDYEALSVARNAPRWLKMLRKHGFIAAPATA

SEQ ID NO: 496366 - protein, 475 aa, unidentified
MAYIAIGVDVSKGRADIAILNESRTRLHGGVYDDTAVGHDALQRELIALRDRYPGAVFLVGIEHTGGLERNWLAFFRDERRAVKGMRVHRLAPMQVRRHLEADLHRSITDASAAVGIARYLLERVRDGKARDTAPSPTASFYRTLRSVGLRRVEVVQQLQALLPQVQPELVRYTRHGVPDWIIDLLALFPTAADLARASVGQVDAVKTVLPERARELITEAATSVASLCGPAAAANVRLLIQQIRELDRTIAAGEQTVRELVAADPLHRRQVALLLTIPGIGERTAYVLSLELGDVQQFRDDRALTAWCGLDPHEDRSGDGVVRKGISHRGNAHVRRALFMPAMTAVRHLPAMMAFFDRLRAQGKPRMVALVACMHKLLRIAFAILRSGAGFDPQHEATRRQQAQAQQAARSAPAPRASTADDATQAAAPEDLTAPVTKAEAQRRRERNAAARAKPQCEVGPQRRGAHGRTAEAS

SEQ ID NO: 496367 - protein, 435 aa, unidentified
MANYYHIPVVGIDVAANFSVVSALKPNGDIFIKNVKIIHSLDGFSKLLTLIQKIEKEFNVKSKVFCESTGIYHLTLLHYLINQKIDISVINPLITNSNKNSNIRKVKNDNLDSLSIARLGKFDDIKVSSYTSEEFLHLKFLVREYYKIVDLRANLKKSFSNNLYIHYPGFNKAFTDNTGKSALSFIKTYPTPDDFFNAPKLEVIELLKKSSRKGSKWAATKYNTIFAIATSASKIGLNTALFGTKVKRFIESYTFYSNQIDDLFAEIMDYIDNATFGETFKTNIQLLKSFKGVGDISAITLLTEMSSIDNFSKPSQLVAFFGIDPSVNQSGKFVGDRNKMSKRGTAIGRRALYAIALASIRKTKNKVPMNQVLYDYYHKNLKSKKKKVRLVAIMNKLLRYIFSILKNQKPYVVRNPKFHQRMFLESKTRLDKKTA

SEQ ID NO: 496368 - protein, 416 aa, unidentified
MFYGLDVHKEFIQVCRLSADGKQRQDFRIPATREAIGPFARTLTRKDQVALEVTFHTWAICQLLVPHAGRVVPVDAAQVKAIAAARIKTDKVDAHTLAQLLRADFLPAVRMPSAESWALRQLVSHRRLLLKQQTATKNTIHGVLLRRLQPLPEGWSPFAQRTRRWMRALALPPTERFMLENALDLLEQIEARVARVDAQLLQHARISESARLLMTIPGIDVTVAIGLLAAIDDVRRFPTPQKLAAYFGLVPCVRQSASHCYHGGITKAGTSSGRHLAIEAAQVLARSASPLAATYYRVRHKRGHNVAVTALARKLIHVVWHLLTRREPYRYASVSRTRTKLLRVVSPERNRNYAVPQTLEGVYAEAGLPALSAASLAERRAAANNRRCRTRLGCAAGKSTESKNMQRGHTMGLTKS

SEQ ID NO: 496369 - protein, 373 aa, unidentified
MNKNVIYVGLDVDDSQYHGAGFDKRTGETVSFKCRPTLKGLVRQLEKLEVYFTDSSLVLCYEASYIGHSLQRDLTKAGYHCEVIAPGSIPRKGGSKSVKTDRIDALDLAQFHANNLLRIVRPPDAAMEQDRDLLRSRQHTMQQQGHVRRHLQSLLRRNGLYYKSENKTRTHWTQHHYCWLERTIESCAGSLKVNLQLLLAQIKSLNDILAAYTQEIEAMANRPEYREPVSALTCYKGVKNLFALTMITEIGNIKRFAHPRQLTAWVGMDIREYSSGGKQHRFGITREGNRYLRTAFVEANQRAYRSARISKDIKARRKGTEAQYIAIADRCLKRTNKKGNRLLQAGKHPNKVKVACAREMIGFVWESLNEAAA

SEQ ID NO: 496370 - protein, 345 aa, unidentified
MVPETAAEPGSPSVVPCNPNSRLVRKARPHLQERGMEPMYVGIDVAKDRLDVHLRPTGESFAVARDGEGLEQLTARLTPLAPALIVLEATGGFERTVAAALGAARLPLAVVNPRQIRDFARAVGQLAKTDALDAAVIARFAEAVRPEPRPIPDAAAQALGEMVARRRQIIEMMTAERHRKRQLVQPRLVKGADRLLALLQKELSALEGDIGEAIRGTPAWRETEDLLKSVPGIGDATARTLLAELPELGRLDRRRIAALVGVAPLNRDSGTMRGRRTTWGGRASVRSALYMAAFVARRKNPLIATLYQRLRAAGKPYKVAMTACIRKLLVILNAIVRDQTPWQLA

SEQ ID NO: 496371 - protein, 404 aa, unidentified
MELTPLYRCVAALDVHQAKLTVCVLHEDGHGELRVELREFGGFKRDRREMARWVASFAPESVVMESTGIYWKSPYAALEQVGLRALVVNARHVKQVPGRKTDLADAQWLAILARSGLLRGGFVPPANFRRLRLISRQMQKLTGILAGEKNRLHKVLTDGGIRLGVVVSDLHGKSGRAMVKALVAGEPARALLGYADPRLKASEEELLDALDGDLSEEHRFVLARLLDHIDYIERQIAELRQALVAGLAPQQGLLRALQTIPGLDETGAAMLLVEIGDDMQAFGSPEKLASWAGVCPGNHESAGKRKSGQQRKGNPYVRRILCEAAHAASRTRCALAEKFKSLLVRRGRKRAIFALAHKLLKTVFVLIDRGDYYRDASVDYEAMSVERNAPRWMKMLRKYGYLSA

SEQ ID NO: 496372 - protein, 416 aa, unidentified
MDEFAAYIGIDWSDKKHDCCLIDAATGRKESSILKHSPEAIDKWASGLRARFPLQKLAVCLEQSRGPLIYALMKYDFLLLYPINPSTLSNYRKSFSPSGAKDDPTDAEFLAEIVSTHRERLRAWQPDDVKTRSLRHLVEHRRKLIGERTRISNRLTALLKGYFSQVLEWFPDLRTTLVCDFLTRWPTLEAVKRAHRKTLEKFFRTHNSNRQEAVERRIKSIKESLPLVTDQAVVKSSALLTAAYATQMKVMIEAIRGFDREIKQLCASHQDYHLFESLPGSGTVYASRLLAAFGSNREKFSSADELACLTGIAPIIERSGKSCWVRWRYFCPKFLRQTFHEYAGESIAHSFWAKAYYESQRAKGKSHAKAVRALAYKWIRIIWKCWQSKTKYDEVKYLESLRKRNSPLLKYAASNP

SEQ ID NO: 496373 - protein, 421 aa, unidentified
MRSIGLDIHRDFAEVAIAEGGEVRSAGRIEMTPEALELFAGSLGAGDRVAMEVSGNAWEVARIIRPHVARVLCVSPADTGIRSARAKTDRLDARALAKLLAAGQLESVWVPDEKTRAIRRRLARRARLVRLKTKAKNEVHAVLMRRLIPKPKPSDLFGVKGRRWLAELALPAEERETVDASLRQIEFCESEIAAIDRVVAAEALSSPEIRRLMTVPGMGVITAASFMAAIGEVRRFADRKKLVGYLGLDPKVRQSGQSQAQRARISKQGSAAGRYALVEAAYSAVLSPGPMRAFYQRIRARRGHQVAIVATARKLACLLWCLLSRGEDYAYAQPSLTAKKLRRAELLAGAPRGKRHVERGLWSTNAAMRKAERELARQAEVAYERTVADWEAQQSKRKGAGATPGRASHAARQVQAPGPAL

SEQ ID NO: 496374 - protein, 365 aa, unidentified
MNTTTTATGLVGVDLAKNVFSICEVDGGGRVGRRQDLTRDAFGVWLVQRPAGTVVAMEACSGAHHWARRCEEYGLVPRLIAAQFVTPFRKRRTSKNDRNDAEAIATAARQGNMRFIPVKSVDQQARLSWHRVREGYKVESLAIGNRLRGLLAEFGIAVAKSESALRTALADLARNTGLPLGMKELIGDLTDHWKQIRDRIAACDARIEAHARADERCVRLRSIIGIGPLTADAMVASVGSARDFKNGRQLAAWLGLVPTQHSSGGHTRLGTISCRGDVYLRTLLIQGARSSLQRAKAVSTQKATPEQLWIGQLAARMPFGKVLVAIANKHARQLWTMLARDVDYDPSASLRHTMRSTTQPAIAAM

SEQ ID NO: 496375 - protein, 359 aa, unidentified
MNEITTVGVDLAKNVIAVCAADRSGRIVLRRVFCRQGFAEWAVKLLPCVFGMEACGAAHHWARWLKSHGHDARIMAAEFVKPFRKSKAAKNDRNDAEAVLTAVRQPNMRFVALKSVEQQAVLSWHRMRQGWIEERTALINRLRGLIGEFGVWVSRSAKVFTRALPRLEQDEALPLLTRRILAEARSHLQRLDQLIALTEAEINAQAKASEAAGRIQAITGVGPITAGAAIATVSDPRDFSNGRQFSAWLGLVPKQDSTGGKTRLGRITKRGDTYLRGLLVQGARSALQKALDRQPEILTRLERWIVDLYARKGYHKTLVAIANKHARMIWAILAKGEAYDPNAWRRLVPKTPRQAMPSA

SEQ ID NO: 496376 - protein, 341 aa, unidentified
MSDVCIIGIDLAKRVFQLHGAAADGSVVFRKKLSRDRLLPFLAAQPRCVVAMEACATAHNWGREIENLGHIVRLIPPIYVKPFVKRQKNDAADAEAIVKAASRPTMRFVAVKSEAQQARAMLFRTRDLLVRQRTQLINAVRGHLAEHGVVTAQGPAHLKRLADAIADETSPLPELVRNLGLLFLEQIDMLDTRINDLDKKLRAVAGQATTTRRLQTMPGVGPITAVAVETFAPAMQTFSGRDFAAWLGLVPRQCSTGGKPRLGKTSKMGRRDIRRLLIIGAMSVLKASARSAPPVNSWLSRMLAQKPRMLVAIALANKMARSIWAMMTKQEDYRGPVAATA

SEQ ID NO: 496377 - protein, 397 aa, unidentified
MIAVGIDISKAKSTVAVIDSDGTVLASPFTMAHTQPEMEAFVSYLKGLGEPTTILMEYTGHYHYPVLKKLQDEGFPVCIVNPYQMKKYGDVEIHKAKTDKKDALRIAAYALEKSYKLVPYSSMEQKYEDLKFLSRQYSQRITYVAKLKVQLIALLDQTMPGITRILPLNSRNPEKCALLLFIKRFKSFDEIQRIGKARFLASYDVLAKKASERSASSKGLSIYELAVDSITTRGEDPYIWISQNQCVDLLSATQNAADEIISQMRNIAETIPEYKVLRAMHGVGDRLGPIILAEIGDVHRFHSGKALNSYAGNDAPPYQSGQFESRNRHISKRGSSALRKACYEVMQALKLIKPQDDPVYLFMLKKEQEGKPFNVAKMAGVNKFLRIYYARAMELYK

SEQ ID NO: 496378 - protein, 350 aa, unidentified
MLIIGCDYHPSFQQIAFVDTDTGELQERQLQHREQAEKFYRDLAAQGMKVRVGMEASGHARWFERLLAELQFELWRGDAAEISSRRVRKQKTDRQDAQLILRLMLRDDFPQIWVASWENRDLRQLLWHRHRMVQARTRIMNQLQAVALNEGLRCKKKLWREAGREQLEAIRLAPWDSQRRRDLLELLDRLNPTIAKLTQAIEQEVEKCPAARRLQTHPGVGPLTALAFVLIIGKADRFQCGKQIASYLGLVPLEKSSGNQRRLGHITKQGNSLLRFLLVEAAQVTARSIPEWRSKYVHLTMRRGRKIAKVAMARKLAVRLYWMMRKEWDYERLRKFGSHAGKPGTGDGVQ

SEQ ID NO: 496379 - protein, 343 aa, unidentified
MNAYYYIGLDIHKKTISYCIKAIDGALIGQGKVDADRKSLGEWAKGLPGPWVGAMEATIFTGWVYDFLKPRALSLKVAHPEMLKAITAAKKKNDRADAEKIADLLRVNMIPECHMLPEDIRELRRILRYRNHIVRTAVKMQNKISGLLMEVGVNYSKRRIHGEKYFHEILERVEEIPPSVKELLKLSRSSYEMFRSFQKRLIETLRTNNLIHDRVERLMTIPGVGEMMALTWVLEIGDPQRVTSIRKAVSYCGLCSAQHESAGKEQRGPISKKRNKHLQTMLIEAAKLAPHWNEQLAILHERELKKGNRNRATLAVARKLVAYMLAVDRKKTDFTLPAKMQAA

SEQ ID NO: 496380 - protein, 371 aa, unidentified
MAEVVQSTSVFVGVDTHADIHHVAVVDPLGRSLSDRTFPTTAAGYEQVLRWCTQFGDVVAVGIEGTSSYGAALTRHLRQAEMNVVEVDRPDRKSRRLHGKTDALDAYSAARAVAAGRATAIPKAKDGLVESIRCLHVARRSAVKARTQAINQIRGMLTTGPVQLREQMRGLGTKALIGTVARLRPTDDAGDPAVAVKIAIRGLARRCQDLNEEIGVLNRHLSALTAQAAPALLERPGLGVDTVAQLLITAGDNPERLRSEAAFARLTGVAPIPASSGRTDRHRLSRGGDRQANRALHTVVLVRMHRDARTQEYVQRRTEQGLGKKDIIRCLKRAVAREIYHHLRPTTSDRGGVLSRPDAKQNEVHRALDGR

SEQ ID NO: 496381 - protein, 354 aa, unidentified
MNTTQVFEKRKIAVAIGIDLAKDHCDVVAYNADNKICFTKANWAYPHLMEWLANAQPAVVLMESCKGCHVRARDIADLGHDTRLVKGADVKALRNVCQKNDIRDADYIARLLYVPGTKFVFVKNQRQQSLQFLQNEYKSIQELRIQVGNQIHAGLEEFGCPGPKSKKFIQSRMMAHLEKNAEPIPEEVMSSFLRRREMWLNLFEQEEEAKKRMEEIAKTDDDAQRIMTVPGVGAQTAVGMLVHIGGDIGRFKNSGQFAASIGLVPKQNSTGGNTTLNGITKCGPKRLRANLVQCGQVILMHADKLKGNFGDWVRKLRDCGKKRGVIVCAIAAKIARIVYRLMKDKVDYTPVPSR

SEQ ID NO: 496382 - protein, 393 aa, unidentified
MSTVVIGMDPHKRSATIEVMAGDEAVLGSGRYGTDAAGYAAMLAAVAGWPERTWAVEGCQGIGRHLARRLIADGERVVDVPPKLSARMRVFATGQGRKTDATDAHAVALAATRMGGLRPVADDEQLAVLRILADRRRALGEDHTRMICQLHQLLLELIPGGAKKALTAAQAKALLATVRPQDAAGKARRRVAAELISDLERLYQRKKAADKELRDLLNATGTTLTSLNGIGPSAAARLLVEAGDITRFPSKAHFASWNGTAPIDASSGDQVRHRLSRGGNRQVNRALHIMAVVQLRHRGSEGRACYDRKVAAGKTPMEAMRCLKRRLSDIVYHQMIPGHRAAQAGPGGHVGASLISSAAGSYPGAGSSDKSLPGPATSNATPSHRAPETVSLT

SEQ ID NO: 496383 - protein, 368 aa, unidentified
MLKGDQPMKKVSRELPKMEAGIAKPEMTVGLDLGDRYSHYCLLNSDGEVVEEGRVQSTEAALRRHFEGEDCLRIALECGTHSPWVSRLLNALGHQVIVANARQISAITGSESKNDRNDAEKLARFAAFDPKLLSPLEHRSEERQVDLNLIHARSTLVRARTMIVNALRGLVKSAGGRLPACSTEFLPARALAAIPPALSAVATPLVEQIGLLNAQVDGMDKQIAKLSAKYPEIVLLRTAPGVGPIVAAAYVLTLGQPDAASNRSAGAFLGLRPAQSQSGAADPQRRISKSGDSFLRSLLVQSAQYVLGRFGPDSELRRWGLKLAATGGKRGKKRAIVAVARKLAVVLHALWRSGQRFQPFPQQAAVAA

SEQ ID NO: 496384 - protein, 421 aa, unidentified
MPRPLQEEFAAYVGIAWADTKHAICLQASGSDKREDTTVEHTPETIDTWVRTLRQRFKGQPIAICLERHQGPLVAVLRKYDFLGLFPINPLTLARYRQAFTPSHAKDDPSDAELQLDLLLRHRDKLKPLTPQSPQMRALEQLVEHRRRLVGDKVRITNRLTSALKNYFPHVLQWFHDKDTALFCDFLTQWPTLKASQLARRSTLERFFHAHHVRYADVIDQRIQAIKSATPLTTDEGVIAPNTLLVQALVTQLRVTLQAIDDFDHAIAQRAQSHPDFPLFEALPGAGAVFAPRLLVAFGEQRDRYASADELQKYAGIAPVTERSGNTTWVHWRLQCPTFLRQTFVEWAAESIRHSFWARAYYAQQRQKGTSHQAAVRALAFKWIRVVFRCWQRRTPYDESIYLNALKRRGSPLLQNLASSS

SEQ ID NO: 496385 - protein, 314 aa, unidentified
MAMPASRPEIGIDVAKDDLVIHLQDLNQTVTIDNTPQAIRQWLATLPKGCDIAIEATSTYHLDITERAHAKGHRVYVVDGYRLSNYRKGVGGRAKTDLADAQLLARYLRREKDELRPWSPPPKAYRVLQSLLRRRAALVKARTALRQSLSGEPELKAPLQALIAEMDRIDTLIQKRLKSAVRAAGLQTQVQRCDAIDGVGELTATALVMAFLRGDFKNSDAFVAFLGLDVRVRDSGKLTGKRKLTKQGDTEVRRLLHCAAMSASRHPVWRAFYQRYRDRGLHTTQALVILARKIARTAFALMKQQQEYCPAKLF

SEQ ID NO: 496386 - protein, 348 aa, unidentified
MLHAGLDLSRKRLDYCLLDEVGERVEVGAAPPDGDGLAGLVRRVEERHGQVMVRATVESMNGARFVHDTLERLGWEVEVADAAKARGLAPLACKTDRIDAWVLAELSRRDLVPAIWLPSFGIRQERERARWRLYLVRKRTALKNRVHAQLLAFGHPCPVSDLFGARGRELLEQIEFPEPWRANVLAAIAMIDDLDREISAIEKELRALGADHRYVPLLTTIPGIAWILGYTIAAEIGDISRFATAKKLTGYTGLCPKVHQSGGSDRRGHLTHAGPRYLRWALVEAAVHACHQDAFRDRYEHNKRRLGKQRGAKVAQVDIARQISEAIWHMLTRNQPFAPASAKCTLVA

SEQ ID NO: 496387 - protein, 328 aa, unidentified
MFEHYIGIDLHQAFFQACAVTRTGDRAWEGRFPRTAEGIATLLARCDEHTAVAVEASTPTWHFADAVSGRVGDLRIVDPVKTKLKAGFAAKTDRLDARRLADALRRESVVGIDYPPIAIRELRELCRFRLAVVQIRTALIQRLRAVLLRQGLVDRRRLARTPSDAWLETLTLPPRAAASVAGLRRVLGGVRAEATAVDEEVQAAAAADPIVVRLQQIPGVGPVLGLMMRAEIGDIRRFPTPGHLASYAGLVPRVEASAGRVRHGRITRRGSPWLRWALVEAAMHGTRRTDRIGRWGRRLVVRKGALKARVALARTLCDEVFAHWSAIV

SEQ ID NO: 496388 - protein, 431 aa, unidentified
MLKINPLSTLYVGIDVSSKSNYVCALDFYKNKYINSSFANNQPGAEELALKILECLKEHPDITTIVAALESTSVYSIHIANYLSSCEELMRFKPYVFVLNPKCTANYKKSYIGLGKSDPIDAFVIADFARAGNIESEPWRGSQFLALKRLTRHRLHLVECMTREKTYLVSNLYLKFSQLQMLEGDDQPFCDIYGATSSSVLMEYFSPEEILDSSEEDLIAFLAKKSRNRIKDISKTADLLKKAARDSYRLDKALYEPLNVSIASSFNCIETFKREIKVIDNAIEKEIKGLNPNAFIILQSIDGIGPVFAGGIIAEIGDITAFHSSDALAKYAGLTWKSNQSGDFDGEDTPMIKAGNRYLRYYLGEAANSMRKHNVEYGTYYRKKYNEVPKHQHKRALALTSRKFVRLVYGLLARNQLYSGVSLDTSIKDSN

SEQ ID NO: 496389 - protein, 418 aa, unidentified
MDEDGNTRGSRRYVALDIHKHYCIIAAVDREGRVVLHAVRVEHADLEGWLKKNLRATDHVVIESTTNAWHVYDLLEPLAERVVVANPIKVKQISQARVKTDVRDTLILARLLAANLVPDVWVPPAHVRELRQLLSQRRQLVETHTQIVNRMHSVAHRHHLKHERGKRFNEKTTLWQRDNRLSKVEQFQLELEMENRGYIEKQISRIGKEVAKMSHQKPWAESMTYLMQLPGFGVITAMTILAAIGEVQRFETAKKLASYSGLTGGVDQSGTHLVQKGITKEGRKELRWAMVEVAQRAVKSDPRWTRKFQELHKRMHRNQAIVAVARQLLELVWYVLTRRQPYRHFSQERIAYKYLTWAWQMDEAARDGLTRQQFARYYMMRLGIGQDLTRIALDPKHPRKIASEAELLALRPDLKHIE

SEQ ID NO: 496390 - protein, 325 aa, unidentified
MVTRTICGVDVASQSLEARIGQHGAAGCFANTPEGIAALGTFCQAHQAELVAMEATGGYERQAFALLSEQGQGVAILNPRAVRQFAESMGSLEKTDRIDAGMIAWYAEVKKSRPACLAPQSQQHLRALVTRLRQLTEIRTAQLNQQRLVIDRSVQASFTKLLAFVGRQIRDLEQRIAQLIDEDPLWRELNQTFRTIQGVADRTVARMMAEMPEIGTLSNKTISKLAGVAPMARDSGQYQGKRRVRGGRASVRDILFIVASVVGRYEPDFIAFQQRLRAAGKPPKVVRIALAHKLLVRLNAKAREVRQRIAALGPASSALLLEKSH

SEQ ID NO: 496391 - protein, 339 aa, unidentified
MKVSTLGIDLAKNVFQLHGVGCNGQTVLKKKLTRDKFLPFLMQLEPCLIGMEACASSHHFARVLRQYGHEVKLIPPQYVKPYVKTNKTDAADAEAICEAVARPNMRFVQIKTAEQQAILVLHTERNILIRERTACANSMRAILAEFGIIMPRTLSQLYKKIPEILEEYDNELSPFVRCSVARQLEHLQGVEDQITLIEQELSRWAKTQPACQRVMKVPGVGLMTATYLVASVGNGQQFHSAKQFAAWLGLVPREFSSGGKQRLGRISKRGDRYVRYLLVHGARAVAAVIERHKDNMPWLYRLLNKKAYNVAVVAQANKTARILWSMLVHHTEYRTLSAV

SEQ ID NO: 496392 - protein, 513 aa, unidentified
MHHRGQRSGRGDRIPKVVNNFAAAYSGTGEQLATAETRLFEPCPTRADRRLPTPPPAPGPSAKRTSPLEGSHIRSRPSQVPAPLRAARIMNPNWNEQPYFAALDWAKDHHDVIVVDRVGTIVADFQFAHTAPGWEEFNCKMQPFGKCPLTIETSVGMAVDQLLERGYPLYPINPLAAKEYRRRKTPSGSKTDRHDAWSLADALRIDGQAWRALRSQDEATAILRLLCRDEIGLIETRTALVNQLQATLGDYYPLALDSFEDWASPAAWAFVRTFPTPADLAKAGKRQWQNFLHRHKLWRPQTASQRLELWAQGQQLNASAATITAKTLLALSLVKVLDALQRQIQEYRSRITQAFKQHPDHDIFGSLPGAKQTLAPRLLGLIGSRRELFPDPDSLMCQAGVSPVAYQTGKLRKARIRWACDHFLRHTIHLWVDQSRRKCDWAQTYYQAKRDNGHDHASALRCLGKRWLKVLWRMWQDHTPYDEAKHLRSLQQHASFVWQALQNTPTTPQPACE

SEQ ID NO: 496393 - protein, 351 aa, unidentified
MLIIGCDFHTRFQQIAMVDTTTGEMIERRLEHENGEAQKFYATLPGPARVGMEATINAQWFEKTLQASHHELWVGDAAEIRAAMVRKQKTDSRDALHILDLLLTNRFPRIWIPPAAERDVRQMLRHRHKLVCYRTSVMNQLHGLAMGQGLCRKKKLWTSAGRQELEGLPLDPWASRRREELLQLLNQLDPWIAQLDEAVIQEAKNRPEAVCLMKQPGVGPVTALAFVLTIGPVERFRRSKQVVSYLGLNPSEESSAGRQRLGAISKQGNSMMRYLLTEAAQTASRFDPELRRDYQRLKFRRGHSGVAKVAIARKLAVRLYWKLREAAQPVPPARMQGSPASPMVEETPSRS

SEQ ID NO: 496394 - protein, 407 aa, unidentified
MIFVGVDWAEAHHDVCVMDDDGKVLGRKRIPDSLSGVSELHVLVADHTDEDDDASHVIVGIEKDRGLIVTALMAAGYQVFAINPLAAARYRERHHVSGAKSDPGDAKVLADLVRTDRHNHRPIAGDGSLVEAVKLLARAHQNAIWSRQRQVNALRSSLKDYYPGALDAFGTDLASVDAVAVLGIAPTPAIGRTLSRAKLVSAMKRAGRKRNLEEHAEKIQTVLRKEQLAQPAVLENAYGITTRVTVAVIVQLNETVAELEAALSEHFEQHPDAKIIHSLPGMGTVLGARVLGEFGDDPNRYRDAKSRRNYAGTSPITKASGRSKVVLARHSRNKRLADALDQWAFCSTNWSPGARAYYDELRARDKHHRKAIRQLANKWVGILHTCLERGCLYDENIAWPTTEELAA

SEQ ID NO: 496395 - protein, 417 aa, unidentified
MVIHMYFAGIDIAKKQHEACIIDDQGTTVLTMPVPNTQPGAARFLAAVRKRIGDDPHAVAFCLEATGHYWLSLYCFLTQQGYPVHVINPIQSDAIRNLYIRKSKTDRKDSFILADLLRMNQTEETCMASEVVLKLQTLSRTRFAFVNQVSALKQRAIGVLDRIFPEYASCFSDVFIKTSRELLKNHSTPDEIAALDLHELTRFLESHSRGRLGQGRAERIQELARGTFGIGLAVDAFALELRLILSQIEFIEAQISDLESAIKLAMEELQSQHAPGSLEGEQHHVIETIPGIGTILAAAIIGEIGDIHRFSDARKLVAYAGIDATVRQSGEFTGSRNRMSKRGSPELRRAIWLAAVSARRFNAELSAFYEAKKQQGKHPMVATGAVARRLVHLIHSVWSREQPFDPDYRWSPSGSAD

SEQ ID NO: 496396 - protein, 400 aa, unidentified
MISVGIDVSKGKSTVCILKPYGEIVSKPFNITHTQKDLSELSSMLFRLNDEVKIVMEATGIYHLPVLTYLQEKGFFVSVINPYLMKSYRNESLRKAKTDKIDSRIIANYGIDHWFKMKEFQTSGEIYEELKLLGQQYRHYMKLHLLSLAELTHLLDLTMPGIKNLLASWNETNRKDKRSDFVERFWHYDVITSMSEQEFTEEYILWAKEKKYVPSQEKAKVIYTLAQESIPTLPSETSSIKMLVTEAVRVLKEVDATLGLILSRMQEIAKALPEYSVVREMGGVGNTLAPKLIAEIGDVRRFRNGKALVAFAGIDPPPYESGQLVGCNRKISKRGSASLRKVGYETMRSLKMRSRPEDPVYRYVVKKESEGKSKKSAKIAGLNKFLRIYYARVTELYKNI

SEQ ID NO: 496397 - protein, 381 aa, unidentified
MNKTIVHHEGAAALTAAGTETNLPPATIKLGLDIHAKIYVVVAQHDHAALQPPRRFAPAEFVPWVGSLLRQGHAMHVVYEACGFGFGLCRALQAAGAQCLVIAPRKLDEQRTGVKTDARDAAALCQRLSRYVDGNTRELAVIRVPSEEEEQLRHIHRQREALVRQRTRLQAQGRGLLVSHSRPAPAHWWRVQTWNRLTRLLPEWLVARLEVLRPVLAALDTQIAALSLELESAAPRDLPRGLGKLTSVVLTREVCDWTRFKNRRQVASYTGLCPGEHSSGAKRVQGSVTKHGNPRLRASLVELAWRLVRFQPAYPPVRARLGLLAKGARATGAQRKKAIIAVARHLAVDLWRLHTGQCSAGKLGLTTNLPVTNQHQPIEIT

SEQ ID NO: 496398 - protein, 432 aa, unidentified
MTKKRRYRAISVNDERVSTVIAAVANRRVAIGIDIAKTRQFAAFMTVDGQVHGTVRWEHPKESPRFIELLRELVSRGSQVEPVMEPSGTYGDALRGALCRAGMPVHRVNPKRSHDAAEVYDGVPSLHDSKSAAIVAKLHFDGASEQWPVATEHERALAASLRVLEVFQKQFQRNRNRLEGLLARHWPELPRVLDLGSATLLELLVEFGSAGEVARRPSEAETVMRRVGGRFLQATKVATVLDEAATSFGLPPTDEERRTVQAIAAEARRCQKAASSAKRRVEALTEHEGAAREMRAVVGKTTAAVLVAAVGDPQSYPSTAAYQKALGLNLKEKSSGKQQGPLHITKRGPGVARLFLYLAALRLLQRDPVVRAWYAKKVARQGGIAKSKAVVAVMRKLSLALWHVARGSTFDSRKLFDVSRLRIAPEPMTEVM

SEQ ID NO: 496399 - protein, 361 aa, unidentified
MDKITRVVVQPEGRQIVRVGVDLAKRVIQVHAVDAQGRVVTSRALARDKFVAWCAQLPAGCLVVMEVSSSAHHWSRKLCELGLDARIVAAQLASPYRAEGATGKNDANDAAAICEAASRPHMRFVPVKSIEQQSMLSVHRLREGIKEDRNACVNRIRGLLLEFGVAIPVGTRALKAQLDDVLEDATNEMNGLARMALRRAQMQWQQLDEHLAWCDERVADHGRNNADVKRAGELMGIGPVGASAAIATVGDFKQFKSGSQFGAWIGLTPKQRSSGGKSNLGTITKRGDPYLRTLLVQGAKSVVNTAHTRSDPISKWVLALKLRAGWQKAVVALANKNARILWAIMTKEQRFDRQHLGVKPA

SEQ ID NO: 496400 - protein, 444 aa, unidentified
MLPILYRRVAGLDVHKKTVVATRMQVTDEDRAEWETQTFGTTTPELLQLHDWLLEWEVVHVAMESTGDYWKPVYNVLEDTFELLVVNAKHVKHVPGRKTDVKDSEWLAELMMHGLLKASFIPSRPQRALRDMTRYRTTLVQERTRLVNRVQKLLEGANIKLSSVATDIMGVSARAMLAEIADGQANARVLAELARGRLRAKIPQLEKALTGIVLPHHRFLLAKQLVHIDFLDEQIEEISAEIGRQLEAMSQPPDRSEPDTGQGAEEGSITGEGEPPLTWLEAVALLDTIPGVDRRTAEKMLAEMGLDMSRFPTAGHLATWAGLAPGNHQSGGKRYSGRTTKGNKALTTTMVVAAWTAVRTKDTFLKARYHRLAARRGKKRAIVAVAHSMLVSAWHMLTYQQPYKELGGDYFDQRKKEAKVSYLIRRLEKLTGASVNIEITPAVA

SEQ ID NO: 496401 - protein, 352 aa, unidentified
MQKIRKQITGIDVAKDELVVCLGRIYEDFSTELYAHKVFLNTPKGFESLVKWVEKSGPVGRFVMEATGVYFEGLAYYLSDNGYEVSVVLPNKIVNYFRTLSVKTITDKTASEAIAQFGLERNLDKWEAPKGIYRKLRQLTRERGQVVETRTVAKNQLHAETLEAYPNATSIARIKKHIVFLNKQEIEIKAELNDLLKTDPEMRAILTILCSLPGIGVLTAATVLAETNGFNLIRNKRQLTSYAGLDVIEKQSGISVKGKPKISKKGNRYLRKAMHLPALAAIRHDNRFKGIFIRLVSKHGIKMKAAVAVQRKLLEMMYILFKSQTTYDKNFFINNQQTEDQLMPTKRLEEHQ

SEQ ID NO: 496402 - protein, 425 aa, unidentified
MNYKQNEKINQVKESTLVVGIDIGSTTQYARAFDWRGIELGKVFPFSNSREGFEAFKAWMRHLQDKYRKSDVIAGIEPTGHYWFDLGAYLEDEGILLVMVNPYAVKQTKELDDNSQSKNDRKDPKVIAKLVTEGRYSAPYTPDGVYADLRIMVANRKRLIREMTQIKNRFARWFAIYFPEYTDVFGDYEAQSSMLLLKKVCTPEAIVELGAEKINQIWRDAKLRAVGMKRATTLCETAKRSIGLKKGSSAARYEMKLLLEDYEYKKAQLDAVMEEIEKLCRKIPESEQMLAIKGIGVITVAGFLAEVGDVRRFESPRQIQKLAGLSLRENSSGKHKGQTTISKRGRSKLRAVLFNAAIPLIAKNPEFKSLHEYYTTRANNPLKKKQSVIAISCKLIRVFYAILAKGVTYDAQKLISDIHRQPQVA

SEQ ID NO: 496403 - protein, 343 aa, unidentified
MQDITTIGVDLAKNVIQVHGVDQRGKAVLKKQLPRRRFVEFFANLAPCLVGMEACGSAHHWARQLEKLGHQVRLMAPQFVKPYVKTNKNDAADAEAICEAVSRPNMRFVPIKNGEQQAVLALHRARAGFVKARTAQANQIRGLLGEYGIIIPQGIGHLTKRLPAILEDGENELPGVFRRLLARLGEHLKELDRQVGELEAQIQDWHREDAASRKLAQIPGIGPLTASALVATIGDARSFQNARQLAAWLGLVPRQHSSGGKTLLLGISKRGDAYLRTLLIHGARSVVRVAERKADIPTWLTQLIGRRHKNVAAVALANKNARIVWALLAHDRDYQAAYAPGPA

SEQ ID NO: 496404 - protein, 410 aa, unidentified
MRIIALDVHRSFAQTAILENGKLRDAGKIDLEYSRLLRFARKLKPDDEIVIEATGNTSAIVRVLLPFVGRVVIANPILVRAIAWAKVKTDKIDAAVLAKLHASGFLPEVWMPDEETEARRRVVAERTQLVSQMTRLKNRIQSVLHANLIPPYKGVLFSQRGRAWLEAQPLAKDQRRVIVRHAGELDRLGAELAEVDKSLAQKALDEPQVKRLMTITGVNATVAMSVLAAIGDIHRFSSPEKLVSYFGLNPRVRQSGDKPAYHGRITKQGRAHARSMLVEAAWVISSAPGPLRAFFIRIRDKRGKHVAAVATARKLAVIIWHILSKDEDYTWNRPALLQWKLRKLELKAGHPSRRGGRQKGSAAAYSNKSVRDSERETIANAEDEYRRFVATWKQQSPKGRSGATKEVRRS

SEQ ID NO: 496405 - protein, 343 aa, unidentified
MSYAGLDLSRRKLDVHVLDEGGATVDRLAVRPDADALRTLAERFTGPVTAAVESMNGARFVHDELERHGWDVAIADAAKAKGLAPLAAKTDRIDARVLAILCRRDLVPEVWLPDPGTRAERERSRYRLYLVRHRTSLKDRIHATLITFGHTVPATDLFGVRGRELLAALEIPEPWASTLTSSLERLDDLAARIGRCEAELARLGADHEYVPLLRTVPGVGPILAYAIASELGDIGRFPSAKRLVGYTGLCPRVYQSGATDRRGALAKTGPKYLRWALIEAAVHAARHPRYRAKYERTKRRRGKQQGSQVARVELARELATAIWYMLSRQEPFRAAGPPSCLVA

SEQ ID NO: 496406 - protein, 374 aa, unidentified
MDEISKIHVGLDVHKDSISIGVAQPGREPGKLLTKIAHHLPKLLKQLDKLGTPSQLHVVYEAGPTGFGLARSLLAKGYGCEVIAPSKTPRRPGDRVKTDTRDCIMLAEFSRSGALHAVWIPDAGDEAIRDLSRAREDAIEARHQARLQLKSFLLRHDVRYAGKTSWGKAHYRWLAEQSFGASAAQTAFTEYCLTVQAADQRVQRLTQALEGSVTQWRFAEVVAALQALRGVAMVTAIGLVAEIGDFSRFEHPRKLMGYLGLVPCEHSSGERTSRGSITKTGNKHARRLLTEAAWQYRHPARISRAAQLRQEGLSEQVRAIGWKAQLRLSKRFAALKQRGLQVNKACIAVARELAGFVWAVGQRAMFEAATKTPH

SEQ ID NO: 496407 - protein, 370 aa, unidentified
MTGGAAVPCGGVATGVEQVGPAIDGDAAVEHYVGIDVSLEWSSVCVVDATGRIVREAKVASEPEALVDFFRRLGLSLAGIGLEAGPLSQWLHAGLAGAGFEAVLLETRQVKAALSAMVVKTDRKDARGIAQLLRMGWFRPVHRKSPPAQEIRALLVGRKLLQAKLLDVELGIRGLLRGFGLKVGPVSKGGFVARIRELIAGQAMLERVVEPMLQAREASRREFRVLHRAMLAVVREDTACRRLMTVPGVGALVAITFTSAVDDPARFRRSRAVGAHFGLTPKKYQSGETDVTGGISKAGDAMVRTALYEAANVMLTRAGRFSALKRWGLEVAKRRGMRRAKVALARKLACVLHRMWVDGSGFRFGKEAVA

SEQ ID NO: 496408 - protein, 339 aa, unidentified
MKLYVGIDLHSNNSVLVILDENDKVVYEHRHPNELAVILAQLAPHRESIQAIAVESTFNWYWLVDGLEEAGYTVKLVNTVAVKTYDGLKYTGDEHDARHLAHLLRLGILPTGYIYPKEERAVRDLLRKRAQLVRNRTMHILSVQNLVIRNSGKGIAAKLIRKLDTAAMNSICGGNSTLVLAIKSSLAVLRCLDEQIDTLERAVLKEAKLRPEFEKLLTINGIGPIFGMTIMYEAGTMARFEKVGQFASYARCVASSRWSNGKKKGEGNRKNGNKYLAWAFIEAANHVVRYNERISRFYQRKKARTNGIIARKAVAHKLARACYHMIKDQAPFDEERAFA

SEQ ID NO: 496409 - protein, 387 aa, unidentified
MMTTTCRHESTAPSTTTITLLLAFELGERRWKLGFTTGLGQRPRIRSVPAGAVDQVLEEIARAKRRLKVSEETAVMSCYEAGRDGFWLHRYLVAHGVTNHVVDSSSIEVNRRARRAKTDKLDLAGLLNLLARYLIGDRRVWRVVRVPSVAEEDARQLHRTWESVQQDRSRLLCRLQGLLVTQGVRLRIGDDFLQRLDGARLWDGRAVPEGLKHRVQRAWAQLVLVNTQLEELEAARTTLVPDHETATGRYVEVLPTLRGIGPIGAWVLATEIFGWREIRNRRELGALVGLVPAPYQSGDTDHDQGITRAGNKHVRRLMVQLAWSWVHYQQASALTRWYQGRFGSGSKRVRRIGIVALARKLLIALWRYVEQGEIPEGAIVKTPAPAV

SEQ ID NO: 496410 - protein, 414 aa, unidentified
MEIVHSRCAGMDVSKRDAKVCVRVAGRGRRKTVETVRTWGSTTNAVLALREHLINEQVSLVVMEATGDYWKPFYYLLEDADFEVMLVNARQVKNLPGRKSDVSDAAWLAQLGAHGLVHGSFVPPAPIRQLRDLTRARTAMTRERGREIQRLEKLLEDAGIKLSSVASDITCVSGRLMLQALIDGQHDPAVLADLAKRRLRAKIAELTEALTGRFTDHHAFLAGMYLESIDQRSRQIVELTARIEVVIEPFRSFCDLIRTIPGIGERCAEVIVAETGADMSIFPTAAHLASWAGTCPGSNESAGRVKSTATRPGNPYLKAALGAAALSIVNTRDTYLAAKYRRIAARRGPKKALVAIEHTILVAIWNMAHTGALYDDPGADYYTHRDPERARRNAITQLQRLGYQVTLTPTAASA

SEQ ID NO: 496411 - protein, 343 aa, unidentified
MEQISTIGLDIAKTVFQVHGIDETAGVVIRRQLRRRQVLSFFAKLAPCLVGMEACATSHHWARELAKLGHEVRLMPPRYVKPYVKRNKNDAADAEAICEAVQRPTMRFVPIKTPEQQSVLMVHRTRQLFVRQRASLINAIRAHMAEFGIVAGVGRNGVETLLELITRGEDERPPSAARECLMALAAQLDLVKRQILEADRRVRAWHRASKTSKRLEAIPGVGPLVATALVASVPDPHVFRLGCDLSAWIGLVPKQNSTGGKDRLASISKAGNRYLRSLLVVGALSVIRRAKQLGYTRHPWLVQLMARRSTKIVAIALANKIARIAWAMMARNESYRTPLPQSA

SEQ ID NO: 496412 - protein, 433 aa, unidentified
MSKFFNSPVVGIDISADFSYAAILAPNGDVYKKSFKIKHDVSGFNHLVNEIKKVEKEFNMKTAIFMESTGVYHLSLFHYLNNNFDNTFVINPLVTKCNKNVDIRKVKNYKKDALFIANIEKFQNIKLSQTNDLDIFLLKNLVREYYKLTDTCSTFKKKLSSDLRIIFPNYNTVFSDPTSNTSLEILSNYPTPKSIIDTPKEDVIKILIEKSKKGLTWSEKIYSKLITVTEEANIIGVPLDGLSVKISSSLVLIKAFKSEIDNLLNEINSLIESSEFPEPIKGNMELINSIPGIGRLTAVTLIAEIGDINGFIKPKHLIAFFGIDISVNQSGKFLGDQSKISKRGTRIGRRALYAVALASIRRNRSGIPINKVLLEYYQVNLKGKKAKVALVAIMHKILNYIFAVLRNQTPFEQRDHKIHKQMFLENKTLHSAA

SEQ ID NO: 496413 - protein, 342 aa, unidentified
MQPVPSFQVYQRGYKMEPANMGIDVSKNSLDVVLLYEGKSYYQVVGNNLSGFQHLSTWLEREGFQQVHLCMEATGQYGDAAATYFYQRGYPTSVINPARIKAYAASHLSRNKTDKADAKLIAEYCQKEKPPLWIPPTDAFRTLKALVHYLDDLMSMRQQERNRMEFSSTDKLVESTMLEHIAFLDEKIKKVHSAIHQHIQSDLQLRHCCELLVSIPGIGERTAARLLAEIQDFRSFKNAHQLAAYAGLNPRKYQSGSSVHRKSRLSKVGNAHLRYALYMPAIVAMKHNPIIRELCQRLSERGLAKMAIVGASMRKLLVLAYGVIKSDLVFDPNFTHKCAIAS

SEQ ID NO: 496414 - protein, 349 aa, unidentified
MEYIALDAHKRYSFASVETLDGSRRTEARIDHGPGVIREFLRKFEPGSPVAVETVGNWYWIVTEIEEAGMVPKLVHARQAKMMLASVNKTDRLDARGMNRLQRSGTLPTVWIPSIDLRDKRELIRTRMVFTRQCTRLKNRLHATLAKYALRIDGASDAFGKRGRQELARCLEKLPTHTRYTADRIVEQLDFVTTQAVALERRMVEAFAPTETIEVLKSLPGVGPILAVVISSEVGDVKRFPSAAHFASYSGTAPRVHASGGKIYLGQLRSDVNRYLKWAFVEAANAISIHRRRYPQRYVTRLYERVRNRRGHQTAIGAVARHLAESTYWMLKKGERYREPKGSISSTKR

SEQ ID NO: 496415 - protein, 369 aa, unidentified
MDKAITYVGLDVHKDAIAVALAEAGVRGDVREYGKVANTPAAVKALATKLSRVGNALRFCYEAGPCGYGIQRQLTLAGHDCVVVAPSLIPRKPGDRIKTDRRDAINLAKLHRAGELTAVWVPDPAHEAIRDLVRARLAAVRGLRQARQQLSGFLLRHGRHYNRPAWTLMHRRWMAGLRFEQPAHHIVLEDCIAAVEAATARRDRLEAHIEAALPDWSLAPVVRALQALRGMALVAAATVIAELGDITRFANPRQLMAYLGLVPSEHSSGATKRQGGITKAGNGAARRMLIEAAWSYRFPARISREQLLRQEGLAKPIRDTAWKAQERLCRRYRKLARAGKSSTVVTTAIARELAGFAWAIARHVQIAGA

SEQ ID NO: 496416 - protein, 408 aa, unidentified
MNTLYVGIDVSSKSNVIYLMLPNGDKHSNFSVANSHEGSTQLVKRILSALTSHSLDTVLIGLEATSVYGDNLVYFLREDATLAPFNRKIHVLNPKQVKKFHDAYNDLPKNDYVDSFVIADCLRFGRINKEVYMGDYRYKALQNLTRARFFAVQNLVKEKQRFMNVLFKKYSTMTQEKVFSDTFSTTALAVYDEFESAEALANMDLHELTDFIIEKGKNRFPDPDAVAKAIQKAARSSYRLPKTVNDSVNQVLSISITSMKALESQIKEFDKAIKAQMELLPNVLISIPGIGPVYSAGIMAEIGDINRFNSQAALAKYAGLAWKQHQSGGFESEVTRLIPSGNRFLKYYLCEAAFSLVRCDKEYSDFYRLKYKEVNRCQHKRALALTARKFVRLVFRLLKDNRLYCPAK

SEQ ID NO: 496417 - protein, 354 aa, unidentified
MNTTQNSTKSKIVKVIGVDLAKDHCDVIGYDENGIICLRLDGCSYAKLREILANLPQAVVLMEACKGSMFHARSIADLGHEVRLVKGTDVKALRNVKHKNDLRDAAYIANLYFVPGIKYVYIKSQQQQSLQFLQNEYKSLQELRIQVGNQIHAGLEEFGCPVRKSSKFIKTRMVAHLEKHAELIPEDVMASFKRRREIWLNLLQQEEEAKRRLEQVATTDANAKRLMTVPCVGPQTAVGLLVHVGVDFGRFKNSRQFAASLGLVPKQNSTGGNNTLNHITKCGPKSLRSNLVQCAQLVLMYAEKWKGNFGDWVRKMRDSGKKHGVIVCAIAAKLARIIYRLMKDKVDYTPILSC

SEQ ID NO: 496418 - protein, 408 aa, unidentified
MYFLGIDIGKRTHVASLMSEEGKVILKGFSFPNTTEGADSLIERLSKYSETPADFIVGMEATGHYWLSIFSYLHESDFLIHVVNPLQTDGWRKGTEIRKRKNDIIDSVLIADLMRYGSFVETVLSDENVFSLKQLSRYRTYLVGTASDFKRKIIAVLDQVFPEYASIFSKQGIFGKASKELLLEFSSPIELEEISAETLAQYLAELSRNRIKPEKADQLKQAASNSFGVKFAQEAFTFQLRSMIEQLKFIESQVKETEKEIKRIMSNLDSVILTIPGIGPINGATILGEIGDIRKFSNPKKLVAYAGIDASVSQSGQYEATHNVMSKRGSPYLRKALFSAALVASQCDPVFRAFYQKKISEGKHHLTALGAVSRKLCYVIHAILTNFLDLTVIKYFFDLANFHLTLYS

SEQ ID NO: 496419 - protein, 455 aa, unidentified
MVDEAIFILFVQEKKKSFLATMTLINFVAANQKYYAFNLLSVFIMVFWSVQYLLQHLLVQTQLSDQLLQPLILILQLPQTPQFRHARPGKFFLPVNGMDYLLPLRLTVRNVLTRRITMNIVFLGIDLAKNVFQLCGLNQAGKPVYTKRTGRKELLQTLANIPACLIGIEASTGAFYWQREFEKLGHKVKVISPQYVKPFVRGQKNDGNDAQAIAVALMQPTMQFVPPKSPEQQDIQALHRARQRIVNHRTATVCQIRGLLLDRGIPIGSAVSRARRAIPLILEDAENGLSSRMRRTIAELYDLFNDLERRIHFFDKEIETVFRQSEACQRIAKVKGIGPKTATAVAAAIGKGTEFKNGRHFAAWLGLVPRQHSSGDRQVLMNMTKKGDKHLRTLFIHGARAVVRVATNNNDGHMNQWVNQLKERRGFNKTTVAVANKNARIIWSMLRNDTGYQVV

SEQ ID NO: 496420 - protein, 344 aa, unidentified
MTQYKRIGVDTSKAVFALHGIDQQDRPVLRINLRHAQMNPFFAKLPPTEIAMEACGGAHHWARELAALGHKVCLIPPQYVKPHVKRGKNDRNDAEAICEAAGRPSMHFVPMKSVSQQAQGMVLKVRETLVGQRTLLINTLRGHAAEFGVIAGKGLPQVGPLLTAIEQQTTIPPEARDMAALLGRQIEDLDTRIKELDAKLTAAHKANAVSQRLATIPGVGPVTALTLAIEIDPEAFESGRHLAAWAGLTPKEHSTGGKQRMGGISRAGNERLRVLLVAGATSVIYAAMKPGSKQMTDWLRALLQRKPRKVAAVVLANKMARVAWALMASGETYRRPASAGATGA

SEQ ID NO: 496421 - protein, 414 aa, unidentified
MELLHERCAALDIGKKDLKACVRTPSPKGKRSRRQEIRTFATTTNALLELRDWLVAEQVSLVVVEATGDYWRGAFYLLEDQLNVILVNAAHAKGLPGRKTDVCDAAWLCQLGECGLLRASFVPPEPIRQLRDLTRYRTTLTAERSREAQRLEKELEDAGIKLSSVATDITGVSGRAMLAALIDGERDPQVLAEMAKARMRPKIPHLVQALTGNFGEHHAFLCRLHLQRIDELTAAIAELSARIAEQMRPFARQLEHLMTIPGVGQTVAEVIVAETGTDMGRFRTGANLASWAGVCPGHHESAGKRKSGKTRHGDRWLTGALGTAAMAAARTKDTTYLGARYRRLAPRLGKKKALVAIEHSILVAVWHILTNNVDYHDLGGDYFARLDPERAMRRIIRQANSLGFTVRFDPIQAA

SEQ ID NO: 496422 - protein, 348 aa, unidentified
MKKPTKHISYSGKDIFVGIDVHKKTYSVVARADSEVVKKWTTAASPQGLAEQLLKYFEGARIHTVYEAGFSAFVLHRELVKYGIDSIVVHVPSIEVAVNDRVKTDKRDAHKLASLLEAGRLKGVRILTEEEELHRMLSRTRQQLVEDRTAVENKIRMKFHQLGLINHDDNRRMSHKLVRELLKQNLSEELTIAVEAYWDIWKSLDQQIAKLDKVLKHQAESDPNESTYQSAPGIGKISARVLSNELGDMSQFKNERQLFSFTGLTPSEYSTGENIRRGHITKQGNSRVRGILIEIAWRAIGKDKALVEFFERLHPHTGKKRAIVAVARKLIGRIRAAFQHGEAYRMGY

SEQ ID NO: 496423 - protein, 347 aa, unidentified
MGLRSPFLGCKKYGRLFFPNTKCMNKNKQFCGIDISKDVFDVVDHEDHHHQYQNDQSGFKEFYKILSDQSHCVMEVTGSYYQGLATWLHSKKVDVSVVNPLSVKRFIQMRLKASKTDKLDAGMIRLYGEYENPELWQPPAQYIIEANELHKLIVLLLRQRTALKNKLHGLKAKGIKKAMVITSLRRQIRSLDNEVSTLELKLEEVVKAHQADLITRLCSIPGIGKRTAIYLIVITQGFEKFETSRQLISYFGLDPTIHESGSSVRGKSRISKTGNNHIRNLLFMCSFTACIHNKSCNEIYNRIIAKGKSKKLALIAVANKLLKQSLAIAKSGLYYDENFRSVYMKIA

SEQ ID NO: 496424 - protein, 420 aa, unidentified
MTTSKERTIVAIVNPICCGLDVHKESITACILYNDGNGKEHSILQEFSTFTDDLIHLRDWLLTHDCPVVAMESTGVYWRPVHNILEGYVDVVLVNARDIKNVPGRKTDIKDSEWLAGLLRHGLLRASFIPPKEVRAWRDLTRMRRKYVNTLSDFKKRVQKLFESANIKIDSVVSDLFGVTGRNLMLLLASGHTDITMTDIEQCVRGRLKGKTQELNRSIKGFFTEHHRFLLQTLLSTIASLEDTIGSLDQRINRLMGNHQELIERMKEVPGISDISARDIIAEIGTTLDAFPNDVALASWCGLCPGNNESAGKRKSGKNHTWKNQVKPVMVEVAWAAARTNNTYYHDKYHRLKTRRGPNKAIVAIAHRIMKCLYHIIKNGVRYKELGMDYLDKKTKTAKLARLQKQAQSLGFSLIPVAGA

SEQ ID NO: 496425 - protein, 328 aa, unidentified
MRYIGIDISKATFTVAYSSDKGCDVRDFRNTSADIRKFIRTLPPECHCVMEATGPYSTLLLYLLSKAGITVSMENPLKIKNFAKAMLTVTKTDRADARLISLYGERMRPEPYKIPSETLMLLKQKRTVLRQFKKQLAATKNLAHSLDVLPVIDKSAKRAVSSVITSLEKQISNLEKELADVTEREFDRQLKLLTSVKGIGITLATALIIATAGFSNFDNSKQLSRYLGLAPTYEQSGTSVNYRGHINRNGDSSLRGLLYVAAWPASRYNAACKEIYTRLRERGKPGKLAMVAVANKLLRQAFAVVKSGVPYKDGFVSEKPAGGHQSMA

SEQ ID NO: 496426 - protein, 346 aa, unidentified
MNMLEAPRVTGGVDTHLDVHVAAVLDPVGGLLGTKSFEVNPAGYKSLLSWFESFGEVEKVGVEGTGSYGAGLARFLRQHGVSLIEVDRPNRAERRRSGKSDPLDAVEAARAALSGRAKSLPKSKDGAVEAIRVLGVAKRSARQARVKALTQVRHLVITAPDELRRRMKDLSVSALVKEGAKLRPSRSADPITAATKAAISSLAHRIQMLDRELAELEEMITPLLTATAPELLALFGVGPHTAAALLVCAGDNPERLRSEASFAHLCGVAPIPASSGKTTGRYRLDSGGDRQANSALWRIVMVRIAHDPETTAYFERRLKEGRTKREVIRILKRYVAREVYRHLPRG

SEQ ID NO: 496427 - protein, 400 aa, unidentified
MAPSLLPNNLMERPVKRNDLSQTLIAFDHSSTLVAVVELSFGSWLAAGLVPHLSRQPLKKLRPDPDALLRLLLRWRDQGIKAGGPIKRIVLAFEAGRDGFWLARWLRARGIEAYVIHPASIPVSREHRRAKTDRLDTGLLMRAVLGWLRGEPKHCNMVAISTIAEEDARRPTRERETLVRDQTRSVNRIKATLIRFGIRTFKAKLRQATKHLEQLRSPEGEPLPPNTMAELRRDLARLQLIRGQIGEIERARLERLKRAPRQGTHPMIRMLARIMGLGIETADMLVHEVLSRKLRDQRAVARYGGLTGSPDESGSKRRERGLARAGNARVRRGMIQLAWRWLMFQSKSTLTKWYRARTAGAKPGLRKAMIVALARKLLIALWRYVTIGEVPAGAVLRSGT

SEQ ID NO: 496428 - protein, 390 aa, unidentified
MHKLFVGIDIAKLNHQATVIDETGKVLGGSIRFPNTTKGGTTLLEHVTKFRDGDTPIVFGMEATGHYWLALYSFLVGKGHTAIVINPYQSESWRKVYMSAVKTDKEDAFLIADLLRFGSIKKSQVPSEVTIALRNLTRFRVSMSLQLSDTKRRILTVLDQVFPEFPALFSDAFGKTAISILEEYQTPEALETLSSRKLTNLVSKLSRGRFGKAMAQSLHAAASDSFGITFALDSFSLQLKLLLHQLGLLVGQLNLLDEEIAKLFGTESKLLTIPGVGPTTAAAITAEIGDIQRFKTSAQLVSFAGINPTVRQSGNFIGNKNKMSKKGSPYLRLALWQASVVASRKNPVLKAFYEQKVKEGKHKMTAIGAVSRKLTGIIFAIMRDNKPFMI

SEQ ID NO: 496429 - protein, 413 aa, unidentified
MVKREKIELVKRQRIFVGIDIAGSKHRARFIDNMGEEQIKPLSFFNDREGLEKLERRVNEIPRIGDDIIFGLEPTGDYWKPVAQYLREKGYPVVLINPYHLKRTKEIIDNSQDKTDDKDSYLIADLTKQSKYFFPVIPEGVYAELREVSINWKRTSQQVARLKCHLSNFLAKYFPEYKGIFSDILGKTSLYILKHFPLPEDIERLGINKLYRVMKKVSKGSIKEGKIQLLYEKARTSIGLKGGSQTAKVLLKEVLSDIEILKKRKEKLTKMMDELLYQSGYLKNLLSIPGVGIVAGSLFLGEIGDPDNYERASQIEKMAGLNLVENSSGSMKGEKKISKRGRSTLRYVGHLVTTVAIGKSPEIKALYRYKVEECKKEKMKALTGLSAKMLRIMFAVCKNKTFYKHEEITRYFR

SEQ ID NO: 496430 - protein, 353 aa, unidentified
MSDLAEEREVILGVDTHLDVHVAVLIDVVGRVVATTSVPTTTLGYEQLIEWACGFGRLTRAGIEGTGTYGAALARRVQEHGVPVLEINRPDRSRRRLRGKNDPTDAENAARAVLAGEANSIPKAQSGVVEAMRAVSMARRSAVKAKTQAINQLRALLVTAPASIRATLWKVKPEQCVARCARLQSLGDTPLLKALTSTLRLLARRWLSLAKELHELDAALEELTKRAGRRLLARFGVGPQTAATLLVTAGDNPDRLRSEAALAALCGASPLEASSGKTTRHRLNRGGDRAANNALWTISMVRMRSDPRTRAYVTRRTAEGLSTKEIQRCLKRYIVRELYPLILADLADSIRES

SEQ ID NO: 496431 - protein, 407 aa, unidentified
MFFVGDDWAEDHHDVYLMDEGGARLASGRLPEGLAGIGRLHEMIAAHADDPAQAVIGIEKDHGLWVAALASSGYQVYAVNPMAVARYRDRHSVSGAKSDAADAKLLADLVRTDRHNHRQLEGDSNQVEAIKVLARAHQNLIWTRTRQVSALRMALLEYYPAALEAFPNLGDRDRDRDALAVLRRAPTPDQGARLSLSKIAAALKGGGRQRGIEERAHQIQTLLRSKQLPAPQEVTAAYGATTSAAITIVATLTDQISAVEIELAQHFRKHPDADIYLSLPGLGVILGARVLGEFGDDPNRFTDAKCRKNYAATSPITVASGRKHAVLARHVRNQRLYDALDRWAFATLKCSPGCRAFYDQHRAAGDTHHQALRALANRLVGILHGCLRHHTPYNEHTAWAHRAPAAA

SEQ ID NO: 496432 - protein, 337 aa, unidentified
MECKRIAVDTSKSVFTLHGVDERGRPILRENLTRARFEKFLGKVSPTEVVLEACGSSHHWGRFAQERGHTVRLVPPQYVKPFVKRGKNDRNDAEAISEAASRPSMRFVPVRSAEAQAEAMDLSARDLLVRQRTQLVNAIRGHAAEFGVIAAKGIAHIAPLLQKVAETDMPQAAKDTLAQLGRVVAQLDAQLAEIDRRLAERHKANPVSRRLAAVPGVGPVTALTVATTIDPGQFASARHFAAWLGLTPKEHSTGGRQRLGGISRAGNERLRQLLVVGAMAVIRQARPGSKTASPWLLALLERRPRKLAAVALANKMARVLWAMMANGTAYRRSPQAA

SEQ ID NO: 496433 - protein, 357 aa, unidentified
MQNKNTEVDFSNQKFFSGIDTHKKNWKITIRANQMELKTFSMNPQPEELARYLRRNYPNGEYFSVYEAGFCGYWIDKRLREQGIKNIVVNPADVPSRGKERVNKDDIIDSRKLARELENGTLNGIYIPNDWHEGIRSLCRLRYSVTKEQTRIKTRIRSLLSYYGKDFPENYECKNWSGRFINFLEGLEFNHATAKKTLNHLLKELKDKKQRLAEIIRELRDSTQEAGIGEKIKQLMSIPGISFITAITFYTEIMDMRRFKGLSELCSFVGLVPSTYSSGDKERVLGLSNRQSKYLRNLLFESSWVAVRNDPALMMKFCELTQRMVKQKAIVRIARKILNRMRHVWLNETDYVIALIQ

SEQ ID NO: 496434 - protein, 384 aa, unidentified
MQERKVITMITHYIGIDAHTTNYTLSTATDFEEKPYNTNKYGAQLHYILKYANALCKKDKIQKENILLGYEAGCLGFKLQRDLNKEGFNCVVIAPSSIPGTEMNRKRKKKTDYRDAEAIAKALRNDDYSAVATPDEQDEAIRDYIHERDAQKKCLKAIKQRIGALCNRQGLKYDGGYWTKKHIDWLKHLSFPNEIFKSVLETQLLEFEHVTEKIEEMDRKIDEFAEMDKYRESVHKLTCFKGIKTLTALAVIVEIGDFARFMKAKNFVAFLGLSVGEQSSSNDHNQGGITKQGNCYIRRLLTEAAQCFSRATSTKSKALKERQEGNSAEIIAYADKGNERLRKRYYHLVNHNMKNQNEAKTAVARELACFIWGMMTGNIHTALS

SEQ ID NO: 496435 - protein, 425 aa, unidentified
MRSIALDVHRDFCEVAIKDQSGLRLAGRIKTSLAELERFAHSLAPDDQVTLEASGPARAIARVLEPHVGRVVIANTRKLSAIAESKVKTDKVDAQTLCELLAAGFLPAVFSPDEFTRALRRRLQRRSKLVRSRTRAKNECHAVLARNLKGRPPMTDVFGKAGREWLAALALPADERETVEGCLREVDFLDSEVGLIERELAAQGLSSQQIRRLMTVPGVSLVSAAAFVAAIGEIQRFSSPKKLVSYVGLDPRVRQSGAAPARHGRISKQGPAEARHMLCEAAWVLIRTPGPLRAFHERVRARRGAQIALVATARKLSVLFWHLLTKEEDYAFQRPTLTRRKLRGLELKAKDGRRSWPSGHALSTKQDRAREAEFALQVETAYRRLVADWQPSGPRSGAGATRGRASSRPTSGKQRGKASVPNPAL

SEQ ID NO: 496436 - protein, 339 aa, unidentified
MDHVAIDLGGRESQICVRRPDGTVVEERRVRTGALPTYLQGRAVSRVIVETCSEAFWVADAAQAAGHEVRVVPATLAPTLGIGARRLKTDRRDAQVLSEVSCRIDLPSVHIPRPDARAAKTLCGMRDGLVRSRTLLINTVRGWVRTQGRRLGTGGVLSFGPRVRTAFGAALPGYVDRQLQAIEHLHAAIADADREVGALAAADPVARRLMTVPGVGPVTAVRFLAAIDDRTRFTGAHAVEAYVGLVPGQDSSGPRTRYLGITKAGSPALRWCLVQAAHCAKRTLKPGPLRDWVDAVAHRRGRQVAVVALARKLTGILFALWRDATVYDPLRTNQRPATA

SEQ ID NO: 496437 - protein, 378 aa, unidentified
MKRVRFVGLDVHAETIAVAVAEKDEEVRSLGVIPNRAESIRKLVKKLGPAEELRVCYEAGPTGYVLYWQLTALGAPCEVVAPTLVPVKSGERVKTDRRDALKLARSYRSGDLTPVWVPDAAHEALRDLVRAREAAKKDQLRARNRLSKFLLRHGKRPPAGVKSSWTGNYLLWVKQEVHFEQFAQEFTLLDYWHEVEHAAGRVERLDRAVEEAVKSAPPQMRAVIEGLQALRGIAQVSAVTIVAELGQISRFARARQLMGYSGAVSSEDSSGERVRRGAITKTGNAHLRRIVMEAAWSYRHRPAVSRALRQRQEVVSEEVKEIAWKAPHRLHTRYRKLTARGKNKGQVITAIGRELLGFIWAMGVKVEGAQKEPLPRAA

SEQ ID NO: 496438 - protein, 344 aa, unidentified
MQVSVLGIDLGKNVCSIVGLDVSGAVVLRRRVKRETLIGLTRKLPLCIVAMEACCGAHHLGRLFAGQGHEVRLMSPEYVRPYIKAQKNDDRDAEGIAEAATRPTMRFVELKTQEQLDMQTLHRSRDRLIGERTALINQARAVLLERGIVVPQGKRRLAEYLNTLMSDPEAGGLSSRMRVLIADIKLQWQELDRRIEIFDAEFMAFAKENDDARRLVTIPGVGVTIASALIAAVGKAETFDHGRDLAAWLGLVPRQSTTGGKPTLLGISKRGNKYIRRLLIHGARSILRFIAERDTALGLWVKELLLRVHHNVAVVALANKLARIAWAVLRRGDRYAAWGTPVSA

SEQ ID NO: 496439 - protein, 363 aa, unidentified
MSMKGKTLVGLDVHAVQTHAAVLDTLTGELRVRRLNGAPSEVVPFLEELGRGVHAVYEAGPTGFGLARAARERGIVLDVVAPGSIPKGPTDHVKTDRRDAVRLARLLAAGELRFAFVPSVADEQFRDLIRSIEDVRGDLMRARHRLSKFLLRRGERYRGPGRAWTLEHLRWLRALAFDDPCSKASFADYLSAVELLVGRRASLLAALEQAVPGSSHAPVIARLRCFRGIDTLSAAGLAAEVGDFARFPKPTLLSGFLGIVPSERTSDQKRRQGSITKAGPTHARRLLVEAAHHYGRQPSIGAVLARRQQGADPRVIAVAWRAQQRLHQRWHHPREQRRKPAGVVAVACARELATFLWEAATLD

SEQ ID NO: 496440 - protein, 312 aa, unidentified
MPPQDGLSFLGVDVAKPTLAIQFPDQSWSTANTASGHAAFIARCVALGPVHVICEATGGYERALVLALHQAGIAVSAINPRQVRDFARACGQLAKTDAMDASILREYGEKLRPSPDPAPAKGAAEFAELVRARQDVVGLITDEINRREHARLSALVKLSHARQKQLEKQLADLDRLIDTHIATHAELTAKAERLQQVAGVGRVSALTVLALLPELGRIGDAQASALVGVAPLNRDSGQFRGQRHIHGGRAAVRRVLYMAALAATRHNTILKTFYARLREKGKPAKVALTAVMRKLVVLMNRLLKNPQFNLVC

SEQ ID NO: 496441 - protein, 438 aa, unidentified
MSNKVIFNFDQLFISVGIDVGADFSWMSIALPNQQFVGKPYKILHNSMDSLTAAVSKIKEAEELYSLESRIFLESTGIYHYPLFCFLRDKGFNAAVINPIITKNSTNMNIRKVHNDRFDSRKAALIGLKPDLKVSLMPSDLALNCRNLCREYYDLMDSRSAYVNKLQGELRMAFPQYLGIFSKVTTNTSLTLLETYTSPSAFIEADKQEMIDIIRSTARFGLTYAKNKHNAIIRAANSAQAFGYMIDSNIKRIRLYISFIRKYDEEIKGILDSLHELVDANEGTDFVKQIHLIETFKGAGFLSAVSLMGEIGDFFAFSKPKQLFAYFGLDPAVKQSGKFEGTKIKMSKRGSAIARRVIHTLTLQSIGTSRTGEAKNPVLRDYYLKKCESKPKLVAMGAVSHKVCNIIFAILRDNKPFKIIKPEEHIKQFNAAKYEIAA

SEQ ID NO: 496442 - protein, 320 aa, unidentified
MMAQNEVVVVGIDVAKDKVDACIRAFKLRQTWPSTAQGHRKLVAWLRKHQVNKAVMEASGGYERAWARVLREAGIEVRIVDPKRVRSFALSAGRLAKNDAIDAEMIAWFAETFSEAPSQRHDAAHEELLALVKARKGLLDLRMRLVSQSEHAAPGLVQKAHAHILKSLASEIAKLEAAISAKIKSTPDFAERAEIIESVPGFAQTSSANLVAGMPELGQVNDEIAAALIGVAPYDDDSGKRRGERHIKGGRRWVRNAIYMPCVGAATQNNPVLKAYYQRLLAKGKEPKVAIIACMRKLIVILNTMIARRQKWDPSRYVLS

SEQ ID NO: 496443 - protein, 430 aa, unidentified
MQKNYSTQNEKIERITEHTLVIGVDIAKERHYARMVNWRKQEGQKGKNFKNNKTGYEKFIGWVNKGIKQSGASDVVVAMEPTGTYYFVFEEYLEKQGIEVVIVNGRDVRRTSEIMGNESSKNDPRDALIIAQLTVDGRYGPSTRPKEGVYAELRELSSLRDLLATDDTRHKNRLHNQLSQLFPEYQKYQKRGFSLGMLAALKHFGTLEALIQAGPDGIHQLWKEQNIKNYGQKKAHALYTLARQSIGIKRNSLAAAHKLRILINNYEANQQALAETEEKLQQQLEQLPQAQQLMDIPGIGPVIAGTFLAEIGDIQNYNSPKQIQKLAGYAITSKSSGKHNGKETSSKMGRKLLKTILYKAGIVLISKNKAFRQIYDYYTIERKKPLIKMKAVIAISCKLIRVFYAMLKNGTAFDEKKMLNDIHRPQTKTA

SEQ ID NO: 496444 - protein, 350 aa, unidentified
MLIIGCDLHTRYQVIAMLNSETGELVTRRLQHENGEAGAFYASLPAPAQVGIEATGYTQWFERLMAELNYELWVGDAAQIRARAVRRQKTDSRDAEHLLELLSTQRFPRLWIPSPEQRDLRQLLKHRHKLVTMVTTLKNQLHFLAMSQGLCRKSKLWSERGREELESLSLGPWARRRRQELLALLDQLQPQIAELDVAVAQAAAADPAAVDLMTQKGVGPVTALAFVLTLGPVQRFRHSRQVVSYLGLNPREHSSGGRQRLGAISKQGNSLLRWLLVEAAQSAARFDPELRRKYQRLKFRRGGQIAKVAVARQLAVRLFWRLRHDSPEVPPVRMPGSPSSGVVPSTGSRD

SEQ ID NO: 496445 - protein, 354 aa, unidentified
MPCIGGEVILGVDTHADTHTAALVDPLGRTLAILMVPASARGHRALLRWARRHGQLRRAGVEGTGSYGAGLARFLALEGVEVIEITRAARKGRRHLGKNDGRDAEAAAAAVLAGQARAIPKPRDGIVESIRVLRHTRASAVKSRTQAALQLRNLIITAPDELRDGLAGLTTKQAVARSARIRLTGRLDAVAATRKALRTLARRWQTLDAEVRELDRDLKRLTAQAAPRLLAQPGIGPETAAKLLIVAGDNPDRLRSDSALAALCGASPVEASSGKTRRHRLNRGGDRQGNTALWTIATNRMLHHPETRAYVERRTQQGLGTREIRRCLMRHLARRLYPLLTADLADANTNSLLT

SEQ ID NO: 496446 - protein, 337 aa, unidentified
MKYCGIDLHSNNSVIVVIDDEDRVVARKRLPNELARIVEFVASWRDELAGVVVESTYNWYWLVDGLQAAGFEAPLANTAAIRQYDGLKHSGDEADARHLAHLLRLGILPTGTILPRDERAVRDLARKRMQLVRGRTTHILAIENIMARQFGGRMTSNQIKRLSADDIDRMPIAADVGLAMNANLAVIGALDAQIEVLERRLRERVKPRPEYAFLTSVPGIGQALSTTILLETGPIDRFASVGNYASYARCVDSVHTSNRKKKGEGDVKNGNKYLAWAFVEAANFARRYCPEAKRFHERKKAKTNNIVATKALAHKLARACYHILREGRPFDVTRCFA

SEQ ID NO: 496447 - protein, 401 aa, unidentified
MNAVGIDVSKGKSMVCVMRPFGEVVLEPFEVLHTAQNLNDLAGKLKALDGETRVVLEATGNYHKPVAFVLHDAGLFVSVVNPVLIHDYDNNSLRRVKTDKKDAVKIANYTLDKWTRLRQYLPEDEARLALKNCYRQYQQAVAVRTMLKNNLISSLDLTFPDANKLFSSPAKSNGCEKWVDFIGDFWHSECVSSLSSDAFAKKYLKWCQKHGYNFTRSKSDTIYACAVNAASLPKSPTSKLLIQQQVAQLKAVSQSVAAFQQEMLRLSQQLPEFDTVMEMYGVGPSLGPQLMAEIGDVRRFSSKKLLIAFAGIEPQPNDSGKIVGNDSGISKVGSAVLRRTLFLIMTVILKTQPQDEPVFQFMNKKRSEGKPYKVYMMASANKFLRIYYARVKAVMDSKHSK

SEQ ID NO: 496448 - protein, 391 aa, unidentified
MSMYFVGIDISKYKHDCCIISAADQQIVSKFTVKNDKDGFEHLLTTLNSLSNPEDIKIGFESTAHYALNLELFLENAHHSFMEVNPVLIKEYKKSTTLRRTKTDSVDCESIARWLMTVEYKPHSKGFYHSYSLKSLTRLRDRLIRQRSFYLVKITNVLDHTFPEFKPFFNERLSKTAIYLLENYGSAEKMAHMNSASYDKLRCASRDKFSIQQFLRLKELAANTVGVNNSIFDIELNSLLTLYNSLCKEIKTLEAEITKLIEEVHPHYMSIPGIGPISAAVIYAEYGDISNFSNPGQMLAFAGIEPGINDSGTESHGGRMVKHGSSQLRYVLLNACLPLIRFDITFATYYAKKRAEGKKHRVAITHVAKKLIRVIYALERQDVDFNVQKLR

SEQ ID NO: 496449 - protein, 447 aa, unidentified
MKQKKPNKRKSVKLPKHLQNLNPYAAGIDIGSKSHFVAVPEGTDDQPVREFSSFTDDLERLAQWLTACGVTTVAMESTGIYWIPVFEILESYGREVRLVNARHVKNVPGRKSDVLDCQWLQQLHTYGLLRGAFRPADQVCALRAYVRQRSTLVRSAAAHTQRMQKALAQMNLQLHNVVSDITGVTGMRIIKAILAGERNPKVLSAMRDPRCKNTEETIARSLQGNYRQEHLFSLRQAVELYEFYQEKVSDCDQQILAQLKDFDAPDNHDPDQKPPRTVGEALQRMSGVDLATINGIDTNTALKIIAEVGVDMSRWKTAKHFASWLGLCPGAKISGGKVLSSATKQVANKAAAALRMAAFALINAKSALGAYIRRQRARLGAAKAITATAHKLARLVYSMLKNGTAFVDVGQEYYEERYRTRVVQNLKRKAQDLGFELVAIQGATPTT

SEQ ID NO: 496450 - protein, 445 aa, unidentified
MDVVFPHCAGLDVHKKRITACRVSPDPTGQNADGVMDVQDFGTLTIELLALSDWLSQVGVTHVAIESTGEYWKPVYNLLEGTFTVFVVNAAHVKNVPGRKTDKADARWLAKLMRYGLLQASFIPPQGQRDLRDLTRYRTKLVQERSREVNRVQGVLERANIKLASVATDIMGVSGRAMLEALIAGRVDATTMAELARGRMRTKIPVLQQALTGVVREHHRRLLAIQLAPIDFLDEHIATLSEEIRHVLSALCPNEPPGSPTADADAAPTAPESSPSASPMTFLRAITLLDSLPGVNQQGAELLVAEWGIDMERFGTAPRLAAWSGIAPGNNESAGIQRSGTTRKGNRALRTGLVQMAHAAPHTKGTYLSALYHRLAARRGKKRAIVAVAHSIVRSAFHMLARHEPYHELGGNDFDAHRREHLVDRLTRRIERLGYRVALEPAAAS

SEQ ID NO: 496451 - protein, 349 aa, unidentified
MGEVSTIGVDIAKSVFQIHGVDADGTVVIRKRVGRAKVVEFFADLPRCLVGMEACATAHQWARELKKFGHDTRLMPPTYVKAYVKRGKNDAADAAAICEAVTRPSMRFVPIKSVEQQSALMLHRTRDLLIRQRTQLINALRAHLAELGLVAAKGHEGLQQLVMAVTESSDERLPSNARFACQAIVAQLHAVQTQINGLDKRIIQAHRANADSKRLEAIPGFGVILSTAVVATMTDPKAFRTGREFAAWIGLVPRQNSTGGKERLGSISKQGDRYLRRLLVLGAISIVGTARTRPDKYPWVTELLGRRPAKVVAVALANKMARTAWAVLAKGETYRAPARSSSAAIVAAA

SEQ ID NO: 496452 - protein, 334 aa, unidentified
MDKVTTVGIDLAKRVFALHGVDALGRVVLRKTIRREQFVETVAKLPPCLIGMEACSGSHEWARRFQGFGHTVRLMAPVFVAPYRKSGKNDGNDAEAICEAVSRPNMRFVPVKSAEQQALLALHRVRQGFIEERTALINRLRAVLTEFGVVLPNRTQWVRRDAVTVAEPLPVLARQAIEDLRAHLTQLDERIGAYDRQLEQQARQSEAAKRLMQIRGIGPLTAVAIVATVGSARDFASGRQFAAWLGLVPRQNSSGGKSRLGHISRRGDAYLRMLLVQGARSVLNTAARHTDRLSLWALSLQARRGMHKALVGIAAKNARIAWALLSKDQTLRTV

SEQ ID NO: 496453 - protein, 387 aa, unidentified
MQRNDLNRSLVAFDQNSTLVAVVELSLQSWLVAGVVPGVKREPLKKLSADRERLLALLERWRNEAIKAGHAISRIAVAFEAGRDGFWLARWLRERGIEVYVIHASSIPMPREHRRAKTDRLDTASLKRAFLGWLRGEAHHCRMAQIPTFEAEDAKRPTREHESLVGERTRVVNRMKATLVRLGITGFNVKLRKAAEKLAALRTPEGAPIPPNTLAELCRGLARLAMINAQIAAIERARLLRLKAAPQHGTHPMILMLAKILGLGIETADMLVHEVLARGLRDHRAVGRYGGLTGSADESGSRRREQGLAKAGNGRVRRGMLQLAWRWLMHQKDSALTHWYRERSANGRGDTRKTMIVALARKLLIALWRYVTTGELPAGVVLKAKAI

SEQ ID NO: 496454 - protein, 426 aa, unidentified
MTRSRSAAASDVEKRQALIGIDWADTKHDICEHPNLTKKYQYTIIKSKPEALHEWAMSLKQRYPNQQIAVACELKKGPLIYALAKYNHLTLFTINPSTVAKYRKAFTPSGAKDDPTDAFIQVEILTLHMDKLCVIEPESAAIRSLAQLVEYRRSLVQDSVDLSNKITAALKNYYPQALEWFKEKDTFIFCDFVSKWPSLVHAKKAKKQTLLSFLNTHNSHYPDVNEARILSIKNAMPLTDDTGVIVPNQMLVEVIITQFKVLLKGIETLDKAIKLAYKAQQDNIIFDSLPGAGPQLAPRLLVAFGCNRDRYHDASELQKYAGIAPVIERSGKKMWTHWRYSCPTFLRQTFVEWAGFSVRYSFWAKAYYDQQKSKGKPHNSIIRALAFKWIRIVFICWKTKKPYDESKYLEALKRRGSPLLKYAINS

SEQ ID NO: 496455 - protein, 404 aa, unidentified
MGLDIHRDVIVACLAKGELGTDPEIEIRSFSTLIPEMRKLRDWVLEAECHYVAMESTGIYWQPIYEMLEPCFDGQISILVVNARHMKNVPGRKTDMRDAQWIATLLRAGLLKGSFIPDKTFRELRHLTRYRKSIVRDITAQKNRIDKFLQSSGFRFTAFLSDAFGASGRNIIRHLMEYGNISREALDRCLKTQTRKRIDEILIALNGSLSEHQRGFLRMIFGHLEALEQHRHTVEDAITKEITKHEEALSLLCSIPGIDVTAAAAIIAEIGTDMSAFPDSQHICSWAGLSPGNNESAGKRKSAHINKGNPYLKSMLCEVGWVISGKRSLYLSGWYWRIKQRKGAKRATIALARKLLALIYTMLKTGSPYNEECFETRRKQSERKRANRMVNELQKLGYFVVAPG

SEQ ID NO: 496456 - protein, 430 aa, unidentified
MIPETPVLIKCLLYTRRRTFMKEQNGADVSIIPQLDKACGLDMHKDKIVGFISCKDGSGQELKEFGTFTCELNDVKAWLQGHHVEHCLMESTGIYWMSLYAILTEAGIHVTVANPTHIKQVPKRKTDRKDAKWLCTLLLNGLVRPSFMPTAEQRILRDHCRSRLFYMRQQNKTQNRLLKILESNNIKLRSVISSIKTKSAMSMIRLLAAGVTDKQQLIACALGRVKLKKEGLSKALEGTLAPHHLVQLQMLLQDLDHVAKQVEMLETIIVEITQAHYSVAYECLDSITGIAGRSAQIILSEAGSDMSRFNTADHLTAWCGLAPGNHESAGKRRETSVKKGNPYLKTAIITAAWAAVRVKDSYWRALFERLRKRMRVQKVIVAIARRMLKVVYKTLDTLTHYQEKGIAHFMDLQAKAALYHRMKQQWPSTE

SEQ ID NO: 496457 - protein, 341 aa, unidentified
MTVIIGVDPHKSTHTAVAIDGDERPLARVLLVADRCQVLRLLAWADPLGTERTWAVESAEGLGKLLAQQLVEAGEQVIDVPPTLAARVRLLGSAKAGKNDPNDVLATAVAGLRHCGLRAVRVEDDTAAIRMVIDRYDDLVALRTQAACRLHVGLRELIAGGAPRRLRAERAAQLLRSVRPQGAAGVERKRLALELVADVHRLDRDIATAKRRVADAVTASGTSLLELHGVGPIVAGFILGHVGDPAWFPTPARFASYNGTAPLEASSGPRSRHRLNPRGNRKLNHALHLAAVTQVRHNTPGQAYYQRKIAEGKSKKEALRALKRRISDAVWRQLQVDIGRR

SEQ ID NO: 496458 - protein, 342 aa, unidentified
MKHYAGIDVSLECSSVCVVDASGKIVREAKVVSEPEALIAWFHSSGFDLERIGLEAGPLSQWLFAAMEAVGLAVELLETRHVRDAFKAMPVKSDRNDARGIAQLMRLGWFRPVHCKSMGAQETRSLLTARKLVQSKLRDVENSLRGILRGFGLKVGKTTELRFAGRIEQLVAGHPHPERIASALLAVHAVLRKEFMAFEKQIRKMARDDTRGRLLMSTPSVGPIVALTYASAIDDPGRFKSSKQVGAHFGLTPKKHQSGETDYTGRISKIGDGSVRTVLYEAAHIMLSKPLKGCSQLKSWAMRIARRAGMSKAKVALARRLAVIMHRMLVDGTPFNAAAAAI

SEQ ID NO: 496459 - protein, 314 aa, unidentified
MTKNAYKFYIGVDVSKAKLDVALSNNNSLLQFTNDQQGLKALLKQLPAKKRSLIVLEASGGYEKYAANYLRQKSFNVAVVNAKRVRDFAKAGGKLAKTDGIDAKVIMEFGQAFNPIPQAPATLEEDQRLQSINRRAQLVRIIAMEKQHAEHASDAHKKGIKKHIRFLEKELAVLEDSLKEQFTQDPNLQDKLTRLDGIKGVGQVTAMNILIHLPELGQLSPKEVSALAGVAPFNKDSGQMKGKREIWGGRTPVRAALYMAVLSAKKSNAALKRFYDRLVAKGKPKKVALVACMRKLIIIMNAMVRDNTAWQPMR

SEQ ID NO: 496460 - protein, 407 aa, unidentified
MIFVGVDWAEVHHDVCIMDADGQVLERKRISDSLTGLSELHALVANHLGENDEPDDVIVGIEKDRGLIVMSLLAAKYQIFAINPIAAARYRERHVTSGAKSDPGDAKVLADLVRTDRHNHRAVAGDSTLSEAIKLLSRAHQSTIWNRQRQVNSLRSAMKDYYPGALEAFGTDLSGQDAVAILAIAPTASLGRTLSRAKITSALRKVGRSRHLEERTERIYQALRQEQLRQPAVLETAYGVATETAIANIVQFNASLVKLEASLSEHFEQHPSAKVILSLPGMGTVLGARVLGEFGDDPNRYSDAKSRRNYAGTSPITRASGRSRVVLARHSRNKRLAGALDQWAFSSLLPSPGARAYYDELKARDKHHRKAIRQLANKWVGILHACIESGTPYEENIAWSRRQERAA

SEQ ID NO: 496461 - protein, 411 aa, unidentified
MEVLHKRCAGLDVHKEVIFVCVLIGLGRRCEKIKKKFGTFPHDLVQLRQWLVELGVTHALMESTGVYWMPIYDALEGAVQIVVGNAQHIMNVPGRKTDQSDAEWLAKLLRFGLVNPSFVPAREFRELRQLTRYRRATVQARASEQNRIEKHMQIAGIKLSSVASKVFTVSGADMMHQIARGNTDPKQLANLARTHLRKKIPALEKAFPSAISLHTQQLLDVQLRQMTRLDCTIAETELRIEQKTKPYEKLIAQLDAVPGIDLVTAIDLLAEIGTDMSAWKTHRQIAAMAGVCPGNYISAGKRLKNRSRQGNPYLKTALVQAACSAINVKGSYYQAKYVRLKQRRGHKRAIVAIAHTILVTVYYMLKRGEAYRELGSHLFAKEEKGRKKISLIKQLEKLGYAVTLHETQLTA

SEQ ID NO: 496462 - protein, 349 aa, unidentified
MKHYVGLDVAMKETAICIVDDQRRIVREGRAASDPEAIAAFLVATGLAFERVGIEAGPLAPWLCDGLATAGLPVICIDARHMKAAVSAMPVKTDRIDARNIACAMQVGWYRPVHLKRPEARKLRLLLSSRQMLLRTRIDLDNHIRGVLKAFGLKVGKVATGQFEARVWELIDEGDAQIRWVVGTLLTTRAAVMSQLALLHRAVLAVVKQDQVCRRLMTVPGVGAITALAFRTAVDEPERFLSSAAVGAYFGLTPSKYASGETDVTGHITKCGDKAVRVLLCEAANALLTRVSRWSWLKRWGLEVLKRRGKMRAQIAVARRLAVIMHRMWLDGTDFRWQREPDAPASAAA

SEQ ID NO: 496463 - protein, 363 aa, unidentified
MIIIGADYHPGFQQIAFVDTETGDCGEQRLQHREETEKFYRDLAAQGMKVRVGMEASGHARWFERLLAELNIELWIGDAAEIRTKRVRKRKTDREDARLLLRLVQEDRFPQIWVASWENRDLRQLLWHRHRMVQARTRLMNQLQAVALNEGLRCKKKLWREHGREQLESFRLAPWASRRREDLLKLLDQLNPTIAELTQAIEQEAENCPEARRLMTHPGVGALTALAFVLIIGRAERFQCGKQIASYLGLVPMEDSSGERRRLGHITKQGNALLRFLLVEAAQVTVRTIPQWRSKYLHLAMRRGRKIAKVAMARKLAVRLFWMMRQEWNYEQVQKFGSHVGQPENRHGVQENTELLTGASRSS

SEQ ID NO: 496464 - protein, 467 aa, unidentified
MQHSITYKSVPVKTASLHFLQHIPRRATVHVGIDIGKNKIFVVARWSPVRSKRIVYENPWFVENPDELPVLVEKLVKIKRHHTLLIGFESTGSYGDPLRQSLADAGLVVHQVRTKLTHDYAEIFDGAPSQHDGKDAAVIADLLSQGRSTLWDFPNATDEEREMSYLVTKLIDSHKELERLQGRLEGLSSRHWPGITKILPLTSLTLLKLFHHYGGPGTLRADRDAAANIRRFSCGRIDGERAERVIRCASSTCGVRQGLWEFQYVKDVATAMLDIHQGTKRYKKRLAELIGASCVELQRLSKILGVATAAVVWCRIGHPARFHCADAWVKSMGLNLVENSSGEYQSDVRISKRGDSETRRWLFLSALRWVQEPEVKPWYQRKKMQTGVRIRGEATKRTGGKAVIAVLRKLMKGIWHALVREAPFDPKILFQEESSQAKDRTAGRKNFRKRNIKSKKSRASQVTRTSQ

SEQ ID NO: 496465 - protein, 369 aa, unidentified
MAQGSTLFIGLDVHKESIAVAYGSGEREAEVVFLGTVGTRQCDIDKLVRKRQAKGKTLHFVYEAGPCGYWLYRYLTKKNLKCWVVAPSSIPKKAGDRVKTDRRDAVQLARLLRSGDLTPVYVPAVEDEAIRDLVRAREDALKDLKAAKARLKAFLLRQDIRYEGRANWGPAHLRWLAEVVCPTPAQQIVFQEYVRAVSEHTERLQRVDTELQTQVQTWRWVPVVEAIQALRGVQFTVAVTLIAELGDLSRFENPRQLMSYLGLTPSEHTSGERRRQGAITKTGNSHARRALIEGAWAYRYPAKVSRHLQLRLEKLPKVIQDISWKAQVRLCKRYRRLMARGKNANQVVVAIAREMAAFVWAIARTVKVA

SEQ ID NO: 496466 - protein, 344 aa, unidentified
MDHFAGLDVSVKDTSVCIVDDTGKIVREVKVASEPDALLAVLTNPAYHFKRIGLEAGPLSQWLFSALAEADLPVICVETRHMRAVLKAQINKTDRNDARGIAQMIRVGLYRPVHVKTLRSQKLRMLLTHRELLQSKAIAVDNDLRGTLRNFGLKVGVVGAVKFEARIRELVEGLPDLAVLVEPLLVVRRVLREQIAVLHRRLLAVVRDDEVCRRLMTAPGVGPVVALTYRATVDVPARFRKSKSVGAVFGLTCSRDQSGERDRAGAISRCGDKMMRAMLYEAAQSMMVRSTRWSWLKAWAMQVARRRGKKKAIVALARRLAVILHRIWVDGTEFRWTREAVPAA

SEQ ID NO: 496467 - protein, 370 aa, unidentified
MNQNILFIGMDVHKESIEIAIAEGGSQEVRRYGKIGGTRDAMRKALAKLTASKKTLHFCYEAGPCGYELYRYLISEDHHCFVVAPSLIPKRPGDKVKTDKRDAVQLARLFRAGELTPVYVPDREDEAIRDLSRAREDAMLVQKAARQRLKSFLLRHDIRYTGKSSWTEKHLRWLADEVRCPSAAQQVVFQEYVNAVTEAKQRLLRLNEQIEYFVKQWRLYPVVEALMSMRGVQMIVAVTVVSELGDLSRFDNPKQLMSFLGLTPSEYSSGGRTSRGRITKTGNGHVRRILIEAAWCYRYPAKVSPEIQKRQEKLPLTIRNISWKAQLRLSQRYQHMQRKGKPHNVTVVALARELAGFMWAIANEVTYPVK

SEQ ID NO: 496468 - protein, 350 aa, unidentified
MSIHTTELIKAKFAGIDFHKKTSVVALGDSTGRVLEQITLPNELSQIRKYFKQFHGLECVVESCRGYEWLVEELQEMGHTVHMGDARSIKLIAQTRCKTDKIDSRLLMELIAKDYLPTCYQPTRQERMLRELVRHRAQLVRSAVKHKLRVHAHLDKENKGIFSPFTIQGRQKLNEVKLTESRRQQVDDELEIIDFLELKIAEQDAKVKYISRSNPDVALLKTIPGFDVLMSIAFIAEVGDITRFKKAKQVAAFLGLVPRVYSSGDTRRNGRITKCGSKLMRWMLVQGAWSAIHASSNLRKMFHDIERRKGKKVAVVAVARKLATIAYHVLKEKTEYQESLLDAGLARAAF

SEQ ID NO: 496469 - protein, 315 aa, unidentified
MERSPVAPTFVGIDVAKNRLDVHLRPAGETFALGRDGFGLAALVERLVALTPALVVLEATGGFEVTVAGTLAAAGLPLVVVNPRQIRDFARATGRLAKTDRLDAEAIARFAEAVQPAPRPVPSAAAQALGELVARRRQLVEMITSEGQRRRQTRDPRLGRRLEAHVSWLQRELATLETDLDDAVRGTPAWRATEDLLASVPGIGKTSARTLIAELPELGSLDRRKIAALVGVAPINRDSGCFRGRRMVMGGRASVRTALSMPTLTAIRHNPALQAFYQRLIGRGRPAKVAITACMRKLLVVLNAILRDQTPWQSA

SEQ ID NO: 496470 - protein, 344 aa, unidentified
MDHFAGLDVSVKETSICIVDETGKIVREVKVASEPEALLAVLSNAAYHFKRIGLEAGPLSQWLFSALAEAELPVVCVETRHMQAVLKAQINKTDRNDARGIAQMMRVGLYRPVHVKTLRSQKLRMLLTHRKLLQSKAIAIENDLRGTLRNFGLKVGIVGKVKFEARIKELVENLPDLAALVEPLLIVRRVLREQIIILHRRLLAIVRDDEVCRRLMTTPGVGPVVALTYRATVDVPARFRRSKAVGAVFGLTCSKYQSGEIDRNGRISRCGDEMMRVMLYEAAQSMLRSKKWSWLKAWAMQIARRRGMKKAIVALARRLAVIMHRMWVDGTEFRWTREQAAAAA

SEQ ID NO: 496471 - protein, 401 aa, unidentified
MLAWAGLDCGLHTTSICLVGERGQVLSEGAVSSEPSAVSSYLRSSGHTIETIGMEACGSSAWLRIALGEVGLPAVAIEAYHAHGVLRSRTNKTDRNDARGIAEMMRLGIFRAVHLKGPESRHMRLLLGLRSLLLRRQLDLEKGVRSALLGYGIKLPRGRRATLARRARVLLVRADQPYLAEITADIFEVCAALKLQIRSIEKQLHELALGDPVCRRFMTVPGVGYLTAVAYRAAVDDPRRFKRSRDVAAYFGLTPRSFNSGLKFGIGRLSKHGDSTLRKLLFLAALRLRQRNMKSSWLKTWGLRVARRRGAKVAVIAVARMIAVILHRMWMDGRDFRRRRALLVGRRIESVASARTGEPVDDSDQGSPPDVACRVGGSAVARLPRDNASVPVEPCLAGGPA

SEQ ID NO: 496472 - protein, 356 aa, unidentified
MERYIGLDVHAASCTIAVISETGRRLRAIVVETNGEALVEAICMIPGRKHLVFEEGTQSAWLYEILERHVDEIVVVGVTESRGRKSDSLDAFGLAEKLRTGAVKTRVFKAPRRFSTLRELVRIHGMVGRDLVRVQARIKSIYRSRGSATPGSSVYSRRGRGDWQERLPESVRRTAARLYEQLDFLVELKARAESDLLRESKKHPILRVLEAAPGLGPIRSAQLACAVLAPHRFRTKQQFWSYCGLGIVTRSSSDWVQGRDGRWIRTQVRQTRGLSHQCNRTLKDVFKGAATTVITQRNKDPIYADYQRMLDSGIKPNLAKLTLARKIGATVLRMWKNEEAYQPEKYRRQSDTDRAA

SEQ ID NO: 496473 - protein, 403 aa, unidentified
MNNVAGIDVSKGKSMVSVLRLFGEVVTKPFSVGHTGSELKELANYLKSLDGETRVVMEHTGRYYEPVARFLHDEGVFVSAVNPKLIKDYGNNTLRKVKTDKADSRKIARYGLDNWAELRQHTPMDTIRMQLKTLNRQQSLYTKTKTMMKNNLIALLDQTYPGVNALFDSPVREDGSQKWVDFATTFWHVDCVRNMSLTAFAERYRKWCKRHGYNFSQSKAVEVHAGAQDLIAMLPRDALTKTMVRQAIDALNAISASMERLKAEMQALAAQLPEYPVVMAMHGVGDSLGPQLMAELGDVTRFTHRNAITAFAGVDPGADQSGTHEAKSTRVSKSGAPELRRALFLVMDCLLKTQPQDDPVYRFMDKKRAEGKPYLVYMTAGANKFLRIYYGRVKEYLASLEGN

SEQ ID NO: 496474 - protein, 344 aa, unidentified
MKVTTVGIDLAKNVIQVHGVDEQGKAMLKKQLKRDQVALFFANLPACLVGMEACGSAHHWARKLQSFGHTVKLMAPQFVKPYVKTNKNDVADAEAICEAVARPNMRFVPIKTAEQQSVLSLHRARQGFVKARTAQGNQIRGLLSEYGIVMPQGIGHITKRLPEILEDGQNELPGQFRTLLQRLAENLKEMDRQVRELEREIKTWHRENEASRKLEKIPGIGALTASALAASVGNASCFTGGRQMAAWLGLVPRQHSTGGKQTLLGISKRGDTYLRMLLIHGARAVVRVCERKPDADTWLKRLMGRRNKNIAAVALANKNARIAWALLRHDREYALDYTPALATE

SEQ ID NO: 496475 - protein, 456 aa, unidentified
MSKRRGKAKREQKVAKQELQNLPVLNLDAAAIDIGSEQHLVAVPPGRDTESVRSFGAFTVDLHAMAHWLKQCGVKSVVMESTGVYWIAPFQILEQYGLEVLLIDARAAKNLPGRKSDVLDCQWHQQLHTFGLLSGCFVPAAEIAPLRSYLRLRDELVKASTQGIQHMQKALFEMNVQLANVISDITGETGLAIIGAILAGERDGKKLAELKHRRIVASKETIAKSLEGNWRPELLFALQTALDRYKFYQQQISQCDEQIAQALAKLPTRQLQAQTKPEINTLQSAKEQKLSPLATQLQRIAGVDLTSIDGIGEHIAQIILSELGPDLQRSFRSEKHFSSYLGLCPGTKISGGKELKRKSRKVKHRVATALRLAARSLHSSDSALGANFRRLKARLGAPKAITAMANKLAKLVYRLLVYGKDYFDRGAQIYEQKFRLQQIRRLQKQAKMLNLKLIPA

SEQ ID NO: 496476 - protein, 396 aa, unidentified
MAMIWAGIDAGKTHHHCVAIDESGRRLLSRRVANDEPELLELLTDVLALGDEVIWGIDLADGGAALAITILFHHDQPVHYISGRAIHRAAESYRGEGKTDAKDAAVIADQTRIRRDLHPLRPGDETVTDLKILTGRRADLVADRTRTVNRLRAQLTDIFPGLEQALDLTNTGPLTLLTGYQTPASLRRTGRRRLETWLRNRKVLRADRLAETALEAAGRQRTSLPGEKLTAQMVHTLAREVMALNQQVAELDKAIEARFRDHRDFEVITSMPGLGVILGAEFLAATGGDMSAFGTADRLAGFGGVAPVPRDSGKISGNLRRPRRYNRRLQRVFYISALLSIRHCEDSRRFYERKRAEGKRHIQAVLALARRRVNVLWALLRDGRTYEPVPPTALAA

SEQ ID NO: 496477 - protein, 403 aa, unidentified
MSICFAGLDWASRTHAVCVIDERGSVLTQFEINHDASGLADLHRRLRGAGVTAVAIERPSGLIVDALLEAGLSVVPIHPNVVKASRPRYRSHGGKSDASDAYLLADLLRTDGHRFKPLAPQSDDIRSLRALVRGRDDLVATRVQLANQLRSLLHSFWPGATEVFADVDSPIGLAFIRRYPTPASAQRLGPKRMAAFCTKNAYSGRRSPEELLDRLHQAPAAALGKLEMAAKGELALSLARTLDRLGDQIRLLTRRIENHVSSIDDGRILMSFPRAGRICAAQILAELGSVRERFDSDEHLAAEAGVAPVTYASGKSKAVTFRWACNHRLRAALTCLADNSRHANAWAASVYAKAKARGCDHPHAIRILSRAWLRVIWRAWTDRKPYDPALHGSAKLLLKTQGG

SEQ ID NO: 496478 - protein, 429 aa, unidentified
MNYTQNEKIEQVTDSTMVVGVDIGSQIHYARAFDNRGRELTKRIFSFHNDLEGFNSFNLWAETLKTENKKTAVLIGCEPTGHYWFAFAKYVNDHQKRLVMVNPFSVKKIKELDDNSPKKTDSKDPKIIAKLVVDGRYSIPYMPEGIYAEIRDLVYSRDRIMKQHNISANRIQRWLAIYFPEYLGLYTRFDAISGLAVLEKAPLPKDVIALGVNGIRKIWHDKKMRGRGVTEDRAKTLVEAAHNSVGLDGGIGTKSELYMLLEEHRLWTSQLEAVNKVLEEMILKVPHVEKLLAIKGVGSITIAGFIAEVGDIRRFDSPKQIQKYAGLELLENSSGKHKGRTRISKRGRRKLRKILYQVMVPLLARNKEFRGIYDYYVTRVKNPLKRRQAMVAVSCKLIRVFYAVLTKGVEYDRFKMMSDIHRKSDIIAA

SEQ ID NO: 496479 - protein, 315 aa, unidentified
MSENKVEVFVGIDVCKSTLEVRIEPPEESFQVANDDVGIRGLCTRLSELAPTLIVMEATGGLEMRAASELAARGLCLAVVNPRQVRDFAKASGQLAKTDRIDTHVLCGFGRAIRPAARPMKEALTQELDDLVSRRRQLVDMRVQETLRLQGASKVQAKSVKAHLVWLDKRIQSIESDLGTRLRSSDAWRVKDDLLLSIPGVGEITSRSVLSRCPEIGRLNRRQIAKLVGIAPLNNDSGKYRGQRHIWGGRADVRSILYMATVSAIRCNRVIKAFAERLKRAGKAPKVVIVACMRKLLTIMNAMIKSNTPWTPKIA

SEQ ID NO: 496480 - protein, 403 aa, unidentified
MNSVGIDISKGRSTVAVMRPFGEVVISPFEVRHTDSELSELARQLKSLDGETRVVMEATGNYHTPVAKLLHDAGLYVSVVNAKLVHGYGNNDLRRVKTDKKDSVKLANYGLDRWLALTRYVPEEDTRLLLKNCYRQYRQYSKVQTVLKNNLISLLDTVFPNANRLFSSPIRGDGSEKWVDFVAEFWHCRCASEKSERAFTSKYLRWCRKHGYNFREAKAHTIYAEASGHIGVMPKSETTKLLVKQAVSQLRATSTALAALKQEMQSLASVLPEYPVVMDLFGVGPTLGPQLIAEIGDVRRFYSKKALVAYAGLDAPPNDSGDVTGRHKSMSKIGASSLRRTLFLVMSVYLQTAPLDEPVYQFMDRKRAEGKPYRVYMMASANKFLRIYYATVKAYLESLEHTA

SEQ ID NO: 496481 - protein, 318 aa, unidentified
MYAGLDLSRKRLDFHLLDGEGATLEVGAAPPDGDGLDGLTERLARYGAPIRAAIESMNGARFVHDRLELAGWQVEIADAQKVKGLAPLACKTDRIDAWVLAELARRDLVPAIWLPDPLVRAERERARWRLHLVRHRSSLKQRVHAVLLTHGKPCPVSDLFGVRGRRLLAQLGLPEPWQGTIDASLRLIDELDREIGESERELRRLGADHHYVPLLCTVPGIGWVLAYTIAAELGDINRFPTPRKLVGYSGLCPRVYQSGERDLRGPLAKQGPRYLRCKQRGAKVAQVDLARRLAEAIWHMLTRGQPFAPKGATDPLAA

SEQ ID NO: 496482 - protein, 343 aa, unidentified
MSVFAALDVSQELTAICVVGQDGAILAEAKVATCPDAIAGWLAERSFDLERVGMETGPLAVWLWNGLTERKVPIVCIDACHANGVLKMMPNKTDKHDARGLAQIIRTGWFNAVQIKSHNAYVNRAMLTARDALVGMRVRLENEIRGLLKTFGVMFGKRVGGFQRRAEEIIEKELAVAPELVPIFEALMQGRRDILARIAALDRQIQAAAKKNKTVQLLMTAPGVGVITAMAVVAAFDDAARFRRSSSVGAYLGLTPRRYESGEVSRNGRVSKRGDRFTRKCLYEAANAIFSRSLGGSCLREWAKSIAQRTGPRKAKVALARKLAVTLHAMWRTNTPFREEAMA

SEQ ID NO: 496483 - protein, 414 aa, unidentified
MFYIGIDIAKDFSVCSVIDDKEEMIIKPFPFNSSTAGFKKLINNIISLNCDTKDIVIGMEATGLLFENLYRYLKDLNYNVILLNPYQTSQYRNMLTMKYVKNDNIDSLIIALLIKSGRYSKGYVNEEQLQSLKVLFRHKENIKEKLKSLKRETSSLLAVVFPELDKVIKDPFNVSGLILLEKYPTAKHFEYVSVDRILKLFRKTKSNNFNQAKAEHLLSIAKDTIYSGVAKDARAFFIRSNIKLIRALQEEIKSLEEEMIKIFDKQIESIQETKEDENYISSVLDNLRTIPGVSDKTLLALLAECGNLDRFKDAKSLIGYLGLYPTQEQSGNTLKYGHLAKRGARYAKKALYLASVAAIRHNSELKQIFRNQVASGRAKKEALIIVARKLAYIIWAIYKHNQAYNPTRVFVAHP

SEQ ID NO: 496484 - protein, 316 aa, unidentified
MSLKDRIAVGIDISKTKLDVFHGGLAQHREFDHSPAGIAELVAWLLDSGAVDLLVLEASGGYEMDVWQALCDANLPTARINPKRARDFARALGMLAKTDKIDAHVLALFGATLSIEPNQPKERALQEMEAWLTRRQQLIEMRVSEQNRKRQAPKAVQKRIDLHLRQLQREIDRIDDYLAKQIQQHPVWNEKLALLDGLKGVGPNTRAWLIAALPELGQLNRRQIAALVGLAPMAHESGGYKGRRRIYGGRSAIRTALFLATLSAVRHDHRIKEFYQRLVQAGKPKKVALVAAMRKLLTIINAVFRSGKPYRVLQAD

SEQ ID NO: 496485 - protein, 420 aa, unidentified
MPTEFAALVAIDWADQKHVWALQRVGSSERETGTLDHTPEAVEVWASELRLRFGGQPVAVALEQCRGPLVFTLTKYDHLVIFPVHPTTLANYRKSFRPSGAKDDPSDARLLLDILTLHRDQLRRLNPDTPETRTLQFLVEERRKLVQEKTRYSNRITARLKMYFPQVLHWFDVGSTMAADFLERWPSLEQLQRARPATIERFFVDHNSRDRERMAQRLEQTRKAVPMTLDAAVLTACRTAIVAWAALLKQVLTAIALYDEKIDELARVHPDYALMNSFPGAGSALAPRLIAAMGSQRERYRTAQEIQCYSGIAPVVASSGQQRWVHWRWACPKFLRQTFHEWALHSIPYCPWAREYYEQQRAKGKRHNTVIRALAFKWIRILFRCWKDGVAYDENKYLATLARRGSPLAAVNVSIVRKTV

SEQ ID NO: 496486 - protein, 311 aa, unidentified
MSSKTYIGIDVSKDQLEVFLTSTSEYQNVANTESGISALISLLQSANPELIVLEATGGLEKPAAEALTVAGFPVAVVNPRQVRDFAKAKGILAKSDRIDARVIAYFGEAIRPEPRPPKTPEVQELEALVTRRRQLVNMITEEKNRLDSSPKRTRLQIQEHLRYLEKALKNINREINKSIKKHPQFEAKNRIIRSVPGAGPVLAVTLLSDLPELGSIDRKALGALVGVAPLNRDSGRFRGRRSVWGGRARIRAVLYMATLAATRWNPVIRAFYNRLLNVGKEHKVALTACMHKLIGILNAMIKNQTTWQGNS

SEQ ID NO: 496487 - protein, 354 aa, unidentified
MPEKLAKPMTAVIGIDIGKNSFHVVGLDQRGAIVLRQKWSRSQVQVRLANMPPCLIGMEACVGAHHLSRQLQALGHDARLMPAKYVRPYSKGQKNDFRDAEAIAEAVQRPTMKYVATKTVEQLDLQALHRVRERLVSQRTGIINQIRAFLLERGIAVRQGLRFLRAELPGILASRSDLLSTRMAYMIEGLAGDWRLLDERIDRISDEIHTLARQDAGCDRLMSVPGIGPIISSAMVAAIGKGDAFSKGRDFAAWLGLVPRQISTGDRTVLGKISKRGNRYLRVLFVQAAWVVLVKPTTWERHGLKSWIEAARKRLHRNVLAIALANKLARIAWSVLARDRDFEPQSALTAVQPV

SEQ ID NO: 496488 - protein, 423 aa, unidentified
MRVMYERCAGIDVHKRTVVVTVVLTGMEGHAQKQTRTFGTMTADLLALAEWLEEERVTHVALESTGVYWWPVYNLLEEGCSILLVNPQHMKTVPGRKTDVKDSEWLADLLRHGLLQASFIPPAPIRALRELTRYRKTLIRERVQQANRLQKVLESANIKLAAVASDVLGMSAREMLEALLAGEEDVAAIADLARRQLRRKIPELKQALEGRLLPQHRFLLRSILAHVDFLDAAIVRVQAEMEQHLVPYQEALRLVQTIPGVNETAAAAILAEIGTDMSRFPSAGHLASWAGVCPGNKQSGGKRLKEATTKGSPWLRAILGEVVFAIAHTRDNYLVTQYRRLAKRRGTYRALVAVAHTLLVVIYHMLRDRRPYADLGADYFDRLDAVRLERHHVRRLEQLGYTVTLTPADVAGGTLAPAPAQAP

SEQ ID NO: 496489 - protein, 391 aa, unidentified
MVYLGIDVAKDKHDCYIVNSDGEILADVFTIPNDQIGFKLLFQTLQSVAPDLSKVKVGLEATGHYSYNILGVLLDKALATLGINPLHTNLFRKSTSLRLTKTDKVDARTIAAMLASNVVLTSYTAISYHNEELKSLTRYRFDKVQERAKLKSSVARLVNILFPELEKLVPTLHLNSVYTLLSEFPGAKQIASCHLTRLVHLLSESSKGRYKRDKAVQIREAAKASIGSVMPAKSLELKHTIHLIEILSEEIDEIEISIREIMDRNPDPILTIPGINYRMGAMILAEIGDFSRFDSPNKILAYAGLSPSTYQSGKLVNAYPHMEKRGSKYLRYALYNATKYVCIWDPTFAAYLAKKRAEGKHYNVAISHAAKKLVCVICALQKSGKPYCPAT

SEQ ID NO: 496490 - protein, 338 aa, unidentified
MKAVARIGLDIAKNTFQVHGVNAHGAVVMRKQLSRGEVLRFFANVPACVVGIEACAGSHYWARELKGLGHDARLMAGQFVAPYRKSGKNDANDAEAICEAVGRPNMRFVPIKNEEAQAVLTVHRARQLLVSERTALANQIRGLLGEFGIVMAAGLAPLRRRLAQIGAGQQTLPVLARETVGELHDRLRLFDACISQYDRKIEVIARGSEPARRLMRVEGIGPVTSTALVASIGDARAFTNGRQFAAWLGLTPSQHSSGGKSRLGHISKRGNVDLRTLLIHGARSVLQFTSKKTDRKSVWVEALKARSGTNVAAVALAAKQARIIWALLARGTEYQPAT

SEQ ID NO: 496491 - protein, 400 aa, unidentified
MRVVFGIDVSKASSEVAILVNGEKVHGYTIPNDAIGFNRLLGDLKTVHQPEIVFEATGVYSRRLQAFFEDNSYTYTRLNPLESKKQLDSLRVRKTDKIDAEKLAMSQFILNRKPSYVQEALYQELRDLSRFYQNLTEDIVCAKNRLHKVLQITFPELENILSAPTGEQYWNLVITFPCNSFVLESDDATLTAIIRQSTAKRISEKRVTYLVDKLTKLANQSYCAVKKTSPVIEEVKYYAGELLRLSEYRQGVLEEMVTLAQPLPEYEILLSIPGITETTATSIIGELGDIRRFHSANQINAFIGIDLRHYESGDFLAKEHITKRGNPYAIKVLFKCIHNIASAGYTNPCHIADFYEKRKRQSQVTSTKPHTIASIHRLIRTMYYLITHNKLYDYTSIQNR

SEQ ID NO: 496492 - protein, 428 aa, unidentified
MTHSEIKSTEFAAYIGIDWADQKHDICLREAGSKRIESLQIDHKPDSISNWVSELRQRFQGRSIAIALEQKRGALLYSLMLYEFIILYPVNPHALASYREAFKTSGAKDDPVDADLLREMVYLHHDKLHPWTPDDPLTRELSLLVEYRRRLVDDKTRLTNRLQALLKQYFPQALDWAGELDTLRALEFLTRWPQLVAIQVATPEHVRDFYRQHYRLGEKLPERLAEISAAQPLTRDKAVIDASITMVKGLLEPLRGLIAAIEAFDQRIETCFEQHSDKDIFNSLPGAGAILAPRLLAAFGADRARYQSAMEIQCFSGIAPVTERSGKTKFVRRRLACPKFVRQSFHEFAKSSINWSAWARAYYDQQRRRGNKHHEAVRSLAYKWTRIIYRCWQDHKPYDESVYIAKLELRGSPLAKLIPTAAEQAVSS

SEQ ID NO: 496493 - protein, 320 aa, unidentified
MTLTLGIDVAKAKLDVALRWPDGRIHSKVVANTDAGFAELQAWLARQDGAGAHVCLEATGTYWEAVAEALTEAGYPVSVVNPARIKAYGTARPVRTKTDAVDARLIADFCASQCPSRWTPPPPAQRELHALVARRDALVVMRTQEQNRLPVAHANVRPGIEALIAHLDAVIAEVEAAIRQRIDDDPDLKTQHRLLDSIPGLGDQTIPVLLSFYGGPPRFDDARQAAAFAGLDPRQHESGSSVRGKPRLSKVGHARLRKALYMPAVVTLHKTTGGRAFRDRLAAAGKVPMVIIGAMMRKLVHVAFGVLKSGQPFNPALHGA

SEQ ID NO: 496494 - protein, 367 aa, unidentified
MSIVYVGMDVHKNSFTLCGLYRNGETTRFLKNKQTSPSVDAVVRYVNEARKEFGKDVKVLCCYEAGCLGYYLERELQIRNIPCVIVATDTSMNKGKKNDRRDAHSLAHNLDSAEYKSVHIPTPEDEAVREYIRMRDSYKAEIKRTKNEILALCLRHGFKYDGNSNWTMRHIAWMKKIDWQQPILAETFKEYLARYDWLKMRINDQDAMIESLAQKDEYREAVKKLCCFMGIKTHTALSLLVEIGDFRRFATAYVFCVYLGLTPSEDSSGSKGHYGPITKKGNSHIRRLLVEAAECFGRSRKGFKSAALKQRQAGMPEDIIRYADRANERFKAKFYRINMRSHWNVAVVAVAREMACFIWGMMTDRIA

SEQ ID NO: 496495 - protein, 384 aa, unidentified
MKNDNILFIGLDTHKEQTQVAYTLDHRTSEINDLGRIQTTKTGFVKLARQLQSKYPHATLHFVYEAGPCGYWIYRLLTSLGHCCFLVAPSLIPKKPGDRVKTDKRDAQNLARLLKNNDLNPIYVPEPEDEAVRDLSRAREVGMHDLNDAKHQLKSMFLRNNIRYNGSDSWSLKHLRWLTEIVLPHPCQQIVLQEMIQTISERMARLKRLDNELTHQVKQWRYYPVVKAIQAMRGVRLLIATGLITELGDLSRFDTPRKLMKYVGLTPSEHSSGDKRKLGGITKCGNGRARRLLVEGAHSYRHAAKVSKEMQVRQEGLPKEIIDKAWEAQLRLCRRYQRLMQRGKPRNVVITAIAREMIAFIWSISREVVLPRVDPKTRLSRVPA

SEQ ID NO: 496496 - protein, 379 aa, unidentified
MQTIIKQCVGIDISKGSFTACVCRKLLSGEALLSSVESFENNKTGYNQFVKWNRKITIPSVEVLYLMEATGIYYEGIAYHLHKLKQSLCVILPNKVKHYAKSLNIKTKTDMVDARIIAQMGAERNLPLWQPPLPVLKQLRDLTRLYTDLKNERTVYLNRLDSEKASAIALPFVIKSNLLILKELEKQIKQCEKEIEKTIMSEEWLAEKVNKLITINGVGLITLAIVIAETQGFALVSSRKQLASYAGYDVVQVESGTSVKGKTHISKKGNSRIRAALHFPALTASRYNQELKEDYQRINIAKPSKMVGATALQRKLLLLIYTLWKNNDVFRTSGDQQTKLLLRRNKVPKKVGNPKELPTQDELPDDLSTKVLLRQLQRS

SEQ ID NO: 496497 - protein, 417 aa, unidentified
MEYAPSTLTAVPVNRLACGIDWARDDHAVAIVDGGGRQVHRSIVEHSSAGLRALVTVLARAGVAEVAIERPDGPVVDALLGAGITVVVISPNQLKNLRGRYGSAGNKDDRFDAFVLADTLRTDRARLRPLAPDSESTVALRALCRARKDLVAHRVRVANQLREHLNRVFPGAVGLFTKLDSPISLRFLSRFDCQDRADWLTPRRLQAWLASAGYCGRTDPAVVFGRLGAAPRGLPSAAGAAQIPITQALVATLDNLVKQIAMLSEQIGQQLNAHTDAHIFTNLPHVGTVRAARLLAEIGDCRGRFPTPEALACLAGVAPSTRQSGRMRSVGFRWACDKQLRDAVCDFADGSRRGNPWAADLYSRARARGHDHPHAVRILARAWVYVIWTCWQNNTAYNPAQHRALQTVLHQDQPPGA

SEQ ID NO: 496498 - protein, 340 aa, unidentified
MSILQYPEQLPGTFYDPASTRPGEEDMEHITIGIDVSKATLDVAVLPTIRELTVTNDEPGCRELIVVLKPLKPQLIVLEATGGLENLAVGMLAAEGFPVVVVNPRQVRDFAKATGKLAKTDRIDAKIIARFGEAVKPEIRPFKDEQSQVLTALITRRRQIVDMLTAEKNRLGISHKSVHKDIKETIAWLEKRLKEIDDDLTKAIKENPVWKEKEQILSSCKGIGRVIATTLLCSLPELGNLNRREISALVGVCPFNRDSGKMRGKRTIFGGRATVRAMLYMAILSAKKYNPAIKSFYDRLIKAGKLPKVAITACMRKLLTILNSMLKHKEMWNPNLLQIA

SEQ ID NO: 496499 - protein, 373 aa, unidentified
MVNSSILYLGLDVHKETTDVAYSSTGDGSIHFHGTIPTNVRSVNKLIKKFGCKASDLVVVYEAGPCGYWLQRHIVKYGVQCWVVAPALIPKAPGDKVKIDCRDAMTLARLAQAGLIESIHIPDADDEAIRDLIRCREDAMIDLRQARQRLKSFLLRNGHPCSGRTNWSDAYKRHLADIHFLEPAKKLTFQHYIAITEERYQRLQHLERELKEVANKWRWYPLVQFLCALRGIRFLSAIAIVAELGDMHRFTYPRALMSFVGLTPSEHSSGQRQRQGGITKCGNTHARRILIEAAWSYRFSPKVSRELQIRQQDLSINLQKRSWEAQQRLCRRFRQLQARGKEFNKIVPAIARELLGYIWDIVQRFNPESEHVG

SEQ ID NO: 496500 - protein, 421 aa, unidentified
MRAVALDVHRDFCEVAIVAEGRLRSAGRIATRPDALELFAQSLDPRDLVALEVTGNAWAIARILEPHVARVIVVSPSDTGIRQARAKTDRLDARALAKLLWAGQLDGVWSPDERIRAMRRRLARRSQLVRARSRAKNEVHAVLMRCLKDRPPASDLFGVKGRAWLAEQQLALTERETVDSAVRQVEFLDSEIAQVERLIAAEALSWPEVKRLMSVPGVNVIVAATFMAAVGDIRRFSDRRKLTGYLGLDPRVRQSGAGPANHGHISKQGSSSARHALVEACWSTVRQPGPIAGFYQRVRARRGHSIAIVASARKLACLFWCLLTRGEDYAFAQPSLTTKKMRRLELTAGAPRRQGGQGVWATNDAMRHAERELALQAQRAYERTVKDWQQKKGASATPGRASSGSSKEQVARQTPRPKSAL

SEQ ID NO: 496501 - protein, 414 aa, unidentified
MLKIVYRVCCGMDVHKSFVVACIASTTEYGVTTYKSKRFSTFTGDLRRCAAWLAENSCKDVCMESTGKYWIPIYNILEPTCNIVLAHPKYVKAIRGKKTDKRDAKWIADIFKHDLVAGSFIPPADIRQLRDLVRYRWKLTNFTTGEKNRAQNCLTVSNIKLDDVFSDVFGKTASAITTRILENPAEKITDVSGFRTKGMKATNEQVLAAVDGEMCEEQAEKLRIIRSHMDSLQLCKLDLESLILATAEKYLPQLNLVMTAPGIQSFAAIGIISEIGVDMSVFPTSKHLCSWAGLTPQNNESAGKKKTTRISRAGAYIKPLLVQCALCAIRAKQFPEVRNRYLALKKRRGHKKAIIAIARILLTAIYNMLKKNEPYNPELYRKGDRPPTHREVSVGEAIFILQRQGYLVTAPPTP

SEQ ID NO: 496502 - protein, 332 aa, unidentified
MSIVSTVGIDLAKNVFSMHGVSARGSVVVRRAVSRAKLTELVAQLPPCLIGMEACSGAHEWARRFSAFGHTVRLMAPKFVMPYRKSGKNDGNDAEAICEAVGRPNMRFVPIKSVEQQSDLSLHRVRQGFIDERTATLNRLRGLLAEFGHVLPLRAVEVRRRLPELLDKLPVRIAVCLRDLLEHATRLEAKALEYEREIKVHVRGNALARRAQTRSGIGPITASALAATVGNGHDFKNGRQFCAWLGLVPRQYSTGGKTRLGHITKRGDSYLRMLLVMGARSVLQSAARLNDPFSRWALAVQQRRGYHRACIAIAAKNARVAWALLAKDPVAA

SEQ ID NO: 496503 - protein, 408 aa, unidentified
MRRYYLGVDWADEFHQVWVSAAEGKKVAEMTIEQSMKGLSEFGRWLHERKAEDIELWAAIEKPQGRIVDFLLDHAVVVYPVNPKALDRARDRFRMSQSKSDSFDAYVLAEFLRTDHVHLRALQPDSEQAQELKMLTRDHHRLGRHKTRLLNQIEVTLKEYYPRPLEVFSDLESRTALDFLEQYPTPRALSELTRRKWNRFAKREHHLGEQRCQELWEKLSQPQLKIPEHVVRTKAQLLLVLVIQLRSLAEAVKNYSDRVERFFASMPAAEFVKTLPGGKSGTTVPMLWAELGDAKSRWQSFRHLQAEAGGVPVTKASGKSRVVQFRFAGNKLLRYASYWLSFNSLNRCEWANKYYRDQRRKGHSHPQALRALGAKWLKIIFVMWRDHQPYDENLHLANIARQQMRQAA

SEQ ID NO: 496504 - protein, 457 aa, unidentified
MDAIYPCVAGLDVHKQTVVACVRRWDGRGRVSKQVKTFGTMTRDLLELGDWLSRQGVTHVAMESTGVYWKPVFHLLEGRFTEILLVNAQHIKNVPGRKTDVKDCEWIAQLLQCGLLRGSFVPPVAIRQLRDLTRQRSQLVADRARVANRIQKVLEDANIKLASVATDILGVSGRAMLEAMIRGEGDPELLADMAKRRLRAKLPQLRQALLGKVTNHHRFLLRTLLEQVDSLERLIASYCEHIEEEMAPFASARDRLQTIPGVDQRTAECMVAELGINMDQFPSEGHLASWAGLCSGMNESAGKNRSSRTRKGSRWLRQTMVQAAWAASHSKTTYLGAQYRRLTFRRGRKRALVALAHTILGIVYHVLKKGTVFIDLAGRRGCSPLPDCRNCLVSNTRCVNSKRECERLFACFRRTSGSSGTGLRYLQFRDLSCNANNASFPRKTRTPRINLSGSSVN

SEQ ID NO: 496505 - protein, 403 aa, unidentified
MVAVMIGVDPHKGSHTAVAISPAEEPLGELRVRACAGQAERLLAWAAAWPQRTWAIEGASGLGHLLAQQLLAAGEQVVDIQPKLGARVRLLATGAVNKNDPNDARSVAVAALRSPARRQVQPEDHAAVLKVWAKRHRDLGRARTQVVCRLHAVLCELVPGGVSKRISAPQAGRLLEGIRPAGAVGAARCELAAEFLADLRRIDAQMRDAKKKLTIAVRASGTTLTSVFGVGPIFAATVIGDVRHVSRFADRDHFAAYNGTAPIEVSSGRRKIYRLSRRGNRRLNHVIHMAAVTQVSHRHSDGRAYYERKLAEGKTPKEALRSLKRRVSDAVFAQLQADARRAAAGPALREPGRATGERLHRPRGRLTPPGTGSSAKPLPGPATTLRPQPSCRSGRNEKLRRTT

SEQ ID NO: 496506 - protein, 348 aa, unidentified
MTMVGGFDVHRKQITFDYVDDDGLVRWGQIRPATRKTLRAWLGEHCPDGDAEFALEGCTGWRYVSEEVASAGVGVHLGDPAEIAGLRGPKKRAKTDRADARLLRTLLLEGRFPESWIPQAHVLEVRTLGRLYCTLMDERRAWQQRIHAQLFHQGCPPITALLSAAGREALARAELSATGRQYADTALRRIDELSTEIGPLRTQLVNFGRRQVGCQALQAHYGIGWLCAAIIWAEIGDARRFTSSDQLVRFAGLDVTVYSSDGKRSPGHLSRQGSPELRWAAFEAAKCAARRSSPDYAYYHQLAAKRDGHNGKNPTLAVERKILRRCYHRLRELGDAALALPIPGEVAA

SEQ ID NO: 496507 - protein, 312 aa, unidentified
MNDQPTPVYAGLDIAKASLQLHLQSKCFDLPNTPAGHAQLRKRLAAIPGIHVICEATGGYERAVVAVLHAAALSVSVINPARVRQFARASGELAKTDPIDAAKLTAFGQAFAPAPTPARTATGLKMAALVLRRGQLLELRVAEAQRADTCADADLRKLFTPWLAQMEKQIAKVEALIEGLLKAQASLADQVQRLDDIMGVGRLTAIMVLATLPELGTLNRRQAAALAGLCPYNRDSGQWAGKRCISGGRAEVRRALYMAALSASRSNHLLKPFYGRLIAAGKPPKVALTAVMRKLIVLMNHLLKNPNFSLAH

SEQ ID NO: 496508 - protein, 387 aa, unidentified
MLFVGIDIAKNKHDMAVIYSDGKVILKHLTFKNNTQGFDHLHSKIMELVHNHETDVYIAFEDTGHYGLNLQTFLRKYYINIYSYNPLLIKKFADAQSLRKTKTDKKDALLIARKLLSDFAELDKPVITDTLMIELKFATRNRSRLTQIRSDAKVQYTNNLDILFPELTSVIAKHNQSTYTLLKKFPTAKAIANARPSSLTKIKRLNLEKALKLKETAKISIGTHSDTLVLSLLQNIETIEYFDKLILASDEHISDLMAQIDSPIISVTGIGTRLGAVILAEIRNINNFSSPAQLQAFAGLEPSVKQSGDSDKTGKMVKRGSPHLRWAIIQAAKLAANYSPKLNEYLQKKLAEGKHYNCAISHVAKKLIRIIFYLLKNKQQFDEYLIG

SEQ ID NO: 496509 - protein, 384 aa, unidentified
MNKDTIVFIGMDTHKEFTEIAYSGYAREDAIEHFGRIKTTKPAFIKFAKQMQSKYPKATLHFVYEAGPCGYWVYRLLTSLGHCCYVVAPSLIPKKPGDKIKTDKRDAINLTRLLKNADLNPIYVPEPEDEAIRDLSRARERAMNDLCDAKFQLKALLLRNHVNYDGKANWSLKHLRWLTEMVLPHPAQQIVLQEMIQTVTERMARLERLDNELVHQVKQWRYYPVVKAIQAMRGVRLLVAVGVIAELGDLTRFDHPRKLMSYVGLVPGEHSSGGRRKVGSITKCGNGRARRLLTEGAHCYRYPANISTELQSRQEGLSKEIIDIAWKAQLRLCKRYQRLMKRGKHYNVVITAVAREMIAYIWAISREVVITKVNPKERLSRVPA

SEQ ID NO: 496510 - protein, 320 aa, unidentified
MSATTERTTYVGIDLSKATLDVAILPTGECFVASNDEAGIEELLGKLAEVPEALVVLEATAGFERPVAAALAASGVALFVVNPRQARDFAKATGQLAKTDALDAFVLARFAEAIRPTPRAIPDAEAREFGEILARRRQIVRMLTAEKNRLGASTSKAVRGRIQAHIRWLEKELARTDRDLDEIIENSPTFKANEALLRSVPGVGPVLCRTLLAELPELGSLSPRELSALVGVAPLNRDSGTLRGRRTVWGGRARVREALYMGALIASRFNPAIREFYERLVAAGKPKKVALVACMRKLLVILNAVMRERTPWRCPHALNS

SEQ ID NO: 496511 - protein, 364 aa, unidentified
MKIVGCDLHARQQSIAMVDTETGELTEKLLKHEGNAVRDFYASLEGPVVVGIEATGAMQWFLELLEELGIECRVGHPAKIRAAETRKQKHDRRDAEVILDLLLMKDRFPDIWMPSTEQRDLRTLLRDRQQWVKMRTRLQHTLQAIALNHALREGRGLWTATGRRALQGLALPPYTHQRRDELLGLYTQLDKRIQQLDKQVETEARQRPRARRLLTHPGVGPVTALATEVFLGDPNRFATANQVASYIGMIPCEHSSGKRQRLGKLTKEGNSLLRYLWIEATLHAVVKDAELKRFYRRKLIQKGMGKARVAAARKLGIRLWIMLRDEIDYEEFCRRGKLRQKGEAHAGMPDYNSGPARAVTGSTE

SEQ ID NO: 496512 - protein, 308 aa, unidentified
MIYVGIDVAKTTHYAAVADSDGVVFVEPFAFDNDAPGFAKFISKIASFPKEQLIIGLESTGIYSENLICFLFDSGYKLAVINPIQTATLRKTNIRKTKTDKVDTLLIIKSLMVNSYRLYTEQDARSLKLKSLCRFRQNLKKSKARLKIQLSGYVNLPFTELLSFFKSGIHISTCYTLLKRCSSPAEIAALRLDSLTMILGEIGNIDRFASPAKLLAYAGLGPTVCQSGKFKACPTKKSKRGSKILRFALIYSAWRLTLKNDTFFNYYQLKLSQGLSRYGALGPVAHKLVRVIFTLLKHNVLFDSTRLV

SEQ ID NO: 496513 - protein, 328 aa, unidentified
MVRFTRQGSTKVTNNNTETAGIDTAKDKLDIAVHGREQRWQVPNVAAGWRQLAADLGKAGVTKVGIEATGGYERGVVTHLRTKGFVVLVLQPIQVKNFARLHLRRAKNDALDAVLVAACAAVLDPPSVDADPRLTELADHLTFVEQIEEDMVRLKTRLEHIDEPRRRRLVLNDIDRLKARRATELLRIAGQLRDHPDLARRLDLVLSVPGIGERTALALIIRMPELGQISREKAAALAGLAPFDDDSGKHRGQRHIAGGRSRLRRSLFAAALPASFRWNKALCALYERLKARGKAHNEALIACARKLLIYANTVVERGTPWVEKQAAL

SEQ ID NO: 496514 - protein, 484 aa, unidentified
MKTKKHSQSSRGPKASRQHKSKKQSLKVIHPNAAGIDIGATEHYVAVPPDAVPAGASNVKTFGCFTEDIDAMVEWLKACGVDTVAMQSTGVYWIVPFQKLEAAGIAPVLVNAQMLKLVPGRKSDVQESQWIQQLHAYGLLAASFRPNDATCRLRTLVRHRANLVSGGAEHILHMQKALTQMNIQLHQVVSHLTGETGLRILRAILSGERDPYKLVKLRDAQITRSTEAQMIKALRGDWRPELLFVLAQSLQAWEFYQEQMKACDLQIEEHLKQMPSAPPAAAKAAPAAADPLASSNLRPKAKQSRKRNDPEKDLGPELARICGTDLTAAHGLRLLTVLTIISETGVDMNKWRSAKAFASWLGLNPNNKVSGGRILSSRTRKVVNRVSTALRMGAVGVAETQTWLGSFHRRMRAKLGPASANTATARKIATVVYHLLKYKEPFVDRDLAAYEARVYRHKLARIKKQAKTLGYELVKTSEQQQLAE

SEQ ID NO: 496515 - protein, 387 aa, unidentified
MSVPFDARKPATAFDHTTTLVSVLELSEKSWQMGASVPGVCRRPLRKIDVRDIDAVLKAVQQWKSEASKAGHSVSRVVLGYEAGRDGFWLARALREHGIEVYVIHPASIAVERRGRRAKTDRIDVDMLLGTLLGWLRGEPRRCTMAPIPTEAEEDMREPGREREALVTARLKTENQIGSQLIRFGIADFRPRLKKAAQKLEELRTFDGRPLPPKSMEKLRRLMAQHRLLSEQMKEIEEARQQVVMVRHPNHLEKMIQMLVRIVGLGVETATLLVHEVFSRKFRDRKALAAFVGLTGTPFNSGGSAREQGISKNGNPRVRRMVTQLMWRWLKFQPGSALARWFEARTGGAKGRIRKIMAIALARKLLVALWRYVEDGVIPEGARLAAT

SEQ ID NO: 496516 - protein, 341 aa, unidentified
MQITTIGLDLAKNVFQVHGIDAAENVLVRKQLRRRQMLEFFKALPPCLIGMEACATSHYWARELTKLGHEVRLMPAKDVKAYIKRNKNDAADAEAICEAVRRPTMRFVQIKSAEQQGQLMQHRARDLLMRQRTQVINAMRAHLAELGIPARQGREGLKELVAIVADDDDTRVPVNARASLMVLAAQLQALQTLIGSIEKRIIKQHRVNEASQRLESIPGIGVIGATAIAATVADPKVFRSGRDFAAWIGLVPREASTGGKHKLGPISKQGDRYLRRILVVGACAVLKLARQKPEKYPWLTQLLARRPFKVVAVALANKMARMAWALLANGGTYRAPRIAAA

SEQ ID NO: 496517 - protein, 399 aa, unidentified
MSALRRVVIGADTHLDTNHLAVLTDTGKPLADAEFPTSPAGYDDAVRWAQSLGTICIAGVEGTSSYGAGLTRVLQAAGIEVAEVSRPDRAARGRRGKSDPLDAYAAARAALAGDRLAVPKDEHTTALRALLSARRSAVKAHTAATNQLHALLVTAPAELRERYRRHHTTALVAALAQCRPATQGDPTTAAVLTAAKALAQRVKFLEQQRQDLTAQLDGLVGQINPALRAAYGVGPHTAAQLLVTAGTNPHRLRSEASFAALCGAAPVPASSGTITRHRLSRGGDRAANNALYRIALVRMSSHSQTRDYVERQVTKGRTKKEILRLLKRAIAREVFRLLTRPGPVDDYRDLRAARQAKNLTLAAVAQHFGVPIITISRLERGHQRNDTLANHYRQWLTAA

SEQ ID NO: 496518 - protein, 348 aa, unidentified
MTRILAIDLGKFKSVACSYDSETADSTFQTIRTCPQEVHDLLVELKPDRLVIEVCGIAGWIHDLATELDIPIEVANPQHEGWRWNKVKRKTDRGDALKLARLSAMSQLPTVYMPSRRVRQWKSLIAYRHALVDRRTAIKNTIRALLDVQACRMPPGAKGWSIESIDRLKGLSRPIGRCGRDDLWRGQLHSELTALRQANELLERIEGRLDRIGAGDERVQRLQSMPSVGKRLSELVVATLDRPERFRSAREVSAYAGLVPRQYESGTMSRQGRISKQGPSLLRRLLVQIAWGMEQRSAYVAALFQRISGGQKSRRKKAAVAVARKILVWCWAILRDGTRWRDPSPRAA

SEQ ID NO: 496519 - protein, 319 aa, unidentified
MSNVIIGVDIAKLKFDVARLCDGKYKHAKFTNDAQGYAGFIIWLISFGDENVRICMEATGSYSLPLAEFMTDKGYFVSVINPAQIHAYGKSELSRAKTDKADAKLIARYGMQAKLDAWIPLPANIRDLQAMTRRVEHLLEMQQMERNRLDTADTTIIDSINTVLNTLEAELTATRKAIHNHIDNDPDLKDRSKLLDSIPGIGTATIAHLLIALSSHHGYTSAKQAVAHAGLAPAIRESGQWTGKTRIAKNGDATLRKALYMPALVAWKHNPVIRAFCERLKANGKNGKAIACAAMRKLIHLSFAILKSGEPFDPNYSLA

SEQ ID NO: 496520 - protein, 454 aa, unidentified
MRKPRVVPDEDHEVMYERVAAVDVAKASGVVCLRTPDPARPGRFVNRIWDNVPATRAQIAGLGRELLRCQVQMVTLESTSDYWRIWYYVLETAGLAVQLVSPSQAKNLKGRPKTDKLDAMWLARLTQQGMLRPSFVPPAAIRRVRDFTRARQDLVAERTRCLQRLEKLLEDAMIKITSVAADGMKAKSVVAMVAALAAGERDPRTLADLAKGPLRAKRDALAEALDGMFDSHHGVIARMLLGQVAFLDQQITRMEDQAIAALAEVPGSWGVDASGQTGPGCGVTPGSPVLAAAHRLAEIPGISVWLAIVIIAEIGLNMAAFPTPAHLVSWMGLCRSAAQSGTRHGKGKPKKGNSYARAAAGQAAIGAARTATFLGERYARIARRRGKAIAQAAVARSIMIIVWHLLADPAARYRDLGPDFYASRINRDKKIRNHLRGLQALGVTVTITDDEQAA

SEQ ID NO: 496521 - protein, 410 aa, unidentified
MKSAVITAVGVDVSKSKSTVAVRRPGGEIVMHSFDVRHTNSDLKKLVSTLKKLGGDIRVVMEHTSMYWRPIALTLKKAGFFVSAVNAMLIHDFSDNSIRKLKTDRADALKIANYALTFWDTLPLLNDEEETRLLLKMQSRANERITATTTVLRNGLIALADQTFAGVNLAFDPNTKNTDGHEKWVDFFLRYWHRDCVCQYSMEVFTESDRGWCKRKNYKFRTATAHKIYIMAQECVATLPKCESTKTPIGQACKSLNAVCEARHNTQLEMQRLAALLPEYEIVMQMEGAGPVTGPALMAEIGDVRRFKNKKALVAFAGIDAPPFQSGAFESKSRHVSKRESPHLRRTIFLVSNIILTLSNPENAVFCFMGKMLRGKTLLCLYCCRKRKVLAHLLCSRERVPSLSSSSGCL

SEQ ID NO: 496522 - protein, 403 aa, unidentified
MKGWVGIDIAKDTFTVTYLAADQEQERVQGPQTYSLTQQGWQRFRHDLDAFASDVEQVAIALESSGPYTRLPLAHLLELPYPVYLLNPTLVRRFRQSLSLRPVKTDNIDASAIARFLRHMHPRLTPVSPSPELHLLTREYETISQHIAQLKTRIKQQIHILFPELPRHVSLFSQTILRLLLAFPSASAIAQADPAHVETLLTSSRGRKLPLSPHDLQALARSSLGIDLPVHTTLLQSLIRRLLALLEEQQHLRQAIEDHFRDQEAFHHLAAIPGMGLITTATLLAEIQNVTRFPTAKHLVAYAGLDPSLHQSGRYQGASRLSKRGNPHLRRILFLLARTLIRTTQRFAQAYHHHRQKGRSHREALVIVSRKILVVFYTLLKRNIPFQDLPPSTTPLPTPTNSR

SEQ ID NO: 496523 - protein, 459 aa, unidentified
MGRKKKMEMEIINSNAAGIDIGSRSHFVAVGQSLEDVKEFGVYAEDLTAICFHLKEYGITSVAMESTGDYWQNLFAELIKHNFEVLLCNGKFTKHPKGKKTDVKDACWIQKLHSLGLLTSSFLPDETTEILRTYCRQRTNLIRLASGASRKMQKYLKFLNFRLDVVVKDICGLTGLKIIDDICKGNLDPYSLARHRHYNCRKSEDEIAKALHGNNRQDFLFGLKQEYDSYMFYQKQIKACDKKIEQFIKVELKKTPEKLKLKTSEKPYKRLNKNAPRIKNFNQVAYQYFNGVDLLAIEGLSHATVLAIMSEMGPNGFEKFNSSKEFVSWLRLAPNNKISGGKVLSSKVPKGSNRLKIALRQAANAIGNLRDTHLSNFFKRIAFRKGRQAAVSATARKLGVIIWTMITKKVPYDPPEKYLFLDQKRKLGIAKRIKKQIDKFELKPEDIGFGNSLILSAEI

SEQ ID NO: 496524 - protein, 425 aa, unidentified
MNYKQNEKINQVKESTLVVGIDIGSTTQYARAFDWRGIELGKVFTFSNSREGFESFKAWMQHLQDKYRKSDVIVGIEPTGHYWFDLGAYLEDEGILLVMVNPYAVKQTKELDDNSQSKNDRKDPKVIAKLVTEGRYSAPYTPDGVYADLRIMVANRKRLIREMTQIKNRFARWFAIYFPEYTDVFGDYEAQSSMLLLKKVCTPEAIVELGAEKINQIWRDAKLRAVGMKRATTLCETAKRSIGLKKGSSAARYEMKLLLEDYEYKKAQLDAVMEEIEKLCRKIPESEQMLAIKGIGVITVAGFLAEVGDVRRFESPRQIQKLAGLSLRENSSGKHKGQTTISKRGRSKLRAVLFNAAIPLIAKNPEFKSLHEYYTTRANNPLKKKQSVIAISCKLIRVFYAILAKGVTYDAQKLISDIHRQPQVA

SEQ ID NO: 496525 - protein, 294 aa, unidentified
MKDTMIGVDLAKRVFQLHGAAMTGEVKFRKKLSREQFRAFMATQPAALVVFEACGSASYWAREMEALGHEVRLIAPQYVRPFVKRQKNDAADAEAIVIAARQPEMRFLAPKTADQQAKAVLFRSRERLVHQRTELVNALRAVLYEYGHAFPLGFCHLKRIATVVEESDCDLPALVIAECQDLLAQIAEKTERIEAKTMALKALAAETDTARRLQTMPGVGPLTALAVEAFAPDMAQFKSGRDFAAWLGLVPRQHSTGGKARFGRISKAGQKAYPLGSGLPTSCVREACHHRVFP

SEQ ID NO: 496526 - protein, 382 aa, unidentified
MKQNSTRRQSAKQTSKQSLKQSPKQSPKQSQKICAGPITIGVDLGDKTSRYCLLDDRGEVAKEGSAATTKKGMAQTFGPLKRCRIALEAGTHSPWVSRLLKSLGHEVFVANPRQLKLISQSSRKDDRIDARTLARLLRVDPELLRPIQHRSAAAQLDLMAVRVRAALVEARTALVNSARGLAKPVGERLPKCDADSLGIGHLASLSESLQALLKPLLKQVESLTAEIKARDQQIEQIARMKYPETKLLQQVSGVGPLIALTFVLTVADQQRFEKSRDVGCYLGLRPKRSQSGRSEPELRITKEGDVYLRKLLVQGAQYILGRRGPDTDLKRWGTRLAVGGKRAKKRAVVAVARKLAILLHKLWSCGEVYEPLRNNPARQVAA

SEQ ID NO: 496527 - protein, 399 aa, unidentified
MEQVIIGVDPHKLSATIEVVDHHERKLGDGRFATDRAGYAAMLAYVKEWPGRVWAVEGANGAGRSLAQRLLQAGEVVVDVPAKLAARVRLFDTGHNRKTDAHDAHSIAAVAVRTKTLRVLTVDGELQALRLLVDRRDALSRRRVQTVNRLHALLAELLPGQAKKDITAPQAKALLSSVRPRDVAGKTCRRIAAEELAELFAVDAKIKKSTAELKALVLARGSHLMDLHGVGPVVAARVLADVGDVARFPDRNRFASWTGTAPLDASSGENNRHRLSRAGNRRVNHVIHIAAVTQLRLNTDGRTYYRRKRAEGKKPLEAMRCLKRKISDALYRQLVTDAAAAQVEDTKAGPGGHRGASHISSAAGSHPHTSTSDQPLPGPAPTTLRPATATRKTHLEATH

SEQ ID NO: 496528 - protein, 355 aa, unidentified
MKRSYYIGIDISKKTLDASIFVEKMEEKRFPHLKVDNNKTGFKEILKWARKEKVNLKDCMFCMENTGHYGLDLYSFLEQKGIEYCSICPLVMKRSMGISRDKNDKIDSARIATFAFEKAYKLKPTKLASEDILKLKQLQSERAMYVSERAKYKAYISDKSNKKGSTFKRMSLLVEALSQQIEAVEAEIQSVIQRNEELKTSYDLITSVPGVGKVIAISTLTHTNNFQSFSNARQYACYAGVAPFARTSGTSIHGAATVSRIGDAQIKAELSQGAMSARHNDPEMSVYAARKREEGKHPGVILNAIKFKLIERMFAVIHRGTPYVLTHEYKTMKNTAEGCHSGGRRKVSQERVFAS

SEQ ID NO: 496529 - protein, 342 aa, unidentified
MDIKVLGIDLGKTVCSLAGLDEAGAVVFRKRLQRHRLLDFLDTLPPCVVAMEACGGAHHIGRYCLEKGHEPRLMSPLYVRPYVKVHKNDDRDAEAIAEAATRPTMSFVAIKSEEQLDLQALHRARERLVSERTRLINQGRGFLMERGIRVGTGRHVFQKELARLAAEGAADLSPRMLLLVTDMASELKVINDRVAAIDAEIKALARTDADMQRLMEIPGIGPTIATALVAAVGTGSSFGKGRDLAAWLGLVPRQVTTGGKAKLIGISKHGNRYLRKLFIHGARTVLHLVRDRTSPITAWADALKERAHVNVAAVAMANKMARIAWAVLTKGERYRPNAMSGL

SEQ ID NO: 496530 - protein, 276 aa, unidentified
MKLYGGIDLHSNNSVIHLIDENGVSHFRKRVVNDLENIVALLTPYRDSLVGLVVESTYNWYWLVDGLMDAGFTVHLANTAAIQQYSGLKHGDDDSDADWLANMLRLSILPTGYIYPKEQRMVRDLLRKRMQLVQQKTQNMLSIQGLYDRHLNRRINSNKLKQLTPAQLEKDFTDVNVRLAVNGNLTVQQCLAQQINMIEASLKTQLKLAPEFIQLTSIDGIGLILALTIMLETGDIKRFSQVGNYSSYCRCIISVAPGTVMARKKVRRTVKTAINI

SEQ ID NO: 496531 - protein, 424 aa, unidentified
MGQVRAAARRVERDLEPDSAEVAGMTGSLIVGIDPGRYGHGVVVLGPDGEEALRERVANEATAIETLVDRVAELAGGPGKALWVIEADGGDGVVLIGELLARDELVATLTPTEVAMRRKGRRQVHKSDLIDAELCARIGREEQATLRRLIAAPEAVAEMRVLERYQDGLIRDRTRLINRLRFLLSQYWPEFLAARAFAAFDGDAVTALLVELPTPSAVRSKTPFEIASLLAAQRYRRRPLERAEQVLAAAQVGPRPQEAVYGRLVAEVAGELRELKLRIEALDEEIRDRFLCQPEAPIILSLPGMSHRTGPRFLAEVGALARFASPDALAAYAGLTPTLWQSGRSSGTHFLTRRCNLHLRQACWAAALGSLKTPASRRFYDRKRSEGKSHHQAIIALARTQLRVLWTMLRAGTLFSTERALQAA

SEQ ID NO: 496532 - protein, 417 aa, unidentified
MSKIIERCAGIDIGKRFLMCCVVTGSADEESHGQTLRFDTTVPALERMREWLSRERVTHVVMESTGSYWVPVFNILEEHFTVVLANPEEVKNRKGHKTDRNDAKHLADLLRHDHIRPSYIPPKATRELRDLTRRRVQLMEDSTRERNRVQKLLEHANVKIAGVLSDVFGVSGQRMLVALLEGESTPDQIAELARGQAKRKIPQLTEALVGHRMTEHGRFLIRSCLRHLACLEEELEELDAEIVRRVGMPPFQNAFALMQTLPGVGELSAAAILAETGTDMASFPTAEQMASWAGLCPGNRESAGIRKGSQTTHGNKYLRTALVQCAWSASRRQGSMFETQFRLLIKRLGPKRAIVAVAHHMLIIIYCMLRAGVPFRGAEALPHQRRRQRRAHHHLRCLRRLGVTVQVLSDDLSGQIP

SEQ ID NO: 496533 - protein, 342 aa, unidentified
MSIPHVGVDLHKQTSQVAILADTGEITQHRLPNDRTVIESFFRELPTPARIAIEATGTWWWIVDLLESLGHDVSLSHPKQTRAIAAARLKNDRVDAQRLAVLLRANLLPTVWIPPQPVREARELVRHRLHLVQIRTRVKNHLLALLARRNLRAHCGQSWLSVRGRQELERLSLGETPGRIVENCRKLLQLLDDQIRGLEIALIERFHDDPHVQRLQTIPGIGRFLATLLVIELGDIRRFPSAKHLVSYVGLVPRVRASGERVRLGHISKEGSPILRWALVVAATQAARQPGPLQHWHRQVLVRRGPMIARVALARRLLALVYEIWTRETTYTLQLRPSAVQR

SEQ ID NO: 496534 - protein, 339 aa, unidentified
MIAVGVDTHKERHYAVALDLLGQVLGESTFAATAAGYGELQRWAERHDNLQELEFGIEGAGSWGAGLCQHLQHGGHAVVEVERPRRVERRAGKSDRIDALAAAKCVLGGENVSTPRRRGILSALRALLNARRSTIAERTRLLNQLQALNVTAPVTLRERVGEGTGKQLERHVLSMRKRANVDVEERAVFCVMRDLAARSRALANDAKRYEQELAELVRSLDATLLDETGIGPISAAKLLACDPARFKHEAAFARCNGTAPLPASSGKTVRHRLNRGGDRQANNAIHTIALIRAKHHPETRAYLDRRISEGKTKREAMRALKRHISRDLFKRLTEAPLTS

SEQ ID NO: 496535 - protein, 283 aa, unidentified
MNTDPKSIPIDRYIAIDIHKHYVVLGGMNPQKEWVLRTRKVRMSRFPEWVQKNILPTDAVVIESTSNAWEIYDLLSPLVAKAVVANPLKVGEISGAKVKTDRLDVERLLTLLIADIVPEVWVPPHHVRDLRSLISHRWRLHKQISMTKNRLQSFIHRFNLIPPEGKLFSEENHSWWQQQDFSPMVRLQIEQDLLILQHLSNHKDAIHQELARLSNRKPWADDMVFLMQIPGLGVVLSMTVLSAIGDISRFEHAKNLVGYAGLGAGVHDSGQKHQGKGIYQARS

SEQ ID NO: 496536 - protein, 320 aa, unidentified
MSVPSVTVGIDVAKAHVDVCVLGAKTDAQRLSNDAEGHSALAAMLQPLGVGLVVMEATGGYEAALACALQAAGLPVAVVNPRQARDFAKSMGRLAKTDAVDARMLADLAAVLVRREDLERFLRPLADERQQWLAALVTRRRQLLTMLHSERQRLQITPKQLHASIEAIVAAIKAQLEDVEAQMVTHVREHFGELDRLLQSAAGIGPVASATMIAELPELGRLNRREIAALVGVAPMANDSGSSKGRRRVQGGRFEIRRVLYMATLTATRYNPAIKAFYERLKAAGKLPKVALVACMRKLLTTLNAMVRTGKPWDESLHSA

SEQ ID NO: 496537 - protein, 397 aa, unidentified
MLAVGIDISKSKSVAAILNQDGSMHTSPFEFHHTQPELDAFIKYILNSNQSATILMENTGHYHYPVLKAFREAGLPVCMVNAYQIKKFGDMDLRKAKTDKKDAVRIARYALEKSYSLVPYTSMEQKYEDLKFLARQYNQRMLTLKTNKVFLLNLLDETMPGITNILPLTTRTPETSLSVLFINRFKSYDRIKKMGKSRFLDAFEKITRKSRNRQTKTYGLAIYEAALRNITTRGENEYTLAAQDQCLELVCESQKAADSIILKMKTLAETLPEYAVLRSMAGVGDRLGPLILAEIGDIRRFHSGKALNAYAGNDAPPYQSGTFESHNRHISKRGNAALRKYCFEVMQALKLTQPQDDPVYLFLLKKEQEGKPYNVAKMAAVNKFLRIYYARAMELYK

SEQ ID NO: 496538 - protein, 459 aa, unidentified
MRKKNQKPNQAKQKISIHQEWPLINPHAAGVDLGAREHWVAVPADRDPQPVRRFGTFTEDLEALAQWLTDCRITSVAMEATGVYWIPLFQLLERRGFAVLLVNARQIKNVSGRKSDVLDCQWIQRLHTYGLLGGSFRPADPYCVLRSYLRYRDELVTGRSTQTQHLQKAFQQMNLQLTQVLSDINGVSGQAIISAILAGERHPLKLAGLIDRRVKASQAEVAKALVGDYRAEHLFQLKIAFELYQTYERHIADCEAVLAAELARLPDRVQASAPSLPPQKGNKCVPEPLRQALHQKLGVDLTAVEGFGPQVALTVLSEVGPDLSRFRTEKHFTSWLGLCPDNRISGGKVLSCRTRRVVNRLSDVLRLAATTLERSPTALGAYHRRMKAKLGGAAGITATAHKLARLLYALLTHGQAYVRQGIEDYERKHQARKLKHLQSTAEVMGFKLIQIQTVPESVS

SEQ ID NO: 496539 - protein, 399 aa, unidentified
MLAVGIDISKSKSVAAILNQDGSMHTSPFEFHHTQPELDAFIKYILNSKQSATILMENTGHYHYPVLKAFQEAGLPVCMVNAYQIKKFGDMDLRKAKTDKKDAVRIARYALEKSYSLVPYTSMEQKYEDLKFLARQYNQRMLTLKTNKVFLLNLLDETMPGITNILPLTTRTPETSLSVLFINRFKSYDRIKKMGKSRFLDAFEKIARKSRNRQTKTYGLAIYEAALRNITTRGENEYTLAAQDQCLELVCESQKAADSIILKMKTLAETLPEYAVLRSMAGVGNRLGPLILAEIGDIRRFHSGKALNAYAGNDAPPYQSGTFESHNRHISKRGNAALRKYCFEVMQALKLTRPQDDPVYLFLLKKEQEGKPYNVAKMAGVNKFLRIYYARAMETLKQQ

SEQ ID NO: 496540 - protein, 330 aa, unidentified
MTEGYVYVGIDVSKAWLDVAVEPAGQNWRTENDPRGINQLVGRLGELAPKIIVVEATGGYEANLVEHLCEAQLPVARVNPGRVRRFAQGLNWLAKTDKIDARLLACFGEKANPRLTKLPSEHQRRLAALVKRRKQVLEMLVGEHNRLENADGEVSPYIQDMMTMLQKQLDELERAIGSLIEDTPDLKGRHDVLLTVPGVGQVTASTLTSQLPELGSCDRKEIAALVGLAPFSHDSGKKRGQRAIKGGRPAIRSVLYMATLSSIRFNPVIKKFYDRLLGYGKETKVAIVACMRKLLTILNAMIRHNQPGDPTLLLDSYHSCSFVPPGQTTS

SEQ ID NO: 496541 - protein, 318 aa, unidentified
MNTKINQSINVGVDTGKTQLDIHIRPLDLFFSVENNDKGIKKALKTIKSHSPERIVIEATGRLEMPFVLACAEAQLPIVRANPVHIKRFSGAIGRRAKNDRLDAELIAHYGEAIKPALTVIKPKNIRLMSDLVIRRNQLLSMQTMEKNRIQILPASLHPTIKPMLTTIKNQITKLEEKLVKLIEDSPEYQAKNTILQSVPGIGSIAAASIISNVPELGHITNKQAASLIGVAPITRESGRYKGKRVIQGGRAQVRTVLYMAMMSAMQCNPVFKATYARLVAAGKPKKVAIIACVRKMVVTLNSMLRDGAMWDENTAKN

SEQ ID NO: 496542 - protein, 458 aa, unidentified
MRRKRTAGRDRQSLPMVHPHAAAIDVGATMHMAAVGPDRTDEPVRSFGTFTADLHQLADWFEVCGVTSVVMESTGVYWIPVFEILQDRGLEVFLVNARDAKQVPGRKTDVKDAQWLQRLHAYGLLRASFQPKAEIAELRAYLRQRERLLEYAASHIQHMQKALTEMNLQLHHVVSDITGATGMRIIHAILAGERDPGVLASLRDIRCHSSLETIEKALTGHYRAEHLFALEQALALYDTYQHKVAACDQRLEAVLKALSAHGPDPASVPAPRRRMSRQANEPGFDLRRALYGVLGQDLTQIHGLGPSLALKLVAECGTDLTAWPSAKHFTSWLCLAPGNKISGGKVLSSRTRRSGSRAAALLRLAAVTIGKTETALGAFYRRLSTRIGKAKAVTATARKIAVLFYNALRHGMDYADPGASYYEERYRKRVIDNLHRRAKAFGFVLQEVAVDASTGAVS

SEQ ID NO: 496543 - protein, 361 aa, unidentified
MPMLADTIDAVIGVDTHRDTHHAEIARPTGAPIAACSIPVTSAGYAQLLAWARQHAPGPRIVLSVEGTRSYGAGLARAATAAGFKVIECEQPTRKTRRGKGKSDPADAHLAVLAALRPGTAQLPTPRADGDREALRILLGARAGLTTTATAQTNRLRALLRDGSDHDRDLARGPLSTATLAALARRHQPPRSSRDQAVRHREIRRLALALRDSAQALKANHAELATITGDLAPGLTSKTGIGPVTAAQAIVSFSHPGRCRHDAAFARLGGASPLQASSGQTTRHRLNRGGDRALNKALHTIASTRMRADPATRAYVTRRRTEGKTDREIRRCLKRYIARQLYRYLTAAMTQPSPRPDEPAT

SEQ ID NO: 496544 - protein, 295 aa, unidentified
MWRFGPQVKDFAIERNAKGLNSLCAKLAALNPVTIALEATGGFETVVAAALAAASLPVAVVNPAQVRAFAQALGKRAKTDPLDAAVIARFAEAARPAIRPLADAETQLLADLIARRRQIVDMIVAEKQRLGRAPAKRLKKSIERLLKALEKELSNLNGDIDTAVRASPLWRANEELLTSVPGVGPTTARTLIAELPELGSLTRKEIAALAGLCPFTRQSGQWRGKSFIQGGRASVRAALFMAAMVAARFNPILKTFYDRLAAAGKPKKAALIAVARKLLTILNAILRDQKPWQIA

SEQ ID NO: 496545 - protein, 365 aa, unidentified
MEAKKTQATRYVGIDLGKRTYEVAIVGNRGKVTLSNGKTGITGRQALYKKLHPQDKVALEAGNMAFIMAKELERFVGCRVYVLNPSHLPLIYGSMKKTDKEDSLKLAHILEDFREERLPVVPVPSEKEMMRRKLLGSYRREKGERTREINRLHGLFVAQGITDVKKKDLATVGRRGETIGRLEGLEREEAEHLLKCLLLCEERIGVLDRQMEKEAEGDEQIEQLQTVPGVGPKVAFAFVAHVAAERFENGDQVANYLGLVPRVYISGDTVRYGRITKRGNGYVRGLLVQAAWALVRTKKMEGLKLRYDYMTKEKGKSKKKTIVCIARRLAVLLYTMMRDGTNYESRPFKAGKEGVEAIAQLALSA

SEQ ID NO: 496546 - protein, 430 aa, unidentified
MKSNTQNAKIEAITEKTLVLGIDVGSEMHYARAFDHRGIEYTKKPFKFSNTEAGFMALQAWILDLKEKHEKDKVVPGMEPTGHYWFNLGKFLQDNEMKPVLVNPHHVKKSKELDDNNPTKNDRKDPKVIAGLVREGRYMIPYLPDGVYADLRTASNIRFQLQAELTRIQNRISRWFHIYFPEYKTVYGKPDAKSGILILKTAPLPEDILTLGVDGVNQIWRDAKLRAVGKARAKTLVEAAEHSVGNKEGAVSARMEIRMLLEDYESRNIRLQEVMVLIEELVRKIPMAEKLLEIKGVGIRTVSGFLAEVGDISRFNNPKELQKLAGLALVENSSGKHKGETTISRRGRKRLRYLLFEVAMSLVSKNQEFRELHNYYTTRRLNPLKKMQSLMAIAAKLIRVFYAMLTKGVDYDPKKMVSDIKRPAVYLQAA

SEQ ID NO: 496547 - protein, 347 aa, unidentified
MIYCGLDIATKSSYVYVTNAGGRKLTSGEIPTTRAGFEARLKRYVGRGLRIVIEAGNQTAWVHDALTEMGAKVTVANPTKIKLIAESRCKTDKIDARILCELLRIKALPHPVHMPGKKARSLRGLLVARRQLVSARTKLCNVVRGMVRQEGIILRTGALSSFRGWRRLMGEGFDQPHLLAVVSAYYESFVSLTQSIRELDRELADHESKEKRAARLQTMPQVGRIASLTFLAAVDNVKRFRSSRKLVGYSGLAPTVRSSGERTEYGSISREGRRELRAVWVQIAHLVAADTSRATQPLRTWFNRVARRRGKKTAIVALARRLLIIAYHLLRDETVYEPARLKRKRAA

SEQ ID NO: 496548 - protein, 343 aa, unidentified
MEYFAGLDVSVKETSVCIVDDAGKIVREVKVVSEPEALLSVLTNPGYHFKRIGLEAGPLSQWLFSALAEAGLPVICVETRHMRAVLKAQINKTDRNDARGMAQMMRVGLYRPVHVKTLRSQKLRMLLTHRKLLQSKAIAIDNDLRGTLRNFGLKVGVVGTVKFEARIKELVENLPDLAELVEPLLVVRRVLREQFVIQHRRLLAIVRDDEVCRRLMTVPGVGPVVSLTYRATVDVPARFHKSKAVGAVFGLTCAKHQSGEVEWSGRISRCGDEMMRVMLYEAAQSMLLHSKKWSWLKAWAMQIARRRGMKKAIVALARRLAVIMHRIWVDGTEFRWTREAAAA

SEQ ID NO: 496549 - protein, 337 aa, unidentified
MKYYVGLDVSVKETAVCIVNTDGKIIAEKSVLSEPDALADYFAEQGMPLEKIGLEAGSLSPWLCRELRDLGFSVICLETRHAKAAMEAQNVKTDKNDARGLAHIMRTGWYKEVHIKSNDSQKARVLLNNRRCIKGKMIDIESQIRGTLKVFGHKVGVVTRKNYEQRIRELIGEDTELLAYIEPLLIIRTHMLEQFSKLEKAVLEMVKNDLVCERLMSIPGVGALTALSFKTAIDRPERFKKSKNVGVHLGLTPRKYASGEVDYNGHITKCGDDNARFHLYIAAQALLNTVQKWCPLKAWGMRIAKRSSKQKAYVAVARKLSVIMHRMWMDGTYYQHA

SEQ ID NO: 496550 - protein, 321 aa, unidentified
MSAPSAVTVGIDVAKAHVDVSVLGANLDIRRFNNDAEGHSALAVALQPLNVQLVVMEATGGYETELACALQGAGLPVAVVNPRQARDFARSMGRLAKTDAIDARMLAELASVLLRRDDLSRLLRPVPDERQQWLAALVTRRRQLLTMLLSERQRLQITPVGLHPSLLAIIAAIQAQLDDIDAQMVAHVRQHFGELDRLLQSTHGIGPVSSACLIAELPELGRLNRRQIAALIGVAPIACDSGLRNGRRRVQGGRFAIRRVLYMATLTATRYNPAIRAFYQRLKAAGKLPKVALVACMRKLLTMLNAMVKTNTPWDDSLHRA

SEQ ID NO: 496551 - protein, 344 aa, unidentified
MEVGTMVVGIDSHKETVAACVVDELGGELATAIFPNTGAGHDSLLSWARSRGEVSLFGIEGSGGVGYALARRLATLGEGVVEVPPFLTVRERKHLRQRGKSDPADALAIARVVAREADLPRFLIHDRARQLGQILNYRDQLVEERTRGANRLHSELTRRHPGYQAEIKNLASRRSLRRVQALIEAGASIETALLLRRLSSLRLLSSEIADLNVHINRLVEQSRTGLIDITGVGALVAARILAEVGDVQRIASESRFAALNGTAPVPASSGTIQRHRLNRGGNRRLNRALHTIAVIQAHLDPRARAYLQRRRAEGKTQREAIRCLKRQLSNVVYRQLVADRGRLR

SEQ ID NO: 496552 - protein, 462 aa, unidentified
MKKSSNRRKVVKLLSELECINLNAAGIDIGSGSHFVAVPEGRDEICVREFKSFTADLYELADWLKRCGITTIAMESTGIYWIPLFEILEERGFEVRLVNPKHLKNVPGRKSDVLDCQWLQQLHKFGLLLGSFRPEQAICELRAYTRQRDSLVKSISTHINAMQKALGLMNIQLHNVLSDITGQTGIKIMRAIVAGERCPKRLAEFRDIRCKHSVEVIEKSLVGNYRAEHLFKLRQELSLYDKFQEMLVECDAAIQICLQHFEEKVDISVNPLAPKEKKKRRKNELYFDAREYLYKMTGVDLTLIDGLDSHSVLKLLGEVGLDMKRWPSANHFSSWLGLAPGTKISGGKRLSSKTKPTANRAAEIFRIAAFTLSNSNSALGAFFRRMKARLGAPKAITATAHKIARLFYTMIRYGIDYKDTGATYYEEQYRKRIIKNMQYKALQIGFSLIPIALETQTKLEVS

SEQ ID NO: 496553 - protein, 387 aa, unidentified
MNDLTVERSPAANDCDPARIFVAIELSKKSWLVAVLTPLSDKIGVHTLPAGDGDALLKLVARVRGRVEAALGRSVEVASCYEAGYDGFWLDRLLQAHGVRNHVFDPASLLVSRRARRAKTDRIDVQGLLRALMAHLRGEPKVVSVVRVPSAAQEDARRLHRERHRLIGERVQHVNRIKGLLATQGIYDYEPLRRDRHARLAELRTGDGRALAPRLAAEIGRELARLELALDMIGEIEAERDAIAAGRAEGHPHADKIERLVQLKSIGPEFATVLVGEVFHRSFANRRQVASYVGLDPSPFSSGGTARDQGIAKAGNPKARTTMIELAWVWLRHQGDSALSRWFRERVGALKGRPRRIAIVALARKLLIALWRYVETGLVPDGAVLKA

SEQ ID NO: 496554 - protein, 343 aa, unidentified
MERYYYIGLDIHKKIIAYCIKAIDGSLVDQGKVDADRQSLEAWVKGLPGPWIGAMEATMFTGWVYDFLKPHAIALKVAHPAMLKAITAAKKKNDRADAEKIADLLRVNLLPECYMLSEEIRELRRILRYRNHIVRTAVKMQNKMSGLLMEVGATYSKKRLHGKKYFRELLERVDDIPPSVKELLQLSRSSYEMFRSFQKQLVATLRTNSLIRDRVHRLMTIPGVGEITALTWVLEIGDSGRFSSIRKAVSYCGLCSAQKESAGKEQRGPISKKRNKHLQTMLIEAAKLAPHWNEQLAIVHEQELKKGNRNRATLAVARKLVAYMLAVDRKGADFKLPSEIRAA

SEQ ID NO: 496555 - protein, 436 aa, unidentified
MIKAAIERCAGIDVGKKWLAVCIMVGPLDAEPRTETRKFGTNVGDLEQLRDWLKENGITHAVMESTGSYWKPVFNVLEEALTVYLANPHQVKPRKGHKTDNKDGHWLAHLLRHAMIQPSFIPKREIRELRDLTRRRKKLIGAGTSEKNRIQKVLEDGNVKLGNVLSDVFGVSGQLMLNALLDGKAGPREIAQMAQRRARKKIPELVAALEKHRMSDHHRRMIRFSVEHMELLEKQIAQLDEDIMAKIRDIGLVKPWELLQTIPGMQAISAATILAETGPDMKQFGDERNISSWAGVCPGNNRSAGKSKSSHTNKGNPWLRSALTECAQGASKKKDCFLKDKFWRITTKHGGKRAPAVMAVAHNLLRFVFQVLSTGKPYQAKAATPLEPQQRERMIRHHIRRLGKLGIAVGQRGPAPLRPRRRTTAAKDAALLTAST

SEQ ID NO: 496556 - protein, 338 aa, unidentified
MRAYAGIDLHSSNNYTAIIDEEDKRLFGKRLPNDLGVVLSALDPFRAKLEGVVIESTYNWYWLVDGLQEAGYKVHLANPSAIKQYEGLKHTDDKWDSFWLAHMRRLGILPEGYIYPKEERPIRDMLRRRLLFVRHRTSHILSFQCAVTRNLSYKISVKEIKKLRKSDASIFYEEPFLKLAAKCAISTIHFLSERIKEIEKAVMSQVKLRPEFRHLQTLPGIGKILGLTIMLEVGDINRFPEVGDYSSYCRCVKSDRESNRKKKGEGNRKNGNKYLGWAYVEAANFAIRFYPEARSFYQRKKSTTNGIVGIKALSNKLARASYYVMRDQVPYDANHLFR

SEQ ID NO: 496557 - protein, 417 aa, unidentified
MEVISTMDVVYRCCAGLDVHKQTVECAVRRLTENGTVQVEIRQFGTMTDDLLEMVNWLKAQGVTHVAMESTGVFWKPIYNILEGHCSVLLVNARHVKQVPGRKTDVRDCQWLAQLLQYGLLKGSFIAPRWQRDLRDLTRERTQLTDEQTRVANRIHKVLEDANIKLGSVATDILGVSGRDILERLMAGEEDVDALAERARGRLRGKIPELRRALQGRLREHHRFQLRLNWDHLQRLQELIERLDERIRELSQPYHPQIQQLDKVVGIDQTTAESIVAEVGVDMKVFPSDGHLSAWAGLCSGNNESAGKRRSGRTPKGNRWLRRTLTLAAQAAGHAKDSFLASRFRRLAARRGKKRACVAVAHSILKVVYHILKDGRSYQDLGGSYFDRLDPQRLTRYLVRRLERLGLKVTLEPATVA

SEQ ID NO: 496558 - protein, 351 aa, unidentified
MKTEPTAQSKLCIGIDIHKRSWKIHCATDLFSGKSFTMPPNLDILCDYVAKHFSDYEVSCAYEAGCCGYYAHCRFEGYGWRSLVVNPADIPRKGKEKYTKTDKIDAQLISRELKDGRLDSIHIPELEREHLRSLFRRCNDLVKDYRRVKSYIKMQLLYFGFSIPEEFDNDHWCHKFRDWLDAVVFEYPTARDTLDSRMRLFRFIDKEIREVFTKLRAYCRKHYKKDYYLLRSVPGIGGIVACGIISELGDLMRFNSLKHLSGYLGLVPGIHQSGDAQRHTGISIRAHRLMRSYFIEASWQAIRTDPVMQTYYRKHLGKNVKTIIIKVAHKLLSRTLAVIKTETPYEISVIQ

SEQ ID NO: 496559 - protein, 420 aa, unidentified
MLMNIPSQFPYRATVGLDWADQKHDVFVRFANGDSYRRKIDSRPEAIQEWLLELQSTCAEAKIAIALEQRRGALFYHLCTHLSWIDLYPINPHSLASFRQTFFSSRAKDDPVDSQLLEELLRTHPERLRSYQPEPTAERKLDQYCRHRRSLRDLATKTELKLISTLKQYFPLAVNLFADVGLKSEIALNFLSRWPTLEELHRAKAQTVRSFFYAHNSRSQSLIEKRLQLIAQAHPVTDDLALIEPLVLTSKCLVTQLRQFNQAISQFDQKIRELFKSHPDHFLFESLPGAGEQLAPRLFAVFGSNRSRWADATDIQKYSGIAPVVERSGKSLWVHRRLARPIFVCQTFHEFAQQSTHRCSWADQFYRRQRQRGKSHHSAIRALAFKWIRIIYACWKANKPYDESFYVQALEKRNFSVSTT

SEQ ID NO: 496560 - protein, 463 aa, unidentified
MAKKNTTSHKSKSKARKNVLERINPNAAGIDIGANFHLVAIPEDRAEENVRKFGPFTSDLHRLADWLTEHHIETVAMESTGVYWIPVFQILEQRGFEVKLVNAAHVKNLPGRKSDVSDCQWLQQLHTFGLLNGSFRPKDDVCILRALLRLRDTLVKDCSSHVLRMQKALTEMNVQIHRVLSDITGYSGMAIIRAILAGERDALKLAQMKHPQVKASTEQIVKALEGDYRSEHLFALQTAVELYDAYQLRITGCENKIEQQLEQFDLKLDFEQVLEQSGALKSRSAQVRLGLQRQAHLTSVCGVDLTRLPGLSTLAVEVIISETGLDMNCWRSEKHFCSWLKVCPDNRISGGKLLGSRPRKTKNRAAAMFRPAAQSAMQSNTAIGAFIRRIKARLGAPTAINAGANKLAQLFYRMLKFGEAYVEQGQTYYEEKYKERLVRNLSKRAKEFGFQLTPCEPATALVS

SEQ ID NO: 496561 - protein, 445 aa, unidentified
MNLNAAGIDVGATEHWVAVPEDRDEEPVRRFGAFTADLYVLAEWLRQCQIETVVMESTGVYWIALFEVLEERGFDVKLVDAHYARQVPGRKTDVKDCQWLQELHTYGLLRGAFRPEDQICVLRSYLRQRSMLVAMASRAVQHMQKALEQMHLKLTEVVSDINGKTGMEIIHAILAGERDPQRLASHRDRRCKHDQATIAKALEGHWRAEHLFALQQALEQYEFLQQQLQACEMQIEACLQTFVTHVDVDTPPPAPARQRRARQRHAPGFDVHGYLAAMTGVDLTQIDGIDALTALKVISEIGLDMTRWPTGKHFASWLGLCPGNKLSGGKRYRMRSKPTANRAASALRLAAQGLVHSHSALGAYYRRMRARLGAPKAITATAHKLARLVYSMLRYGTAYVDAGQQAYEQKYRDRVLTNLQRKARVFGYQLVHVADPGNAQAAATL

SEQ ID NO: 496562 - protein, 446 aa, unidentified
MRRSKSSRPRKLRVVNPHGAGIDIGSREHYVCAGDEQPVRRFSCFTDDLRAMSAWLKQCGVTTVAMEATGVYWIPVYQILERDGFEVVLVNARHFKNVPGRKSDVQDCEWLQHLHECGLLAGSFRPSDDVVVLRSYMRHRANLTREAAQHIQRMQKALDQMNVHLHKVVEDMMGETGTAILRAIVNGERDPRTLAELRNYRCKSRQDEFIAALTGDWRDEHLFCLTQSWTIYHQLQDHIAACDEQIARCCTAFSEADRLPEMPAAKARKQDTALRRELFRIVGVDLTAIDSMSPDAVGRILSEVGMDMTKWPTADHFASWLRLCPNRRVTGGRVHGSRTLPTRNRATEVFRKCAESMARSQCFFGAFYRRLRARKGGPYAIVATAAKIAKVFYRVLRTRTPYRDIGKDHFDTAHRQRAIHGALKRLKALGVEIDIAQLQPVSDAVR

SEQ ID NO: 496563 - protein, 422 aa, unidentified
MLAESVDEDQIIARVAAVDIGKAELVCCVRVPGDGGAKRRLQEVSTHSTMTRSLAELANHLVDLRIERVVMEATSDYWKPVFYLLEAHGLEPWLVNARDVKHLPGRPKTDVLDAVWLCKVAERQMLRPSFVPPRPIRKLRDFTRYRIDLVGARTAEKNRVEKLLEDACIKLSVVASDIFGVSGRQMMAAMIAGERDPKVLAQMAHTRMRTKIPLLVEAFTGHFDDHHRFLLSQMLARIDGIDADIAVLDSQIETLLAPFAPAVARLDEIPGIGPVAAAIIIAEIGLDMTRFPTFGHLCSWAKFSPGVKSSAGKKKGNGTTGHGNRYLARVLGEAAVVAGRTDTFLGERYRRIARRRGKKKAIVAVGRSILVIIWHLLSDPDTRFTDLGADHFTRNVNTETKKRNHIRQLEALGYTVTLQPAA

SEQ ID NO: 496564 - protein, 327 aa, unidentified
MIRPVLGIDIAKLKFDVCLMKSEGKLKHKVFPNTPTGFAQLAGWLSTQRVERVHACLEATGTYGEALAYQLHQDGYTVSVVNPAAVKAFAGSRLSRTKTDKVDAELIARFCLAQQPLAWTPPAPEVRELQALVRRLEALIEMRVAEENRLEAGSVVAAVRASVAAHVAYLAAEIKRTEELIRAHIGNHPTLKQQSALLDSIPGVGQTTAALLLAEIVDMTQYRSARQVAAYAGLVPRERRSGSSVRGRTRLSKIGNARLRKALYFPAITALRCSPFFKQWAEGLRERGKCKMSVIGAAMRKLIHLAYGVLKTGKPFDPEWVQNAKSA

SEQ ID NO: 496565 - protein, 338 aa, unidentified
MKITTVGLDIAKSAFHLYAVNKMGRYMKKKQLKRKQVLPYLARLEPCVIAMEACGGANYWAREMKDLGHEVKLIAPQYVKPYVKGNKNDYNDAEAIAEAAQRPTMRFVPIKSVEQQDIQNLHRQRERIKKARTALVNQVRGLLAEYGIVINKGVAAVRKGLPGILEDAENGLTMRGRELFADLLEELRVLDERFKQSEKQIEISNRGNEVCQRLDEILGVGPITASAAYAAAGDGKDFVNGRHFSAWIGLVPGQHSTGGKSTLLGISKRGNAYLRTLFIHGARAVLRHSANKTDRFSLWAQALLERRGHNKACVAVANKMARMAWVIMAKGETYRAAI

SEQ ID NO: 496566 - protein, 487 aa, unidentified
MNSIFRHRNADVERLFNAAGRPDKVMCVALDYAKRDHTAAVCDGSGRRLRSAFNVRNNREGLDFLIGVVEGLCRKHKIERGHVFFGGEDCGRYAFNFIYALASKGFLVVGINAGDAKHERDCSSASTDAIDAVGVAGMMIKKAGRTIGATFNDAYVIRRLRHQRDALVRAQSASAHRLHSLVDELFPGFLDTKLSGLTPFGRASLWLMEERFSAAEVHARKRPALVKALRDFAVVDPDGAADKLRALADAGLPAPERMIPVYQRCLRDELALYRGLGESVHAMDADIAKALARTPGAMLATIPGIGTRWAAALYSELADPLRRRRVDSMSALAGIVPRVKQTGGKDGPTAVGRRTKQCNPFLKSALVSAAVSVSQYGHAEMRESFRADEAQGRDARMRMARRLLRLCLCLADNGAFFLPPSLHKGGATDAVREYYAQVWPKVLIKWRDSGAILEAVAEGSPLKTWHDMAEELYGLELSVKPPQYVRK

SEQ ID NO: 496567 - protein, 408 aa, unidentified
MYNAVGIDASKFKSTVTVIQPAGIVIRKPFDVLHTSGELNTLITYLQSLEGETRAVIECTGHYHEPVAKSLSEAGIFISTVNPKLIKGQKQNTLRKVKSDPADARKIARYALDNWAELRQYSSMDTTREQLKTLNSQFDFFMKQKVTAKTNLISLLDNTYPGVNKLFDSPVREDGSEKWIDYAYSFWHVDCVRKIGLKAFTVRYEAFCKKHHYNFQKGKPAELFEASKQLVAVFPKEKSYKLLIQQSIQQLNLASEHIEILRKEMNQLASTLPEYNTVMSIYGVGETYGPQLIAEIGDVSRFTHREAITAFAGVDPGVNESGQFKQRSNRASKNGSTRLRKTLFQIMSTYLQNRPVNEPVYQFLDRKRAEGKPYLVYMTAGANKFLRIYYGKVKECLRNLDQESNEES

SEQ ID NO: 496568 - protein, 473 aa, unidentified
MGKGSGNGTTRGDRRRNARRERLRALLPRDGAVIGIDLAEDKQALAVIDHDVRVLARKTVKVKAFRLGEALDWAVAQAKVKGFAAVTVACEPTGPRWLQVQRLCAERGLPLVCIQPLISHIAREQQDYTPHKTDESDCVMIARLAVELHCYIPEELDEAWAHLRHLGRRRAQLITAATASAQRIRDFLSVAWPTVTETCVQPLESKTWLAAVQLVTGRCGADPGKLAAMGPEAFTALVRSAVGSWGGKKAWGTICGRVFAALTDTEGVVAWSRRGLLRRCADELGDLQRTRAQLRAVEADMVMVLGELGLSRLGDIPGLTAVGAAAILAETGDPRRYDSSSSLVKHAGLAPSDNASGAFYGEAHISRRGRPGLRLTVWRAVWPMLRFNPVMAAKYQAMTSAADAAALAAGTQDGARTRPATAAAAAARARRAKARVACAASLLRWIYTIVVHDTGWDPAAASGAAARHQAEAA

SEQ ID NO: 496569 - protein, 408 aa, unidentified
MNTLYVGIDVSSKSNVVYLMLPNGDKHSNFSVANSHEGSTLLVKKIYSALTSHSLDTVLIGLEATSVYGDNLVYFLREDATLAPFNRKIHVLNPKQVKKFHDAYNDLPKNDYVDSFVIADCLRFGRINKEVYMGDYRYKALQNLTRARFFAVQNLVKEKQRFMNVLFKKYSTMTQEKVFSDTFSTTALAVYDEFESAEALANMDLHELTDFIIEKGKNRFPDPDAVAKAIQKAARSSYRLPKTVNDSVNQVLSISITSMKALESQIKEFDKAIKAQMELLPNVLISIPGIGPVYSAGIMAEIGDINRFNSQAALAKYAGLAWKQHQSGGFESEVTRLIPSGNRFLKYYLCEAAFSLVRCDKEYSDFYHLKYKEVNRCQHKRALALTARKFVRLVFRLLKDNRLYCPAK

SEQ ID NO: 496570 - protein, 340 aa, unidentified
MTHIAMDVHRKRSVLAYQTPAEAEPKVVRCYTTRAGFARVLGALPRPWIVCLEATRQSPAVVRWLGELEVEAVQLVDPKGLKAFVKGKPKTDARDAKEMLALLQMGRLPKAYLAPPEVQEVRALTRARAYVRRGSTSLRNQLRALLNQHGLEVPARDLCGVAGRRQLAESVAQLGPLGQSAAGQLTPLLLATEQALDVLEGHVREELARQPVAQALMLLPGLGPVMALAVTAELGEIERFEDVAHLWSYAGVAPRAHDSDEYQAERHLPQRCNKRLRHLAVQAAQAAARCRQPSNARRTYQRLCRRGLHHNTAKVAAARELLKDIYYCWKRAGRATELAA

SEQ ID NO: 496571 - protein, 377 aa, unidentified
MKRIKFVGLDVHAETIAVAVADQDGEVRSLGVIPNRDESIRKLVKKLGAEEELRFCYEAGPTGYVVYWQLTALGARCEVVAPTLVPVKSGDRVKTDRRDALKLARNYRAGELTPVWVPDATHEALRDLVRAREAAKKDQLRAKHRLSKFLLRHGRRPPMDVKAWTLKYLAWIEREVHFLQPAQEATLLDYFQEVEHMAARMARLDLAIEEAVKLTPPKMRAVIEALQALRGIAQVSAVTIVAELGEVSRFTRARQLMGYGGIVASEHSSGEKTRRGAITKTGNAHLRRVVVEAAWAYRHRPGVGGVLRKRQEVVSADVREIAWKAQHRLHTRYQKLTARGKNKGKVITAVGRELLGFIWAIGVKVEAAHKEPLRQAA

SEQ ID NO: 496572 - protein, 323 aa, unidentified
MQGKEMSERQPMEKVYIGIDVCKSWLDVHIHPASIEFRVNNDGPGIGDLVDRLAGWPVDLIVVEATGKWHRQVHASLDEATYRVAVVNPYRSRKLADALGMLAKTDTIDARVLALFALHVAPRPTPPSAADMAALKELVAARRESMRDMTALKNRLGTTNHRLAERQIRTRLKMIKRHLKELELAIGKTIAKCPEMTQRADILSSIPGVGPVAAMTMIAELGELGACSRTQIAALTGVAPMNHDSGQFRGRRIIKGGRAGVRSVLYMAAIAAIRCNPGFGNFYKRLVAKGKKPKVAITAVMRKLVILANSLITDNRKWSPNPP

SEQ ID NO: 496573 - protein, 322 aa, unidentified
MRYIGIDVSKATFVVAYSSDKGGEIRTFNNTTAGIRQFIGTLPKDGSIHCVMEATGNYSALLLYMLNVAGLTVSMENPLKVKDFAKAMLSTIKTDKSDARLITLYGEKMNPRPFKVQGEAILRLRQKRTVIRQLTKQITAMSNLRGSLACLPVPDKGATHTVDETIKFLEKKRDRLQSELTDLVEVEFSRQLALLTTIKGIGITLATALIITTGGFTYFQNAKQVSRYLGICPTYEQSGTSVNIKGHINRNGDAYTRGLLYIAAWPASRFNAQCKETYTRLRQNGKSGKLAMIAVANKLVRQAFAVVAHDKEYVDGFVSNRP

SEQ ID NO: 496574 - protein, 332 aa, unidentified
METETGELGEQRLAHREEGERFSGKLKEESVQVRVGMEASGHARWFESLLRELQFELWIGNAAEIRTKRVRKQKTDRQDAQLLLRLLMEDRFPRIWVPDSENRDLRQLLWHRHRLVQMRTRVMNQLHVVALNEGLQRKKALWRPAGRKELESFELAPWASRRRQDLLEILDQLTPKIQELGKALEDEVEKRPVTRRLMTHPGVGPLTALAYELVIGTPERFHCGKQIASYVGLVPTEESRGNRRRLGHISKQGNVLLRFLLVEAAQVTVRSQPEWRSKFFHLAMRRGRKIAKVAMARKLAVHLYWMWREGCDYSQSKKFGSHAGEPGNRDGV

SEQ ID NO: 496575 - protein, 349 aa, unidentified
MRFYTGQHQHYCGIDLHARTLYLCVQDREGNILLHKNLPCDRARFLEAIEPFRDDLVVASECIFNWYWLADLCAEHHIPFVLGHALYMKAIHGAKAKNDKIDALKTTSLLRGGLLPQAYVYPPDMRPTRDLLRRRLHFVRKRADLMAHIQNTFHQYNLPRPPGRLVYPSQRAPIPGAFEDPILRKSVETDLALCDTYDGLIRDLENTVLRQARSHDFKTLLCLNSIPGIGKILSLTLLYEIHDIGRFPSVQDFASYARLVKCEKTSAGKRTGASGGSKIGNAHLKWAFSEAAITVLSHFPESKRLHDRLKRKFGKGKALSIFAHKLGRTVYFMLQRNQSFDPDRFLANA

SEQ ID NO: 496576 - protein, 409 aa, unidentified
MQKFNAATQRIETASAQIALSAAGASGETKPHAAYIGLDVHKETIAVAVAEPGRGEPIYLGEIANTPKKVAKLIAKLSAAYDGGLLLFCYEAGPCGYGLYRQLIASGHDCEVVAPSRIPKQAGERIKTDRRDALKLARLLRSGDLTAVWVPDQEQERMRDLSRARDDLKAQERQARQQLNAFLLRHGQHWPKGKSRWTPAHENWLAGLKLEDPWQQVVLQTYIDAERAAGERVAQLSDQLMRALPEWSLAPVVDSLVALRGIDKLAAIVLLAELGDISRFDSPRQLMAFLGLVPSEHSSGGRRRQGAITLTGNRHARRMLVESAWSYRFPARQTKHLKAKAANASPAAKQIAWKAQVRLCGRYRSMTRAGKNTKLVCVAIARELAGFLWDIVRQEMPRLAQAPTAAARA

SEQ ID NO: 496577 - protein, 306 aa, unidentified
MIVLGADTHKRSHTIAAVAAASGELRGEQTVQVGRRGFDGLLRWARSLDGERVWALEDCRHVSGSLERFLIERGERVLRIPTHLTATARRSARRRGKSDPIDALNVARAALQEGLESFPTAQLDGPELDLRLLVDHRERLVRHRVELNSTLLWHLHDLWPELQLPGGALFSKKWSTRIGRRLARAPQTMRVRIARDELRRLRELTLAIRRLEREITALVEHIAPQLLSEPGFGPLIAAKLVGEIAGAGRFANDAKLARAAGVAPIPASSGNTQRRGARVTPGPRPASRSPARLAGTGRAGRHSVPP

SEQ ID NO: 496578 - protein, 400 aa, unidentified
MLSIGIDVSKGKSTVCGMKPGGEIVYAPFEVQHTREGMLELVSLLRSSGEEVRAVLESTGSYHCPVVAALLENGIFVSVVNSLRMKRFCSQSIRKVKTDRIDAMQIALYGLAYWQELQPARLPEDTYRELQLLARQYYQMTSMLIKAKVDFNAICDQVLPGMQELMNDHAGRHKLSDFVLRYHHTTHILEMGETRFRKDYCKWAEKKGYRNCERMAVLIFATAQNGIPVLPNAPSTQIVITEAIRVLHTVEASRDAILTQMQALAKTLPEYSLVREMPCIGDTLAPRLIAEIGDVRRFHSKRALIAYAGIDAPPYQSGKFCANNRHISKRGNRYLRKTGYEVMQSYVMHKPANDPIFTFIEKKRGEGKSGKLAMVAGLNKFLRVYYGKVTELYRSLPAIE

SEQ ID NO: 496579 - protein, 370 aa, unidentified
MRESNTSTTWVGLDVHQNSITAAILTPGAMRPTVQQLPGDLNAARRLFRRLGSTGPVRACYEASGAGFILQRTLTRDGFHCEVIAPSLMPRKPGDLRKTDRLDAIRLVELYRSGLLTPVAVPGEEQEALRQLVRSRLALISHGTRLKHRIVHVLATHGHRFTGSKSNWTQTHRRWLQDLRVELTGPLRMVLGLHLDHLEYLESQIRTLDAEMERLAQQPGLRERAEALCCFRGIQTLTAMTILTEIGDIRRFAAPRQLMAYCGLIPSERSSGDVQRRGPITKSGNTHLRRVLVESAWHYRHRTGAQLRLTRQRQGQPAAVVAAAVKAQHRLGRRFWHLAQTKHVNKAVTAVARELCGFLWSALMALEAGC

SEQ ID NO: 496580 - protein, 473 aa, unidentified
MKEHKKTKAKTKSQATQALREPEPNAAGIDLGAEEIWVAVPAERDQNPVRRFEAFTQDLMAIVQWLIGCGVRSVAMEATGLYWIPLYQLLEDAGLKVCLVNARHVKNVPGRKSDVRDCQWLQYLHSVGLLLGWFRPAQAICATRSIYRYRQNLISMATEHVQHMQGALDQMNIKLHYVIDDLTGFTGQAIIEAILSGHRDPAQLAKLRDKRIQASEEKIIKSLQGDWRKEHLFVLAKAWAQYQEVQKQIQDCDRELLQYTQELEACTTVVKPLKMMCLRPELMGSEPLNLPIKKRPRKKTSKNQPQGPWHQELERFFGTDLTLIPGISVLTGLTLMTELGNDLRAFKTQHHFASWLCLCPDNETSASKVLRRRTRRSQNRVRQALRMAASSLHHDKSYLGDKYRRLRARLSPPKAVTAMAHQLARIIWTLVTRKVPFDMSLFSKQETLNDQRRLKRLAASARHLGYQLTPLAA

SEQ ID NO: 496581 - protein, 423 aa, unidentified
MDVLYERVAGLDVHKETVVACVRTMIDGKATRECRTFATTTEQLMELRAWLEECRCTHVAMEATGVYWMPVFRILDEGGFELILANAAHIKNVPGRKTDMNDAMWLADLLACGLIKASFIPNEEMQELRALTRTRKQLVREQTRHVQRIDKTLAEANIKLSSVLSDIMGASGRRMIEAMIRGVRQPRQLAELAGKQIKATPKELYDALHGRLTDHHRFLLELHLKQWDSLDETIRKIDLEIDQRIARTDAKVGGSQIPFRTLIELLSTVPGVSVVAAPAILSEIGPDMSRFPTAGHLVAWAGLCPSQNESAGKRKSSRLRKGAPWLKTMLVQCAWAAKRKKDSYYRAQFFRLQSRRGPQKAICAVAASILTAIYHILTDGTEHHDLGATYFDRRPVELKVNHLVARLKKLGFTVQLQPIAQAA

SEQ ID NO: 496582 - protein, 403 aa, unidentified
MNSVGIDISKGRSTIVVMRPFGEVVISPFEVRHTGSELSELARQLKSLDGETRVVMEATGNYHASVAKLLHDAGLYVSVVNAKLVHDYGNNELRRVKTDRKDAVKLANYGLDRWLTLPRYIPEEDTRLLLKNCYRQYRQYSKVQTVLKNNLISLLDTVFPNANRLFSSPIRGDGSEKWVDFVAEFWHCRCVSEKSERAFTSKYLRWCRKHGYNFSEAKAHTIYAEASGHIGVMPKSETTKLLVEQAVSQLRATSTALAALKHEMQSLASQLPEYPVVMGMFGVGPTLGPQLIAEIGDVRRFYSKKALVAYAGLDAPPNDSGDVTGRHKSMSKIGASSLRRTLFLVMSVYLQTAPLDEPVYQFMDRKRAEGKPYRVYMMASANKFLRIYYATVKAYLESLEHTA

SEQ ID NO: 496583 - protein, 353 aa, unidentified
MKKIVKQAVGIDVAQDELVVCMGRMYEDLTLELYSHKTFGNTAKGFELLTNWVSKLSNADVELIYVMEATGVYHESLAYYLSDQGDRLSIVLPNKISNYSRTLDVKTVTDKTASEAITRFGLERKLDNWEPPKGVYRSLRQLTRERDQVVVTRTIAKNQLHAEEAEAYPNKKSIARTKKLIAFLDKQEQEIKEELAQMIKEDEEVKRIVVLLCSLPGIGLLTAATILGETNGFDLIRNKRQLASYAGLDVKEKQSGTSVKGKPRISKKGNRYLRKAMHLPALTAIRHDERFKAIFARIVSKHGIKMKAAVAIQRKLLEIAYTLYKRQEKYDSQYLNKSEDKIAVEITELSIKN

SEQ ID NO: 496584 - protein, 344 aa, unidentified
MTTAPTIVGIDLGKNWFHLIGLDRHGATVLRKKSNRAQLAAYAATTPTCVVAMESCPGSQYWGRVFTQAGHEVRILPAQFVKPYLKANKNDFNDAAAIAEAGGRASMRCVPLKTTEQLELQAVHRVRRRVIVERTAVINQMRALLLEHGIVVPLGRALFARRLPAIFEEAEHKLSPRLVALLHRMRQRWLTIDVEITHATRDLTDWADQSDLCRRAVTVPGIGPLIATAVVAAVGNGRMFSGGRDMAAWLGLVPRQYSTGGTPTLGRISKRGNTYLRELFIQGAQSSFLYLKRDQSSLGKWLRQVETRRHRQVAVVALANKMVRICWKVLTSEQVYAPYPARVT

SEQ ID NO: 496585 - protein, 354 aa, unidentified
MDIKYIGMDIHKETISIAVMNGEGKVVMESIIETKASTILQCIQGVHGDLHVTFEEGTWAAWLYDLLKPHITKLVVCDPRKNALLKEGNKSDKIDARKLADLLRGGYLRSVYHGENGLRTLKELARSYLTISKDLTRVMNRVKALYRSWAIPCEGQQVYAPRHRAEWLNKIGEAGVRRRAEFFYQQLDALRELRQAVRQDLLAESRKHSATRLLRQIPSIGPIRSALLIALIQTPHRFRTKRQLWTYSGLAIDTRNSAQYRYVDGQLQRSKKPQQLRGLNQNHNHDMKAIFKSAASMASCREGAFHDFYQGLLTKGMEPAMARITLARKIAAITLIVWKKAAHFDAEQLKPQAA

SEQ ID NO: 496586 - protein, 427 aa, unidentified
MISAVREKCAGLDVHRDFVMVCLMWGPAQGEAQFELQKFGTTVPELERLQEWLQSRGCQDVVAESTGAYWEVVQDVLESTCHFCLANPQEVKSRRGHKTDKKDAWWLAHLYRHDMIRASYLPARPVRELRMLTRRRRELVRDAAQEKNRVQKLMEQSHIKLRSVLSDVFGASGAAILEALLDGEQDPQRLADLAKGSLRKKKTQIAAALTGLEIPEVHRFLIRQALEHLAVMVEQVDDVQAWIRRHIREEPEFAKSAELLESIPGINEVSAAETVAEVGPNVKAFPSAAHLSSWAGVCPGNAESGGKARHCPTTKGNPYLRATLNQSAWASSHQKESEFQRRYQHLSPRLRHKGAIIAVAHALVYAIYNVLNYQRPYQQVAGSELGQAQAVRLIRHHQRRIQYLSAFLKQRPKPDLAYTLSKLQPEG

SEQ ID NO: 496587 - protein, 357 aa, unidentified
MNPVIGLDVSKGESHAQAFLDRGVPHGKIFRFNHDLEGLASFLNYMRGVESAAGIRPSIVMEATGHYHSPVVQFLDEHQYLNIVINPLISHNAKKTNLRRLKTDAADAHLLGTLFYKEEFEPYKKRGQHLMNLRYLTRQHESLTGMYVQAKLQFQAILDQVFPEYHGVFGDLYSKVSLRFLALHPTSKEVLEMSELEITTAIGRLTGRGRSVSWCLERAQILGAAAKRNPFKETAFSSHLISIQLLIKLLLQYQDHLADLNKSIEALAEELLEYDLIQSIPGIGTKIAATILAEIGEIDRFDHAKKLVAFAGVDPSVFSSGKFVATQIKSLSMAPEDFVLPYIKLYDVVFVVIEIRN

SEQ ID NO: 496588 - protein, 423 aa, unidentified
MDQDTTYVAFDTSKETLAVGIAKGGRRREVRFFGTIASRPEAVRKLVEKLARQHHRLAFCYEAGPTGYGLYRQIRAMGYDCQVVAPSMVPVRPGGHIKTDRRDATTLAALFRAGELTAIWVPDAAHEAMRDLSRGRQAAMEGLRRARQQLLSFLLRHGRVYPTRSHWSRAHRRWLSEQRFDHAAQQIVFEELIQAVEQAQSRRDRLEQQMAALPPSWSLREVVAALQALRGVALLSAITLMAEIGDFRRFTNPRELMAWLGLVPREHSSGATTVRGAITKPATGAPDAYWSRAPGPTGCRRASVSNSFAATGLCPRRSRMSPGKPRSGCAPATGASCAPASRPVSSPSPSRGSSPPSYGPSPPPSCRRSSRQPDKPPSTVKEIDPNNHYAAHRRVRWPVRATLAVIPRAKPAFAPLETEEGPR

SEQ ID NO: 496589 - protein, 420 aa, unidentified
MAFKIFRFNCCGLDVHKTWIFACIGLTDANGRTEYKEKRFSSFSRGLRELAAWLASYKCTDVCMESTGKYWIPVFNVLEKTCNVILAHPKYTKPQKGNKTDRKDAKWICDLFMCEMIKPSFIPPAEIRHLRDLVRYRSKLTNMLTGEKNRAQNCLTVSNLKLDDVFSDVFGKSSRSITEYILAHPGEAFDVTPFVDKRCKTPIEEIQAAVDGAVSPEQAIKLRQCLDHIDELEKHKAEMEREILRVSNPYLDALELIRTVPGLDKNPFTAIQILSEIGGDMSVFPTDKHLVSWAGCCPRNDQSNFKIKSTRISRAGSYLKPVLVQVANALIKSKKHPEITERYRRIKSHRGHKKAIISICRLLLTAIWYILTDLKPYSAEGYLAPRPVKEDKVLTTSQALSLLKLRGYIIKDNDSPSTAC

SEQ ID NO: 496590 - protein, 339 aa, unidentified
MKYIPVGVDIAKHLMQVHFVDEHTGEIIDKQVKREKFLEYFSNREPCLIGMEACGGSHHWARELQKLGHKVRLLKGRFVKAFVMGNKNDVMDARAIWLAVQQPVKSVAVKSEEQQATLGLHRMRQQLVKFRTAQINALHGLLLEFGETTHKGRAALAKEVPEALERLKERLPLYLINMLDEQYLRITELDEHLDHIEKQLQAVARQNETCQRLLNIPGVGPLIATAAVATMGDASAFKSGREFAAFIGLVPRQTGSGGKIRLLGISKRGDKYLRTLFIHGARAAALLTKEPGPWITELKKRRPASVAIVAMANKLARTVWAIAAHGRKYDKNHVSIRPD

SEQ ID NO: 496591 - protein, 310 aa, unidentified
MDMIAVGIDVSKDRLDVAVRPNGEVFAVERKATGLDELIVRLRELGPQLVALEATGGYETIAAAALASAGLPVVIVNPAQVRAFAKALGQRAKTDPIDAAVIAHFAEATRPEVRPLPDEATQMLADLVARRRQIVEMIVAERQREKRMTRPHLQADIARLIKTLEKELSKLDREIDDVVRGSPAWREREDLLASVPSVGPVIARTLIADLPELGTLSRRQVAALVGLAPFTRQSGQWRGRSFIGGGRKTVRTVLFMGAVVAMRFNPVLRAFFLRLVDAGKPKMVALIAVARKLLTILNAMVRDNRRWQNA

SEQ ID NO: 496592 - protein, 407 aa, unidentified
MVPTSVLRGLATNNSQCHNIKGITLLLTGSEIDMTQSNILFIGMDVHKESIVISLADDDRSEVRRYGSIGGTLDDFKKMLRKLVSTGKDLFFCYEAGPCGYELHRYICSQGHQCIVVAPSLIPKKAGDKVKTDKRDADNLARLLRSGDLTSVYVPNAEDEAIRDLSRGREDAVLALNSAKQRLKSFLLRHNIRFNGTANWSEKHLRWLAEDVNMSYPAQKVVFQEYVNTITEANERVKRLDKEILFHTKQWRLYPVVVSLMALRGVRMVVAVTIMAELGDLTRFDNPKQLMSFLGLTPCEYSSGEKQKKGAITKTGNQHARRVLVEAGWAYRFPAKVSKEMQKRQENIPLPIRDIAWKAQLRLTKRFRTMASNGKLNNVIVVAMAREIAAFMWDIAHHVPISPAEQS

SEQ ID NO: 496593 - protein, 412 aa, unidentified
MKQVLDPVAGLDVHRDNVVAAVRTVGSDGEITFTKRKFPTTRRGVKELAAFLTEAEAFRVAMEATGVYWKSVYYSLEGIFAELWLCNAQHVKNVPGRKTDLSDAEWLADVAAHGMVRPSFVPPPEIRELRELTRYRKTQIDARAKEIQRLEKTLQDAGIKITSVASGVWSLSSRRIVEALIAGERNPGVLASLAVGKLRPKKAQLEEALDGWFGAHNAFVCRQVIDHIDFLDDSIAKLSEEIAARLLPFEAAVSLVCSVTGIGEASAQAIIAETGVDMSRFPTAGHLCAWAGVAPASHESAGKKRPAGTRHGSTWLRRVLIEVARAAARTKGSYFTAQYSRIARRRGSNKAAVAVANSMLAVIWYVLTNGCFYEDPGADYFERRHDPAVEAKRLQARIEKLGFDVTISPKAA

SEQ ID NO: 496594 - protein, 391 aa, unidentified
MIYVGIDVAKDKHDCFITNSDGEVLFKAFTITNNLDGFNDLYQKIETVMKDITKVKVGLEATGHYSYNLLGYLIDKGLPTYVINPLHTNLYRKSLSLRQTKTDKVDARTIASILMSDVNLKSYSDISYHNEELKSLTRYRFDKVKERAKLKSSVSRLICILFPELEKLVPTLHMVSVYALLSEFPGAKQVANAHLTRLTNLLSEASKGRYSKDTAITFRDAARTSIGSNMPAKSLELKHTIKLIKELDSEIDEIENEIKIIMDEINSPILSIPGINYRMGAMIIAEIGDFSRFDSPDKILAYAGFSPSTYQSGHLYGAYAHMEKRGSRYLRYALYNAAKYVCHWDPTFTAYLAKKRAEGKHYNVAISHAVKKLIRVIYHLEKTNQQYIKAS

SEQ ID NO: 496595 - protein, 428 aa, unidentified
MSYKIAGIDVHKKVLAVVVSDVEIESEYQFERRMFSSNPEQLRSLAAWLVEQEAEEVVMESTAQYWKPVWEALERYWKPIREKREGARRKSGTLHLAQALSNRGRRGRKNDFRDAERLVKRLVAQELTLSFVPDAEQRLWRTVTRKKYQLRRAVVRIHNQLEALLEEAHIKLSSLVSDLLGVSARRMLKALADGETNPAALAVLAHERLRATPEQLCDALGACTELKPVYRRLLKMTLEHLQILEQQIGQLDQELATLLHPHQDAVQRLAEIPGFAVDSAQQIIAEVGPAAATFPSEKCLSSWVGACPGEEETAGVNYSHRSPKGNRHMRRLLNQTANAAVKAKGSIFEIVYRRCVPRLGHNQAIGAIAHRQCRLIWLILHQGARYEERGPAVSKQSRYQRTWRMIRQLRNLGYRIELPNPQASQAQA

SEQ ID NO: 496596 - protein, 313 aa, unidentified
MMSEVFVGIDVSKESLDVFIDASALALHVTYNDEGLQTVLKQVQAATPTLIVLEATGGLETRLACELGAAGLPLAVINPRQARDFAKATGKLAKTDRVDAQVLAAFAKAIRPQVRPIKDEETRTLDELVSRRRQLIAMRVQETLRLPTASSKPMLKSLKAHIAWLQKRIDDVDIDLTHRLRTSDLWRTKDDLLRQIPGVGAVTTTTLLAKCPELGSLDRRQIAALVGVAPLANDSGKHRGKRFVWGGRADVRAVLYMAAVTAMRCNAVIKAFAQRLKQAGKPPKVVIVACMRKLLTIMNAMVKYNTPWNPKVA

SEQ ID NO: 496597 - protein, 346 aa, unidentified
MMIIGCDFHPSWQQVSWLDTETGETGEQKLVQASGDAERFYRQVAAPALIGMEATGNCHWLVDLLAELGHELWVGDAAQIRASYVRQQKTDKRDAAHILKLLVEGRFPRIWMPSSEVRDLRQLLLHRYKLVIMRARVKNELQHLCLNKGVQRKHKLWSQAGQQILRELPLKPWAGRRRDDLLKLMAMLDQQIEPLDQAVKAEAQRDKMALLLQTQPGVGPITALAYVLTMGDVNRFPRGKQVASYLGLIPREHSSGGRQKLGAITKQGNRMLRMLLVEAAQAAVRYDPQFRKEYLHRCHQKPKAVAKVAAARKLAVRLYWMLRTQRPYPEIVRIESSLRVPLVGAS

SEQ ID NO: 496598 - protein, 340 aa, unidentified
MEDVAVVGVDLAKSVFQVHGIDAQGQVVVRRRLSRLKLLAFFERLPRCLVGMETCASANYWARELMGLGHQVRLMPPQYVKPYVKRSKNDASDAEAICEAVTRPTMRFVGVKSSEQQSVLVLHRTRLVLTRQRTQIGNAIRAHLAEFGIVAPVGRLGFDRLVTVIADEDDERVPALARACLAMLVEQHRLVLSHMLETDRAIRMHSRSSELGRRLQDIPGVGPLVASALMATVPDPHVFKNGRGLSAWLGLVPRQNSSGGKERLGGITKAGDTYLRKMLFVGAMAVIRHAERYGTRKPWLIKLLSRRHPRIAAIALANKIGRIAWALMTSGERYREPVIA

SEQ ID NO: 496599 - protein, 402 aa, unidentified
MTVGVDTGKCRHQAAAYDPDAERIVGQVGFTVDRAGFDQFRRFLEGLGPVPGQIVIGLEATGHYHLTLVEYLADLGYHVALLNPLQAAQFRRSQGKRAKTDRLDAQALARFLVARAPRPQPVRSPTLVALRELTRFRADLVDQRTAVLHQLIGAVDLSFPELPRLLHDLRGRTGLTLLAQYPTASAIAAADPQRLTELLHDASRGHFGSARVARLMDTARTSVALRQAAEVVALKIRSLVRQVTMLDQEIADLELVIAEHFSQLGYRPADFPAGGIVTLATLVAEAGPVDRYPTAKHLVAYFGWCPVDRQSGSYKDPHPRLSQAGNRYVRRILWMLAIHVISRPGPYQEYFQRRTAIGKRKMDSIVAVGRKLLTTIYAILKTGRPYDPTFSSARSHQAPAAA

SEQ ID NO: 496600 - protein, 355 aa, unidentified
MDSAKYIGLDVHKESISIAVLNAAGKIVMECVIETKAITVRQFLGGLRGELHVTFEEGTWAAWLYDLIQPHVTEVVVCDPRQNALLNTGNKSDRIDARKLAELLYLNKLKSVYHGEHGVRALKELVRSYLTISKDTARVMTRVKALYRSWAIPCTGKQVYAPQHRAEWLAKITEPGVRRRAEFYYQQLDALRSLRQQVRRELLRESQKHTAWKLLCQIPSIGPIRAAVLIGILQTPHRFRSKRLLWTFSGFGIETHSSGDYRSVEGQLRRTNRPVSVRGLNANHNHDLKNLFKGAAVVAAHKPGPLQEFYTALLAKGIRPEMARLTLARKIAAITLHLWKKGARFDAQYLKPQAA

SEQ ID NO: 496601 - protein, 415 aa, unidentified
MEHTYQVAGIDVHTSMLEVVISDAARKGEFRFRGRKFGTTASEVRALREWFQQQGVREAAMESTAQYWKPVWQELEGSCELVLAQAFSNRAPRGRKRDFADAERLLRRHVAGELIVSFVPDPQQRLWRTLTRGRHQLTRDRVRLHSQVESLLEDARIKLSGCVSDLLGVSSRRMLHGLAKGERDAAVLAAMADPGLRASAEQLQDALRAAATMNPMHRELLGLFLTRLELIERQIETLKGYIATALSGHEDAVQRLAEVPGYGIDSVQQVIAEVGASAATFASPGELASWVGVCPGREESAEISKNNRSPKGNCMMRRVLNQVANAAVKSKGSAFQNLYRRLVPRLGHNKAIWAVAHRLCRLTWKILHQAARYIEYGERTNPKAVRKRANKLLRDLKALGYRVQITPSNPAVPEV

SEQ ID NO: 496602 - protein, 388 aa, unidentified
MLQPLDASKSLTAFEQDSTVIAVIEMSQSKWLVAAVVPGIERQPLKKIEANEETLLKVLHRWRAEAGQAGRVIKRVAIAYEAGRDGFWLARWLRARNIEAYVIHPASIAVSREHRRAKTDRLDTELLMRTFLGWLRGEKRHCSVVAIPTVAEEDARRPNRERENLVTERTRIVNRMKATLTRFGIRNFKPTLRKAAEKLDNLRTAEAMPLPENTRAELRRHLARLRVVREQIREIEHERLRMLKAAPVTEKGPHAMVRLLARVLSVGIETADMPVNEVLSRHLRDHRAVARYAGLTGSPDESGRRRREKGLARAGNARVRCGMIQLAWRFLRFQKDSALAKWFDARTADGRAGTRKTMIVALARKLLIALWRLVTTGEVPQGVVLRPA

SEQ ID NO: 496603 - protein, 388 aa, unidentified
MYYVGIDIAKYKHDCYICTSEGVTVLESFSFDNSNTGFKELQSALDHLDHSQQIKIGLEATGIYGKNLKLFLSSIGYDFHEFNPLLVKRFHDSLSNRKTKTDKIDARIIALYLSTGASRTYLYSSYHTQALKQLSRTRNKLIRSRSDQYVIITNVLDVEFPEFKAFFHNKLSDTALFLLNKYKTVDRMKRLTYQDCVLLHNKSRRIPTSSFEELRDLAKHTIGHHFNYNDLILSSALQIVNTLERQIESIEKEILAIMEELHSPIDTIPGISTLSAATILGEFGDFSKFSNPKQLCAFCGVEPAIYQSGTSFHNGRMVKHGSSELRYVLFNAVPYLVIHNITFREFFYKKLHEGKNYRVAQSHVVKKLLRMIYHLELTGESFDPTLLY

SEQ ID NO: 496604 - protein, 380 aa, unidentified
MDSSRSLGIMVPARVYGGLEHNEWKESEMNATTVAVDLAKNVFELAVADEQWRVAERHRLTRTQFERWFNNREVKLVVMEACSSAHHWGRVLRARGIEVRLLPPQYVRAYVKRNKTDAADAAALLEAARAADIKPVAVKSVEQQALQALHRTRSGWMASRTGRINMLRGFCREFGLVVPEGAARGLAQIARFLADERSGLPGMLRGSMRLLLEEIRLMEARIQQLELDLVELAQQSPACQVLQSVPGIGLLTSTAMVAAVGDPRSFDSGRRYASFLGLTPREFSSGGHRYLGRISKRGDRYIRMLLTHGARSVLRAATVARRCGRQLDRLRNWALAVQARTNHNKATCALANKLARIAWAVWVKHEKYQTEPAFTAQPGA

SEQ ID NO: 496605 - protein, 355 aa, unidentified
MNKIKYIGLDVHQASISAAVRDETGKLVMQTVMATRAAAIAEFLDGLRGTLHVTFEEGTYSAWLYDLLVRRVSKVVVCNPRKNALLKTGNKSDRIDALKLSELLRGDMLSPVYHGENSTRTLQELARSYQALTQDTTRVMSRLKAIYRGLAIPSGGKKLYSQRHRQQWLDQLQQPGTRRRADRLYEQMDFLQSLRRKAKQELMVESRKHSVCARLRSIPYLGPIRAAVLVARMQTPHRFRSKRQFWGYCGLGLETRSSANYQQLDGHLQRSHKKVLIRGLNVDHNHDLKNVFKGAALSASIFPGPLQEFYQERLAGGMKAEMAQLTLARKMAAIALTIWKKGERFDPSKLKAQAA

SEQ ID NO: 496606 - protein, 312 aa, unidentified
MATSSYVGIDVSKDRLDVAMLGEERVWQVNNTPEGIDALVQQMHHVCPELIVVEATGGYQRAVVEALFLAGLAVTVVNPARVRQFARACGLLAKTDKLDAQVLAVFGQKVQPMRYEGKSEAGRQLSALLVRRRQLDEMLKAEQNRLRTISQSLRYSVERIIACLKEEKKTLDVQIQQFMAEQESWQEQTEILGSAPGVGMVTTATLLAELPELGKLDRKKIAALVGVAPMNFDSGRKRGYRKTKGGRADVRSVLYMSTLVATRYNPVIRAQYQQLLKRGKEKKVALTACMRKFLTILNAMLRDRQLFCCAIA

SEQ ID NO: 496607 - protein, 379 aa, unidentified
MDHAITDTPAETILHGALELSKNTWLLALQLPDRTQPSLYPIGGGDTETLMAKLMAARDRWTKMSGKAPSIVLCYEAGYDAFWLARFLKARGIECLVVDAASMQVNRRARRAKTDRIDVGMLLRALIKWGQGDHHVWSVVRVPGVDEEDLRRSHRERDRLVCERTAHINRIKGLLFGQGIRDIKVKSKYKTLQIDKLVTGDGRPLPPRLASEITREIARLALIQEQLAALDRERDQAPTPCKVTEKKRVQLMSLTGIGPAIAAVMTREVYYRQFDNRRQVAGFLGLATSPHDSGDVERSQGISRAGRGQVRGIIIQAAWLWLKHQPKSALTRWFVRRTVGQSGRIRRIMIVAVARKLAIALWRFLEQGLVPQGAMLASR

SEQ ID NO: 496608 - protein, 355 aa, unidentified
MTQNTYLPKDYDTFIGIDVDKSSFAFTVKDHGVMNRAKKIPANPENLYNYIQKHFAHERVLCAYEAGPTGFHLHDYLTQQGQPCFIVSPLSIPKAKNDKVKNNRIDSEKLSTYLRTGELKAIRVPYGPYRELRHLINMRENYVYNRKSAKQRIKALLLSDYLYPALKDVEQNWSNNYIQHLKKISCTPAARQRLDMLIMDLDYARQQTLSILKQLRVFNEAFPEIKRNVEYLQSIPGIGFIIAISILGRIGNPQNLRNVREIAAFAGIVPTERSTGDTINQGSITHLGNRNLRCLLIEAAWVAIRKDTELYQFYCRIKARHHPRIAARKAIVAVARKLTQRIYKILKEQRIYTMH

SEQ ID NO: 496609 - protein, 382 aa, unidentified
MLRKNIVQTLDAATSWKVFGLDLAKHDLAVVAIPADGSEVQYVKRYSYADFLEFTAQIPSATMVFEPGNGANHFALRLQAQGHTPKMVSGASVKSWITLHMSGQKTDLNDAYALARLSEDPDLKTVRIKSVDQNRLQSLQAMRKQLVEQRTKTIVSIKGIFQCWGILFKKDSRSLKKFKEAANNNKELLGEEVVEAMILQIDRIADLDKDIKHVEELLKKVTMQDPRAQPMLDIPCVGLQTVSRLCAIMGDIKDFETPRSFVAFIGLVPKNMISGNKTTTPSGYEQVGQGKVNRRGDKMARSLIIQCASSMYMNFHKDNFPECALKDWIQKQKDAHKPYGKIMVSLAAKLLRIIYAVLKHGEAFSYEKAGISRSALAALLRD

SEQ ID NO: 496610 - protein, 345 aa, unidentified
MKHYAGLDVSVKETSLCILDETGKVCRELKVTSHPDDLVQVLRDPAWRLERVGLEAGPLSQWLYSGLAAAGLPVICIETRHAKAFLKAQVNKTDRNDARGIAQMMRVNLFRPVHVKTLASQHRRTLLTARKLLQENAIAIENDIRGLLRNFGLKVGIIGKVRFEDRIRELVAGLPELAEIMACLLEARQSLRERFATLHRKVLATVRDDDVCRRLMTIPGVGPVVSLAFSATIDIPARFKNSKAVGPALGLTPVLNQSGESNRIGRVSLCGDAMMRALLYEAAQVLLTRVQKWSWLKAWAMAVARRRGLQKAIVALARRLAVIMHRLWSDGTEFRWTKEGAVATA

SEQ ID NO: 496611 - protein, 360 aa, unidentified
MDKHKYVALDVDSANIVAGVYDRKGVALMQCCLRNNGQVISEFFKTMTGTVHVTFEEGTQAVWLYELIRPLVAEVIVCNPRQNKLLKAGNKSDRIDVAKLGKLLRLGELRPVYQGPSAAQGLKQLVHGYEALVDDTTRVKNRLKALYRGRGLSCKGETIYGREQRQQWLLQLETKEMQRRASYLFEELDCVLRLRAEAEKVMCRAARKHEAYKWISSAPGLGAIRTAQTLATAITPHRFRGKRQFWPYCGLAVVTRSSSDYEWVDGGARRKRKPIQTRGLNQNYNRTMKAVFKGAALSALQQHPEFQEYYHRLCAQGTRPEMARLTVARKLAAIVLILWKKGERYDSERLNQAAPGSDQQ

SEQ ID NO: 496612 - protein, 363 aa, unidentified
MYDSTTVTVGLDVHARSIRLAAVRADELLEERTLPYDEDAVERALRRWPRVRCCYEAGPTGFGLYRHLSERGIECAVVAPGLVPQRPGDRVKTDPRDARKLARLLAGGLLEPIHVPSPELEAARDLVRAREDARLDRMRDRHRLSKFCLRHGRLLPGSSWSVSRRIWLSQQRFAFAAEQLTFDTYLHAVDLVDARIAALERAIAETAAQGPWSALVAHLRCLRGVDTLTALGIVAEIGDFGRFKTAEEFMAFVGLVPSEHSSGERRRQGSITKVGNSHVRRLLVESAWHARRRPKVGYELARRQRGQDALVLERAWRCQERLYKRWQRMAGRGKPSQKIAVACARELAGFVWAIATEQPLRTT

SEQ ID NO: 496613 - protein, 392 aa, unidentified
MIYAGVDIAKMDHVIGAVDEAGAEAAKPMKFKNSEAGFERCIAWLESVADSEDEVFVGMEATGHYWKACFAYLMAAGYKVCAVNPMQVHAMRKLKSLAGVKNDRIDSWLIAETLRQGDYDETRLATDEVQALKQLTRYHQGLKQELATVKTQAICVLDAYFPEYASLFSDMFGAASLKVLSECPTPSEVARKRTSSIAKLLSEGSRGRLGADKAAQVKAAAKSSVGIKLGEDAASFQIKTMVSQVEFLNRTIAKVEREVASLLERVEPNITTIPGVSTTTGAQIVAEIGDVRRFKNAASIVKYAGLNSGVDESGKYAAEGVPITKHGSPYLRRSLWLAASRARQYDPKLKDYYDKLRRRGKPHRVAVTAVARKLCHVVYAVMRDGEPYDQAK

SEQ ID NO: 496614 - protein, 389 aa, unidentified
MKIYVGIDIAKLNHFAAAISSDGEIIIEPFKFTNDADGFQLLVSKLESFDKNSLIIGLESTAHYGDNLVRYLVTELYQVCVLNPIKTCQMRKNNVRKTKTDKVDTYVIAKTLMMQDNLRFVSFFDLDMMDLKALGRFRQKTIKQRTRLKIQLTTYVDQVFPEIQYFFKSGLHQHAVYALLKEAPSPKEIASMHMTHLANLLKVNSHGHFTKEQAKELRVLAQKSVGANDSAISIQITQTIQQIELLDSQLEKIEAEMTDIMKFNDSVIMTIPGIGYINGGMILGEIGDIHRFSNPNKLLAFAGLDPSVYQSGNFQAKTTRMSKRGSRVLRYALVNAAWNVVRNNATFKAYYDAKRAEGRSHYNALGHCSGKLVRVIWKMLTDEVEFNLE

SEQ ID NO: 496615 - protein, 447 aa, unidentified
MNPVVGLDVAKGESQIQAFLDKKKPYQKSFKVDHTLEGLEKLHSFLSEVERITGGKPPLVMESTGHYHTPVVHYFEERGYLIIIVNPLVSYRAKSSSLRKVKTDIIDANHLCEMYYKEGLEPYKKRGIQLLNLRNLTRQHENITGIYVQTKLQFQAVLDQVFPVYRGVFGDLYSVVSLLTLLEFPTSQNILEAGEETVTNTIKELCPRRSIKWANTKAIALLAAASQNPFRENLYQSHILSMEMYIKMLLEYQKHLSKFEEEIDALAKDIEEYKIIQSIPGIGEKIAATIISEIGEIERFDHPKKLVAFAGIDPSIFESGKFRGTVNRITKRGSSRLRHTLYMAVRCAIRDCRKSKTTDELIPRNKRLREFYDRKREEGKPFKVAIIACANKLLQWIYALLKSRTTFQDLAWLLKCTNKCKTFQTTGLGRLFGMLIFSIPYYKILFH

SEQ ID NO: 496616 - protein, 433 aa, unidentified
MASRTYSKIIAFRRARRDNFYKERLVMEVVYRCCCGIDVHKKVIVACLVNGGEQELREFGTTTSEIKTLANWLTESGCEMIAMESTGVFWKPLYNLFELMDLDAMIVNAAHMKALPGRKTDVKDAEWIADLLRHGLLKASYIPNREQRELREITRYRKSLTEERCREVNRLQKILEGANIKLDSVVKDITGKSARKLLQRIIDDDIPDSDEVSKLVHGRMRPKLDQIVASIEGITTPLQRKLLAQIIDHIDDLNRRIGELDKLVQEYMAEYEAAIEAIDEIPGIARRSAEVILAEIGLDMGRFPSAAHLCSWAGVCPGNYQSAGRRKHGKTTKGNKALKTILTQCAKSAKTVKSSYFFAQYQRISARRGKNRATLAVAHSMLIAIYHILKNKTAFHDLGSDYYDSFNRERKINSYLKRLKALGWEPDAIPSSA

SEQ ID NO: 496617 - protein, 451 aa, unidentified
MPVMAVPERVEDEEHEQRLERVAAIDVAKASGKVCTRLPHESKAGKRVTLVWDLPATTNAICELAAHLVEQRIERVVLESTSDYWRPFLYVLQAAGLCVWLVNASDVKQVSGRPKTDKLDAVWLAKLNERGMLRPSFVPPVDIRRLRDYTRLRLDLTRDQTRHKQRMEKLLEDALIKLSTVATDIFGKSGRDMIEALIAGQRDPKQLADLARGRLRVKHAALVQALDGRFDDHHAELARILLDQVDGLDTQIRQLTATIDGLIAAMPAARGDHPAPTGTGGSASEQRPALSTIARLDEVPGIAEHTAQVIIAELGLDMTVFPTAAHLVSWTKLSPRTIQSGPRTRGGKTGKGNPYLKGVLGEAAAAAAKTNTFLGERYRRLVKRRGKLKALVAVARSILVIVWHLLTDPTARFRDLGPDFHTRRVNTDRKIRNLIHQLETLGHTVTLQPAT

SEQ ID NO: 496618 - protein, 344 aa, unidentified
MTIVEDRPAITGGVDTHSEVHVAAALDPVGGLLGTREFPATAAGYASLLGWLGKFGDVALVGVEGTGSYGAGLARYLAARGVRVVEVDRADRQDRRRKGKSDPLDAVSAARAAQSGRASGEPKGRDGAVEAIRALMVAKRSARNERTQAINQARALILTGPDELRAGFARTRAAALAEAIAALRPRPGDAAGYAVRTALRELGRRVEFLDAQIERLDDLIVPLVAVRAAGLLSLYGIGPDTAAMLLIAAGDHPGRLRSEAAWAHMCAVAPIPASSGKTRRHRLNRGGNREASHALWRIVITRMSAHPATRAYVKRRTAEGLSKKDIIRCLKRYVAREVYPCLRG

SEQ ID NO: 496619 - protein, 368 aa, unidentified
MLNTTTFVGLDVHARKIVAAALDAMTGEVRSATFGYDAAAVADWIRSVDPSAKCVYESGVTGFDLQKRLTGLGVDCAIGAVSKMIKPSADRRRKNDRNDAEFLARMLSVGNIVEVWVPDDECEAARDLVRALDDARDDLRRCKQRLSKFLLRHGLVFDETTPTGRRKGNWTAAHWAWIRSIEFSEKSDNDVLAYYIDAVRQATEGKKRLERLVEAEASKPRWKKRVDSLRCLKGVDIMTAADIVFEAGEFARFGNARAFAAWLGLVPSEHSSGEKIVQGGITKAGNRHLRRVMVEAAWHYNHCSAHSKDLSAGQAPDPAAMRHAAKGVRRLVERRRGLLGRGMQKNKANVATARELACWCWAVGCMAE

SEQ ID NO: 496620 - protein, 347 aa, unidentified
MIIVGIDAHSRSHAAAAIDEHGRLLEGIEVAAGVCELARLCAWIGALPQPRLVAIENARGYGLAIVRLLLAQGEELVDVPATLTCDGRRSSGQRGKHDQGDALVIARIGLRDQERLPRLDASVLDDELKLLVDARDQLIVEAGRWRNRAHALLRVAAPGYQAKTGAFASAGSVRRARAIARRATHHDPTRGRLAVQALDRLTALERDAGKLEREIRELLRARHCAHLLAICGVGPIVAAKILGETRGIGRFRNAAAYAAHTGTAPIPASSGRVHRHRLNRGGNRQLNRALYTIAMVQARWDPSARAYLERKLAEGKSAAEARRCLKRHLANVVYRALTADEHTLALT

SEQ ID NO: 496621 - protein, 343 aa, unidentified
MKKIVKQVLGIDVAQKELVACLGRMHDDWPPELYANKVFANTEKGMEALVLWVKKQTDQQISLRFVMEATGVYHEALAYFLEEKEYELSIVAPGKISNYMRTLEVKTITDKTSSQAITMFGLERKLDCWKKPKDSYRKLRQLTRERDQLVEERTMVKNQLHAEQTEAFPNKSSVKRIKDRIVILNRQEKEIKAELAVLIAQDDEIKKIVVIICSLPGIGLLTAAIVLGETNGFNLIRNRRQLASYAGFDVKEKQSGTSVKGKPRISKKGNKYLRKAMHLPALTAIRFDERFKAIFARLVSKHGIKMKAAVAVQRKLLEMVYTLYKTNNPYDRNYLKKNELVEA

SEQ ID NO: 496622 - protein, 367 aa, unidentified
MFHSDYTVGCDAHKHFSLFAVLDGKGDLVERTRIGHVPGAIGAFLSQYPEGTPVALETVGNWYWIVDEIEEADCIPLLAHAAKAKVMMGNIHKTDKLDAQGLATLLYLGKLPSVWIPPAEVRDERELPRTRMAFAKHRTMVKNRIRSTLAKYALSLDTASDIFAPKWRPELEAVLQKLPAETERCVRQQLQILDALNDHIQQLEDRIVDRIQTTPTLQLVQTVPGPAKVLAIVIDREVGSIDRFSAAKHFTSYCGLVPKLSASAGRAHYGRMVKQCNTYLKWAFIEAANVIVAHRHAPNWRHKYVVHLYERTRRRKGHSVAVGATARYLAESTYWVLKKSEPYREPPHWAPAGMNSPVSLSQGQARA

SEQ ID NO: 496623 - protein, 341 aa, unidentified
MPKVTIFVGLDYHKESIQVCVMDHAGTVLCNRSCGNDVPEVARLVACYGDDVRGAIEACNGAADLADELIAGHGWDLSLAHPGYVNRMKQSPDKSDYSDAKMLADLVRVGYLPKVWLAPEAIRQLRTLVRYRQQLVHERRAVKLRITALLRDARVEEPPGRRWGRAWREWLKTTAALGSEARWVVDQHCANLQRLDEALLAAEVRLAQVTAEDPIVAQLRTYAGVGPVTAWVLRAEIGRFDRFRSGKQLARSCGLSPRNASSGPRQADAGLIKAGNELVRATVLEAAHRLIRYDARWKGLATTLRAAGKPACVVAAAVGNRWVRWLYHQIRGGPLVQPSAA

SEQ ID NO: 496624 - protein, 326 aa, unidentified
MHTHFLGIDIAKSKFDCALIRPDGKVRNKVLTNNAQGFAQLLAWLDAHGVPSSELAQLHVCMEATGIYWEALAEFLCDQAIAVSVINPAQIKAYGASRLMRSKTDKIDANLIANFAKERTPAPWTAPAPHERVLRSLVLRLEALQNMLTQESNRLQVANLAVQPQIQNHIDWLNAEIKALAKLIKDHIDKHPDLSQKRDLLDSIPGIGERTQAIMLAYFGCAEQFDNARKAVAFVGLDPRQHESGSSVKGKPRMSKVGHAFVRKALYMPAMTALYKTEWGKRFRERLANAGKPPKLIIGAMMRKLVQVAVGVLKSNKPFNSALHCA

SEQ ID NO: 496625 - protein, 403 aa, unidentified
MSTTASTSSGEEATIKYVCGIDIGSQSCSGCICRPDKSVVVKPMTFANASEGWQVLVEKLTRLDAAPSQIVIGMEATSRYHENLYHELEQRGYQMRLLHPGQTHHYHQQQGLRAKTDRLDAMTIARVLLSGEARVGYIPGEQVATYRELVRLHTQLSEEAARYQNQIQVLVVVLFPEFSQIFADPCGQGALAVLKAYPDAQAVAQAGVEAVYQVLRAVPAAHFGRPTAKKLVAAAQGSSSSGRAVSARASSLRILCDQLEHTEANLKRLEEELEQLITMDPSTKGLQQMPELGPKTVAVLRAELGEVDRFACTDQAVAYAGMDIEIKESGQWKGKARLSKRGSGLLRQILYLAALRSTHLEGSAFGAYYHHLVKRGLKKMSAMMAVMRKMVAVAHEMRNEIFN

SEQ ID NO: 496626 - protein, 366 aa, unidentified
MQTQRNTLELTGQNIYVGFDAHLKSWNVSIMVEDVFFKTFSQPACPLTLYKYLSRNFPNCTYHSAYEAGFSGFWAHYELTRLGVKSIVVNPSDIPTTGKEKVQKTDSRDSRKIVRSLRSGELKPIHIPSTQTINDRSLVRTRKTIVNDLCRYKNRIKSFLYFNGISYPEQFSKAGTHWSKRFMKWLFEIEFESTAKLSIDVLLTQATELRKQLLNVNRQIRILSKSERYNENVSLLLSVPGIGLTTAMTILTELENINRFHNLDELCGFIGLVPSTRDSGNKESIRNITPRGHHVMRKTIIESSWIAIRTDPVLCRSYYEYCKRMEPNKAIIRIAKKLISRIKFVLTEKQKYQHCIVKSNYKINQN

SEQ ID NO: 496627 - protein, 317 aa, unidentified
MEQRQTNTKIAGIDVGKSKLDGAVHGLEDTTQVGNAPAGFSELIAWLKAREVGRVGLEATGGYERGVRAALEAAGFEVVVHQPIEVRRFAQMKRRRAKTDRLDAQLIAAATAQVDAVRAAQDPRLQALAERLTAYEQIADQAAQLKAFLEHVTLTDVAKAIRAQIRAMATLKARLAAEILRQIKAHDDLLARYRLLVSLPGFGPIVAATHVIRMPELGQMRRGQAAALIGVAPFARDSGQYKGQRFISGGRSRPRRMLYLAALAAKRWDPHYKTFADQLIARGKPAKLAIVAVMRKLIEAANLVLSRGQPWLRRTAT

SEQ ID NO: 496628 - protein, 369 aa, unidentified
MPHVTSIGLDVHARSVAAAAFNPFTGEVVRRSFGTDASEIAEWALGFEEPRACYESGPTGFHMARELRELGLDCAVAAVSRMQRPAADSRRKNDRRDAEFIARMLATHNIVEVPLPDAAAEAARDLDRALDDATADYLRARQRLNMFLIRIGRVWDERNAGGTRKKAWTRAHWRWISETRLEGPQRDVLEHYVTAARCAESDKRQLERKVVALAGTDRWRPAVEALSCIKGIDTLTAFRLAAEAGSFSRFRSAPAFASWCGLTPSERSSGETERRGGMTKAGNRLVRTALIESAWHYSMCTPRPKVPAPGADVPAAIRSRADECTARLCRRREALSAAGKNACKANAAVARELACWVWEIGCRAEGTLG

SEQ ID NO: 496629 - protein, 418 aa, unidentified
MGGIREVAKVACGLDVHRSEVVACLITSGTRKRPKVEIRRFRTVLAELLQLRSWLVEAKCEVVGMEATGPYWKPIYAALEGHVQLVVGNPLQMKGLKGRKTDQKDAEWIADLTRLGMIKPSFVPPPEFRALRDLTRERRNVIHARTILRNQILKLLEGTGIKLASFISNVFGVTGMGLLRSLSQGQDVRALLPLLVKGSLRRKLTDLNLALEQPLPEHLRELLAIQLMRHDDLDHVVSHIEAMIETRMEPYQAERNLLIQIYGLGITAVNIILAEIGVDMNVFPTPAHLAAWAGVCPGNRETGGKRISGSTRKGNTYLTTILVECALATVRAKGSYFRSKYHHLRARIGHKRALMAIAHKLIRLIHRLLSRKEPYKDLGEAFLDMRDKTVKADKLSRRLQALGYRVTLEPLPDTGLIA

SEQ ID NO: 496630 - protein, 323 aa, unidentified
MTQNDRLVGLDVSKDWLDCHVLPGGEAWRVRNDAAGHTALIGRLAALGVRCAVLEASGGYEKAAASALRAAGLKVRVVDPKRVRYFAKAMGRAKNDRIDALVIAGFGQATADDRDTTIPPDARRETLSELLGVRQDLLEHRTALNHQARGLNADTARVLAGPLAACEQAIAALDGEIARAIAAHPPFAELARRLGSVPGLGPVAIAALIAWLPELGQLSRRKLAHLVGVAPFDDDSGQRKGVRVIKGGRTKLRNVLYMAAMVAATTACNPTLNAHYTALRAKGKEAKVAIIACLRRLLGMLSAMVARGQDWQPSTPATTARPV

SEQ ID NO: 496631 - protein, 375 aa, unidentified
MEHHSEAFVALDTAKLRNAVAIADAGRNGEIRYLGEFDNTEVGTRKLVAQLASKHARLTFCYEAGPTGYGLHRLIKSLGHDCMVVAPSLIPSKPGDRVKTNRRDAVNLAKLLRAGELTAVWVPDERHEAMRDLVRARDAAAKDYRIKRQNVSSLLLRVGRHYPGKKTWGRAHTNWLTSLKLEHREQRIAFEEMLLAVRQVRERIERLEQAMREAVADWTLAPVIEAVQAMRGIDTVGAIAFLAELGDLSRFENPRQLMAYLGLTPSERSTGESVKRGGITKAGNTRARRLLIEAAWSYRFPPRVSKDMQTRIGAAPRTAREIAWKAQMRLCGRFRILTRKGKRPTIVVTAIARELSAFIWAIGREVVGSHATANQ

SEQ ID NO: 496632 - protein, 405 aa, unidentified
MFMTPQACLEAGTEYPRYKLFVGFDVGKRFHAAHARTGSGRRVLALRVDNDEAAVDAFVARALEAAGCEPGACLVVVDQRRNIGTVVVRRALAAGCDVAYITGKGEKRARELFPGVAKNDAKDAEVIAAAAAGMPQSLLPVPREDDGLEGARRLRSQLAFSVKQSTQVKNRIRAALVESNAAFERLVDFSRPWQLDVLERLGGPWQVLDAGKGRLARVARGAGEEELAGLWESLSRATRPTEEQVRSEARTIPMLARRLRAIEADVDELSDLVAKEVEGDETYRCLLTVPGVGRSTAARLVAAVQVGAFAGNDKLASYCGLTPRDTRSGATISSTSPSPEGNRCLKNLLIFTCLSLVRSDNEFGRYYRACRSRGMRHTAALKATARKRLKVIYAVMRDVRPYEPR

SEQ ID NO: 496633 - protein, 317 aa, unidentified
MTATAAFVGIDIAKADFVVACRPEETSWTATNDLAGITAAVDRLRTLAPTLIVLEATGGYETALVAAFAAAALPVVVANPRQVRDFAKATGQLATTDHVDAQLLALFAERVHPTPRPVPDAALQQLEALMTRRRQLLDMVTAERNRLEHAAAPIRRDISQHLRWLERRVAAVDRDLDNTIQKSPVWRAKEDLLRTAPGVGPVVSRTLLAELPELGQLNRKQIAALVGVAPFARDSGTRRGKRAVWGGRASVRAVLYMSALVAARRNPVIGAFYRRLVAAGKPKKVALIACMRKLLTILNAMMRTNTMWHHTSQLESV

SEQ ID NO: 496634 - protein, 413 aa, unidentified
MDVWHSRCCGLDVHKSSISACILLREAGRVQKHQRRFGAMTQELQELAEWLRQFGVSQVAMESSGVYWKPVWNILEGQFTVVLANAQHIKNVPGRKTDQKDAEWIAQLLQYGLLRPSYVPCETIRDLRDLTRMRASLSQEVSRISSRIQKVLEDANVKLASVATNVLGKSGRAMLEDIICGEDDPEHLAALALGHLRVKIPQLRVALAGKIRSHHRFLLRRLVDQIQFAEHEIALLDERLEDIGRQRPELAQAVARWDTIPGIDRVAAWALLAEIGDNMSQFPTAEHLASWAALCPGNHESAGKRLRGTTRQGSPWLCRMACQCAWAAARTKNTYLSSQFRRLAARRGKKRASIAMAHTIIVMGYHLQKNQSNYEDLGGNYFDRIHSDGLKRYLVKRLQQLGHKVTLEPMEAA

SEQ ID NO: 496635 - protein, 410 aa, unidentified
MNSQDIQRYIALDIHKEYVMLGAMNAAQEWVIRPKRVEMIHFRSWAAKNLREGDAVVIETTTNVWDIYDIVAPLVTRAVVAHAGAVRQIAEARVKTDTEDIKRLLRLLIADIVPEVWVPPAHVRELRGVIAYRNRLVKTGAMIRNRLHSLLHRHNLPLSEGGLCDREWWEAQTLNTLEKLQVRQELVLLEKVEQNKAEVDKELGKMSVGATWGQSATRLLQLSGLGVVVTMTILGAIGDIHRFEDAKHLVGYAGLGAGIHQSGKERQEKGITKSGRKELRWALIEAAWKAVQMSPLWKQRYEELKKRKGPCKAIVAIARKLLVTIWHVLSKETTDCNASEEDLAWKMLLWSWSLGDEARLGLTPKQFAKYSLMRLGVQNDVTSFMRGKVLRRIAPAEEVLARMSELGLPG

SEQ ID NO: 496636 - protein, 329 aa, unidentified
MMSVQMGIDIAKDSFEIHLLNGDEAPESAGFDNNPSGFKKLRRFVKKRNVKQLHACMEATGHYGEALAEFLYEQGFEVSVVNPARIKAYGQSQLRRNKTDRLDAALIADFCRSQKPPLWTPPPPHWRELQGLVRHLADLEVDRQRQRNRLDALQHSASPSAIIQNNLQQQIQFLSEQIQQVKNNIQEHIDHHPDLKRERDLLVSIKGVGRLTAAKLMAEFRAITHFDDVRQLVAFAGLNPRHRQSGSSIKGRTRISKMGRASIRATLYMPAVVARQHNPILKSFADRLQQRGLNNMEIIVAVMRKLLHLAYGILKSGQPFDPHYLESQA

SEQ ID NO: 496637 - protein, 385 aa, unidentified
MAEAALSDSHPQSNGMDPFSPTGIVVPDCRCQSRVIEKKGSIMKLIRVGVDLAKNVFQLHGVDRNEHPVWRRRLSRAEWLEVLQESVGPGCEIGMEACAGSHHWARLLEAKGYRVKLIAPQFVKPYVKSNKNDANDAEAICEAMSRPSMRFVTIKSVDQQDIQAAHRIRSGLIEARTAKANQIRGLVSEYGLVAPKQIASLRTAIPDWLEDAENGLTGRFRCLLHGLWKDLQALDVRIGELDREIQQIARSVPAAQRLQQLRGIGPMIATALVAAVGRGEQFANGRQMAAALGLTPRQHSSGGKERLLGISKRGDSYLRMLLIQGARSALQTAHNKTDRLSQWITSLCARSHPNVATVALANKTVRIAWALLSRESDYQPDYVAA

SEQ ID NO: 496638 - protein, 354 aa, unidentified
MRKVKQLNFSDEIIYCGLDVHKTNWKVNARLSNLEVAAFSQDPNPERLKKHFENNFPGATLKVVYEAGFCGFGIQRSLTALGIGCIVVNAADVPSSDKDRKRKDDKRDARKLSMELSKGNLQGIYVPEIQMVHARSLVRQRHRLVQDQSRCTNRIKHLLMNQGLKTDDKQERWSLKYIKKLQQLDCGSETLKLTLRFLIEQYLQIRNIQKDITISIRELSKQEPFASVQKILQSIDGIGLISGMVIQTEIADINRFKKLDGLCDYAGFVPDIYSSNDKMTIRGISPRANEFLRETIIESSWMLIRKDPAMLMKYNEYKKRMNANKAIIRIGKHLLSRIRHLWKNGELYQRGIVG

SEQ ID NO: 496639 - protein, 360 aa, unidentified
MGNERTFVGLDVHARSVTGHALDAVTGEVWQRKLCPDPGEVLRWVSGLPGPVKVGYEAGPTGYGLYRCLNDHGTLCVVAAPSKLHRPHGDRVKTDARDAELLAHLLKLGEIVEVNVPSVEQEAARDLVRAREDARADLMRARHRVSKMLLRQGIVYSGGDAWTKVHDGWLRGQRFDQQSRQLAYDSAYEAMVLTVDRRDRLDRAIDEMAGKSSYTPVVRRLSCLRGISTLTGFALAVEIGDWQRFTGATIGAFVGLVPTESSSGQSRSQGSITKTGNTHARRLLVEAAWHHAKPYRVPGKTMRDRWELAPPAARLRGHEGNRRLHQRWQRFNARKKRPAVADVAIARELAGWAWSLAVLE

SEQ ID NO: 496640 - protein, 350 aa, unidentified
MPDPIHPTPVCLGIDIAKDSFEACVLHPGGRKSTKAFANAGEGFEAFLAWCARNDALAARFGVEATGPYALELLYFLAQHAPQMHIALLNPRHVKDYGRSLGRRVKTDRVDAEIVARFIQAVPPRRWTPPPAQSSELQSLVRRRFQLVASRQAARNRLHSLGRKVPGEGEGAADSVRREIGFLGGELDLIEKAIDSLLRRSVTLGKAEALLRTIPGVGRVVALTILAEIPFISSFGRAREVAAFAGMTPGLQESGTSVRRRGRLTKEGSSALRAQLYMAALSVWSSETTRCAGDTRSSSNAASPRWSPSEPPCTASCASPTASSSIRHPSRKLSQNSACQTLSTALAWKL

SEQ ID NO: 496641 - protein, 407 aa, unidentified
MATPDTVDVWIGLDVGKEFHHAVVLDDAGNALFDRRVANTETDLVKVFDAAATHGTTALAIDQPGSIAQLALALARQRDIPVAYIPGLVMRRAADLYPGEAKTDRRDAMIIGDTARTRRKQVHWLTIDDELLLQLRVLNGLDTDLAADSTRHANRLRDALTSISPALERAVGAKLSHAGVRDLLAKYPTPTALRSAGKARIRNTIAKRSPRLKVSVTERVWAALSQQTVTVPAEETVGRVIAELVVELDRIRDRRDRLEKEIEVVFLAHPLGPVLITMPGIGPRTGARTLAEIADGSGFANGSKLAAYAGLAPVTRQSGTSIKGERRSRRGNHRLKNALFLAAFASLSDPDSRAFYDRKRAEGKKHNAAIICLARRRCDVILAMLRTGEPYLTSTQLAERAETTNAA

SEQ ID NO: 496642 - protein, 386 aa, unidentified
MQKLNDLSRSLTALEPDGTLIAVIEMSLSSWLVAGIVPGVERQPLKKLAVDESALLKLLHRWREEAEKAGRRIERIAVAFEAGRDGFWLARWLKVRGIEAYVIHASSVAVSREHRRAKTDRLDTELLKRSFLGWLRGERDHCKMVEIPTMKDEDAKRPNREHDSLIGERSRIVNRMKAALVRLGIRGFNPKLKRASTRLDGLRTPEGEPIPPNALAELRRDMERRRLVNNQIRQIEEERLKRIEQAPCDGPHVMVRLLARVMGVGIETADMLVHEVLSRNMRDRRAVARYAGLTGSPDESGRKRREKGLARSGNVRVRRGMIQLAWRFLLHQKNSALTKWFRSRTENARGTRKPMIVALARKLLIALWRLVREGIVPDGVVFRAAQ

SEQ ID NO: 496643 - protein, 339 aa, unidentified
MSEDYAGKQIVGIDLHRRRSVLVRMTEDGQKLETTRISNDPEYLRAVMARAGESPEVVLEACYGWYWAADTLIELGASVHLAHPLGVKGFAYRRVKNDERDAADLADLLRMGRLPEAWIAPPACRELRELVRHRAKLVGLRTNLKCHVSAVLAGAGVQALPADVFGVAGRGLLQCVALPAAMRAKVNSALRLIEAIDFEIDTFTPLVTTRLRADPGWVAVQTIPGVGPILGAVFVAEIGDIHRFRRPGQLTSWAGLTPKHHESDTKVRRGRITKQGSKLVRWAAIEAVQRIGAHTRLGAYRDGVAQRRGRNQAKVAAARELVECVFYGLRDHHIRRLAA

SEQ ID NO: 496644 - protein, 412 aa, unidentified
MTAIDQFAAHVGLDWADKKHDVCVQFKNGERTFHVIEHTAEALDAWLNALHKQVKGKIAIALELKKGPVVYALQKYPFITVFPVHALSLARYRQAFSPSGAKDDPQDAELALELMLRYPQKIKAIEPDNADIRLLQQLVEQRRQLVEDKRRFVNRIINTLKQYYPQPLEWFSHRGSLLLCELIMRWPSLQQLKRARRDTIRNFLNAKGGRAIALTEQRVASIDNAIPLTTDPSVIEANALMATALATQIKVVSEIIKTYDERIETLFDTLPDAGLFKSLPGMGPCMGPRMLAALGDNRDRFNSAEEIQNYAGIAPVTERSGQKSWVHWRWQCAKFVRQTFVEWAAKTVNSSYWAKLYYQGQREKGKSHQSAIRALAFKWLRIIYRCWKTRTRYDEAKYLLALEERKSPLLMP

SEQ ID NO: 496645 - protein, 409 aa, unidentified
MSLFCGIDWATDHHDIAVVDHAGRLVAGGRVENTAAGFVALLAMLADAGEDPHTPMPVAIETDHGLWVAALTASGRQVYPINPLAASRYRSRHVVSGAKSDAVDARTLANILRTDLPEHRPRSNDSELAQSVRVLARAQQDTIWNRQQVANRVIALLKEFYPAALEAFASLEGGITRADARAILTAAPTPAQAAALTPARLRKLMSKAGRQRYLDRDAVRLREVFTAEHLRQPVMIEEAMGRQLSALLGQLNAICTAVADLTEAVTETFHRHPDAKILTSFPGVGPVVGARVLAEIGDDRTKFDDARGLKAFAGSAPITRASGKKTVITHRHIKNRRLAAAGSIWAMASLKSSPGARRHYDARRAKGDWLQEAKRHLFNKFLGQLHHCLQTGQTYNETHAFPPPLTLAA

SEQ ID NO: 496646 - protein, 348 aa, unidentified
MLIIGCDYHPGFQQIAMVDTETGELGERRLTHREEAEQFYGALKERRVRVGMEASGHARWFERLLSDLRFELWIGDAAEIRTKRVRKQKTDRQDAQLLLRLMVEDRFPRIWVADAENRDLRQLLWHRHRLVQMRTRVMNQLHVAALNEGLRRKKALWRPAGRSELQSLVLAPWASRRRQDLLDVFDQLTPKIQELSRALEEEVEKRPVTRRLMTHPGVGPLTALAFELVIGTPERFHCGKQIASYVGLVPSEESSGDRRRLGHISKQGNSLLRYLLVEAAQVTVRSQPQWRSKFFHIAMRRGRKIAKVAMARKLAVHLYWMWRRGWDYGEFEKLGSHAGAPGNRHGVQ

SEQ ID NO: 496647 - protein, 408 aa, unidentified
MAIIGMDIHRAFAEVVALEGKSRRRLGRIAMRCDRLAAFAAGLTKDDIVVVEATGNATAVAEVLAPHVGRVVIANPKQVRVIAHAKIKTDKIDAAVLAELYASGFLPEVWIPDKDTLALRRQVTRRNQIVRQRTRLKNIVQSILHAHLIPAYPAGNMFGRKGRAWLAAQKLPEDERMAIERHVREIDRLGEDLKVIQRDLAQYGLADLRVKRLMTVPGLDMIVATALVAAIGDVGRFGSPQKLVSYLGLNPSVRQSGSGPAYHGRISKQGPGRARGLLVEAAWAAARAPGPLRAFFLRIRGRRGQHVAAVATARKLAVLVWHLLSKEQDYLWVRPGLHATKLRRLELTAGHAPARSQRGSAYDYNIKATRDQERRRVQQAEKIYERFVAGWNRSGPRVRTSAAKEERQ

SEQ ID NO: 496648 - protein, 316 aa, unidentified
MTSYVGTDVGKASVVVAVHGQPGVTVVANTRTALRGWARCLPAGSRIGVEATGVYHREVVAAAQAAGHTVYLLNPRDVRHYAQAVGRRGKTDRVDAQLIARYVAQEHAGLRPYRAPSARQAAIATLLERRHAVVKAQASLRQALQDLPVGISAWRRVQRDFAALLAQLDARLNQLAAEEAPVAALRQRLRTTPGIGPLLSLALANLLSRYSFQRSDALIAFVGYDPRADDSGQHRGRRRLSKRGPAEVRRLLYAAAMAAARSKVWQPLYQQDRQRGLSATEAIIILARRLARTAFALARSGETFDPARVSLACAKP

SEQ ID NO: 496649 - protein, 402 aa, unidentified
MNAVGIDVSKGKSMVAIMRPFGEIVSAPFEIKHTAGDIHSLVELINSVEGESRIVMEHTGRYYEVLAHQLSKANLFVSAINPKLIKDFDNDSLRKVKSDKADAVKIARYALDKWQNLKQYNVMDELRNQLKTMNRQFGFYMKHKTAMKNNLIGILDQTYPGVNTYFDSPARSDGSQKWVDFASTYWHVDCVRKMSLNAFIDHYQNWCKRKKYNFSQSKAEEIYGKAKELVPVLPKDAITKLIIKQAVDQLNSASTTVESLRTLMNETASKLPEYPVVMAMKGVGTSLGSQLMAEIGDVSRFTHKSAITAFAGVDPGVNESGSYEQKSVPTSKRGSSDLRKTLFQVMDVLIKTHPQDDPVYQFLDKKRAQKKPYYVYMTAGANKFLRIYYGRVKEYLASLPES

SEQ ID NO: 496650 - protein, 414 aa, unidentified
MTEEEIISWFAGVDWGSERHQVCLLDARGTTVGEREFPHSGEGLAELGDWLLSMASAASTVAVAIEVPHGPVVDALIDRGFVVYAINPKQLDRLRDRFSVAGAKDDRRDAYVQADSLRTDRRLFRRLQVADPRLIELRAWSRLAEELRAERVRLSNRVRHQLWRYYPQMLKLTDDLAAPWFLELWAIASTPAKAGRLRKSTVERLLKQHRIRRMDAETVLRILREPAIKVAEGVAEAASIHMRSLVARLRIVNRELREAERKLDELCTTIGEIEQTSGEGLQRRDVAILRSMPGIGRINLGTLLSEASGPLSRRDYEGLRTLSGAAPVTKRSGKSLIVVRRYAAHVRLRDTVYHWARVATQRDPKCRARYTALRKRGHSHGRALRGVADRLLALACVLLQRQTLFDPYFGGSTA

SEQ ID NO: 496651 - protein, 345 aa, unidentified
MEDASVAYQLYVGVDIAAETFVAAWLAPGGKSAAPFTGEQTPAGFAALQRRLQATAIPPAAALVVLEATGTYWVALAVALHEAGYRVAVVNPRQAHHFAKAQLRRAKTDALDAADLAQLAAALRPAPWTPPPAVYHEVRQRLVARDGLLAMRTQARNQRHALLQWPVVVAAVRQHLDELIADLDRRSAALETEIAAVIKESAWAESLSCLTSAPGIGLVTASWLLVGTLNFALCTGPESLTAYAGLAPVPRESGRSIRGRPAIGHDGNAHLRTALYMATLSAARFNPAIKAFYQRLRAAGKPQKVARCAAARKLLHQAWALGSKLQRFDPDHQQQQHDPLPQLAA

SEQ ID NO: 496652 - protein, 348 aa, unidentified
MDKIIRIGIDTSKTVFVLHGVNAAEQPVLLKKLRRRQVLDFFRTLQPTRIGLEACGAAHHWARELLALGHDVVLLPPQYVKPYVQRGKNDAADANAICDAMSRPRMRFVPVKTAEQQAALMLVGVRDQLIVRRTQLSNMMRGYAAEFGLTAARGLDKIEPLLARIATDPSVPELAKELFAALAAEYAELKPKLRKIEAQLLAWHRQNELSRRLVEIPAIGPIGASLLVMKVPNPHGFRTGRDFAAWLGLTPKDHSTAGKQRLGVITRAGDETLRGVLVVGATAVIQQANKGRGKPSPWLTALIKRKPPKLAAVALANKTARIAWKLMVSGERYDRNRAETAPIARVAA

SEQ ID NO: 496653 - protein, 369 aa, unidentified
MTEYSGAFVAFDVAKTKHAVAVAEAGRAGEVRFLGEVENTPARIERTIKKLAGRYGRLQVCFEAGPTGYGLYRQIQELGHDCLVVAPALIPKRSGERIKTNRRDAVTLARLHRAGELTGVWVPDAVHEAIRDLVRAREAAMDDLRRKRQQLLSFLLRHSRIYTGGGHWTLAHRRWLARQAFEHPAQQIVFQEGVDAIEDAARRLRRMEEQLTAIVPTWSLAPVVEAYQAMRGASFLVAVTFAAEIGDLRRFDTPRQLMAFLGLVPGERSTGEIVRRKGLTLAGNRRARRALIEAAWTYRYPARVSETLRARLDGLPKAVRDIAWKGQVRLCARYRRLSAAGKKLPVVVAAIAREIAAFLWAIGREVAPV

SEQ ID NO: 496654 - protein, 375 aa, unidentified
MKEKLRFLGLDVHAETIAVAVAEPDGEVRSLGTIPNRAESIRKLIKKLGPAGKLRACYEAGPTGYIVYWQLAELGVECEVVAPTLVPVKAGDRVKTDRRDAEKLARCFRSGDLTAVWVPDEGSEALRDLVRAREAAKQDQTRARHRLSKFLLRSGQRAPTGVRPWTRPYLIWVAQLRFTQIAQESTRQDYLHEVEHMRERVARLEQAIMEAVKLASPALQQVINDLQALRGIADISAVTIASELGQVSRFGSARQLMGYCGVVPSEDSSGKRTRRGSITKTGNAHLRRIVVEAAWSYRRPPGIWYGLRRRQESISEEAKEIAWKAQHRLHKRYLKLGAAGKDQRKIVTAVARELLGFIWAIGTRAETISRQQVAA

SEQ ID NO: 496655 - protein, 315 aa, unidentified
MNQTNWVGVDTHKDSLACYKDGQFKEFNTTPKGFFSALEWAGQGYKWAIEGAYCFGKPFTAYLINNGCEVYEVNPLLTKTWRRSLAISNPKNDYGDAKVISINAHNARLQKISLETIQLKEKITAREHFVKDRTRAINAIKMLFSARGLDLPFEDLTTLKAGKWLSGQDDLVIKHFGKMLSDFNEAIKNFEKEIEKSLPEKARKLKQIKGISDLTAAIIYTETKGEIISPEALASYAGIAPVEHSSGKTSKHRNNKSGNRKLNSVFYRISIHQSRFDEKGKAYYEKKLAEGKTKRHARKCLARQLVRLVFNLLKD

SEQ ID NO: 496656 - protein, 346 aa, unidentified
MVEITTVGLDIAKQLFQVHGVSADGTVLFNRRLRRSEVVRYFTKLPVCLVGIEACGGSHYWAREIAALGHDVRLIPPGYVKPYVKRGKTDAIDAEAICEAVSRPTMRFVPIKTIECQAAQLTLRSRDLIVRQRTQTINALRGHLAELGIVAAKGLAKIATLILIVRDENDARLPTTARKALSMLADQIETLSDQIRVLECEIVRSVRQDDEARRLTSIPGIGPITAATIRALVPNPAVFVSGRHFAAWIGLTPRSHASGGKERIGKISKMGNPALRSLLVVGATAVIRHVRRGAAVSPWLTALLARRPAKVAAIALANKLARIAWVLLAKGGTFVRHKQIPTTVAG

SEQ ID NO: 496657 - protein, 337 aa, unidentified
MKPKQVKFYIGLDVHQNMTAYAVRSWKGDIVLGGECATRFEDLFKVLEPYLISSVVGLEACTSYYHIYWSFKEKGYDIRVANTLRIRQLIVKNDRIDAERLSDMLRLGSYPTSYVPSKELMKLRSMINIRHNFVEEQTRFKNQISSCLAKHGLKIHERTKFTKKWTDQLLVILAEHPELKELHYAYEHFKIIEHNVDKITAECVTHCKLHWKKQLEVLPTIPGIADCLACYIIADVCPITRFKDKKKMRRYAGVIPCSQESGGKTYGSYLPKGSSRALLRWALVQASWAAVKGKNNLAKYYKKKKKTRTKTKAIMAVASSLSDIVYNVLKTAKPYSA

SEQ ID NO: 496658 - protein, 395 aa, unidentified
MSAEGEAIRSNDYRKDTTVKAPSTRPAAVLGLDVGKSSHWACLIDRDGEVLASAPVRNREAELDALFASAPAGTLVVVDQFRNIGSLAVRRARAAGLGVAHLPGLAASRAAGLFAGEAKTDERDAAVIARTALGVPDSLSGVPGRGEALEAARALSSQRDHVVACATRDKNRLRAVLLESCPALEAAVDLSDRRWLELLAGFGGAWGIARSGAEGPRAEAAGEAAAASTAPPPSLVEAENRQVRFLAARISEALDEAGALEAETAALLEGDETYACLLTVPGIGPRTAAQLAVSVDIGRFPDHDHLASYCGIAPRVRSSGTSVRSVRASRRGDARLKSLLIFSCNSLVRSSGRYGEYYRACRARGMGHGRALKAVARKRLRAIYAVMRDRVPYRE

SEQ ID NO: 496659 - protein, 298 aa, unidentified
MPALTIGLDIAKNVFQVHGVDRHGKTVVQQKLRRAEVLKFFAKLESSLVGIEACHGSHFWARELTALGHTVRLLPTQYVKPFLLGGKNDANDAAAICAAVTRSGIHFVAIKSAEQQSLQSVHRMRQRLIQERTAKSNQIRSMFAEEGVIFAVGLPQLRKGVVELVNNPDAHITALLRRLGSMYLEQLKALQQWLDELAAEIAEIFKSNEACQRLATVPGIGPVIATALVSSVGDPSQFRNGRQFAAWLGLTPRQKSSGGKTRLGGITKRGDTYLRTLLVQGARAVMHFVNRRDDQHSR

SEQ ID NO: 496660 - protein, 351 aa, unidentified
MNKVSTLAANGNGENIPTVIGIDLAKNVFALHAVNRHGKPVLVKPQVRRDQLLEVLAQLPPCIIGMEACSGAHHWARELIALGHTPKLMAPKFVIPYRIQGKRGKNDANDAAAICEAVTRPNMRFVPIKSVDAQSILTLHRVRQGFVEERTATINRIRGLMSEFGIVLPQRAEVIRKQAQLAAEKMPSWAASAVYDLLAHLVTLDMRVAEYDEHLKRMANRDERCKRLMALTGIAHITATALVASIGNGHDFKNGRQLAAWLGLVPGQYSSGGKVKLGHITKAGDRYLRTLLILGARAMLANAVRKNDRISRWAVALQARAGYGKALVAIAAKNARIAWALLAKGEAFEPA

SEQ ID NO: 496661 - protein, 342 aa, unidentified
MLYVGIDVAKNKHDVTALNVPGKTVLKPLTFSNNKAGFELLDLSLRQLNQDCLIALENTGHYAFNLLNFLHEQGYKVYTCNPLLIKEFAKSLSLRKTKTDKKDAHGIALKLLSDPNREQFQHDNRQVELKILARHIHRLKKKQSDWKVQYTRCLDIIFPELDKIVGKHSEYTYQLLTRYPNPQKRLEAGFDKLIEIKRLTASKIQDILSVAPRSIGTTSPAREFEIIEIIKHYKRLIDKAETCVNDLMAEFNSVITTVTGIGGRLGAVILAEIRNIHAFDNPAQLQAFAGLDSSIYQSGQIDLAGRMIKRGSPHLRWALIQAAKACARFSPAFKAYLKTKLE

SEQ ID NO: 496662 - protein, 340 aa, unidentified
MEMIGLDLHKRESQLCIQDAEGVFTERRIVTGRGSFAALFAGRPRARVLLEASTESEWVARYLESLGHEVIVADPGFAPMYATRSKKVKTDKRDARALCEACARGTYRAIHRASEAQRHVRTELAVRDALVRTRTRYVAMIKAMVRREGLRLRSGEPAHTAAKLAEVSLPDVLQSELAPLVSLLEPVNAQVTAATARLTALARGNPVVTRLQTIPGVGPITAVAFVAALDDVTRFASAHQVQAYLGLVPSEFSSGERQLRGRITKRGNARVRWLLVEAAWRVMRARDPEAEMLRQWTERVALRRGQRIAAVALARRLAGIMYAIWRDGTAYAGGSASIAA

SEQ ID NO: 496663 - protein, 350 aa, unidentified
MIIIGVDFHPGLQQIASVDSDTGEFEEKRLAHREEAEKFYRDVASRGAQIRVGMEASGYARWFERLLAELQIELWVGDASEIERKRARKQKTDRQDAQHILQLMLKDDFPKIWVASWENRDLRQLLWHRHRMVQARTRIMNQLQAVARNEGLQCKKRLWRGSGRQQLESFRLGRWANRRRRDLLELLELLNPTIEELSQAIEQEAERCPEAQRLMTHPGVGPLTALGFVLIIGQAERFQCGKQVASYVGLVPLEKSSGKRRRLGHITKQGSSIVRFLLVEAAQAAVRGNPQWRSQYLRLLMRRGRKTAKVAMARRLAIRLYWMWREKQDYRQSRSFGSHAGQPGNRDGVH

SEQ ID NO: 496664 - protein, 346 aa, unidentified
MKNITTVGVDLAKEVIQVCVVTRGKVISNTEMTPQEFRCFLAKMKACIIVFEACATSNYWKQVSVSQGHDARLISAKLVSQIRQNQKTDKNDALAIVQASQLTGVRFIQGKQFSQQELQSISRMRELAIKQKVATSNQIGALLLEFNIRVSNRHGGINGVVKATLEDAENDFSPEFREALYETWQGYLALVTRIAKYDEHLNVSIENTPACKKLMALEGVSTINAVNLYISLACAEDRVFSSSKDASASLGLTPIQYSSGGQVKLGGIGRRVKNALVRSNLVSGAMAVIRQVSQREPRTVKEKWLKALIERRGNKCAAVALANKTVRTAFAMLRDGTEYHAQALNT

SEQ ID NO: 496665 - protein, 418 aa, unidentified
MLVAGIDIGAELHHVAVVDDAEAVVVKATSFAEDAAGYQKLFELLGRAGARGGADLPLAPASAPPERTLVVMEATGHYWQNLFAALVAEGYAVALVNPLRTHRFAGEELARTKTDNIDCLQIARFGAQKRPAPTGLPEMAAEELRELVRLRTRLIQETVARVNQLHRLIDLGFPEFTRYLSDLNTELANAILRQYPTAQTFRALSPRRLAKLSYDGRHRVGEEIARNLIEAAKISVGSQHSPAHQTGVRYACEDLQTLRTRLKRLEAEISGKLEQHQVGKLLTTIIGIGDCTAAMLLAELGDPARFQSAGALAAYVGLCPGHKHSGKHQPRSSSLTPFGNRRVRQALWMPTLGAATQRNPWLMAFYRRLMERGKPHKVALIAAMRKLLAAVYSVAKNRRPFVPFLNTQPAARFDYEKA

SEQ ID NO: 496666 - protein, 416 aa, unidentified
MDVVHTRCCGLDVHKQTVVACVLLSGPTGGPPRREVRTFGTMTDDLLMLADWLAAEGITHVAMEATGSYWKPIWNVLEGAFDLLLANAQHIKAVPGRKTDVKDAEWIADLLRYGLLRPSFVPDRAQRELRELTRYRTSLVQERAAEASRLQKTLEGANLKLGDVASNVLGRSARAMLEQLVAGQTDAVALAQLARGRLREKIPQLERALAGRVAPHQRFLLAQQLAHLAYLDAAIERVSAEVAERLRPLGATLERLDTIPGVGRRTAEILLAEIGPDMGRFPTAGHLASWAGMCPGHDESAGKRRSGKTRQGSPWLRQALVEAAQAAGRTRGTYLSAQYHRLAARRGKKKAVIAVGHTILVTAYYLLAREQAYEDLGPDYFERRDRAAVERRSIRRLEALGYRVTLEPLAPAPSAA

SEQ ID NO: 496667 - protein, 355 aa, unidentified
MSQEKYIGMDVHQATISVAVMDAQGKLIMECLLETKAATIVEFIQGLQGTLSLTFEEGTSAAWLHDLLKPHVSRLVVCDPRKAALLKDGNKSDRIDARKLAELLRTNQLKPVYHGEHGVRTLKELGRSYLTLTKDVTRVMNRIKALYRSWAIPCSGTTVYAPRHRAEWLAKIGEPGVRVRAERLYQQLDVLQPVRQAARQDLLSESHKHPAVKLLRQIPSIGPIRAALLVALLQTPHRFRTKRQLWAYSGFAVETHDSGEYRCVRGKLQRNRERITVRGLNDNHNKDLKSLFKSAAISASTRPGPLHDFYAARIAKGMRPTMARLTLARKMVTITLTVWKKGVSFDPQQLHRQAA

SEQ ID NO: 496668 - protein, 414 aa, unidentified
MAEEYKIAAGLDIHKQFIVATILSVQELKIQQRFERTMQGLLALKNWIIEHKCQVVACESTNNFWYHIYDSLCDHTTVIVGNAHDMKVLTHKKTDKIDSEIIAKLALKGMITPSRVVPRHQRDFRNIVRMRHFLVRKRTDLKNRIHNIFDTELFHLSNVLTDVFGKSGRMIMDGILQGKSADEVIMSLKGQVRIKKGGEIRELLEQSLSVYALMQLRHSLEVLRVLDAEINYLTKVSSQYAQKHYPREYEILITVPGVGEIAAFTLLAEIGNFKDFSSAEKLAAWLGIVPKVYQSADHNSRRSITKRGSRLARWILIQVAHAAAKRKVSIFYDFYESKKDIIGKGKAAVALARKIITIIWHLITNDEPYEDKYARPKKIPKVPTVKIPVTFTIEEAIKLFMEASQVLKSPDPGL

SEQ ID NO: 496669 - protein, 326 aa, unidentified
MFLGIDVSKATLDAALLLDSGATKARHKVFLNTPVGHGQLLLWLQEQGASIVHATLEATGSYGEAVALALHEAGHRVSLVNPALVRAFGQSQLKRTKTDKADAILIARFCAMHQPPLWSPPAPELRELQSLVRRVEALEEMQQMEENRLESGVSCEVVRASLLDHIAYLQSQIDGARRQIEQHIDAHPDLKEQARLLESIPGIGAVTAAVLLAEIGDISHFQSARQVAAFAGLVPRLRESGSSVRGKPRLSKVGSPRLRKCLYFPAMTALRWNPLIKALGLRLAAQGKPKMLILGAAMRKLLHLAYGVLKSGKPFDVNFNAQTCAA

SEQ ID NO: 496670 - protein, 340 aa, unidentified
MKTYTYFVGVDISAEFYTVSIYTNNTLTSVGEQFPNTNDGNALCKQWLFNHGATFENSVICLEATGVYGECFCYAFASYGFPVAVEPPMKVKRAFSQRIHKTDAVDSTQIAEYAFRFADELKLWQPKSEILEQIRTLLTAREHCVTQSAATQNILRSLTYKFVRTPTAITAFTNTLEQQKENIALIDAELKRLCQSDDSFHTMISLLKSIPGVGFILAVHLLSISNGFTRPLVARELSSFCGIAPLQHQSGTSVFRKPRSVGNGHPILRKLLFLAALSIRTHHQQSKKYFLRKVDEGKSKRLVINNLSNKLLKIICAVATSKQPFIENYRSVNPFFLKSA

SEQ ID NO: 496671 - protein, 406 aa, unidentified
MELTALHKRVIGLDVHQAQISACAIIEDADGTTRIEQRQFGAFKRDRRALADWAAALSPDEVVMESTGIYWKSPYAALEAVGIRAQVVNARHVKNVPGRKTDVGDAQWLATLARAGLLRGSFVPPAKLRELRLISRQRQKLVGQLASEKNRLHKVLTDGGVRLGVVVSDLHGQSARAMVKAIIDGQSPHEVLQLASRRLKASREEIFDALQGELTDSHRFVLDELMHHIEEIEARIARFDARLLDGLTDERNALALLQTLPGVDLIGAAMLLVEIGTDMDAFGNADRLASWVGICPGNNESAGKRKSARVRKGNPYVRRLLCEFAHAASRTKSVFQSKFQSLIVRRGHKRAIVALAHKILRTIFFMLNRGEHYRDSATDYEALSVQRNAPRWIKALTKFGFIPQLA

SEQ ID NO: 496672 - protein, 348 aa, unidentified
MESVAGLDVGVKKSALCVVARDASSIRTLSRHRTATSPSAIGDWLASQGVTRVGLEAGAQSSWLARELEKHGLNVTVMETRRQRAFGSYSKVKTDERDARLIGEALASGLYTGVHVRSAWSQEVRALLGARLQLKRQAQQTRQFVRGHLRAAGIELGRASGKKWLVAAEAAVAERGGILGLCLTAMLSACRAVGEQVAVLDKEIRRLARQDGPCRRMMTAPGAGLLSSLALRASLDDAERFERSAEVGPYLGLTPSRWQSGALDRRGGITKQGDGLVRAYLYEAAVSLLERQKRDCPLRRWGLEQQARLGKRRTRVAVARKLAVLMHKLWRSGETFDWNRGMEMPKTH

SEQ ID NO: 496673 - protein, 393 aa, unidentified
MACSRLASRRYPARSDSKEVWNQKPEVGMSFARDDGESPTETEVRALMKVLIGVDPHKASLAVAAVDEATGELLERASFPQDRAGLRSLERWAKRFSECRWAVENAGGLGRYLAGRLAGSGESVVDVPPKLSARVRVLSTGNARKNDGLDALATALAASRNGCLAAVDPEAASEVLSLLSERREDLVAERTRALNRLHALLRDLLPGGVTGTLSADRAARLLRGIRPRSSSSRIRRRLASEVLRDIRTLDRKIADLNGRIEAEVEASGTTLPEIFGVGPILAAKIIGTVGSVERFPTKAHFASYAGTAPVEASSGEVVRHRLSLAGNRHLNYALHMVAVCQARSDARGGTYYRKKIAEGKSRKEALRCLKRRISDAVFASLVADSQVLSRSAA

SEQ ID NO: 496674 - protein, 391 aa, unidentified
MIFVGIDVAKDKHDCFILNSEGTVLADVFTIANNHIGFETLLSRIQSCSQGESKIKVGLEATGHYSYNLLGFLLDSGLATYVINPLHTNLYRKSLSLRRTKTDRIDARTIAMMLMSDVDLKSYSNTAYHNEELKSLTRYRFDKVKERAKLKSSVARLVNILFPELEKLVSSLHIAVVYALLSNYPGASYIANANTEELAETLCTASKGRYTKSKTAEIQVAAGVSIGSKMPAKSMELKHTIALIRELDKEISEVESAIDKITSQMDSPIFTIPGIGRHMGAMILAEVGDFSNFASADKLLAYAGLSPSTYQSGQLQNCYAHMEKRGSRYLRYALFNAAKYVCLWCPTFSAYLEKKRSEGKHYNVAISHAAKKLVRLIFAMQRSGKAFLADY

SEQ ID NO: 496675 - protein, 427 aa, unidentified
MTKAHDTTDARVLVGIDISKHRHEVLIAAPGKTRRRRMTVMNTAADYRRLIEILRSLGLPVTIGFEATGKYHRALMFALGAAGFELKLVSSVALARTREALHNSWDKNDPKDAQVILHMLQIGAVQVFHDPLVAGTSDIQELSKTYEMVARAKTELWHRILTHYLPLYFPEADRFHRSSRGDWFLAFLEAFPSPHMITAMDKESFIQAAWPVIGRRVSKAALLADIYETSKASVGLPVAPDSDAIRMFRLVLAQGRSLVQQRNAIEARAVELLGDHPDYQLLRSIPGIGPMNALAVMAEAGDLRRFRHHRQFLKFCGMDLATVQSGLFRGRSRISKYGNARLRRTLWLASQAAVLKPANSFRDKFERYIAQDRHNPDLRRKAYTAIAAKMARTIHAVIKSGEPYRPFFEGASPGGRTPLYRAVEAGS

SEQ ID NO: 496676 - protein, 371 aa, unidentified
MISVGIDVSKGKSTVCILKPYGEIVSKPFNITHTQKDLSELSSMLFRLNDEVKIVMEATGIYHLPVLTYLQEKGFFVSVINPYLMKSYRNESLRKAKTDKIDSRIIANYGIDHWFKMKEFQTSGEIYEELKLLGQQYRHYMKLHLLSLAELTHLLDLTMPGIKNLLASWNETNRKDKRSDFVERFWHYDVITSMSEQEFTEEYILWAKEKKYVPSQEKAKVIYTLAQESIPTLPSETSSIKMLVTEAVRVLKEVDATLGLILSRMQEIAKTLPEYSVVREMGGVGNTLAPKLIAEIGDVRRFRNGKALVAFAGIDPPPYESGQFVGCNRKISKRGSASLRKVGYETMRSLKMRSRPEDPVYRYVVKKGIRR

SEQ ID NO: 496677 - protein, 343 aa, unidentified
MKLMRVGVDLAKAVFQVHGVDRNEKVTLRRKLTRANWLEVLLDAVEPGCVIGMEACGGAHHWARAFQAHGVAVKLIAPQFVKPYVKSNKNDANDAEAICEAMSRPNMRFVAVKTVEQQDIQAVHRVRFEVSKQRKAKGNQIRGLVAEYGLVAPKELWHLRAVIPVWLEDAENGLSARFRRLLNGLWQDLLALDQRMTELDREIALIANADPVAQRLQQLRGVGPMIATALVATVGDAKQFANGRQMAASIGLTPRQNSSGGKERLLGISKRGDTYLRTLLIHGARSIVRTAKGKDDRLSQWVTRIAETRHYNVAAVALANKTTRIAWAMMKHGTEYQADQTAA

SEQ ID NO: 496678 - protein, 346 aa, unidentified
MKKLVKQIVGIDVAQKELVVCLGRMTDDWSPEIYAHKAFANNLKGFNALENWVKKLVDLEVSVRFVMEATGVYHEPLAYYLSDQGYTISVVLPNKISNYFRTLEVKTINDQTASHAITLFGLERKLEDWKRPNVVYKRLRQLVRERDQLIQERTIVKNQLHAEKSEAEPSSSSMMRMKKRIVLLNKQELEIKTEIQAIVKKDKNTSDAVQIINTIPGIGILTAITVLAETNGFELIRNKRQLTSYAGLDVVQKQSGTSVQGKPRISKRGNKYLRKAMYLPALSAMRCDERFKGIFSRVVSKNGIKMKAGVAVQRKLLEMTYTIFKTNQPYDKGYFKRMEEMKLERS

SEQ ID NO: 496679 - protein, 412 aa, unidentified
MRKVIMVGCDLHDASMILKIAVDRNAPETKSVKNDPQGRQALAADLRRRAQAEGGARVIFAYEASGQGFGLYDELTAAGVECCVLAPTKMARSRRQRSEKNDDKDALWLLELLRGHILAGNRLPTVWIPDAATRDDRELVGTRMDVGEKITGLKAQVQCLLKRNQLRRPAAVGRGWTKTFRVWLQQDLIVSAESPLAGGTRAALSSLLRQLGSLEEEEMLLDAQVDKLAWSSRYAAQTRATTRLCGVGVLTAMVFLTEMGDLGRFANRRQIAAYLGLAPTCHESGEKNDCKGHITHQGSSRVRRVLCQATWARVRNDEEEKAAYERIKARNPKKKKIAVVASMRRLAIRLWHLGRGAQYPAAENQSPGRNKTSTDSSSLSASGVSQWSREVDPVAWSRELSTFGITRVGREE

SEQ ID NO: 496680 - protein, 358 aa, unidentified
MVDKVTEAAVVGGVDTHKDLHVAAVVDQNNKVLGTQYFSTTRQGYRQMLAWMTSFGTLKRIGVECTGTYGSGLLRYFQNAGLEVLEVTAPGRMERRKRGKSDTIDAECAAHAAFSGIRTVTPKTRDGMIESLRVLKTCRKTAISARRVALQIIHSNIISAPDELREQLRNMTRMQLIRTLGSWRPDASEYRNVTNVYRISLKSLARRYLELHDEIADLDVMIAAIVDELAPELIKRNAIGYESASQLLITAGDNPQRLRSESGFAALCGVSPVPVSSGKTNRYRLNRGGDRAANSALHIIAIGRLRTDAKTKEYVARRVAEGHTKMEAIRCLKRYISREVYTLLRNQNRRINSIPITA

SEQ ID NO: 496681 - protein, 344 aa, unidentified
MAARIHTIGLDIAKDVFQVHAVDAKGRVVLRKQLKRLEMPKFFRSLKPCLIGIEATGEAHNWGRILKDFGHDVRLIPPSFVKPYVKANKSDARDAEAICEAVQRPNMRFVSIKSEKQQAQLIIHRARELFVRQRTNLINALRSHLSEFGVVANKGADGAKATLAFVGSASFKKLPLEVRRILQLFVDQLQSLEAPLQRCEELIERAHRASVGSQRLVTIPYIGPLTATAIIATVGDAHQFRHARDFAAWIGLVPRQLSSGGKQRLGRISKRGNLYLRKLFYLAAARAARSSKFARTQAGQWALSLRRRKPYRVAIIALAAKMARIAWALLVRKSEFHGVAPATI

SEQ ID NO: 496682 - protein, 396 aa, unidentified
MDSVLYVGIDTSLGAHVVCAMAADGQVVARTTVPNDQAGAEQFVAWLHPHAAPYARLAIGVEATSVYHVPLMEWLTQTPDLQRWQPTWYVLNPKVVQKFRETYVDRGKTDRADAALIADVMRFGRVTPWTPPDPRYAALQVLTRHRRQLSHLITQEKNRALVQLFCVWGQYAHTEEPFFSNVFGVASQTVLERYTPDTLAAIPLADLVAEIAAAGRQRLKAPDDIAQTLHRLARRAFRLHPDEQDARHQSLVLHLDTIRALEHQQQALDKVIARDMQAFRQTLTTIPGIGPVYGAGLLAEIGPIERFPSENALAKYAGLTWRPHQSGNFDADIRPLTRTGNVYLRYYFIEAAERVRVRDPQFKAFYEKKYHEATHHAHKRALVLTARSGSAWSTGC

SEQ ID NO: 496683 - protein, 350 aa, unidentified
MNVNHYIGFDVHKKSISYCVKAADGTIIEEAKLAAKGAVLRAWAGKRREPWHGAMEATLFSGWIYDTLRPFAAELQMGHPAQMKAIGASKKKNDRLDARKIADLVRCNLLPVCYVAPPELRELRRLLRYRNLVVAEAVRMKNKMSGLLMEVGAEYNKGRLHGKEYFAELLDTVEGVPESVKDLLRLSRGALELFQTTQQGLLARLQKEPLLAERVTLLKSIRGVGEVTALTWALEICDPWRFPSIGDAVSYCGLTSALDSSAGKQQRGPISKQRNAHLQTVLIEAAKLAPRWNPQLAAIHELEIQRGHRNRATLEVARKLVAYLLAVDKSGKPFQIRIPETIKLEVQTAA

SEQ ID NO: 496684 - protein, 437 aa, unidentified
MLKEINLHAGAVDIGSENFHAAVYGGAVRVFGTFTRDLQAVLEFFQEHEVNTVAMEATGVYWMPLYEVLQQGKIKVCMVNGAHVKNVPGRKTDVSDCQWLAELHAHGLLEAGFVPDETILRLRDYQRLRQDHIETGSQHVLHMQKALERMNVKVHDVLSQITGFSGLQIVKAILKGERDPEKLADLSDSQVLVKKRDRLVESLRGHWKAEHLFALDQALAGWQFYQEQIVACDQRIALVLTEMAAIKAPVEENKLRPMRERKKQHHNAPQITGLYETLVRICDGHDATLLPTVTEYLILQLLSETGTDMTRWPTPKHFTSWLGLAPASRQSGKSRRPQKRFRGRAGRLFCVAARSLARSKHLALGGFYRRIRSTCGGQVANIASARKVAQLYYNTLRYGNAYVEKGLKQYEEKYRRDSIRRLKSAARQFGLELTEKK

SEQ ID NO: 496685 - protein, 451 aa, unidentified
MIAAVVEKGAGIDVHKKFLKVCVMIGPLSEEPRFEIRRVECSHSGLEGLRQWLKAEGVTHVVMESTGPYWVPVFNILEQDVKVILANPQQVKNRKGHKTDAKDSWWLAHLLRHGMVRASFIPEQATRNLRELTRRRKKLIEQAASERNRVQKQLEYGNVKLGNELSDVFGLSGQMMLQALVNEDRTPEEIAELAQGSLQKKKKEIAEAVRGQRLNETQKEVIRSCMRLMVFLDLEIEALSASIAKLIQESGQRKQKELLETIPGIQEEAAGNVLAETGPDMQQFPDEGHLSSWGGVCSGDNESAGKNKSRHTTHGNPWFRATLTECAWSASRTKGTVFESRYESLKPKIGHQAALVAVAHLLAVTIYQVLSRGEPYRERRPQELPEVQRQRIIRHHVRRLRRLGCWLQADRLAPLESWYVTHQIPDTGPAQPKRRGPKKRQSNAALPTERP

SEQ ID NO: 496686 - protein, 485 aa, unidentified
MAKRRMSTFERLESGRLNRKQRRELGRQVAVADPGLTIVHANAGGIDVGNESHYVAVPPDRDPNPVREFGCWTAALNQIAEWLQSCRIDTVAMQATGVYWIALYDVLEQHGIQVVLANAQHTKNVPGRKTDVQECQWLMKLHTYGLLRDSFRLAQEMESVRTIWRLRDRHVKEAGRAVQHMQKALTKMNIQLANVISDINGLSGQEIIAAILQGERDPWKLADLKHYRVRASREEVARSLEGNWREDVLFELQQAVDSYHFAHRQMQECDRKLEGYLASLPARMLDIPVQPEDTQATTPKKKTKKAKRPRGNQPHLDLKTELKRICGVDLTSIDGIDVMTALTIVSEIGTDVSRFQDETHFASWLGLTPAKDITGGKTIGRGKRKVKNRVAVALRTAATTLLKSDSYLGARYRSLRRKLPSFASAVKAMGRYLAVLIHRLLTKGEAWVDRGATQFERRHTEQELASLSFKARAKGFKLIPITEAS

SEQ ID NO: 496687 - protein, 331 aa, unidentified
MTRLPNRANDAPLTIGVDVAKATLEVGFSDGESTLALNNDEAGHEMLIKRLAALRSNGATIGLIVLEATGGLELEVATTLQLAGYAVVVINPRQARDFARSMGYLAKSDHIDARVLAHMGQTLLQRDDLRKLVKPLPDERQRMLQAMVTRRRQLVGMRIAEQQRAGAPDKRMRRSLNIIMQALDRELARLDKEMQAFIGEHHAELAALLDSVKGVGKTTISTLLAEVPELGELNGREISALVGVAPINRDSGTMRGKRTIFGGRAQVRKVLYMAALVASRYNPVIKAFYQRLLGAGKPKKVALTACARKLLIILNAMVRTRQPFDIARHLA

SEQ ID NO: 496688 - protein, 331 aa, unidentified
MANAHMLSIDLAKRSFQVCSTDRAGSVLYNRTISRPELEALLKEHPCCIVAMEACATSHYWGRFAGAEGHEVRLIPPIYVKPFVKRQKNDAADAAAIAEAAVRPNLHFVAVKNAEHQARAVAYRTHQCFVSQRTQTINALRGHLAEFGLVFPQGVPHLKEIRAAMVDEHVDVPPSIREIAGLYLEHIDTLSAKIDELSLRLREAMAVSAELRRVGPVTAGAIMAFAPDLRTFASGRNFAAWLGLVPKQRSTGGKSRLGSMSKMGQSDIRKLLVVGTMSRIRWIVRKGVLPDNWLGRMMARRPRMVVAVALANKMARTIWAMMTREEDYRLA

SEQ ID NO: 496689 - protein, 351 aa, unidentified
MTMVGGFDVHRKQITFDYVDDDGLVRVGEIRPATRTTLRHWLGEHCPAGDAEFALEGCTGWRYVVDELATAGVVAHLGDPAEIATLRGPKKRAKTDRADARLLRTLLLEGRFPESWIPPAHVVEVRTLGRLYCTLMDERRAWQQRIHAQLFHQGCPPIRALLSVAGRDALAQAELSAAGRQYVDTALRRIDELTVEIGPVRGQLVSFARRQVACQALQARQYGVGWLCAAIMWAEIGDARRFSSSDQLVRFAGLDVTVYSSADKRSPGHLSRQGSPELRWATFEAAKCAARHGSPDHAYYQRLATKHDGHNGKNPTLAVERKILRRSYHTLRELGDAALAMPVPEEQGVAA

SEQ ID NO: 496690 - protein, 389 aa, unidentified
MKIYVGIDIAKLNHFAAAISSDGEILLEPFKFTNDADGFQLLVSKLESFDKNSIIIGLESTAHYGDNLVRYLVAEFYQVCVLNPIKTCQMRKNNVRKTKTDKVDTFVIAKTLMMQDDLRFITFFDLDMMDLKALGRFRQKTIKQRTRLKIQLTTYVDQVFPEIQYFFKSGLHQNAVYALLKEAPSPKEIASMHMTHLANLLKVNSHGHFTKEQAKELRILAQKSVGANDSAISIQITQTIQQIELLDSQLEKIEAEMTDIMKFNDSVIMTIPGIGYINGGMILGEIGDIHRFSNPNKLLAFAGLDPSVYQSGNFQAKTTRMSKRGSRVLRYALVNAAWNVVRNNATFKAYYDAKRAEGRSHYNALGHCAGKLVRVIWKMLTDEVEFNLE

SEQ ID NO: 496691 - protein, 335 aa, unidentified
MEAIHERVAGIDVHRMKHVVTILIGRENGTVSSETREFGGFKRDMRALVGWLQTHRIQQVVMESTGIYWKSVFSHLETAGIPALVVNAFHVKNVPGRKTDVGDSEWLAQLARFGLLRGSFIPPKDLRELRLISRYRRKLMGTLGGEKNRLHKLLDDAGIKLGGVVADIDGVCARKMVEGLIAGGTPEGLSALGRGKLKSTSEVLEAAMDGDLSPRHRLVLSTVLSHLRYLQQQLAQLDRYLIEAMKPYAWAWRLLQTIPGIDQVTAAMILIEIGDNVHRFGSPSRLASWTALCPGNNESAGKRISGKTRHGNPIVRYLLCEAANAARFEGGRCCG

SEQ ID NO: 496692 - protein, 320 aa, unidentified
MQTQSEVLNIGADVAKDEIVVACSEGSFPVRKIANQRAAVTAFLRDLPAGSRIGLESTGIYHELLAEVAHKLGFIVFVLNPKDARHYAKGVGLRGKTDRVDAELIARMIAHEHTKLHVWIPPTPEQREMGRLLKRRAKLSSLRQALAMSLSGLDGFGADLKALRARFDLVIARIDQRVKTLVEASPDRKEHVTHLRTIYGVGPVVSAALVNILERVPLNSADAFAAFTGLDPRPDESGKHRGKRRLSKRGPADLRRLLYLAAMSAIKTQAWKPLYEHYRAKGLSSTATFVILARRIARTAWSMYTYKTEFDPTRLTKALT

SEQ ID NO: 496693 - protein, 397 aa, unidentified
MIAVGIDVSKSKSTVAILNGHGSIRAKPFDVHHVADELQALVDYIKRTSEPPTILMEPTSHYHYPLLKAFTEAELPVCLINPYQMKKYGDTELRKAKTDKRDSLRIAQYALEKSYSLIPYTPQDQKYEDLRFLSRQYSQRISTLTVAKVQLLSLLDETMPGITTILPLKSRDPDNCVLLRFIKRFKSFDVIRKMGKTRFLDSYQVLVKKTKDRFAGSKGLAIYELVLNSVTTRGENPLSAMTQDQCVDLVSTSQKAADEINLQMRIIAKTMPEYKVLRSMAGVGDRLGPIILGEIGDIRRFHSGKALNAYAGNDAPPYQSGQFESRNRHISKRGNPALRKACFEVMQALKLTKPQDDPVYLFLLKKEQEGKPYNVAKMAAVNKFLRIYYAHAMELYK

SEQ ID NO: 496694 - protein, 347 aa, unidentified
MLHAGLDLSREKLDVCLLSDQGEHLDQLAVPPDVDSLRRLARRIEEVHCEPVCAVIESMTGARIVHDTLEQQGWSVEIADAQKVKGLAPLACKTDKIDSKVLAVLSHRDLVPAIWLPDPSVREERELARFRLHLVKHKSALKNRIHSTLINFGKPCPVTDLFGLEGRRLLKRLEVPEPWRGNITASIELIDDLERQIAEVNRRLKEGHADHPYIPLLMSVPGIGWVLAFTIASEIGEIERFSSPEKLTGYTGLCPRVNQSGEKDRRGPLTKHGPTYLRWALLEATMHALRHPAYTERYERTKRRLGKQRGAKVAQVDIARRLSHAIWHMLSRKEKFAPRGAAFRLAA

SEQ ID NO: 496695 - protein, 335 aa, unidentified
MQVYGIDLSMEKFDVNYIDSNGKVKNKEMKNGITSISKFLLNVPKGGILCAEHTGVYGDLLVYLCNQVNIPIALVPGYTIRHSFGMIKGKSDPVDARRIREYGERFTDKLIFSEYDQENIVELKQLYTLRSQLVKARKSLMISEKGRCHLPLQSLSVHKHLDPVLAELDMGITATEEEIKALIKANKDLYENYELARSVKGVGPVIATDLLIKTGNFKNIDTARKAASYAGVCPFPNTSGKMVGKSKTSPFADKKLKSLLYMGAKSAVKYNKEYRLYYLKKQLEGKPHFVIMNNVSNKLLRTIYSVVKNKIPYSQDHICLDPREKKINSSSKKVA

SEQ ID NO: 496696 - protein, 404 aa, unidentified
MEATRIGIDIAKDLFHLVGMDSRGKKLWRKALRRQRVLEWLAQIEPALVGMEACATAHHWAREIQQLGHQVKLIHPTFVIPYRKSSKNDFNDAEAICEAMSRANMRFVEIKTLEQQDLQTLHRIRRLAIKQRTQVANHLRGLLAEYGIAVRQGITPLRREATELAAETGRLTSGMRRAVTDNLEQLELLDRQLRALDRDIASYCRTDERCRRVAEVPGVGPLTATAIVAKVGNARQFPNGRALSAFLGLVPGQNSSGGKNVLLPITKKGDRYLRTLLIHGGRAMLNVAGRHDDPRSQWALRLRRKRGPNVAAVALANKNARVLWKLLSSGEYFQTQPPALSASHDCGDHNNLGPLVSRRQPDIDEEGARKGSQPKEKPKLSAPALPVYPPRAPSPHTAPTIFTK

SEQ ID NO: 496697 - protein, 418 aa, unidentified
MRFIGMDVHRDFCEVAISEDGQVRSAGRIVTSVEQLALFAQSLGPADVVVLEATGGAGRIVDELERGPARVLVANTRRLPAAGRAKTDKLDARMLARLAASGLLETVWTPDEQTRALRRICARRDSLVRARTRAKNETQAVLARNLCARPPVTDLFGKGGRRWLGGQVLPADEQLTVDGCLRQIDFLDGEVAAMDHALAARALRSPEILRLLSVPGVALNTAACFMAAVGDIRRFSSARKLVGYLGLDPRVRQSGSSDAHHGRISKEGSALARAMLGEAAWSVAKAPGPLRAFFERIRARKGPQVAATATARKLACLLWCLLTRGEDYAYARPSMTRHKIRQLELACGAPSCKGQQGVAGNRSVTLRETEREVARQAEAAYRRAVADWKSGGPAKMGAGATPGRASQGPSRGKAARQT

SEQ ID NO: 496698 - protein, 357 aa, unidentified
MGFILAKTVIGMDIGKKYSWCEAVSAETGEVLKERRLTNRKEDFVSFVETLPKPVRLVMEATGNSAYLYECWEDLVEEIQLAHPLKTKAIASAKIKTDRIDDGILAHLGMADLVPQAYFPPREVRDLREILRHRAFMVSLQTKVKNRIHSYLWKLGVETEDTDLFGKSGLSWLKGLGTREPYRALLDQDLKILEALQQEIKHATQAIDRLAKEDPRAHLILPIKGIGKYSAMLILAEIGEIERFPEPKKLVSFSGLCPSTFQSGRVSYHGKITKQGSKWLRWILVEAAQKYARTPGRLGDLFRRIEKKKGRKTAKVAVAREILVCIYHCLNKGVAFEENPKRVKRVESQHAPLVSGC

SEQ ID NO: 496699 - protein, 345 aa, unidentified
MIIIGADYHPAFQQIAFVDTETGEVQEQKFYRELAAQGKKVRVGMEASGHARWFERLLAELNFELWIGDAAEIRRKRERKQKTDRLDAQHILRLLLKDDFPRIWVPSWENRDLRQLLWHRHRMVQARTRIMNQLQAVALNEGLRSKKRLWREQGREQLEAFRLAPWASRRRHDLLELLDRLNPTIAELSQAIEQEVEKCPEAQRLMTHPGVGPLTALAFVLIIGGADRFQCGKQIASYLGLVPLEDSSGNRRRLGHITKQGNSLLRFLLVEAAQVTVRSLPEWRSKYVHLTMRRGRKIAKVAMARKLAVRLYWMMRKGWDYEQVKKFGSHAGQPGHRHGVKSNIE

SEQ ID NO: 496700 - protein, 344 aa, unidentified
MTLVGCDLHTRMQQVAVLDTGTGEVSERQLAHDGSAIEEFYAALPGPVTIGIESTGYAVWFHILMQRLGHTVLVGDAAKIRAMVVRKTKTDRRDALHLLDLLRHDRFPTIWIPDPATRDLRALLTHRMRLVRIRTMVKNGLHAIALNYRLARGSKLLRQAGLAQLHALALPPYTAQRRDQSLELLAGLTTQIRELDDAITTAALAHPDAPRLITHPGVGALTALATVVVLGPVARFHDSKHVVSYVGLAPALNASADKYHLGHITKQGSTLLRFALGQAASHAARMDADLKRTYCTLVHRRGRPKAKVAVARKLLVRLFIMLRDQIDYDEFQRRGRRTLAIASG

SEQ ID NO: 496701 - protein, 311 aa, unidentified
MKEPERFVGIDISKEEMVVAVRPTAELQNFPNTEEGLAALVGFLQPLGAHSIVLEATGGFARAAVNTMALAALPVVVVNPRQIRDFARSVGLLAKTDAIDARIIARFAEAVRPELRPLKDLETQKLEDLNNRRRQIVEMITAEKNRLVMAPPWSQKDIRSHIAWLEKRLKRVNDDIDDLIKQSPIWRQKEKILTSVLGVGPVVTTTLLCSLPELGTLSARKLSALVGVAPFNRDSGQSRGRRSCWGGRAHVRAALYMAALTASRCNPVIREFYLRLRLAGKPAKVALVACMRKLLVILNAMIKNNTCWQQA

SEQ ID NO: 496702 - protein, 340 aa, unidentified
MENTNQNQNTLWIIGIDVSKESLDVCLINNTDGQLFNGKFNNNLSGFRNFKAWCKTHSCECNGQSLSCLEHTGLYTRQLVHYLLSRQVNVWLESSLHIKRSMGLARGKSDAIDAQRIARFAFALQAEAKPLNLSGLTLEKLKDLNANRNRLMKAIQSLQVSTKELRQVDVESGKTIERINREAVHGLEKSLNAVEEKISEFIKADENLSKQFDLITTVNGVGKIMALLLLIYTQGCTKIIDGRKLACYSGVAPFEYRSGTSITGRTGVSKFANNALKRVLHMAAISSVQHNPELNEYYKRKTAQGKSKMAVINAVRNKLLHRIVAVIKRGTPYQTTFKKV

SEQ ID NO: 496703 - protein, 404 aa, unidentified
MSLDAHSNPAAIRVQLCAIFVSLELSRSTWLVTSLSPGSGEKMSQHTVMGGDLCGLLALFAVLRCRAQVRSGTVYPIVTIQEAGLDGFWLHRALEAEGIESHVVDAASIAAPRRRRRAKTDRLDGESLLRALLAWLRGEPRVCSMVRVPTPAAEDRRRPSRERQALIAERVRHVNRIKGLLFSQGVGDYEPVRRNRRARLEALRSGDGRVLPERLKAQIGRELDRLELVLEQIKALEGERDALLRAACAPPAAEPAPSAAEAPMPKGGGAPPIPAMLMGLKGIGADFAAVLWSEGLCRSFANRRQLAAYAGLAATPWCSGSINREQGVSKAGNPRLRTAMVQCAWLWLRHQRDTDLAHWFQERVRARPKARKTTIVALARKLLVALWKYVTQGLVIVGAVMKSA

SEQ ID NO: 496704 - protein, 435 aa, unidentified
MEQPTRFIGMDVHKDTIVVAVTAAGEVGKAMPYGTFPNTAATVEKLVRRLRQAGSGPLKFCYEAGPCGYGIHRALTKMNEDCMVAAPSMIPRKSGDRQKTDKRDAASLAVLHRGGLLTAVWVPDAAHEAMRDLIRARLAAVRAVRAARQQLSAFLLRHERIYPAGRTAWTKAHRGWLADQSFAQPAQQIVLEESIEAVRLGEQRRDRVDGYLRAQIPTWSLFPLVQNLSALRGLDTIASAGLAAAIGDPSRFVSAPDFMAYLGLVPSEHSTGPKRRIGAITKAGDVHARSLLIEAAHSYRFPARVARHKLTAVDAVPDAVREIAWKAQTRLCQRYRHMMAKGKLKQVVVTAIARELAGFVWSIACITTDPPTKNSAVTTPSEKICPTGSTTCSSVPRRQPIKETARRAERPGQIRTASADGKRPDRMIAHHHSSG

SEQ ID NO: 496705 - protein, 453 aa, unidentified
MKKESVKKGVIKMGTGLPVFNHHAAGIDIGDTLHYVAISDGAGGHEVKTTSAFTCDLEEIVDYLKSNGITTAAMESTGVYWLPLYLMLEDAGIEPYLVNAKHVKNVTGRKKDDTDSIWIQKLHTCGLLQKSFQPDSEIRLLRSYTRQRKNLILLSSDSVRRMQKALELMNIKIHTVISDILGKTGMKMVKAIIAGERDPQILSLLCDPRIKASPEEIIKSLQGIWREEHLFMLEQALENYEFHQKQIKSCEEKIKQQLLNQVATIMDGDITGLEEQLKKKSKAKAKKNQFDFAVGPYLKIIAGVDLCKVPGISEVTALEFIAETGVDMRKWFGSKHFDAWLNLTPNTKITGGSIVSSKMMKKKNRAGQCLRQAASCLSTNKTPIGGYYLRMRARLGGKGAALATAHKLARIIYTMLLNKIEYNPGILIDNEEKIKFERIKKLEKQLSRLKRAA

SEQ ID NO: 496706 - protein, 341 aa, unidentified
MSIITVGIDLAKNVFAVHGVDDSGKAALVKPKVSRADLLPLIANLPPCTIGMEACSGAHHWARLFRQYGHTVKLMAPKLVSPYRMSGKKGKNDAADAAAICEAVTRPSMRFVPVKEEHQQIILCLHRTRQGFVEERTACYNRLRGLIAEFGIVLPQKVACLRREICARLEDLPGYANLCVGDLLAHADQLDQRIAEYDRLIAKAARENAASRRLMKLPGIGPVTASAMLASIGNGHDFDNGRQVAAWIGLVPGQYSSGGKARLGRITKAGDNYLRSLLVMGARSILKSVGDKQDRFSRWARALQERRGYWRAVVAIAAKNARIAWAVLKYGEDFKPLPEAI

SEQ ID NO: 496707 - protein, 356 aa, unidentified
MNFNNNTLYVGMDLHKNTSSFCVKDYAGTILRQEKILTDKNQIRDFMLSLGKSASIVLEPVSQWYTYADMLEQLGHDVHLAHPMKVKAIASARIKTDKIDASVLADLLRSNLLPEAYFANKEVRKWKEIVRFRASLLNLRTQVKNKIHAILHKHALKHNFSNLFGKSGRIWLSNLSLGEPFASNLAQYLSLLDFLTKQIDEAEAQVEKQVSNHPHAKLLTSIPGVSFVSALTIMAEIGDINRFPSAKQLMGYAGLVPSTYSSGDIARHGRITKTGSKWLRYIMVEVAHHQVLCKKIPGFGSYYLGMKKRKGTGTAAVATARKLLAVVWRLLKDNRPYQETPPHRGKSGPLAQKYSS

SEQ ID NO: 496708 - protein, 316 aa, unidentified
MTKDNHNTCCAGVDVSKSKLDVVLWPCGTYQAFDYTAEGLRQLSRFMAEHKVGRIGFEASGGYERRLLEHLRAGAIPAVRLQPAQVKSFARAKLKRAKNDRLDAMLIAAFTASLESLPGLPSEVTMELAEHLTFIEQIEDQIVVVKTSLATTASVRLRRLYEAEIRRLEARREAELLRLAKVVEASEELSRRLARLCSIKGIGLRTGLALLIRLPELGSLSREEVAALTGVAPFDKDSGKTSGKRTVQGGRSRLRKSVFMAAFSARQWNPDLKAFYDRLRAKGKHHMTALVAVMRKLVILANAVVARNTDWQPTRP

SEQ ID NO: 496709 - protein, 400 aa, unidentified
MGTPHARIWVGIDAGKGHHWAVAVDADGQTLFSTRVINDEAQILTLIETARERADEVRWAVDISGRASTLLLALLIAHGQRVVYVPGRTVNRMTGAYRGEGKTDAKDARVIADQARMRRDFAPLDTPPELVGTLQVLTHYRADLIADRVRLINRLRDLLVGICPALERAFDYSAAKGPVVMLTAYQTPAALRRIGVKRLTTWLERRKVRGAGTIATKAVEAAQSQDIALPGESRAARLVRDLAHQLLALDERIKDNDREIHETFRADDRAEIIESMPGMGPILGAEFVAIVGDLSGYRDAGRLASHAGLAPVPRDSGRRTGNHHRPKRYNRRLRWLFYMSAQSAMMRPGPSRDYYLKKRAEGQIHTQALLALARRRVDVLWAMLRDKRLFTSVPPVTRAG

SEQ ID NO: 496710 - protein, 409 aa, unidentified
MRIIGLDIHRAFAEAVAWDDGKLKRLGRVDMRRHLLEAFAKKLTQEDVVVVEATGNAASVAAVITPHVKKVVIANPKQVRIIAHAKIKTDTIDASVLARLYASGFLPEVWIPDEPTQALRRQVTRRNQIVRQRSRLKNIIQSILHSHLIPSCPHADLCGASGRAWLFHQVLPEDEQLAVERHLREFDRLADDLKVIERDLARSALADEAVKRLMTIPGVDMVVALAIVAAIGEVGRFDRPEKLVSYLGLNPSVRQSGPGPAYHGRITKHGRGHARGMLVEAAWAAARAPGPLRAFFLRVRARRGQHVAAVATARKLTVIIWHLLSKGESYAWARPALHARKLRDLELKAGYRTERGQKGAAHAYNIKSHRDQERRWVEQAEAAYARFVAGWNPRGPKRARTGAANEVRR

SEQ ID NO: 496711 - protein, 350 aa, unidentified
MIIVGCDYHPGFQQIAFVDTDTGELQERRLQHREGAEKFYRDLAAQGMKVRVGMEASGHARWFERLLAELNFELWIGDAAVIRTKRVRKQKTDRQDAQLILQLMLENRFPQIWVASWENRDLRQLLWHRHRMVQARTRIMNQLQSVALNEGLRCKKRLWREHGREQLESFRLAPWASRRRHDLLELLDRLNPTIAELSQAIEQEVQKCPEARRLTSHPGVGPLTALAFVLIIGRADRFQCGKQIASYLGLVPLEDSSGNRRRLGHITKQGSSMLRFLMVEAAQVTVRSLPEWRSKYFHLVMRRGRKIAKVAMARRLAIRLYWMWRKGWDYEQVEKFGSHAGKLGTGDGVQ

SEQ ID NO: 496712 - protein, 356 aa, unidentified
MTSLSPGKGEKMSKHSVKAGDLAALLKLLAELKCKAQARTGEGYPIITIQEAGLDGFWLHRALQQEGIESHVVDPASIATPRRRRRAKTDRLDGETLLRTLLAYKRGEVRVCAMVVAPSPEEEDRRRLSRERRTLIAERIEHVNRIKGLLFAQGIFDYVPLRRDRRKRLEALRTGDGRALLPHLQAQISRELDRLELLLNQIAAVEREQDALLTASRPASEKTASDPVTLLLNLKSMGPNFAAVLWSEAFWRQFANRRQVAAYAGLAATPWRSGGIEREQGVSKAGNPRLRTTMIQLAWLWGRHQPQSALTQWFKAHSQRGRKRTIVALARKLLVALWKYVTAGVVIEGAVMKPIA

SEQ ID NO: 496713 - protein, 516 aa, unidentified
MFWSKKRGMPRREVGLEEVLTISPVTRRRSSPMKSKAYRAASVKDVKISEIISRLAEGPTWAGLDVGKGHTMVVIRDSQGTTLRPWKVLQPDEIRVIAELLKELKQHRPLVVAMEPTGTYGDALRQALHDAGLAVHRVSPKFTSDYAETYDGVPSQHDGKDAAVVAELAAFGKSRLWPMGPPAYGDLLQDVQWMDTQQDILQLWLGRLEGLLARHWPELTNLLELNSATLLRILAEYGGPQALCADAQASDNLKRWGRALLKPEKIEAVRESARSTQGVRMEPAECDFMQRCARAAQAARKEIQQVQNVLEKRAAGDEKLQRVGQAVGMVTACVLFATVGDPTEYSCGEAYRKAMGLNLKERSSGKHVGHLKITKRGPSMSRRWLYFSALRMIQHPAVKPWYEHKKSKHQDHGGQGVVGVMRKLSLAVYAVARGATFDAARLFPGRKPTAKPGPSETLGALPPDPRNLPPSHQSRTKNGTAGASDREPAARSASVTETALGSVSTGALSSVAAEQA

SEQ ID NO: 496714 - protein, 276 aa, unidentified
MQTITTIGLDIAKSVFQVHGVDAEGNVIFRRQLKRRYVLAFFEKLPRCLVGIEACVQALGHTVRLMPPAYVKPYVKRHKNDATDAEAICEAVTRPNMRFVVTKTPEQQSCLTLHRTRHLFIRQQTSVINAIRAHLAEFGIVAPVGRHGVAQLLGIAADSNDKRLPEVARACVAALGTQLQTLKAQILEFDRMITAWHRSNEASRRLDDIPGVGPVLATALVASIADPKVFRSGRDFSAWIGLVPKQNSSGGRDRLGNISKRGDRYLRSLFTTARWL

SEQ ID NO: 496715 - protein, 339 aa, unidentified
MVYVGLDVSVGRTAVCIMDAAGHVIREQSVASTPEAIATVIRAHGVPIERVGLEAGINSAWLARGLLEAELPAIVIDATHAAAALKTGFRNKTDKNDARGLADLMRVNKFRAVWVKSPAAQRDRALLTVREQLRRQSLDARNTIWSILQVEGLKPPKLTSPTFQALVVQALEDEVLAPLLRPLVAVAEHLDRQVAGLDKVIAARAKASAACQRLMQVPGVGPLVALTYAAGVDDPARFRDSRTVGAHFGLTPRRFQSGTMDWSGGISRAGDAGVRRALYQAANVLIHHSRGWCALKSWAVRLAKRRGLGKAKVALARKLAVVLHRIWTTGEDYRLKAAA

SEQ ID NO: 496716 - protein, 339 aa, unidentified
MYPFYLGIDLHLKRTFMVLINAKGEVIDKERISNKEIKDFLEEKVPQETYAVLEATRNWPFMYDLLNEHVQQVDLVHAKGVRAIANAAVKTDQIDASTLAHLARMNYIPKAYAATQDIRDLRQLLRHREWMVNQRSKAKNRIHAVLAAYNLISPVTDLFGAAGREYLHEVMENELRPSAQQVIEDHLAMIDHLTERIQAIVKNISLSEKQNHIVNLLKSMPGVGKLIALILLAEIGDISRFRSSKALCSWAGLTPKVHSSDAVVQHGHITKEGSRYLRSAMVQAATTACRVSPKWYRVHENMAFRCGRRAARVAVARRLLTVIYFMWKKDQPYQEDYGQ

SEQ ID NO: 496717 - protein, 355 aa, unidentified
MNDTKYIGLDVHQATISVAVLDSAGKLVMEAILETKAETILQFVHGLRGSLRVTFEEGTCAAWLHDLLKPHVAQVLVCDPRKNALIKAGNKSDRIDARKLADLLYLNKLSAVYHGETGIRALKEVARSYLALTRDTTRVMNRLKALYRSWAIPCAGQRVYAPRYRSEWLAKITEAGVHRRAEIYYQQLDALRSLREQVRRDLLAEGRKHSAMKLLRQIPSIGPIRAVLLIALIQTPHRFRTKRQLWAYCGLALKTSTSGEYRIVEGQLKRSKKFLAIRGLNQNHNHDLKNIFKGAATRAAAVPGPFQEFHAGLVVRGMKPTMARLTLARKIAAITLIVWKKGVRFDAEYLNQQAA

SEQ ID NO: 496718 - protein, 408 aa, unidentified
MPRYYLGVDWADRVHQLYGGDENGIKVMEMKVQENPEGLAELGRWLNQSRVEQVELWAAIEKPHGRIVDFLLDHGVVVYPVNPKVLDRARDRFRMSQSKSDPFDAWVLSDFLRTDHGHLRPLRPSSEQAQELKLLTRDQQRMVRHKTRLLNQLKFTLKEYYPRPIEVFGDLEARIAVDFLKQYSTPTALSKLSRKQWSRFAQQHPHLGQARSAKLWEELKKPQLVVPDHVVRAKAQLLEALLDQLEASLRSIEKYSDKVERFFASTPAARLVEKLPGGKSGTLLPALWAELGDAPARWESFKHLQAEAGAVPVTKSSGKSRIVEFRFSCNKQLRYAVYWFAFISINRSQWAKAFYRDQRARGHSHPQALRALGAKWLKIIFVMWRDHKPYDETHHLANIARQKLRQAA

SEQ ID NO: 496719 - protein, 377 aa, unidentified
MCQVTIVGCDLHDRNLLLSLAVGKNEPQEKPFRNDAEGRSAMIEFLWKFAERHGSGRIVLVYEASGQGYGLYDLLTDHGIECYVVSPAHLAKSAKRKKNKTDAKDARHLFEAARAHVLAGNELPVVWTPPAALRNDRELVRARLETAEAGTAVKLRILSLLKRQGCTLPPHRGWTKGFLSWLREGAALPEVVRPVLASLVARLEVLRQQQAQLDRELRKLAQTSRYRAPCAALRQLPGVGLVTALVFLTEMGDLTRFPNRRTVAAYLGLAPAAHESGEITDRKGHITRQGPSRLRKVLCQAAWAAVRCDPQAREAWTRIRGDRPQRGKKAIVAIMRRLGIRLWHAALAAGVSSDLVARPKPPPRQAPPATSPGGQAA

SEQ ID NO: 496720 - protein, 344 aa, unidentified
MNYYAGIDVSLESSSVCIVDATGEIVKEVKVESHPDALVKFFKAFGHPLLVIGLEAGPLSQWLYAGLTKAGFVTSLMETRHVKAALSATTVKTDRRDARGISQLLRMEWFRPVHAKSAGSQEMRALLVARKQLQHKLRDIELSLRGILRGFGLKVGKVTDKTFEARIRELVTGHPMLEQIAEAMLAVRAMLLEQFDKLHKAVLKIAQRDEVCRRFMTTPSVGAIVAITYKSALDDPGRIKKSRNAGPLFGLTPKRYQSGENDFTGGISRVGDEMVRTALYEAANVLLSRGTRFSALKRWGLEVAKRRGLKRAKVAVARKLAVILHRMWINGSTFRWTKTEAAHA

SEQ ID NO: 496721 - protein, 320 aa, unidentified
MLTTLGIDISKDSFHVELSIKGKLRHRKFRNRQEGFDELSVWLGKHSATALHACLEATGPYSEGLALYLHQAGHTVSVVNPALIKAFGQSELLRNKDDQPDAGLIRRFCEKQQPAAWTPLPAHLRELQALTRHLENLSETRQQQLNRLESAKARDVVKSLRKLVAYLDREIERAEKQIKQHIDNHPELKQQFHLLDSISGIGTRTAAALLAEIDFKQYRSARQLAAYVGLTPKNNRSGTFRGRTRMSKIGNARIRKALFMPAMVAKRHNPIVRNFCQRLAGNGKSKMEIIGAAMRKLIHIAFGVLKSRRAFDPNHELLVN

SEQ ID NO: 496722 - protein, 343 aa, unidentified
MDHFAGLDVSVKDTSVCIVDGTGKIVREVKVASEPDALLAVLRNPAYRFKRIGLEAGPLSQWLFSALAEVDLPAICVETRHMRAVLKAQINKTDRNDARGIAQMMRVGLYRPVHVKTLRSQKLRMLLTHRKLLQSKAIAIENDLRATLRNFGLKVGMVGTVKFEVRIKELVENLPDLILLVEPLLVVRRVLREQLDLLHRRLLAIVRDDAVCRRLMTTPGVGPVVALTYRATVDVPARFRKSKSVGAVFGLTCSKYQSGEIDRNGRISRCGDEMMRVMLYEAAQSMLRSKKWSWLKAWAMQIARRRGMKKAIVALARRLAVIMHRIWVDGTEFRWTREAAAAA

SEQ ID NO: 496723 - protein, 332 aa, unidentified
MVFNHYLGIDISKKTLDAALLLREGVVEGQIKVSNDKKGFKDLLSWLKKLKISPTEVLVCAEHTGIYGYDLQVWLDEKAIKYAMVPALEIKKSLGIRRGKNDVVDALRIAEYAYIRRESIVLTHRPSETIFQLKALITERKLYVRSRAGLLSRKDAMEKYESREGRKRREEAIKKFSSYIESLDGQIEDVISNDPDVLRNYQLVRSVKGIGLINAVNTIVYTNNFTSFQTARQYACYIGIAPFEHSSGTSIKGKTMVSSLGNHQLKCELTMAARNAVCTDPWLKGYYKRKMAEKGNMRGAYGIVLNAVKFKLVVRMFAVIKSGTPYKTLTYC

SEQ ID NO: 496724 - protein, 339 aa, unidentified
MKKNEVKKYENFIGIDVSKETIDVSIFVGEQKKLQYKQFSNDDAGFGSMDKWFKKQEGFNYPLTLACMEHTGIYTRLVQKHLLNKGANVWLESSLQIKRSLGLNRGKTDKIDSKRIAEYACRFSDKADLSGCYSKNMQKLKDLLTSRERLNKALKSIVVTIKELKKIDKEQGMEIEMLNLSAIRGLKQSIVEVEKTIEEVIKADPQLKEMFSLATSIPGVGKILTIKLLVYTHAFTKFESARQLACYCGVAPFEHRSGTSIHGRTGVSKFANNDLKCTLHLAALSSVQHNPELKKYYERKVEEGKSKMSTINAVRNKLLSRIVAVINRRTPYVNIQLAA

SEQ ID NO: 496725 - protein, 338 aa, unidentified
MNYVGIDHHRQYSHMTVMDQMGQVLRSGRVPNLQNDIGKFLEGFEAVEAVIETGRSSYTMVDVLEEMGVTVKIVHPNEVKAIARAKIKTDKRDSEVLAHLLRMNMIPEVYRRSPENRRDQRILRQRAFYVRAMTALKNRVYALLAQQKEEVRQEVARETNIFSVKGQKTLLGLDLTRGEKRLLEALLKTYRHLETRIAESTALIEKLYEEIREAQLIRTIPGFGKYLSVLVAVEIADLSRFADPAHLHAYAGVIPSVHSSGDKTYYGKIIRAGNRWLRWAAVEAVWPAIRADFDLRCFYERLARRKGANKAKVATARRLLTIIYKVWKEQRNYIPYRR

SEQ ID NO: 496726 - protein, 392 aa, unidentified
MIYVGIDVAKDKHDCFITNSHGDVLFKSFSISNNRDGFETLFQRIESVSDELNKVKVGLEATGHYSYNLLGFLLDKGLPTYAINPLHTNLYRKSLSLRKTKTDKVDSRTIASMMMSDMNLKSYSDTSYHNEELKSLTRYRFDKVKERAKLKTSVSRLVNILFPELETLVPQLHMASIYALLSEFPGSSYIASAHLTRLTNLLSASSKGHYSKDTAIIFRETAKTSIGSVMPAKSLELKHTIKLIQELTIEIDEIEAEIKRIMDEEIDSPILTIPGISYRMGAMIIAEIGDFSRFDSADRILAYAGMSPSTYQSGQLDNCYAHMEKRGSRYLRYALYNSTKYVCQWDESFAAYLAKKRAEGKHYNVALSHAAKKLVRLIYAMEKSGQPYSKAA

SEQ ID NO: 496727 - protein, 383 aa, unidentified
MKSVCGLDVHKDSVYLCILSEFGELIEKVFGVLTYQLEEMRDLMLHHHVVEVSMESTSVYWIPIWRVLSPHFKLNLANPYFIKQLPGRKSDVKDAQWIAVCTMKELIRGSFVPPEIIQQLRQYDRRIFDLNEEIVRKLSKLDAVLQRCNIRLSNYVSNVDSKSYKAVVRAISQGITAPEELVKLIHGRIINHHGIDVITASLKGVVSLAEIDMISQLRDELDMAEAHKEKCQARMLEICEREFPEELKRLQTIPGIKERAATSLIAEIGTDMNKFETANHLASWSGLKPRNDESNKKIKSRSITHGNVYLRKTIIECAWAASRTKDCFFSRFSYHQTQVRKKNKMKVLVAVARKMLIAVWHVLHDNTIYIDFTTDRKTSQTRG

SEQ ID NO: 496728 - protein, 455 aa, unidentified
MVEKRKQKRVDRGNMDRIHAHAAGVDVGSTFHVAAVSGKLTDAPVQSFKSFTADLHAMADWLSSHGVKTVAMESTGVYWIPLFEVLETRGFEVILVNARDVKNVPGRKTDINDAQWLQQLHEFGLLRASFRPREEIAQLRAYMRQRDRMIEYAASHIQHMQKALMQMNVQLHHVVTDITGGTGMKIIRAIVGGDSDPVRLAQFRDRRCKESLETITAALSGNYRREHVFALRQAVEFFDFYQAKIRECDGEIEVTLAALNSKRPEPSDPLPPVRHAPSRNEPQFAVRETMHAMLGADLSQIHGLGPYTVLRLVAECGDDMAKWPTVKHFTSWLTLAPGNKISGGKLLSSKTRRSSNRAATLLRIAAVNVGRTSTALGAFYRRLAARTGKAKAVTATARKLAVLFYNAVRFGLKYNDPGANYYEERYRQRVLHNLRRKAEHLGFALVETPATEGVS

SEQ ID NO: 496729 - protein, 429 aa, unidentified
MNYTQNEKIEQVTDSTMVVGVDIGSQIHYARAFDNRGRELTKRIFSFHNDLEGFNSFNLWAETLKTENKKTAVLIGCEPTGHYWFAFVKYVNDHQKRLVMVNPFSVKKIKELDDNSPKKTDSKDPKTIAKLVVDGRYSIPYMPEGIYAEIRDLVYSRDRIMKQHNISANRIQRWLAIHFPEYLGLYTRFDAISGLAVLEKAPLPKDVIALGVNGIRKIWHDKKMRGRGVTEDRAKTLVEAAHNSVGLDGGIGTKSELYMLLEEHRLWTSQLEAVNKVLEEMILKVPHVEKLLAIKGVGSITIAGFIAEVGDIRRFDSPKQIQKYAGLELVENSSGKHKGRTRISKRGRRKLRKILYQVMVPLLARNKEFRGIYDYYVTRVKNPLKRRQAMVAVSCKLIRVFYAVLTKGVEYDRFKMMSDIHRKSDIIAA

SEQ ID NO: 496730 - protein, 370 aa, unidentified
MKKNNTNPGSSKQAGKSGPRGLTIGLDLGDRSSRYCVLDDNGEVVQEGSLATTKKGLAQVFGSRKRSRIALEVGTHSPWVSRLLSGLGHEVIVANARQVKLISQSTRKDDKLDAQMLARLARLDPQLLRPIRHRSERAQLDLTHIRVRAALVEARTSLVNAARGLAKALGERLEKCDTDNLDMERLAGLPEAVQQALRPLLEEVASLTEKIHACDEGIEQIARTEYPETGLLRQVKGVGTLIALTMVLTVEDAERFQKSRDVGCYVGLRPKRSESGERQPQLGISKEGDVYLRKLLVQGAHYILGGRGPDTDLKRWGQKLSARGGKNAKKRAIVAVARKLAILLHRLWVTGEVYEPLRNSMAPAAKQKVA

SEQ ID NO: 496731 - protein, 312 aa, unidentified
MKNDTIGVDVSKDHLDAHRLADGATRRFANDKGGHKALIKWLAETPLNRVVFEPTGPYHRAVERALGASGVPFVKVNPRQARRFAEATGKLAKTDRLDAAILARMGSLLELGARPARSEGLFELKELYVAREALVKDRTAARNRGKALTLSLLKRQNAQRLEQIDRQIATVEAAILQLVEADESLADRFAILISIPGVSNITAFALLIAMPELGSLEAGQAANLAGLAPIARQSGRWTGRSFIRGGRADVRQALYMPALVAARFNPDMKAKYAHLIETGKPAKVALTAIMRKLVVLANALLKANRTWTPRTA

SEQ ID NO: 496732 - protein, 338 aa, unidentified
MIAVGVDTHKQQHHAVALDGLGQVLGEIVIATTLAGYSQLVCWLRELGENVLVGIEGAGSYGAGLCEFLQAEEVEVFEVERPQRRERRSGKSDRIDALLAAKKVLTGDGLSTPRGSGKRLALQMLLAGYRSIVSERSRLYNQLQALQISAPYTLRERIGQARNGATLANRLTGMRTRPTATQQENLTLQVLRDIANRARALDTEAENYTRQIEEMARSLAPSLLEEPGVGPICAGRLLAFNPARFTSEAAFARANGTAPQPASSGKTVRHRLSRGGDRQVNAAIYTIALSRSVHHPPSRAYIQRKTTEGKTKREAMRSLKRHLSRHLYNQLARTPLTT

SEQ ID NO: 496733 - protein, 345 aa, unidentified
MQHVAIDLGSKESQVCVRGVDGQVLYEKKHPTRGLALLMQSWPTSRVVLETSSEAFRVADAARAAGHEVRVVRSTLAKELGVGERGIKTDLRDARKLSEVSTRIDLPSVHIPSEQARELRSLVRGREMLVSSRTRMINHIRGWLRTQLLKLRGGATSSFPARVRATASQHKHQVPMHIEQLLVVIDALNLQILASNRQMRALVKANEVCRRLMTVPGVGPVTALAFVAAIDDVSRFPHAYRLTSYLGLTPGEDSSSLRERRTSITKAGSTSVRRVLVQAAWSAYWTRPNEPMVRWAKQIADRRGKFIAIVALARKMAAILYALWRDETSYRSERAAQLEAEVQTS

SEQ ID NO: 496734 - protein, 344 aa, unidentified
MTYFAGIDVSLKDSSICVVDTDGKIVREAKVASEPEALVAFFNTVGIVVSRIGLEAGPLSQWLHDGLSRSGYDVVLLETRHVKAALSAMVVKTDRKDARGIAHLLRMGWFQPVHAKSLGARDTRALLAARKLLQSKLIDVELSIRGILRGYGLKMGKISKGRFEARVRELIEGHAMLEEITTAMLRAREALREAFAKLHRQILAIARVCPISRRLMTAPGVGALVAITYKSGIDDPHRFARSKSVGPHFGMTCKKYQSGETDVTGGISRVGDASVRTALYQAAHIILSRETPYSSLKRWAMQVAKRRGLKRAKIACARKLAVILHRMWVDETDFRWGKETIAAA

SEQ ID NO: 496735 - protein, 340 aa, unidentified
MNATTYGLDIAKRVFQLYWVETESGEIHNRKFGRQALLEFLAQQEAGLIAMEACGSAQWWRRKLMALGHEVKLIHAKFVRPFVQTNKTDAADAKAIWTAIRQPGMRTVAGKTEEQQAMLSLHRMRMSLIRFRTMQVNQLRGLLYEFGVTLKGGRQAGLSEMQQRMAELEETVPGMLFEAIKEQLRRLADIETDIQDIERRIKDWQKQQEACRKIAEIPGVGMLTATALVATMGEANSFKSGREFAAFVGLVPRQSGTGGKVKLFGISKTGDTYLRTLLIHGARAVMFKAKDKGEWCEEILKRRPTNVAIVALANKMARTAWAILAHGREYQKGYVSVVPA

SEQ ID NO: 496736 - protein, 391 aa, unidentified
MTKPKTKTVNDFSRCFDLLDMDATLIAVIEMSQSSWLVAGIVPGVERQPLKKLAIDEHALLNLLNRWRAEAEKQGHRITRIAVAFEAGHDGFWLARWLAAQGIEAHVIHASSVAVTREHRRAKTDRLDTELLKRGFLGWLRGERGHCKMVAVPTLAEEDAKRPSRERETLVGEASRIITRLKSAFVRLGIRGFNPKLKAAATRLETLRTPEDEPIPPNTLAALKRDLERHQIVKKQIRELEQTRLESLAQAPAKGPNVMVLLLARVIGIGVETADMLVQEVLSRTMRDRRAVARYAGLTGSPDESGAKRRDKGLARSGNARVRHGMIQLAWRFLLFQKDSALAQWYRQRTANAPSMRKPLIVALARKLLIALWRLARDGVVPEGVRLRPAT

SEQ ID NO: 496737 - protein, 476 aa, unidentified
MEAQKQGARRPDERSWHEMNRKQRREIARRIQSEDLRLEVVHPDAAGVDIGNESHYVAVPATRDRQPVRRFGCTTAELKDMATWLKQCGILTVALQSTGVFWIPVYDILEEAGLEVYLVNARDTKNLPGRKSDVQESQWLMKLHTYGLLRNSFRPPQEVRRMRTYWRQRNDLVRSAGRQIQRIQKALTQMNLRLANVLSDVSGVTGQAIIKAILTGERDPRKLAAFRDKRVKASEEEIARGLEGNWQEDLLFMLKQEQEGYEFCQKQIAECDARLEQYLQQTPDRSQGASLPEEKRKGRLQKKAKNPQFNLRTALFRITGTDLTQIDGIDVRTAATVISEAGWDMSKWENENHFVSWLRLCPDNRISGEKVIGKGRLRTNNRLATALRMAASTLRESDTYLGAQFRRLRTRLEAPVAIKAMAAKLARLVYRMLRYGMQFVDRGAMFYDARHRQRQINSLKRKAAKLGFQIVLAPAT

SEQ ID NO: 496738 - protein, 374 aa, unidentified
MENTITYVAMDTHKKQHKIALHYPCREEIVEFTINNAVRDIKKMVNKIKKQAPGEVEFCYEAGVCGFTLKRRIEQFDCRCCVIAPSLVPRKPGDRVKTDRRDARKLLMMYQAGLLTEVHAPNEHQEAARELTRLRETARDNLKRIRHQLLKLLTRHGYVYTEGRHWTQRHITWLRTIQFTESTLTGVFENYFNEMIYCIGRLENLDREVGLLADSQEYKEIVGLLCCYHGIDTLTAITIITEIFEFGRFESPRHLMSYLGLTPSEDSSGEKQKKGAITKAGNKRIRRLLNETSWHYRHRYVPSAALKKRRKGQPQWAIEIADAAGRRLSTRHRYLINKGKMPCKANIAVARELAGFIWFTVTQYQARKNTNDAA

SEQ ID NO: 496739 - protein, 413 aa, unidentified
MHVTCGIDWAEDHHDVAVVDCDARLLGKLRISDDAAGFQDLLRLLAEHGDSPDDPIPVAIETSRGLLVACLRASGRKVYAINPMAVARYRDRHIVSRKKSDHQVSVVLANILRTDAEVHRPMPSDSDLVRAIAVLARAQQDAVWDRTRAHNRLRSHLREYYPTLLEAFASKRERLLSREARAILAIAPTPAEAARLSRSRLRAAVIRAGRQRRVEAETDRLLEVFRRTWLRQPTLVEKAMGRQTLALLAQLDAACRACDDLAHDTEDMFLQHPDAEIITSFPGLAILTGARILAEIGDDRSRFGQARDLKDYAGSAPVTRESGKSRRVTHRRIKNSRLAATGRHWAFAALTASPGAHAHYNRRRNNGDRYHAALRHLFNRMRGQLHHCLTSHQKFDEAIAFSRPEPSSLATAA

SEQ ID NO: 496740 - protein, 309 aa, unidentified
MDIIVGIDVSKERLDVAVSPSGASFCVGNDHDGIEELARRLKAEKADLVALEATGGFETLAVAKLSACDICVIVVNPAQVRAYANAIGRRAKTDAIDAALIAAFVTATKPQIRPLRDAQTQALSALVDRRRQIVQMIVAEENRLRMALEKTTHKSIRRLLDALRREMESIDKDLDDHIRKSPLWRVREALLTSVPGVGRATARTLLAEMPELGSLDRRQIASLAGLAPWTRQSGKWKGKSFIGGGRSKVRAVLFMAALVASRHNPFLKAFRDRLVASGKPKIVAIVATMRKLLTILNAIIRENKPWQNA

SEQ ID NO: 496741 - protein, 330 aa, unidentified
MEKWNVILGVDVSKLTLDISCAERKLYLKIDNQAKGFAMFKKWCRVNAINPNEALIVMEHTGGYEYRFMQFCESQSIQYCRIPGLEIKNSLGMTRGKNDQVDAFRISRYGEEKIKKLIPSGPLNKSILTLKKLLSFRKRLVREKAGLESTVKERRYMYRTDKKDTILQIAQAKVKDNKKYIRQLEQEIMTLIKDDEILLRNYRLITSIKGIGNVNAWMTLAYTENFTSFANARKYAVYAGVVPFSHRSGTSIKKRDRVSHLANKEIKQELNQAAKTAIIHDPELKAYAERKRQSKCYPLVLNNVKFKLILRMFSLVKRGEKYVDNYKRAA

SEQ ID NO: 496742 - protein, 347 aa, unidentified
MKILALDLGKYKTVGCDYERESGKHRFRGSFTTPAALQQLVKEVKPDRVVIEVCNIAGWVCDLLRGMGVEVQVANTSDDAWRWRKVKKKNDRCDALKAAQLSAVNQLREVHIPAIDVRQWRALIAFRQQLVKRRGKVKNHIRDLLLVEGEILPRGAKCWTQLGVARLEAMAKPLQEAGMKELWRGQLYSELRQLREVQQEITVAEEKLDAIAAADPRVALLRTIPGVGPRLSEAIVALLDRPERFHKASQVSAYIGMVPKQFDSGESERHGRITRHGSRLVRSLLVEVAWAGLRYNPWVRQTYQRISGGKKSRKKIAIVAVGRRLLVRCWAMLRDGTSWRAPVIKAA

SEQ ID NO: 496743 - protein, 481 aa, unidentified
MIKSVGIDLAGNGEHKVRCLDEKAEPCDGFGFETTPAGLAKLEERVFKDGSNPMVVFEPTGLAWVPVAVYLRARHPDCRLVRTQSRNVAALRKYLRRSSKSDKIDSLTLAKMPFVDAERLNDVFLPPAKIYAIQRLARQRRRLESDMAARKTRIISILDGYLPGVRLAFSTLWAPQAKAFLSSRLNPFAVVQDGEKALDRFLTMARSRHRKDTAESHALYIACQAVAMIYERSLSAGTINDDFFTALEEELGRELRLMDAEEAESQSITQRLKELYQELHPSDNLRTIPGVGEQTAPVFLAVVGDPARFHSQSAFANFNGVVPNSKQSSQTESKGLRMTKAGPAIMKWALYQSGQIGRRCDPQLASLYYREMVHNGKNHKQAMGAVMSHIGARILAVLRENKPYELRDVQGKPITWDEAKKLIQLNYHVPEEIKRDRRRRRTLGDSVNRRLRARREMLAGRVREAAEAPQSAVSSPSNQFN

SEQ ID NO: 496744 - protein, 426 aa, unidentified
MDKAPRRCIGLDVHRDFAQVAIWRGGQVRQAGTFATTPEGVREFAGGLGPADEVALEATGNTWAIATLLASHAGRVVVSNPAKTRAIAEARVKTDKVDAEILAQLLAADYLPSVWMPDAETSALRRQVLRRAHIVRQRTRLKNQVHAILARNLVPRCPAADLFGIKGRAWLAAQELPPDEQAAAAALLRQLDFHAEELALIDADLGQAALGRPEVLRLMTIPGVDATVALSIVAAVGDFTRFRTPERLVSYLGLNPRVRQSGGQPASHGRITKAGPAHARGMLVEAAWSASKAPGPLRAFYQRVRARRGMHIAVVATARKLAVLCWHLIIKGEDYAFALPSLIAHKQRKLELRAGAPSARGRKGPAARYSLAAVRAAERDLAAQGEVAYRTMVAAWQPARPPANPARKKVAGAAASKGTRLIKPAG

SEQ ID NO: 496745 - protein, 338 aa, unidentified
MGRFMGVDLHRNCFTVCLIAENGREYLSEYYLDDIDRFLGKLRCDDEVAVEVTGNTRLFYDLVAPHVARVAVVNPSEFRVIRQSTKKTDQHDARALALFLSKNLLPEVRMKDREHAELASLTQTRDALVKQRTALKNKVNNLLSSQGVNLSKESLASEKGLRQVLGMKFTPLVEIELAVLVEQIRAINASVAKLEGTIKEEGAKLPGHKNLKSIKGIGDLGATILLSVIGDVNDFANEGKLAAYFGIVPRVNNSNETERSGRITKRGTKLGRTTLVQCALIAKRYSPYLARFYERIKSRRGTGKAIIALAKKFLGIIYNTLKEDWVFADFPKFELATE

SEQ ID NO: 496746 - protein, 317 aa, unidentified
MAQKQVSVGIDVAKEKIDAAIRFGAEASFANSTEGRRELLAWVKEHGVCKAVMEASGGYERSWAALLRGAGLEVVIVDPKRVRHFAKSAGQLAKNDPIDARMIAWFGEVFGQASGQPHDEERQELDQMVTARIGIARLKEQIEGWAEHDQPKAVQKAHQALLKAVVLQLDKLEDVIAAKIDKTEPFAQRDEIIQSVPGLAGTAAAGIIAFLPELGLVDRQAASALLGVAPFNDDSGKRHGERHIQGGRRKLRKLLFMPIVGAATQHNPVLKAYYQRLIAKGKKAKVALIACMRKLIGILNTMLARREKWDPTKHAIA

SEQ ID NO: 496747 - protein, 326 aa, unidentified
MQGKEASEQEANAKSSVGIDVSKDRLDVHVLPCGARRALANSSAGIRQLKRWLQRFELDLVVVEATGKWHRRVWRSLSASGIPVAMIDPFKARMFAKANGVLAKTDRLDAAVLARFAAVMMPAIRLPPAPVVEELAELVSGRDAAVAELTGLKNQVSAATVGVLRRQLMQRIARLADDIDALESEIMARIAADEGLARRYQILTSIPSIGPVVAATLIAHLGELGGLTDKQIAMLAGLAPIADQSGKRDGKRVIWGGRARVRRSLYLAAVSAVRCNPSMRDFYRRLRAAGKSAKLALIAVARKLVLLANVLIAQNRTWQPSPPLHA

SEQ ID NO: 496748 - protein, 348 aa, unidentified
MDHIGIDVHKRDSQIYILAEGGEVVEQRIRTEGERFAAVLGARPRARHLIEASTDSEWVARCLEALGHEVIVADPNFAPMYATRSRKVKTDRRDARALAEACLLGAYRPAHRLSDPQRHVRGRLGVRDALVHTRTRYISVIRALLRQHGYGVPSGSAERFTDRVRGLPLPGRLRSVVAPLLAVMGPLNQQLAYSDATIEHLAVQDPRVPRLRSVPGVGPVTAAAFLAAVDDAQRFHHAHQLEAYLGLVPREYSSGETQRRGPITKAGHSRPRWLLIQAARSILRCRPPAAEALWTWALRIATRRGTHIAVVALARRLAGILYALLRDGTVYAPRPTRHHPDPVAALHA

SEQ ID NO: 496749 - protein, 335 aa, unidentified
MTQSLSSGPISSGPIFIGIDVAKAKLDLARSDHPQVLTVTNDTGGIGQILQMLSDLKPAIIVVEATGGLERPLLDALLDADLPAALVNPGRVRHLAIGLGILAKTDAIDARVLVEFARLAEPRLSEKRSKHRVELQALITCRRQLVHVKTEQTNRRATTSSKPALKAIDAVLLTVDKQIRKLDGQIKDLIDGDDDLYRQDKMLRAVPGVGAVLSTTLLAELEELGRVDRRQISALAGVAPMNRDSGQTTGARSIRGGRTAVRCTLYMATLAAMRFNPVICAFARRLAGTGKKGKVLIVACMRKLLCLLNAMLRDNLQWHELNVVRRTLAPTGGAK

SEQ ID NO: 496750 - protein, 407 aa, unidentified
MEVLYPRCAGLDVHAETVVACVRLATGATVRRDHRTVATTTQGLLELGQWLASLEVTHVAMEATGVYWKPVWHVLEEAFTLVLANAMHIRNIPGRKSDVNDATWIADLLALGLIRSSFVPPAPIQDLRDLTRTRTQLVRESARHTQRLQKTLEDANLKLTEVISDVRGVSGRAIVHAIIEGETDPDRLARLAHPRLEATPAQLVEALTGRVTSHHRFMLKLHLQQITTLEQAVRDLDARIEEMLRPFRAVVDLLVSMPGLKARAAAVIVAEIGTDMTRFPTAGHLLSWAGLCPRLDESAGKRRSNRTRRGTPWLKTTLVQVAWAAARTKQSYFHAQFLRLKSRRGPKKAILAVAASMLTDIYVMLRDGVFFEDLGDQYFAQRDKTRLTARLLKRLRDLGVEVEIKAA

SEQ ID NO: 496751 - protein, 388 aa, unidentified
MPRQRKPNDFSRSLIALDMDTTLIAVVELSLSSWLVAGIVPGVERQPLKKLKTDENALLTLLNRWRDEAVRSGHKISRIAVAFEAGRDGFWLARWLNARGIEAHVIHASSVAVSREHRRAKTDRLDTELLKRAFVGWLRGERDHCKTAAIPSLREEDAKRPSRERESLVGEQSRLVNRMKATLIRLGIRGFNPKLRHAEQRLETLRTPEGKPIPANTLAELKRDMQRRRFICDQIRSIEQERLERLERTPDTEPHAMVRLLARVTGIGIETADLLVHEVLLRNMRDRRAVARYGGLTGSPDRSGGTNREKGMARSGNARVRRGMIQLAWRFLLFQKDSALAQWYRQRTEHAPKARKTMIVALARKLLIALWRLVREGVVPEGVTIRPA

SEQ ID NO: 496752 - protein, 340 aa, unidentified
MSLYGGIDLHANNSVIVLLNEQDKVIYRKRLSNDLPTILEQLVPYNAEIKGLVVESTYNWYWLVDGLMEAEYRVHLANPAAIQQYSGLKYTDDDSDARWLAHLLRLGVLPAGYIYPKAERAVRDLLRKRAHLVRQHTANVLSVQNILARNTGVRFSGKRIHELTKRELTTLLAEETQVLAVTSSLVVLDCLRHQIKMLEQSVHKRLHHTPSYEQVLTVPGIGPILAQTITLETGAISRFPTVGNYASYCRCVDSTKLSNGKRKGTGNVKNGNPYLAWAYMEAAQFAMRFQPEAQRFYQRKLAKSRHNTVLARKAVAHKLARACYYLMRDLVPFEATKAFG

SEQ ID NO: 496753 - protein, 338 aa, unidentified
MNIVFLGIDLAKNVFQLCGLNQAGKPVYTKRTGRKELLQTLANIPACLIGIEASTGAFYWQREFEKLGHKVKVISPQYVKPFVRGQKNDGNDAQAIAVALMQPTMQFVPPKSPEQQDIQALHRARQRIVNHRTATVCQIKGLLLDRGIPIGSAVSRVRRAIPLILEDAENGLSSCMRRTIAELYELFNDLGRRIHFFDKEIETVFRQSEACQRIARVKGIGPKTATAVVAAIGKGTEFKNGRHFAAWPGLVPRQHSSGDRQVLMNMTKKGDKHLRTLFIHGARAVVRVATNNNDGHMNQWVNQLKERRGFNKTTVAVANKNARIIWSMLRNETEYQVV

SEQ ID NO: 496754 - protein, 319 aa, unidentified
MARPGCTAYAGVDVAAKSSAGGQQLDALRRRAGAPAAGTLVALEATGACRQGAAPALTAAGWAVSVASPASARHYAQARLRRAATAAVDAAVLAAYGRDRRPAPGTPPPADVPALQPLIRQRDDPVACRTPATSRRHAPAQLPDVPAEVRQPRAALLHVLRERIAALDAAIRRRAAAAASIVTEPACLTSSKGVGALPAAIVLTAARPLHRRLTPQRAVACAGLDPAPRRSGGPVRGAPRIGRTGNARLRRALYRAALSAARSTPLLRPFYQRLLARGKGRKVALVAVARKLLAPMITLPRPHRTFDPRGAANHPPRGR

SEQ ID NO: 496755 - protein, 416 aa, unidentified
MEIEHTHCAGLDVHKKTVVAAIIVPDGQGGLRKEVRTFATMTADLLALSDWLLSFGVTHVAMESTGEYWKPIHNILEENFEVLLVNARHIKQVPGRKTDVMDAEWIADLLRHGLLRGSFIPPVGQRELRELTRHRANFVRERATLVNRIQKTLESANIKLASVASDVMGVSGRAMLDAIITGTANAAEMAGLAKGRLREKREQLDKALQGRVKPHHRFVLSEYLCQVDNLDETIARFDAEIEKYCHPFEEAVELLDTIPGVARRTAEVVVSEIGSDMSRFPTANHLAAWAGVAPGNNESAGKRYSGTTRHGNRALTVALVQAAHAAARSRNTYLSAQYHRLAGRRGKKRAIVAVAHSILVISYHIIQRKEPFRDLGGDYFDLRRPEATAKRLLGRLQHLGYDISRIQQPCILPVAA

SEQ ID NO: 496756 - protein, 294 aa, unidentified
MHYIGLDVHKQSVSYCTKTAAGEWVEEGRLDATREALESWAQAQPPWRGAMEATLFSGWIHDTLAPYADDLAVGHPAAMEAITRAKKKSDRLDSAKLADLCRVNLLPRVWMPPRELRELRRLLRFRRRLVEQATWSKNRIATLMMEIGEPYAKSKLHHKRYFYRFLDDLKASETDLLLLAASRDRLEDSAELARLVEKRLLEHPLLRERVARLQTIPGVGAITALTWAVEIGDPRRFRSLDRAVSYRGLCARLNESAGKSKRGPLSKQRNPHPQHVLIEAAKLAPRWNEPLARL

SEQ ID NO: 496757 - protein, 338 aa, unidentified
MKLYGAIDLHSNNNVTVLTEEKDKVVYQKRLTNDLPLILEQLSPYASSIEGIVVESTYNWYWLVDGLMEKGHRVHLANTAAIQQYEGLKHTDDDSDARWLAHLFRLGVLPEGYIYPKEERAVRDLLRKRSQLVHQKTANILSIQNLYARNTGQSISANRIKQLSSEKVDAVFPNADLALAIKANLTVMRTLESEVATLERVVKDRIKLRPAYRHLLTVSGIGQVLALTIMVETGDIRRFAKVGNFASYCRCVGSEKLSNGKRKGTGNTKNGNKYLSWAFVEAANFAIRFEPLIAHYYQRKKAKTHRVVAIKAVAHKLSRACYYVMRDEVPFDVNRAFA

SEQ ID NO: 496758 - protein, 387 aa, unidentified
MEGKIRPRGDVLGLDVGKSSHWACLVARDGEVAANGPVPNTEADLDALFAQVGGDTLVVVDQVRNIGSLAISRARLAGLEVAYLPGTAAHGAARLFAGDAKTDERDAMVIAKTALGIPDALLPAPREDDGLRAARSMAAQRDYMVASSTRDKNRLRSVLLESCPAFEALCDLSDPSWLKMLEKLGGPWGIADAGKAAMGAVTRGADRASMDAAWRAITTSTRPAECVVRAENPQVKMLARRISESVAEARSLDGLIAEALSGDATYECLLTVPGIGPRTASELVIGIDISEFPDHDHLASYCGVAPRNRRSGTSISSVSASRQGNKRLKNLLIFSCNSLVRSRGRFGEYYRACRGRGMCHGEALKAVARKRVKVIYAIMRDKVPYAA

SEQ ID NO: 496759 - protein, 312 aa, unidentified
MAKDTIGIDVSKDRLDIFWHSRGEARSLPNSGEGFGQLCDWLGEEEGVLIVFEATGAYHRGLERHLSLAGLHFIKVNPKQARRFAQAIGRLAKTDSVDARMLARMGVVLDLAPQAIEGEDVHDLKELLTARRALVKDQVTAKTRLATALNPLVREQLCRRIDDIGADIESLDEAIAQIAKQRGTLEARIRRLMTIPGIGRLTATTMLIDMPELGHLDSKKIAALAGLAPMTQQSGKWQGKERITGGRSSIRRAIYMPALVAIRFNQDLRDKYQQLLKAGKAKKVAITAVMRRIIVLANTLLREDRDWQPERP

SEQ ID NO: 496760 - protein, 401 aa, unidentified
MAQQLWAGVDAGKSDHYCVVIDADGKRLLSRRVANEEAALVELISTVATLADGGELTWAIDLNAGGAALLITLLIAAEQRLLYIPGRTVHHASGGYRGEGKTDAKDAAVIADQARMRRDLQPLRAGDDIAVELRILTSRRTDLVADRTRAINRLRAQLLEYFPGLERAFDYSTSKAALILLTGYQTPDGLRRAGPARLAAWLRKRKGRNADAVAATAIEAANAQHTVVPGQQLAAAMVARLAEEVMALDTEIGNTDAMIEERFRRHRHAEIILSMPGFGITLGAEFLAATGGDMDAFANPDRLAAVAGLAPVPRDSGRISGNLKRPRRYNRRLLRACYLAAHIAIRTDPASRTYYNRKRAEGKRHTQAVLALARRRLNVLWAMLRDHKLYQPATPPTAAAA

SEQ ID NO: 496761 - protein, 392 aa, unidentified
MRSVGLDLGACHIAWCEVVDGRVTRRGSVRRLEELTAVLGPATAPARVAFEACREGWHVHETLEQWGKQPVMLDTTRVRQIGVGQHGRKNDALDAEAIALALDTGRVPVAHVLSPERRELRAKLSVRGELVELRARQITILRGLARAAGVTVGSCGVEGFLAKLQAAPLSDAARAVMQPLVATLRVAQEQIALVDAELAQVAKADEIIRLLASAPGVAIIVAATFVSVIDEAKRFRNAHAVAAYLGLVPGENTTGGKQRLGSITKHGNTHARAMLVQSAWQILRAGPADDPLRQWATHLAKTRGKKIAAIALARRLAGVLWAMWRDGTVYDARLGTLESARGLKANAQSQELRAQAMACVAKKIQRRERAARTTQASSRRAPRAKTSRATTM

SEQ ID NO: 496762 - protein, 433 aa, unidentified
MQDVHDEPLFAARVAGLDIAKAEVEVTIRVPGDTGPARRQQETRTFGTTRRELDSLADWLACWGVAKAGMEATGDYWKPVFFLLESRGFDCDLYNAAQVKALPGRPKTDRADSIWLAKIVERGMISSSFVPPEPIRRLRTHTRYRRHLTQARTAEKQRVEKLLEDGHLKLSSVISDIHGLPGRDMLEAIIAGQRDPRALAQLARGKMRVKIRALEEALDCSFFTAEHAAVLAMMLTTIDHYTAQIQELTTKIEALAEPWLHQVTQLDAIPGIGQVNAQDIIAEIGTDMTVFPTSAHLVSWARWSPQVKKSAGKRKGSNSTGRGNPYLGAALGEASTSASRTQSFLGARYRRLARRMPSRKAKVATGNSMLTIVHALLSDPEASYHDLGPDYYEQRTHARRQARNHVKSLERLGYKVTIQAINPDTGELLTATG

SEQ ID NO: 496763 - protein, 345 aa, unidentified
MDSMYYIGLDVHKKTISYCVKDSSGAIHAEGAIPATRFDLDRWMKTLPQPWTAAMEATIFTGWIYDHLLPHAAALKVAHPLMLRAIAAAKKKNDRIDAHKIADCLRCDFLPECYMASTEIRERRRTLRYRNLLVRQAVQLKNKIAVLLMEAGVSYNKQKLHKVGYFRELLATNKDIDDSLRPLLRLCRETLVRLQKMDSALVRSLGRDPLLAERVERLMTIPAVGPVTALTWALEVGDVRRFSSIKKAISYCGLCGAEKSSAATIKRTPLSKQRNKHLQSVLIEAAKLAPRRSPDLALVYDKEKQKGNANRATLAVARKLVAYLVAIDRGQRDFLVVEQQDRTAA

SEQ ID NO: 496764 - protein, 322 aa, unidentified
MKNLSFLGVDVAKDTLVIFDGQKVYEFQNERGLKKFKRKFFKKKEDRKKRVVIYEPTGPYSAFLEEFCATNMIKVVSLNPRKVPRLREVLGHRAKTDNLDAKLLYEYHKIVSEEEIKEIEYNENLEKLSLLLSEYQLLQNIENKLSNFLEYLDRVPVDSKESKKYIQKNLEETRQRLQKIKKEMEELVNKDDDINRGVREIEKVKGIGKMIATYCYIFFRKRRIRNRREVVALAGLDPEVKESGKRKLVTRISKKGDNRLRSLLFMGALSAIRCKEGGLKEYYESLIKRGKPKKVAIIACARKLLIFAFYNYKKWQMEAQSA

SEQ ID NO: 496765 - protein, 336 aa, unidentified
MSHYCGIDLHSNNHVVVVIDNEGNRVFDKRLNNDLSSTLRVLEPYRETLKGVAVESTFNWYWLVDGLQEKGFVCELVNTTAVKQYDGLKYSGDHQDAFHLALLMRLGILPTGYIYPKEQRAIRDLLRRRLSLVRSASSQLISVQSQIWRSTGIRIKSGELRKPEFTPPLLDHYTLQAIQAGLAVYQAISQEINVLEQSAYQAVKLTPAFRVLQTITGIGKILGLTIMLETGDIHRFASAGNFASYCRCVDATRTSNGKTKGQGNAKAGNKYLSWAYSEAAHFAVRFEPLAQRFYARKMAKTNSIIAIRAVARKLARASWMMLKHQLPYDARLMFPN

SEQ ID NO: 496766 - protein, 324 aa, unidentified
MIDGILGIDVSKNTLDVSIAICTKVRSKSFANSSDGWRLLLDWLIVQNIQRVHACLESTGRYSLGIAYALYEAGHVVSITNPAQIRDFARTKLGRNKTDGVDASHIREYCELFKPSPWEPPTQAHRRLGELQTIRSGIIAGLTEWKNRKNSGIVDVEAQALADATISHFTSQLGAVDEAITRTIDNDCDLRSKRDLLLSISGVGETLAGVVLAELPGPDVLRSSAEVVAYAGLNPRQYQSGTSVVRATRISKIGNAVLRAALYMPALSAMRYNPAIVALVTRLKSQGRLKPKQIVVAAMRKLLVLCFGVLKTRRPFDAAIAMGC

SEQ ID NO: 496767 - protein, 351 aa, unidentified
MIIIGVDYHPSFQEIASLDRETGEYGERQLNHGDGQADRFYRDLKQQAVRVRVGMEATGCSRWFERLMAELDFELWIGDPAEIKAARVRKKKTECEDARLLLRLLRADRFPRVWFPDPENRDLRQLLWHRHRLVQMRTRVMNQLQAIAMNEGVRLRQALWGKGGRAKLESLELAPWATCRRKDLLELLDRLTPKIEPLSLAIEQEALKRPEVRRLMTHPGVGPITALAFVLIIGTPERFRCGKQLGSYLGLIPSEDSSGGKQRLGHISKQGNSLLRFLLVEAAHAAVRHDPDWKRRYLHLAMRREQGIAKVAMARRLGVRLFWMWRKEWDYQQVWQFGTHAGELVHVRGAQ

SEQ ID NO: 496768 - protein, 355 aa, unidentified
MSSEKYIGLDVHQATISVGVMDSQGKTVMESILETKASTLLEFFSGLRGSLFVTFEEGTWAAWLYDLLKPHVTEVLVCNPRKIPLLKQGNKSDKIDARKLAERLRLHDLKPVYHGETGVRMLRELARSYLTVVKDLSRVMNRLKALYRSWAIHCAGRDVYYKCHRSQWLEKIPEAGTRRRAEQLYEQLDLRRHLRQQARRELLAEGRKHTITAKLRRIPSLRPIRSVLAVALIQTPHRFRSKRQLWTYSGLGLETRDSGEYHYVHGQVRRRKKQATIRGLNKDYNHDLKSLFKGAATRASVKPGPFQEFYQRSLAKGIKPTMARLTLARKIAAITLTLWKKGEDFDIDKLNSQAA

SEQ ID NO: 496769 - protein, 289 aa, unidentified
MVYLGVDLHRKVSHVVALDEAGNVTLSRRLLNDPAEFRRVFGELEPEPIEVAFEATYGWGWFADLLADAGVAAHMAHPLATKAIGAGRVKNDAIDARTLAHLLRTNLLPEAPIAPPEVREARRLIRMRASLVRVRADPRIRRLTPIPGIGFLTATMIVAEVGDVGRFETPNRLCSWAGLTPTERSSADHTKRGHISKQGSRWLRWAMVEAAVAAARGPSLQRFFGPIKERRGTKIARVALARRLLSLAFYALRDEAGCRAYPVLAHPSRLGVIPGHVVDEHGHGRLPTE

SEQ ID NO: 496770 - protein, 356 aa, unidentified
MSKGITAGGSLTIGLDLGDKYSEACVLEGSGEVLEGFRVRTSQAALDRALARFASARVVLEVGTHSPWVSRLLARQGHEVIVANPRRVRLIAENDSKSDSFDAELLARLGRVDPALLSPIVHRGEEAQRHLVLLRARDGLVRARTQLINQVRGFAKSLGSRLPSSSSEVFPKRVRSAVSEDLFPGLQTMLGMIEQLTEEIRRMDREVERLCKERYAETEVLRQVKGVGPITALCFMLTLEDPNCFRRSRSVGPYLGLRPRQRNSGEQRPQLRITKAGDEFLRRLLVSAAHYILGPFGPDTELRRFGLRLAERGGKAAKKRAVVAVARRLAVLLHRLWVTGEEYQPLGYDKTMAKAA

SEQ ID NO: 496771 - protein, 477 aa, unidentified
MEQNSIPKPPIKGRVVGFDCHPDTFTAALVQGKTPAEAVVQKVFTKVPLSQMLSWAKKHLSPDDMIVMEASGNSSEVARQFRANHFQAEVLESCHLGKLKEAHANNDRISAVRIAKAFLAGTAKIVWIPDAKTQERRDVMHAHRKAVKRHTQMNNRLDSYLSDNGVRLEASLKALEPQIAFAQIRQAKEWSTSQWLIIDSFMAELQAAGHVRQKWEQAMAMEVISDPVLLSLARLTGIRAITAYSIGAVIGDIARFKRPKSLVNYLGLHPCFDDSGNEQWSGGVGGGHGRKDLRSLLIESAQSILNTTSPLARWGRSLMARKGSRNLAAAAVARKLAIAIWYLLKGKWETLENIDRSLSLKIGKIISKVGSQTLQNMQTDRKTLRQQIEQKLKSGRVYQLDPTLVYKPKPTESTKPLTLAEEHGPEVRRPMALKKNLSALSRSRSTTRPVRGIQPQSAGPRSAPLRASGPQSPDAHP

SEQ ID NO: 496772 - protein, 367 aa, unidentified
MSSVASQAGLIHLGMDTSKNTIVVATLLPGEDSPVTDRIANEEAAIRRLIGRFADRSVLRVWYEAGPGGYELYRLLASVGVACQVVAPSLIPKGSSDKVKTDKRDSRRLARLGRAGELTPVRVPSPAEEAVRDLARARDAMLADRKRAQQRLTAVLMRHGRIWRGATYWTAAHRSWIAAQRFSEPALASAIGYYRATLAVREAELAALEAELMPWAAREPLASPVARLGCYRGIAELGGLTMAAEVVDWRRFPAARAFMGWTGLVPAEYSSGERTRRGHITKAGSEPVRTALIEAAWAYRFQPAIGAGLRRRQAGAGPDTLARSWKAQRRLHDRYVHLVHAGGKAAPEAAVAVARELAGFVWAEMTA

SEQ ID NO: 496773 - protein, 409 aa, unidentified
MEAIFPRCAGLDVHKETVEATSRIWEGRRVEPQTRRWGTMTRELLQMADWMAAQGVTHVAMESTGVFWKPIYNILESRFTVILVNARHLKQVPGRKSDVRDSQWIAQLLQHGLLRASFIPPRPQRELRDLTRHRTQLVAEQTRVANRLHKVLEDANIKLGWVASDILGVSGRAMIRALMEGEQDAAPLADRAQKQLRGKIPELERALEGRVTDHHRFMLRLLWKELASLEELIAELEGKIEQMTRPFTPCIQRLDPVPGVDRRIAEVVLAEVGADVHAFPSHQHLASWAGMCPGNEESAGKRKRSRTTKGNRWLRQALVQAAWAASHSKSSYLAAQFRRLAGRRGKKRALIAVGHSILVTVYHLLKYRTTYSDLGSDFFDRLHHDRLTRYHVKRLESLGHKVALEPVAA

SEQ ID NO: 496774 - protein, 418 aa, unidentified
MKIVYPICCGVDVHKTFLVATIIKTEGIQPKYSKKRFSTFNNSILQFKQWLIDNNCFDVCMESTGKYWVPIYNLLEDKIRVTVASPKWVRAVKGNKDDAKDSKWIGDLFRLGLVPGSYIPEKPIRILREYTRYRSKLVSCKSSEKNRFQNSFTVCNVALDSVVSDMFGKSAALITDYLIKTDSFDPEYCKSLLQRSLKKKGDIVIESIAGYEIAPAQKQRMLIVRSHLEFIEKAIDVLDSKLDELVKPYEDFISLLCTIPGVDRRSAITIISEIGVDISQFSNSMRLCCWAGLTPGNNESAGKKKSVRITRAGVYLKPALVQVAHAAVKSKDSPYYSNKYERISKRRGKKRAIIAIARMILTAIFYMLQNGEVWNPTDLFKVDLPPALQEKQKQKAIQNALKLLVREGVIQPPESPAA

SEQ ID NO: 496775 - protein, 439 aa, unidentified
MGALSAGRSATWRNREILLSDQNIEFAAFLGLDWADQQHVVHLQEADSNNRERLLLDQTPEALQSWIQHLRSRFGGRPVAIAVEQSRGALLYALMHVEFLHIYPVNPVMIAKLRQAFHPSGAKDDPRDADLLLDVLITHRHHLRVLVPDDVLTRSIRLLGEGRRKLVDQRTALTNQLTAALKDYFPQALAWFGDLHTSRACAFLQRWPSLQLLKRATTGSIRKFYQSQGYRGQDKLQQLLQDLSSSRPLVEDEAVLLASSMMVQALVKQIPALTESIDQYDQQIAALFKKHDDFTLFTSFPGAGAATAPRLLGALGSDRNRFEFASQIQQMSGIAPVTVRSGQSSSVHWRLACPKFLRQTFHEFAAQSIPHSDWAKAYYDQQKQRGSSHHAALRALAYKWIRIIFRCWKNRTLYDETIYFKSLQRRGSLLATALSITVK

SEQ ID NO: 496776 - protein, 394 aa, unidentified
MKLVGIDVGKNSHHFCVMDKETGEFNVAPSSFSNNKEGFDFLINSLKTYSKKSILIGMEDTGHYHVALLKFLLSNGYTVALINPKTTDLTRKMEGGITKNDKLDTITICDVLDTPERKKQYRITKVDRFDLYEQRQLTRHHHNLKEELNVYCNRLQKSIDLVFPEFNTLFSSKYSIVYMNLLKTFGSAEAIASTDIRTIRKCFEIKGRGNRISLTPEKLKECAKNSIGISSEVETIQIKHLVSQITLIKEQIAEIDKKIEEFSITNNSPILSIPGISHFSGTSILAELGDIGNYSKPSQIIKFAGVAPYHYESSQYNAQHTGITKKGSKYLRKTLYQIILTVINNNPVFKKYYRLKISQGKGHRCAQGHCIRKLLRIIYHLLETGQSFDPALLR

SEQ ID NO: 496777 - protein, 343 aa, unidentified
MSEISIVGLDLAKNVFQVHGVDASGGVVLRRQLRRGAVEKFFAQLPPCTVGVEACGSAHQWARVIGRYGHQVRLMPPAYVKPYVKRNKNDGRDAEAICEAVSRPTMRFVPVKSVEQQATMAVHTTRALLVRQRTMVANSLRAALSEIGIVAAQGIEGLRELMAKLEAPHEEVPEIMRGALLLLAKHWQALDADERVLERQIAKAARSDREARRLMEVPGVGPIIASTVLAKVPDAKVFRSGRDFAAWIGLTGRDHGTGGKHRPGRISKQGDRMLRALLISGASAYLRHQRTRGVSDPWLRDLLARRPYKVVMVALAAKTARILWAMLVKGEPYRDRASASAAA

SEQ ID NO: 496778 - protein, 346 aa, unidentified
MTNMLLKQVVGIDVAQKELVVSLGRMDIRAAMEVMEVYANKTFANTKGGFMALVSWISKHTDQSCPLRFVMEATGVYHEALAYHLYDKNYPVSIVMPNKISNFFKTLEIKTVTDKSMSAAIAMFGLEKQLDNWTPPKKIYRGLRQLTRERSQLIAERTLIKNQLHAEQAEAFPGEDTISRMQKRIKMIDSQLKEILTEIRVTINEDMAIKSALDIITTIPGIGILTAAVVLAETNGFDLIRSKKQLTSYAGLDVKEKESGTSVKGKSKISKRGNKHLRKAMYMPALSAIRHADRYKAIYTRIVSRSGIKMKAAVAVQRKLLEMVYTIYKTNMPYNKNYLQVMAENS

SEQ ID NO: 496779 - protein, 418 aa, unidentified
MKHQKMNYTYVGIDSHKNTHTAVLLDCFFEKLGKVTFNTMPSEYPAFLREAENLKTQGTKLVFGLEDATLYGRTLARFLNEGGYIVKHVNSILTSRERKNQSITQKTDSLDAQCTARVLLSKFGELPDAIHESKFWILRTLVISRDSVVKENTRLKMHLHSLLTQHYPNYRDFFVYTFGKTALAFFKKYPSPITLLDVSLEELAEFLLEESCDRFGIQKANFIISSLEDTSAEYQEIRDMAVQSAIRRLESNLKELERMEMSMAVYLDKLGCTLTSMAGIDVVSASKILSCIGDVKRFPSPGKLARYAGIAPVTYASGQKDLRYANKRGNRELNSLFYRLAVRLTSPVGPNNKIINHFFYEYYHRKLSEGKTKRQALKCVERRLVNIIWTMLTYDEEYVGPPVTDIPPEIDKDVIKKI

SEQ ID NO: 496780 - protein, 421 aa, unidentified
MKKFSMSVLEIKSFNVESIRGRWSGDRVIVGLDIAKRVQYASMSDDQGVPLTVLKWRMPEELYVFVALLESIGSDRVEVVMEPSGTYGDAIRFALHRSGIAVFRMSPKRVFDAREVYDGIPSLHDKKASCLLARMHAEGLTRRWEPEPESRRELHAMIMSLDWATRSYRTEISRLEALLARHWPEASEHLKLGSLTLLTVLSQIGGPSSVASRMAETKTLMAETGGPLVKGATITALLASASSTVGVPTAAGEDALLREAATLALSARGRRRDAAARVRSCLGDHESLMRMGAVVGPTTAAVLISELGDPLSYGHAKALEKAAGLTLKEKSSGTHQGRRSITKRGSSRARQWLYFAALRLIKDDPVARAWCARKAQRDGGVKKKAVIAVMRKLLRALWHVARGARFDSTKLFDIARLDVVA

SEQ ID NO: 496781 - protein, 341 aa, unidentified
MNVFIGLDVSLRSVAMCVLSAEGDLIEETNLDCEVAAISDHVRAKGYSVERIGFEAGTMSQALFHGLTAEGFGVVCMESRQVSAAMSAMRNKTDKTDARGIAQILRAGWYNPVHMKSRESHEVKALLAARKAILNRCIDLENEIRGLFKAFGIRLPSRLSRRRFDEKVRPIIEADDTLAFALLPMLDVRGDLYDAYRLMEKRVIAVSRKDPVCKLLMTAPGVGPITALSFKAAIDDPTRFKSSRLVGAHFGLTPRRFQSGEMDNTGRISRAGDRDVRATLYIAANSLLIVSGRPSSLKSWGLKLIRTKGVRRARIAVARKLAVILHRMWITDTPFQTEGTA

SEQ ID NO: 496782 - protein, 426 aa, unidentified
MTYRIAGIDVHKRMLAVVIADVAVEGEYQFERRKVGTSPSELCRLADWLVAQQVEEVVMESTAQYWRPVWATLEQRWRLQRLQESDGARSGQLHLAQAQSNRGAAGRKKDFPDAERLVKRLVAQELKLSFVPDVEQRLWRTIMRRKHQLTRNRVQFQNRLECLLEEAHIKLSSLVSDLLGKSARYMLQAVAEGETNPETIAALADHRLRATAPQLRDALGACRDLHPVYRQLLKMALEELKLMEEQIDKLEQEMANLLSAQQDVVQRLAEVPGLGVDSAQQIIAEVGPEAAAFPSAKHLASWVGVCPGEEESAGINYSHRSPKGNRQMKGLLNQASNAAVKTKGSIFEFIYRRLVVRLGHAQAIGAIAHRLCRLIWMILHQAIRYEERGPAVSRSTTERRAAKMIRELRRLGYRIEPVECKAEGSV

SEQ ID NO: 496783 - protein, 455 aa, unidentified
MAKKRKQNTKSNISDMPVMHPDAAGIDIGATEIFVAVPQNRDAESVRSFPTFTQDLYRAADWLKQCNIKTVAMESTGVYWIPLFQILEDRGFEVYLVNARHLKNVPGRKTDVSDCQWLQYLHSVGLLRASYRPQQEVCAIRSLIRHRESMVHMAVTHVNHMQKAMDQMNLRLHHVISDITGKTGLAIIDAILAGERNPYVLAQLRNERIKASEEVIAKSLTGDYRSEHLFALRQSLVAYRSCRKLIDDCEIEISRSLEQFTPPNNPNDGESNLQSKDSSPLSGNNASDLSNELKRCFGVDLTKIPSIKELTAQTLFGEVGPDLTKFRSASAFASWLTVCPNNKVSGGKVLSTKTRRSQSRVATALRMAAMTLTHSQSALGDFYRRMRARLGAPKAITATAHKLARIIYHLVTTGEEYDESRFVADQVRYRNRQETALRVKAKALGFQLSPLLQPA

SEQ ID NO: 496784 - protein, 372 aa, unidentified
MSKIRYIGLDVHKATITIAVADMNLPAYVLATIPNDTGELLKRLRKLSSGAQLKVCYEAGPTGFGLCRDLRAAKIDCIVVAPSLVPVRSGERVKTDRRDACKLAHFLRSGDLTSVWVPDIQTEAMRDLLRARDAAKRAERVARQQLDKFLLRQGRIYAGKKKWTRPHVEWIQAQKFELPAQQRVLSDAMHTIQEATGRVTRLMADVTDLLPGWKLAPLVKELQAFRGVDVVTAATLAAEIGDFTRFSKASQFMAFVGLVPSEHSSGGSRRVGRITKTGNQHVRRLLVEAAWHYRHLPRIGRGLFERQREVNEITKRIAWKAQHRLYRKSSHLLLKAKSPQKVVVAMARELAGFLWDAARQPDLQPGDKAVNV

SEQ ID NO: 496785 - protein, 364 aa, unidentified
MKRKVYVGMDVHKETIQIAILPSNTKDLVKEQQIKHEEGQIKKFIQKLKSEGTEIHCCYEAGVTGYPLYRYLKTLGVNCIIAAPGKIPRQSSDKIKTDKRDAIKLARLLRSGELESIHVPSEEDEAVRDYLRSRDSLRLDLGRSRQRLMKFLLRKGITYSTTKYWTASHYKWLNNLHFENEILQATFNDYYSRVRVQEENLKAMDQKIREIAESEPYREKVGILRCFRGVDYLTAMFLLSEVNDFKRFKTAGSFMSFLGLVPGEYSSGSKRKQTSITKTGSPRLRRILVEAAWQHRFPGTGSKVVAARRVGQSALVVSLAEKASLRLHKKFKSMQLRGKTPQVMITAVSRELSGFLWAAMNLVA

SEQ ID NO: 496786 - protein, 482 aa, unidentified
MKKRNIYQNRSQELLSLFEDAGSSAKVMCVPMDFAKKDHVVMFCNGYGDIVRKPFSVKNSPEGVKYMVDQVTRSCRHRGIKKKHVFFGGEDVNSYAENFVNTLRSRGWLVAGVNAHDAKKQRANLQASTDRLDLMGIATMLLNCRANCCPAQSGIYRNLRTIVRHRRKLVVMSTEVRNRIHGVVDRLFSGFLDERRTGIVPFTKSSLYLMEDRFSAKQIRRRKPQKLIEILRRFGTKEPETTALKLQQYAKHVLNTPVEYVSTLQLSLSQHVKHLKCLNEGVHQLEKEIAVNLAQTQGAFLTSFRGIGIVLAAGITAEIGDPHEQKPLNNLVSYSGIIPRVKQSGGPDGKTYTFSVGKRCNRILKDYVVKSALHLGLHGPDDLMIDYKRRDASGQHADFGIGRRYLRTAISLMRSSQIYLPPQLRKAKTKPEERASYYLTVWPYLREKWQRYGSFKAAFDKNRPLGQWRSIVQNLYGIKLKI

SEQ ID NO: 496787 - protein, 405 aa, unidentified
MATIVALDVSKGKSFYVMYQEMTCLYEGEITHTKSGFQELHALIKNLPEVPEIVFESTGIYSRPVETFCQKNQLIHYVLNPLQAKQQMEKESLRKWKTDKRDAHRLAQTHWNNSRTKSVSAEPLYKELRDLSRFYQEIMDEIGRMRMHLHNAIQLTFPELEQVLSNRLTPYGLTMIAQYPHPSFVLKQSRTIIKNRLMASTAKKISENRARNKADELIAYAKDSYPAVSETAIPVAKTRYYAEQLQALLNQKERLANQMIETAKQLEEFSVIASFPGIGELSAAQFIGELGDLRRFSDPRKVNAYIGIDIRRYQSGNYLAQDHINKRGNPKGRKILFFIVKNMIKAQHAAPNHIVDYYYKLKKQPLPKKEKVAIVACMNKLLKCLHAMIRNGTKYDYSYTVSTDH

SEQ ID NO: 496788 - protein, 410 aa, unidentified
MIEPLVRCCAGLDVHKAVVVCTVLQEDRKGKLRKETREYATFTDELAELARGLASLDVELAVMESTGVYWKSLYEALEAEGLRVYVVNAGHIKRVPGRKTDVSDSEWLAELGRCGLLRPSFIPPRDLRELRLLTRYRQKVSGMMASEKNRLHKLLDDAGLRLGCVVSDIDGVSARQIIAALIEGEARPEQLARLARGRLRDKQEALCRAVVGQLSDRHRFLLRTLQNHLQGLEAEIGEIDAQVVAAMEPYQEPWQILQTLPGFDALGAAMLIAEIGIDMERFGNKGRLSSWAGLCPGNNESAGKRKSGRAYRGNRYVKRLLCEAANSACRTNSQFKGMYQGIVIRRGHKRAIMAIAHKLLEVSYVLLKKRQPYVDPKIDYEALTVGRNAPRWIKALKKFGYWPEPNSKAA

SEQ ID NO: 496789 - protein, 359 aa, unidentified
MKMAANTSVETNVILGVDTHKDNHVAVALDELGRHLGILSVPTTTEGYRKLLRWARGLGTIEQAGVEGTGSFGAGLARFLKAEGIQVREVIRPKRRDQYRSGKSDPIDAEAAARAVLAGTATGEPKGADGTVEMIRALRAARRSAVKVRTQASNQLKGMLLTAPEELREELRALSTAKLVSRAARFRPGESPQSVEAATKYALRSVARRYQHLQEEIKELDEQLDRLVQQAAPELLRVDGVSTDTAAALLIAAGDNPQRLKSEAAFAHLCGVAPIPASSGKTIRHRLNIRGNRDANRALYVIAFGRMGRDERTRAYVAKRTAEGRSKREIIRCLKRYIARELYRILVPPLRTTPSISVP

SEQ ID NO: 496790 - protein, 493 aa, unidentified
MKTAPSSLPAKRRARNARKLKQQAKTATIATPVRSLDELTPVHRRAAGIDVGSAENYAAIPAEGLAAGESPVRVFGVFSQEQDALVEWLRAHQITTVAMEATGIYWLTLYDKLEAAGIEVYLVDPHGVRAVPGRKSDWLDCQWLQKLHTYGLLQRAFRPDPPIRRLRTLTRQRAELVICGGVHLQHMGKVLTAMNLHLHLVVSDLHGETALRIIEAILAGERDPKTLVKLRDPRCHKSTLAEMEAGLKGAYDDENLFVLEQSYQGWKFYQQQLTHCDKRIEKVLAVLPTAKAVTREAPPKPVVTPSAPKRGRKKQINRGPNAAAVDFSQALKRISGVDLIQVCGLNLLTVLMLLGEIGTDMSRWRNARAFASWLGLCPGAKISGGKVLSRRTRKVNNRASTLLRLAAWGAGKTDTWLGRFYRRIRARRGAPKAVTATARKLACVIYHMMKHGDEFVFLDTTQYEARARDHRLHRLRKEAQKLGFQLTELQQVA

SEQ ID NO: 496791 - protein, 356 aa, unidentified
MSEYDGKQFVGIDLHRSRSVIVRMTAEGERLDAVRIVNDPMALMTEIGKAGEAPEVVLEATYGWYWAVDVLAGAGARVHLAHPLGIKGFTTRRVKNDVRDATDLADLLRMGRLPEAWIAPPAVRELRELVRYRCRLVGRRSGLKAGVHAVLAKQGLRLPVTDLFGVRGRALLAAAPLDPVLRARANSLCRLIEAFDFEIDTVTGLLLRRAAKDPGWAVIQQVPGIGPILAAVIVAEIGDVHRFAGPRQLCSWAGLTPKHYESDRTVRRGHITKQGSRLLRWALVEAAQKIPASAGWPVATRDGIRQRRGRGIATVAVARRLLTLVYFGLRDGHIRALDPRATTSSPDTTSSPDAAA

SEQ ID NO: 496792 - protein, 412 aa, unidentified
MQDILTCVMGLDVHRDIIVACLVKGAVDAEPEAETRTFSTLIPEMQKLRDWVIEAECRNIAMESTGIYWQPIYEMLESCFDGEISILVVNARHMKNVPGRKTDMKDAQWIATLLRAGLLKGSFIPDKTFRELRHLTRYRKSVVHDITAQKNRIDKFLQSSGFRFTAFLSDTFGASGRNIIRHLIEHGSIDREALDKCLKTKTRNRIDEILVALNGSLSVHQRRFLNMVFLHLEDLEAHKHTIEDEITEEVLKHTDALNLLCSIPGIDVTAAAAIVAEIGTDMSAFPDSQHICSWAGLSPSNNESAGKRKSVHINKGNPYLKSMLCETAWIMASHRKLYLSGWYWKVKQRKGAKRATIALARKVLSIIYTMLKTGTPYSEECFEQRRQRCERKRANRMVNELQKLGYTVVAPD

SEQ ID NO: 496793 - protein, 352 aa, unidentified
MRKNNVKAVVATIGVDLGDKHSRLCVVDAAGEIVEEGQVATTAVAFSRRFKSLEPHLVVIETGTHASWVHDLLVRLGHEVVVANARKARAIWANERKCDELDARMLARLGRSDVRLLQPVQVRPAQMRDDLSLIRARDALVTVRTMLVNSARGLAKSMGKRLPSCSPGSLPKKELDSDVEPVLRPLMKALEGLNERIKDCDKQLEELTETRYPQTALLRQVAGVGPVTSLYFQLAVADHRRFKDGRAVGAYFGIVPRRDQSGGRDPQLSITKCGDTMGRRLLVQCAHHILGRHGPDTDLRRFGMKLAARGSKGAKKRAIVATARKLAVLLFALLRKGEMYEPLRNSAKSQAA

SEQ ID NO: 496794 - protein, 361 aa, unidentified
MDSSPPLAVSQCTRKFKRDKEESEMNRNVVGLDIAKQVFHLFMMLDGKAVKRKLKRSELLAFVAQLPPSLIALEACGGSHHWARSFQALGHEVELLNARYVKAFVVGNKNDFNDAEAIFTAARQPNKRTVAIKNMEQQDLAMVHGIRQGKVEERTALINQIRGHLAERGIVLPKSANQVRKQLPSILEDAENQLSTLSRSLFAEQYQALVAMDAAIKAVERQIEALCRQNALSKRLIAIPGIGPLTATLAAADVGDGKGYTSSRDYAASLGVVPRQHSSGDRQVLLGISKRGNRRLRTLLIHGARAVLKYCTDKSDPLSRWLQALIERRGFNKAAVALANKNARIIWALATREGEYTPKVA

SEQ ID NO: 496795 - protein, 380 aa, unidentified
MSPVTTHAREFTSTTPVLHLAFELADLRWKLAFTPGLGRRPRVRTVPARDLDAVRQEITRALARFDLPATTPVVSCYEAGRDGFWLHRALTAMGIANQIVDSASIEINRRLRRAKADRLDAEKLVLMLGRATQGDPRVWRVVRVPSEADEAARQLSRELDAVTHDRTQVLNRMHGLLTTEGVHLALTGDVPAALPALRRWDGTPLPAELLERLARDWRQVEALTARRAALQAQRRRDVTTGTTPAHAQMRQLAQLSAVGMATATVLVREFFGWRAFRNRRQVGGCAGLTATPFQTGGTHHEQGISKAGNRRVRTVMIELAWGWLRYQPQSELSAWYQAYVGTGGPRHRRVGIVALARKLLIALWRYLETGTVPAGARLKA

SEQ ID NO: 496796 - protein, 378 aa, unidentified
MTSGNTVYIAVELSVSSWLVAARLPGVERPRQQRLEGGDTVALLALIAELRSLASSKLGGAADVACCFEAGRDGFWLHRLLTAHGIAAYVLEPTSILVNRRARRAKTDRLDAEGMLRVLAAWLGGDRHVCSVVRVPTPEEEDAKRPHREREHLVQEKLRIENRIQALLFTQGVRGRPSLRSWDRDMAELRTGDGRMLLPLLRAELDRLRRRLVLVLHLIRELEAERAKALEAAADEAIVQKIAALLCIRGIGANFAAVLVREVFYRAFANRRQLASYVGITPMPYQSGGMDRDRSISRTGNPRARTTLIQLAWLWLRYQPGSALATWFRERVGTLRGRTRRIAIVAMARKLLIALWRYVETGVMPDGVVIREQTAVTV

SEQ ID NO: 496797 - protein, 408 aa, unidentified
MQLTPIYKRVIALDVHQAKITACAIVEHDDGRQEMTKLDFGAFRRDRRALAQWALQIRPEVVVMESTGVYWKSPFAALEAVGIIAWVVNARHVKAVPGRKTDMADAQWLATLARAGLLLASFIPGAQFRQLRLVARQRQKLVGVLSAEKNRLHKVLVDAGIRLGVLVSDVHGQSARAMIKALIKGEPIHEILDLKGRLGASREELFEAMSTEQFSATHAFVADQIMQHIEYVEQRIARMDAYLLAGLKAWQPQLNLLQTIPGVDQIGAAMLLVEISADMSAFGSAERLASWVGICPGNNESAGKRKTGRIRKGNAWVRRLLCEFAQAAARTRSALRAKFDSLAIRKGRKKSVIALAHKMLRTIYAMLSNGTHYEDKTVDYEALSVAKNAPRWIKMLKKHGFIGQPTAA

SEQ ID NO: 496798 - protein, 321 aa, unidentified
MAQQVKFNQMIRCGCGIDVHQQVIVATIRHSDSDFETREFDAYTRSLTELREWCKTEGVTHIAMESTGIYWKPVFNILEEDFEIILVNARHVKNVPGHKTDKKDSIWISKLLLSGLLKGSFIPPQDIRELRDLVRYKRKLTNQAASEKNRLIKTLEDCNIKLSSVISDVNDGVSATKIINDIIKGITDIDKLMLHLHGKIKADREDIRKALEGRITNHHRFMMKIIKESIDEIEKIISKVDRQIDKAVKKYQVELDSLQTVPGIGRDSAISIISEIGVDMSQFPNEQHLSSWAGMSPGNNESAGKKKVPEPPTETNISDQR

SEQ ID NO: 496799 - protein, 368 aa, unidentified
MDGEYYTTIGMDVSDRTTKVCVMAKERGARRIIEETTIPTTGDALRAYLSGKSSDWPVVFETGTHCRWMKREVESLGMKAIVANPSKLRMVTESNTKNDRNDARELARFALADVGLLHPVRLRSERCQQMLRLMKARDLLVKVRTMHVNELRGFAKSMGFRLPSCPANRVHALDKAGWPDDFESLAWPLMDMLETIDLKIRAYEAQIRSLAESGELKDKVGRVREVYGIGLLSGAALVASIDADPGRFRKARDAGAYFGLVPRQRQSGEMDAQCHITRAGSGFVRRLMIEAAQIAMRESARDTDVKLKGRRICARGGRIAKKRALVAVARCLVVTAVALLKNPDAEYVPLSEPARREFEAMRSDEATA

SEQ ID NO: 496800 - protein, 391 aa, unidentified
MIYAGIDVAKDKHDCFITNSVGEVLFKSFTIPNNREGFETLFQKIQSVSDDLTKVKVGLEATGHYSYNLLGFLLDKGLPTYVINPLHTNLYRKSLSLRKTKTDKVDAHTIASMIMSDVNLKSYSDTSYHNEELKSLTRYRFDKVKARAKLKSSVSRLVCILFPELEKLVPTLHMVSVYSLLSEFPSAHAIASAHLTRLTNLLSESSRGRYGKDTAICFRDAARSSIGSHIPAKSLELKHTIRLILELTSEIDEIEAEIKTIMDEINSPILTIPGISYKMGAMIIAEIGDFSRFDSPDKILAYAGMSPSIYQSGQLDNCYAHMEKRGSRYLRYALYNATKYVCHWDESFGTYLAKKRAEGKHYNVALSHATKKLVRTIYAMEKSGQAYTNVA

SEQ ID NO: 496801 - protein, 322 aa, unidentified
MAMLSFGGIDVSKDRLDVMVLPEEQCSSVNNDVAGWAELVEQLRGSSIAAIGIEASGGYERGVMRALLAADLPVRQVNPFKLRQFARASGVLAKNDPLDARLIASFVAIMPTRPAQRQAPAAERLTEMLAVRRQLSAEKVAAENASRLLEDAMLRRLSRRRIARLAADIDLLDRHLVAIVGTDAALAHRYRLLTSMPGVGVVLACTLIALLPELGSMNRKQVAALVGVAPYAFESGTLKGRRCIWGGRANVRQVLYMAAMSASNWNPAFKAFHDRLKAAGKLPKVAIVAVMRKMITTLNAMVRDDVVWADRLTGRHSVPTAR

SEQ ID NO: 496802 - protein, 339 aa, unidentified
MKKISTIGLDLAKQVFEVHGTNSAGEVAVHRTLRRRQVLGWFAKLESCLVGMEACATAHYWARELSAMGHRVRLIPPSYAKAYVRRNKSDAADAAAICEAVSRPSMRFVANKTAEQQAAAGIHRVRELLVKQRTMTMNALRSLMAEFGIVVSEGPGHIGELAAILADPRDERIPEPLRTELLQLVETLRHIEEGLAAVDKQILAWGRQNRTYQHLLTVPGYGPILSSAMAAMVVDPAAMRSGRDFAASLGLVPRQDGTGGKVKLGPITKRGNGYLRRLLVNGAMAVLNSKRARNDPWLLKLLKTKKRKVAPVALANKMARIGWALMMRQEDFRAMPRAA

SEQ ID NO: 496803 - protein, 326 aa, unidentified
MNYDIGIDVAKDKIDCLWLKDITSLKIKTKVLPNSAQGFRQLKLWLEKHVCTELSHIYICLEATGVYHEALAYALFKMGVKVSVINPAFIRNFAKGLGVRGKTDKKDSMVLARYSALIRPRLWQPEIEDIRILKALLSRLTGLENDLQREHNRLEKADVSQASKTVIDSIELMIEQLSKEVNRIKKLIDNHIDQNPKLKKDRSILKTIPAVGEVLSREMLSVLNSRDFEKASQAAAFVGVVPKLWESGKMKGRTTLCKNGPGRIRAVLYMAAIVATKYNPDIKIQYERLLKAGKTKMQALGAAMRKLVQICFGVLKHQSEYRTQAI

SEQ ID NO: 496804 - protein, 460 aa, unidentified
MNQFYLGIDASKGYSDFVMLNAKKQLVIENFQLDDTFDGHARLYQRLGSFNQDHPQATIYAAVESTGGYENNWFQSLLKFQDSLPIKTAHLNPLGVNYNHKADLKRNVTDKISAQNVAEYMIAHPEKVSYQHQGSLASLRKQWGFIAMLTKQSGQLLNQLESLVYNANPEILMYCKDGPPQWVLKLLTRYPTALRLSKAKAKSVARIPYVSRDRAQQLVATAKKTVASAHDDVTEQLIVATVKQILDLNNTIKAQTQILADKCAVPEVELLKTFIGIGDYSAIGLMLEIQSVKRFLTSKKLSSFFGIHPAYKKSGDGTWKYRMSKKGRREPRRILYLVAMSAIKSNPLIRSIYQQAVQRGMEKKAAVGLCMHKILRIIYGMLKHNKAFDPEIDRKNRQKKPLRQRRVRQDKDRRYQDFDSKAPISSRQKKKREERKQSQNVSNVECGINEASVPVPELAN

SEQ ID NO: 496805 - protein, 404 aa, unidentified
MEKPSAGIDWASEEHALCVVGAQGARVAEGLFTHDEAGIRELVARMRSLGVERVAIERPEGLLVDRLLEAGFTVLPVHPNALKATRPRYEAAGGKSDGFDAFCLAELARTDAHRLRALRPHSDETKALRALTRTREDLVAARVRLANELRAQPQAFWPGAALIFADVDSPIALAFLERYPAPADARGLGPKRLEVFLARHAYCGRRQPEELLGRLRSAPEGRADVLESEARRGAVLGLVAALRPIVVQIRELTSQIAGAVRAHPDGQVFLPLFKDPKSVITAARLVAEVGDDRARYPSAESLAADAGMAPVARESGKRKVASFRWACDKRLRDAVSCLADSTRHHHPWARGVYLRARSRGLDHPHAIRVLGRAWLRVLWRCWQDEVPYDPVKHGNLQRLQPAGG

SEQ ID NO: 496806 - protein, 344 aa, unidentified
MHVGMDLGRNTMAVAVVGNDGELVDEFSVRPDATGLGRLLDRVGSDEPVSGVVESMNGARFVYDFLCDAGWAMSMADAHAVKGIGKTAAKTDRIDARVLAELSRRDLVPAVWIPSEEVRRDRERARYRLHLVKHRTALKNRIHAVLFAWGQPISVSDLFGVAGRRLLVDLDLDEPWKTNVVSCLEVIDFLDVEIKACETELRRAAAAHPDVALLKTIPGVGDILAYTIATEIGDIGRFPTAKNLVGYTGLTPRVHQSGSRDWRGPLTRNGPKYLRWALIEAAIWTARHPAYNDRYQQTKQRLGKQRGAKIARIEVARKLTVAIYWMLTRREHFNPGGPTEPLAA

SEQ ID NO: 496807 - protein, 426 aa, unidentified
MKVMHDRVAAIDVHKDMVKVAVRVPGERRGTRKADVLEFRTFYGVLEEMGRELRRRGVTHVVMEASGVYTEPVYYALAGLGFTEVMVINPAHAKALKGHKTDAKDAIRLLDLYECGLLSGSCIPAPDLKEVRDLARYRMKTVQARASEIQRLQKTLETAGIKLSSVVSDVTGVSATAMIEALIDGERRGAVLADLAQGRLRTAGKMADLSMALAGRFTDHHALMCRLHLDRIQALGEAVADLDATIAPLVARYSREAELLKTLPGFGDVVVAGWLGAIGPAPHQHFATAQRLASWATVCPGNYMSAKKSKGGRTGDGGNYIKPLLVQAAWAAVRVPGRLQAKFNRLVRKFGGARNKGAVKRAIMAIAHALLKIAYQVLKTGTPYTDLGAGFYASRETPQARQDYLIRQLQKLNPGCVITITPAEAA

SEQ ID NO: 496808 - protein, 349 aa, unidentified
MKLVGIDVGKNSHHFCVMDKETGELNVTPSSFSNNKEGFDFLINSLKPYSKKSILLGMEDTGHYHVALLKFLLSNGYTVALINPKTTDLTRKMEGGITKNDKLDTITICDVLDTPERKKQYRITKVDRFDLYEQRQLTRHHHNLKEELNIYCNRLQKSIDLVFPEFNTLFGSKYGVVYMNLLKTFGSAEAIASTDIRTIRKCFEIKGRGGRISLTPEKLKECAKNSIGISSEVETIQIKHLVSQIMLIKEQIAEIDKKIEEFSIKNNSPILSIPGISHFSGTSILAELGDIGNYSKPSQIIKFAGVAPYHYESSQYNAQHTAITKKGSKYLRKTLYQIILPVILSLIHI

SEQ ID NO: 496809 - protein, 323 aa, unidentified
MSTKATKKRRSFIGIDVSKKLLEVGVHQSDYHFRCPNDPKNFPALITELISLRPARILLEATGGLERALLQALHAAGLPVVVVNPRQVRDFAKALGLLAKTDRLDARVLAHFAAAIQPAIRPVKAQQETELDALMGRRTQLSDMLVQEKNRRGSAATKDTRDDIEEHIEWLEERIQELDEKLKEQLKCSAVWQQKDKILQSVKGIGFVTSLSLLADCPELGQLNRHQIAKLVGVAPLNRDSGQQRGARHIWGGRAQVRSKLYMATLAAIRFNPVLKSFYQRLLAKNKLKKIAIVACMRKLLTIINVMIRENKLWNVKAQPVSA

SEQ ID NO: 496810 - protein, 345 aa, unidentified
MDQISRIGMDTSKHIFQLHGVNAAEAPILRKKLRRKDMVAFFAKLPPTVIAIEACGSSHHCARLLQAFGHSVKLIAPQLVKPYVKRNKNDAADAEALCEAMSRPTMRFVPVKTAEQQAALMLVGVRDRMIRNRTQLSNAVRGHAAEFGLTAAKGMAHLVPLLERIETDESLPALARELFAVQAKEFAQLQARIGEIDARLKTWHKADECSQRLDKIPGVGPIGAVLLRMKTPEPELFQSGRQFAAWIGLTPKDHSTAGKVRLGVITRAGDEGLRSVLVAGATAVIRHAQRCGKASPWLAGLLKRKSPKLAAVALANKTARIAWKMMMTGETYIAQSVPAALAGTV

SEQ ID NO: 496811 - protein, 336 aa, unidentified
MDIIKQVVGIDISKDTLAVCYGTVNLQQNQQISESKTFANNPKGFKELMLFVKKKRGQLKVPLYYAMEATGVYYENLAYFLNEKQQKVVVILPNKAKNYSKTLCIKSKTDPLDARMITQFSLERQMQLWSVPNPLMKAIKALTREYQSKKEIATQIKNQLHAEGYSHAPLKESMKRNHAILSFFEKQLREIEGQIKEIVKQDDDLNNRINKVDKIEGVGFMTIVSIISETNGFALIENAKQLASYAGLDVVYNESGLKKHKTTISKRGNKHLRKAVYMPALSACKHNPKLKALYIRIVSKKGLKKVALIAVARKLLLLIYTIYTKNVDYISNYNPA

SEQ ID NO: 496812 - protein, 393 aa, unidentified
MIYVGIDVASEKHDCAVLNSETGEICDVFVFENNHIGFNALMTKLALYSRMKDFSDIEIGLESTGHYSNNLVNFLHEKRLSVKVFNPLTVQRLRKAQTLRRTKTDQTDAKFLACMLIGDDSKSYEKSLPQIEELKTLTRHRFRLVKEKSKHKQHISRLITIVFPEITTAFCSTSLATVRELLMQFPSAEAIAAVDIRKLTNLLWTASKHRFGRDKADEIRNLARQSIGTNNRGTALELQQHLQAVQFLNQQIKTVESEIKAIMIELDSPIISIPGISFTLGAMILAEIGDITRFQTPAKLLAFAGIDPSCYQSGKFTADRTPMVKHGSPYLRYAIIQAATCVKRYAPEFIAYFDKKTAQNKHYFVAISHVAKKLIRVIFSLLKYQKHYEPQAT

SEQ ID NO: 496813 - protein, 342 aa, unidentified
MEKIATIGLDIAKSVFQVHGVDAAGKVVVRKRLSRARVIPFFAKLPRCLVGIEACSNSHHWARELIALGHDVRLMPAQYVKPYVKRAKNDAADAEAICEAVTRPTMRFVTVKTPEQQSVMMLHRVRLMLNRQRTQLSNATRAHMSEFGIVAPVGRIGLERLLAIIADGDDERIPPDARICLEMLGAQLAIVKEQILENDRRIRASARDTEVGRRLMEIPGIGPLLASAFVASVADPRLFKTGRDLAAWIGLVPRQNSSGGKERLGGISRAGNQYLRQMLVVGSMAVIRHAERHGTKRPWLIELMKRRAKKVAAVALANKTARMVWALMTSGERYREPQVAHA

SEQ ID NO: 496814 - protein, 444 aa, unidentified
MAGTLYLGIDVSMAENACSPLLQDGTEARRRFTVPNNLPGAEQLASEMVKLMESYHLDRLLVGLEATNLYWWHLACFLNSSPQLSPFQPRVYAFNPRLIKSFKKALSDTTKSDINDAYAVAERLRFGRLPAQFIPNQLYQPLQRLTRFRCHLIHQVAREKSYFLSFLFLKFSEYQNLDPFSDIFGATSQAVLTDYLSVDEIAAAPLEELAQLLVKEGRNHFSSPETIAAVVKRAAQDSYRPHATLNEPLNLILGTTLENIRTLSRQTKKLDQAIEREVRKFPNPLISIPGLGPVFAAGIMAEIQDIHRFPDQSSLAKFAGLFWRTRESGSFQAEETSMGKSGNAYLRYYLIQAANSVRMHNAEYGSYYRTKYNESTKHKHKRALVLTARKLARLVDAMLRHNQLYVPPLMNLTEEVNKLAITRARPAKQHHYRQPGSHSLALCA

SEQ ID NO: 496815 - protein, 421 aa, unidentified
MGNKVRRSVKFEYLVSTKLRRFSMGCFVGVDVGKSKHAYAVVDVAGAELASGEFTGTAAGFEKLKWVLLRFDVEGIGMEATGHYWRNLWHALGHAGYERRLLNPTATVYYRRMSLTKHKTDALDALCIARYLASVRPDGRGLGVEAQESLRSLARAQATIAEQITESVNRLHKQLDLSFPEFPKLVGRLDAPKALMLLEHYPTALLMGRARTLADKCYGQQNHRIGAPLAGRLQEVARNSFGCAQTSSDALLIRQSVSHIRLLHEQSKELIREMEVLVAEQDQDAANLLSVPGIAIKSAAAVIGEVGDISRFETARKLTGYIGAHPRFHDSGNKSGHARMSKAGNKRLRRILWQCTIVAMKHNPIIKAHYEKKLAEGKKKMVAIGHCMNKLIHIIWGVLTYHEPFDPNGGIRVQMVAQNAG

SEQ ID NO: 496816 - protein, 350 aa, unidentified
MPKRNVPRPAAVYGIDIGKNIFHVVGLGSDGVPVQKVRFRRDTLLQFFERAAPAIVGMESCAGSQWIARKIQALGHKVRLIPAQFVKPYVKSNKTDIIDAEAIAEAATRPTMRFAALKSEEQADLQALHRVRDQMIGTRTRLINQMRAFCLEYGIALRQGAGLFKLDLPQVLEDQSNDLSPAMRKLLANLFADLRQLEHRIGDLTREIEAVANREDIARRLMTIPGIGALGATALLAAIGNGRQFQKARDLAAWLGLVPREYSTGGKQRLLGISKRGNRYVRKLLVHGARSCFRHLDRTRDRLGSWLDGLQARMHPDKAVVALAAKMARIVWVVLTKPGALYERRDPAFT

SEQ ID NO: 496817 - protein, 416 aa, unidentified
MLFIGDDWAEDHHDVEIEDEDGRRLARARLPEGLEGITRLHALVAEHAPASWAALEPQQAAGQVVVGIETDRGPWVTALRAAGYQVFAINPLSAARYRQRHCTSGAKSDAGDAHVLAEIVRLDRDHHRLTAGDSDLVDAIKLVARAHQTAIWERTRHVLRLRSTLLEYFPAAVKAFEDLSAPDALSLLGRAADPDRAARLTRGQLVAALRAARRHHVEAKAEVLQAVLRAPALRQPATIQGAYAAVVAAQVGIITALNAQITQLGQVVGKHFGRHPAADIYLSQPGFGVVLGARALGEFGDDKERFADSRARKNYSGQSPITRASGKKSVVLARYATNRRLGAALHMQAYAALTGSPGARAYYDALRGRNIGHHAALRQLANRLVGILHGCLKTGTLYDEDTAWQHRRTIIQTAAA

SEQ ID NO: 496818 - protein, 403 aa, unidentified
MNAVGIDVSKGKSMVTILRPFGEIVSSPFEIKHTSSDIHSLIKLIHSIEGESRVVMEHTGRYYEALAHQLSAADLFVSAVNPKLVKDFNNDSLRKIKSDKADSVKIARYALDKWQSLEPYSITDELRAQLKVMNRQFHFYVKQKTAMKNNLIGLIDQTYPNANTYFNSPTRSDGSQKWVDFVSTYWHVDCIRKMSLNAFVEHYQNWCKRKKYAFNKSKAEEIYTKTKELVPVFPKNEITKHIIRQAIDQLNSTSVTVETIRTLMNETASKLPEYSIVMQFKGIGPSLGPQLMAEIGDVTRFTHKGALTAFAGVDPGVNESGSYAQKSVPTSKRGSSNLRKTLFQVMDVLIKTMPQDDPVYQFMDRKRTQGKPYYVYMTAGANKFLKIYYGRVKEYLSVLPDPS

SEQ ID NO: 496819 - protein, 348 aa, unidentified
MNDIATVVGLDIAKAVFVAVGMNDRGKVLWRKKLARDEVLPYFTTLAIAKVGIEACAGAHYWARRLNAQGHDTRLIAAQHVKPFVNGSKNDWNDAQAIAEVRSREETKYVPINTEAQQDMQMLHRARQALLVERKGVICRIRAFAGEYGKVFPVGVGKFRKGIEHWLSDADNGLSGQAVETLRELLEQLDEKEERQAGYDARIARAASGDERARRLMQVPGIGKLTATAVVAAVADPRHFPSSRDLADNLGLVPRQHSSGGKDRLFGITKRGDGYLRALLIHCARSALRCAGEKPDHMLRWAVQVQQRRGSKVAVVALANKLARIVWALLANGGDYQPVPQRRASVSV

SEQ ID NO: 496820 - protein, 427 aa, unidentified
MIPAVLTNCAGIDIGKRGLAVCLMVGPAESEPRVEVREFGTFTTDLEAMKEWLVQAGCTHVVMESTGSYWKPVFNVLEGSVGVCLANPEDVKGRRGHKTDRKDAKWLAHLLRHAMIRASFVPPRPIRELRDLTRRRKQLLGDATSERNRIQKTLEDANVKLGSVLSDVFGVSGQNMLEALLEGHGSAQEIAQLARHKARRKIPQIIASLTGHRMSEHHRFMIRLSLEHMRVLEEQVAGLDQEILQRIGSLGLQHLVDLLQTIPGLGHDSAVAILAEVGPDVSQFPTAKNLSSWAGVCPGNKKSAGKDFRGHTTRGNRWLRSALTECAWAASRSKDSPLRDKFWRWAVGGKKKAVVAVAHGLLLQVHQVLLTQQPFPHKPAIPLDEKRRKRMVRHHLRCLGRLGVSTGPKMIYADGTIPRHGRRPGKA

SEQ ID NO: 496821 - protein, 418 aa, unidentified
MKKHNNSLKKSEATTKRAKSRGPVQRDTKEVLAELVGKLKEKLDPKKAAAASAGDGHPRGELRPNLDRLTEGVDLGDQWSHYCILGLEGETLAEGQLRTTQEDFATFFQGLNAARVVVEVGTHSAWVQEVMCGCGHEVLVANPRFMEGSKRRKRKNDRIDANKLARLGRVDPESLHPIQHRSREVRQDLVMLRARDALVAARTEIINTTRGLVKSMGTRLPKCSSRSFAHKGEEAVPVEMREALLPLVRLAAALSADIKEYDKKIESLGREKYGHTTLLRQVKGVGPITALAYVLTLENPERFAKSRDVGPYLGLVPKQEDSGESQPQLGISKAGDGMLRKLLVGSAQYILGPFGPDTDIRRYGLRLCERGGKNAKKRAAVAVARKLAVLLHRLWVSGEVYEPLRPGMSATMTPAAAA

SEQ ID NO: 496822 - protein, 448 aa, unidentified
MRTRKPARAKKMKLPKHLQHINPHAAGIDVGSRSHFVAVPEGSCEQPVREFTSFTDDLHRMADWLLACEVTTVAMESTGIYWIPVFEILESRGLEVRLVNARHVKNVPGRKSDVLDCQWLQRLHSYGLLEGAFRPTEQVCTLRAYVRQRMNLVRYAAAHIQHMQKALSQMNLQLANVVADITGVTGMRIIKAVLAGERNPLVLARLRDRRCKSSESTIARSLHGNFRPEHLFSLKQAVDLYEFYQGQIAECDRQILDQLASFDGADASGNGPPESVDEALQRMAGVDLTQIDGIDTNSALKIIAEIGTDMNRWRSAKHFASWLGLCPGTKISGGKVLNAKSKPVANRAAATLRMAAFALFNSKSALGAYLRRQRARLGAPKAITATAHKLARLVYSMLKHGTAYVDEGQKRYEERYRTRVVQNLKRKAKELGFALVEAVEKQPKLETT

SEQ ID NO: 496823 - protein, 353 aa, unidentified
MAGTNVNQDVFGGVDTHKDVHAAAALSVTGQLLGTALFPTTRAGLSQLLTWLTGYGALIRVGVEGTGSYGSGLTRHLRSAGISVVEVNRPNRQFRRQRGKSDTVDAEAAARAALSGTAAGTPKSQDGMVEAIRLLRLARRSAMKARTQTGNQLHAVVQSAPTALRDALRGQSLAKLVTLARRFRRRAAMTPLAAARFTLKSLADRWAALEAELRDLDHQLELLVSAAAPSLVALTGVGTETGGALLVAIGDNPDRLHSEAAFAALCGASPVEASSGRQKRHRLNRGGNRDANRALWVVVMSRMATDATTRAYVERRTQQGLSKREIVRCLKRYVARQIYRTMLPTLRHATTTA

SEQ ID NO: 496824 - protein, 462 aa, unidentified
MPASSRSRAPQPAGGSPNLPLVQPHAAAIDVGATELYVALPPERTAQPVRVFETFTADLQALAACLLEHEVTTVALESTGVYWIPLFQILEAAGLEVCLVNARHVKHVRGRKTDVSDCQWLQQLHAAGLLQASFRPPDAVCAVRSLLRHREELVRQASSQIQHMQKALTQMHLHLHHVLADITGMSGQRILDAVLQGERDAEQLAALRDPQVKAPQETVVKALQGDWRAEHLFVLRQSLASYRYLQVQMRECDAEIERLLAACPGPADPADAPPPPKNAPRGKSRKNQIELPHRDLREELFRLFGTDLTQTPGLGPALVARLFAEVGNDLTAFPSAKQFASWLGLCPDPKKSGGRVLRHRTRDVRHRAALLFRLAAQSLHHSETVLGRHFRQMKAKLGAPAAITATAHKLARIFYHLVTTQEAYDESVFARQEQQQQARQLRRLERQAAALGFQMIPKATAT

SEQ ID NO: 496825 - protein, 379 aa, unidentified
MSKIRFVGLDVHADTIAVAVAEPDGEVRPLGIIPNRLESIRKLVAKLGPTQQLKVCYEAGPCGYVLYWQLSALGVACAVIAPSLVPVKAGDKVKTDRRDAAKLARSYRAGDLTPVWVPDADHEALRDLVRAREDARQDQHRARHRLSKFLLRHGRRPPQDVKKAWTLKYMTWIQEQVHFDQPALEFTLLDYVHQVEHMAQRIERLETAITEAIQKIPPQMRAVIEALQALRGVAQLTAVTVVAELGSLSRFQNPRQLMGYSGLVSSEHSSGHRILRGPITKTGNAHLRRVIIESAWAYQHRPWIGGFLLKRQRDLNLTPQVREIAWKAQWRLHTRYKKLDAANKKKPQIVTAVGRELLGFIWAIAVHTEAQFPPQPKAA

SEQ ID NO: 496826 - protein, 349 aa, unidentified
MMIIGCDYHPSFQQIAMLDESTGELSGRRLAHPAEAEAFYRSLKGPVRVGMEAIGNTLWFERLLAELGHELWVGDAARIRASAVRQQKTDARDAAHVLELMLQGRFPRIWVPSPSDRDLRQLLLHRHKLVQMRTQVKNQLQHLALNQGVRRQHRLWSRAGRQLLEQLTLPPWTDRRRKDLLGLLDGLEQSLQELDRAVEAEAQARPEARQLMTQPGVGPVVARAVVLTLGPVERFGRGKQVASYLGLIPREHSSGGRQRLGSISKQGNPFVRALLVQAAHVAVRHDPELRRQYLRLAQRKNRAVATVAIARKLAVRLYWILRRGAWDSPVGSMSGSPSHSLAEAPGPIR

SEQ ID NO: 496827 - protein, 397 aa, unidentified
MLFVGDDWAEDHHDVELQDEAGRRLGRARLPEGVAGVARLHELIGGHLAEDAGPEEVAVGIETDRGPWVQALLAAGYTVYAVNPRQVARYRERHGTSGAKSDAGDAHTLADMVRTDAHQLRAVAGDSEQAQAVKVVARAHQTLIWERHRHMLRLRTALREFFPAALEAFPDLTAPDALELLGRAPDPGSAARLTSAQVTAALRHARRRKLRAGQLGQPPAVAAAYAATVRSVVRMIIAFNAEITAMEEQVTACFGQARDAEIYLSQPGLGKILAARVLGEFGDDPARYASAKARKNYAGTSPVTRASGKKKTVLARFIHNNRLVDALHQQAFCALTASPGARAYYDELRTRGQGHHAALRQLSNRLVGILHGCLKTATLYDEHTAWGHHNHDQQTAA

SEQ ID NO: 496828 - protein, 350 aa, unidentified
MVVGIDVHKHTHAAALIDDRGGQVAALSITNSPKGYRQLIDWLVDHDAASAVVGVESPGSHGRCLVTALCGAGFEVLQVPAWRTHRERHHRGPGKTDPGDALSIAHVVLRHRDELGPAQEPELVRALGMLELQRRRFVRDRTQAIQRLRSDWTQHDPVAEAAVLRCDRQRELRQLKRIRLGDSLTQRTAARCIRELANDIEELNHKIAALDAEIADLLAEHDNPFEDLLGAGTNLAATIIAQAGDVRRFRNASAFARFCGAAPIPCGSGQTSGRHRLHRGGNRQLNAALYRIAIVQQRHHPQAKAYLDRKIAEGKTAREARRALKRHLANVVYRRLLTWANTTPAFTNLT

SEQ ID NO: 496829 - protein, 589 aa, unidentified
MANKLLAVSRLKPGQVKTFQVRFALRQFAAGCDIDKPVGTYCVLYPTPNGFQAQVQQFANSPSGCKDALAWVLSHAEKHLPPDEKPLFIIESTGCYHQLPLKTFNDAAEVVVVNPHRIKAILRAEGKDDVKDALTLTKLVLSFDLKKSVLAVGAQKRLKKVLRMKRKLINNRTQVSNRIGSLLTENSVPLPNVVKVMTASGRAICRAIAQGQTNRDLLTLLWQGQNLPASGLELVAQGQPFQQVLAAFAPTMPTKAVARLKEIHDALFYVADLEQTMLNLLAQQLRLLEMYDQEIELIEQEVVLAIEAYKVELPGGGHRTAQEMIDLLCTAPVFSEESARMLVAEAGLNFPEIYGNAEAFTRNFGLTPGNSKSAGKVIGNDVVQGNQHFKPVIVQAATAFLRRQFEPTDNGWFLWLWGRRYQQRTDAQHARIAVARKITRSVYFMCRYWQPYDDTQHRTLREDYALQTANRLANTAKELSVASPDIIGLDASSKLKQASFAINQALGLQVTRYKLCPFDHDFPVDTLGLSSRVVNLLLKNDIVSVSQLVLRLVSGTLMSINRLGLKSAQEIEAVLISKNLIEIQTSDPV

SEQ ID NO: 496830 - protein, 415 aa, unidentified
MALKIVYKICCGIDVHKTFVVACIASTNDKGITSYESHRFSTYTSGLKTLLQWLLDRNCKDVCMESTGKYWIPVYNILESDCSIVLAHPKYVKAIRGKKTDKKDAKWIADLFKHDLVAGSFMPPADIRQLRDLMRYRFKLTCFKSSEKNRLQNCLTVSNIQLGNVVSDTFGKSAQAILDKILENPADTSFDLEPLVFKSLKKKLPELRDAIDGYITTEQAGKLKVIKAHYENLESRKAELEELILALAAPYQQELAILQTAPGISSDFTAIGIISEIGTNMEAFPSAKHLCSWAGLTPTNNESAGKKKSVRVSKAGCYIKPLLVQCANAVVTSKKHPEIRNRYLRLKKRRGHKKAIIAIARMLLTALYHMLKNGENYNAELYRKSDLPPVNREITVEQALMIARNQGYKIKSATA

SEQ ID NO: 496831 - protein, 441 aa, unidentified
MKQTEKMEIINPHAAGIDIGSKSHFVAIGQQEDQVKEFNVYSSGHQQMISYLRESGIETIAMESTGSYWQSLFRVLQDSGFEVLLVSGAQTKNVRGKTDVKDCQWIQKLHSLGLLRGCYLPSETTSKIRTLSRHRQFIVETAASLSNKMQKALRLMNLRLDVVLNDITGVSGIRIIEAILNGERDGINLSQLADSRVRKSKKDIADALQGQWSEELLYELKSSYALYKVTQQSISDCDVEIEKILNKATIDAVVEQNIKLKKKQIKGKNQQRFDLPSYSYKLFGVDLFAIESVSMNTVMTFIAEIGNDIYKFKTAKQFTSWLRLAPNNKVSGGKLISSRTPKGKNKFTIALRNAANTIDRQKGGTLNTFFKRIAYKKGRAAAITATARKLATIIWNMVVKKQEYKPLDETKYIELLKIKRVSNIRTMMQKYGITTTELSVT

SEQ ID NO: 496832 - protein, 411 aa, unidentified
MIKENYIYVGIDLHKETHTAVMIDCYNQKLGEITFPNRPADFPKLVAKVKKCNTDGKTIVFGLENAYGYGRALAVWLIDKGYLVKDVNTAISHRQAKHRGAMYRKSDSDDAKAIALATLNMLDKLPDACPNDAYWSLGQLVHRRDNIMKQRTRLVNQLHEQLCIAYPSYKQFFNDISRPTALYFWEHYPSRKYLKGKSVEDLRAELVPVSHNKCSTRTCEKILDAIAGDKVKNNAYQDARDMVTLSIVSDLQHYDKQLAEVDKMLEQMYKMLGCTLTTIPGVNVITAVKILAEIGDIKRLSNANKLAQFAGIAPLHLSSSGKGKDLATKQGNRRLQATIYFLAIQMVHISSKGTPRNPVVRAYYEKRKAEGKTSQQALICISRRLISIIYEMLKNGTEYRMPVVENAGENV

SEQ ID NO: 496833 - protein, 346 aa, unidentified
MTIVEDACVITGGVDTHADTHVAVAPDPLGGLLGVREFPATAAGYAGLLSWLGGFGTVAMVGVEGAGSYGAGLARHLAAAGIRVVEVDRADRQDRRRAGKSDPLDAVSAARAVQSGRASGAPKGRDGAVEAIRSLMVARRSTRNERTQVINQARSLILTGPDELRARFAGHCAAALAEGIAALRPRPGDAAGHAVRVALRELGRRAEFLDGQLERLDELIVPLVTARAPGLLSLYGVGPDTAALLLVAAGDHPERLRSEAAWAHLCGTAPIPASSGKVRRHRLNPGGNREANHALWRIVITRMSAHPATRAYVDRRTKEGLSKKEIIRCLKRYVAREVYHHLRGGG

SEQ ID NO: 496834 - protein, 411 aa, unidentified
MDALHECCAGLDIHKQTVAACVLVGPPGGPVARTVKTFGTMTDDLLALGDWLAEHRVTHVAMESTGVYWKPLYNLLEGGFTLLLVNAHHVKAVPGRKTDVRDCEWLADLLRHGLLRASFVPDRAQRELRELTRYRTALVRERAAEVNRLQATLEGANIKLAAVATDVLGKSGREILVALVGGETDAAAMANLAKGRLRQKLSDLERALVGRFAAHQRFLIARQLAHIDYLEGAIEEVAAEIAARVRPFETAIERLDTIPGIGRVIAEALVAEAGTDMAQFPSAGHLASWAGLCPGNDESAGKQRSGKTRKGNKALRALLLEAAHAVGRTKGSYLSTKYHRLAARLGRSKAAVAVAHKLLRIVYHLLADPEAVYEDLGPQYLDQRNHAALQRQLVRRLERLGYAVSLEPRAA

SEQ ID NO: 496835 - protein, 418 aa, unidentified
MARLHHQPQPSDIFAGVDWGGTQHQLCLIDADGQMLQQRRIPHTVAGVDELCQLLTNQHGLVRVAIERAEGLLVERLLSLNAVEVFCVSPKISARARERYRLAATKTDEFDAFVLADTLRHEHGFWRPIRPASDTLMQLRAIIRDRERVVWNQRDLENQLRATMEAYNPAVLHLFSSLDRDISLEFIRRYPLPAQAARVGVTRMDAFIRREHYSGRTPAVTLVDRLRPHLLSASAGTNEGKAFTAVRFADQLELLNRHLRDYDTEIARLLALHPDTKIFTSFPGIGPVIAATLLAGMGEDRARFPSAPALLAETGLAPVTRASGRTRQVRFRYAANKRMRHAIDWWAFVAVREDPDWSGNLYTTARAAGQGHHRALRGIGARWTRILWRCWQDRVEYDPSRHPHRNQALHSTEPQLVS

SEQ ID NO: 496836 - protein, 352 aa, unidentified
MRYLGMDVHAKSTVWCLLDAQGEVVSEGHTPTTAALLAALVRELAQEDTVLAGQEVGTLTYLVHDAVTAAGTTLLSFNAQSLRMIAASRKKTDRRDAYWLAKALQSGMYPHPVYVPTGEIRELRARLSQRRVLQTDYNRWRYRARTYLRAGGYPVAPGVTALRAALAPGNAGTRGAPTSLTDALGLCQRQEAALRAELAQVDATLRGRTQAVAAIQRLMTVPGIGPLTATTIYAWVGDVRRFPHAKQLAAYAGLVPAVRQSGGTVHVGGITKQGAPALRATLVQAAHVLLSRCRGADARPLQAIGLRIRGTRGRRKIAVVAVARHLLRIAYYILRDGTTYDAHRLGTMTDAA

SEQ ID NO: 496837 - protein, 342 aa, unidentified
MKTFVGLDVSHKKTSVCVIDHNGNKIRMANVDTHPGVIADYLFSEGFDKSKIGLETGPLCVWLYHSLKSFGLDIDCIHARHVHAALSMQLNKTDQNDAFGIARLVLSGWYKPVHVKSLECHQQRLILTSREKLVQLRVAVTNQIRGLLKTFGVVLPLGKNSVFEHAVLESSPSLETIKPAVMMLLDTWEHLSGQIRKFNYMLEKLARNDPVCQILQSVPGVGVLTALSFKTSIDDPSRFRRVSDAGAFLGLTPKKYQSGEVDRNGGISKQGNRMTRTLIYEAASCLLTRYGKDTSLAIWANELRHRMSYKKVIVALARKLTTLMLSMWKSETFYNERLKAVN

SEQ ID NO: 496838 - protein, 355 aa, unidentified
MNSRKYIGMDVHKESISIAVRNDAGKIVMECVIETKASMILQFIDGLRGELQVTFEEGTSAAWLYDLLKPHVTKLVVCDPRKNASMREGNQNDKIDARRLAELLRLNHLNPVYHGEHGLRSLKELVRSYLTITKDLGRVMSRVKAIYRSWAIPCTGKQVYAPRHRAEWLGKIREPGVRRRAEFYYQQLDALRMVRQEVRRELLAEGKKHQAWKRLCQIPSIGPIRSAELLGILQTPHRFRTKRQLWTYSGFGIETQSSADHRSVDGQLERAKKQTSIRGLNRNCNHDLKNLFKGAAIVASSKPGPFQEFYTALLTKGIRPEMARLTLARKIATIVLIVWKRGACFDAQHLKPQAA

SEQ ID NO: 496839 - protein, 388 aa, unidentified
MEARTVNNLPPATSHDDAVRCVLAIELSKKSWIVAVNTPLSDKISRHTLKPCDGKELLDLCERIQTRARETKQRVEIVSCYEAGYDGFWLHRLLEAHGIRNYVIDPASLQVDRRARRAKTDHVDAERLLRSLMAYLRGELKVWSVVCVPSVAEEDDRRLHRERGRLINERIQHINRIKGLLAIHGIYDYQPLRRDRMQQLEWLRTADGRTLPPRLKAEILRELQRLVLVIGMIKTIEAERDTIASAETEAEHTSAKKIQHLAKIKSIGPEFATTLVGEVFYRSFDNRKQLASYVGLTPAHFQSGAMSRDQGISKAGNAKARTVMIELAWLWLRHQPDSDLSVWFRDRVGKLKGRIRRITIVAVARKLLIALWRYLETGLVPKGAALKV

SEQ ID NO: 496840 - protein, 339 aa, unidentified
MNQLYGGIDLHANNNVIVLFDEEEQVVFEKRIPNDLEKILFHLAPYQRVLQGLVVESTYNWYWLVDGLMDAGYSVHLANTAAIKPYNGLKHTNDHSDARWLAQLLQLGILPTGYIYPKEERAVRDLLRKRSQLVRQKTATRLSIQNLLTRNTGHTFRGNQIKQLRPETIGELVSLPEHAMALHATLAVMRHLAEQITLIERAVKGRVRLRPPFRFLQTVPGIGQTLAFTIMLETGDIRRFPTVGQFASYCRCVSRTKRSNGKRKGKGNTKNGNKYLAWAFVEAAHFAMRHDPQIRRYYERKLAKTHVFVALKAVAHKLARACFYIMRDEVAFDVDRAFA

SEQ ID NO: 496841 - protein, 431 aa, unidentified
MNCNTQNAKIASITEKTLIVGIDVGSESHFARAFDWRNYEYSDRAFEFSNSESGFRAFRAWMDNIAETAGKDVVIPGMEPTGHYWFNLGHFLQDNGMKPVHVNPHHVKKSKELDDNNPSKNDRKDPKTIAALVNEGRFSYPYIPSGIYAEIRGLSNLRFQTQEELTRIKNRMARWYSIYFPEIKDVYKNLDSVSGMMIIKEAPLPSDIVTLGVEGVNGIWRVAKLRAAGIKRAMTLVTAATNSIGSREGSECARLEIRNLLNDFEVYSNRMEELMQKIVEKLSEIPYIDKVLEIKGIGPKIASGFIAEVGDISRFDNPKQLQKLAGYAIVSNSSGKHDGKNHISYRGRKRLRYVLYEAAISVIGKNQEFSEIHAYYRTRKNNPLKKMQSVVAVACKVLRVFWAILTKGVDYDGQKMMSDIERPSMQALRAS

SEQ ID NO: 496842 - protein, 449 aa, unidentified
MMEHGMATSKAKTSRSKLEVMHPDAAGIDVGGSMHFVAVPNEAAEQSVRPFGVYTRDLHAMADWLQGCGVKIVAMESTGVYWIPLYELLERRGFEVMLVDARQVKNVSGRKSDVLDCQWIQQLLSYGLLKAAFRPQDQFCELREFNRLRTRLLADQGRSVQHMQKAMTLMNIQLSQAISDVAGVTGQKIVRAIVEGERDAKVLAAYRDGRIKASEEEIAASLQGTWRAEHLLALKQALGRFDFYAQQLQECEAEIQRVMGKLEVHTKELSKGKKRSKAKNAPKFNVRERLLKMCGVDLTKVDGIDETTALNIVAEVGTDLSRFPSDKHFASWLGLCPGTRISGGKVLGAKTKHSVNRASQAFRQAAAALRSSKSALGAYYRRLCGRMDKGKAVTAAAHKLARLFYALMTKGQEYVDQGQQYYEERYRQRVIHQLQRRAQSLGMSLVPTA

SEQ ID NO: 496843 - protein, 353 aa, unidentified
MLTVGIDAHDRLYVMCVLDEQGKTFKEHTVRGGPEAVAAWIKGLGGGARACYEASLGYGMLHDALTGAGVPTQVAHPAHLRSIWQSKKKNDRIDAHKLATMLYLDRVPRVHVPSMPVREWRVLIEHRRRLVDKRTATKNGLRALLRSHAIAAPKGRRLWFGPGKKWLGGVGFASPLAALRRDQLLEELEHFDRMIKAAERALDQIGDRHPGVALLRTMPGVGPRTSEAVVAYVDDPRRFGSTRRAASYFGLVPCLDQSAGVKRLGHITRQGPATVRKLLVEAAWQGIRHSPSLRRMFDRIKGGRKEQTGRALVATARHMVQAMVAMLKSGQEWHEQEQEPPAGRPAQPVTAAA
